United States Patent Application Publication US 2006/0134663 A1 - sequence listing, part 103

SEQ ID NO: 315566 - DNA, 1282 bp, Homo Sapiens
  misc_feature (23)..(23): n is a, c, g, or t
  misc_feature (62)..(62): n is a, c, g, or t
  misc_feature (83)..(83): n is a, c, g, or t
  misc_feature (88)..(88): n is a, c, g, or t
  misc_feature (349)..(349): n is a, c, g, or t
  misc_feature (467)..(467): n is a, c, g, or t
  misc_feature (821)..(821): n is a, c, g, or t
  misc_feature (893)..(893): n is a, c, g, or t
aaattaagatttttataattacngacctgccatctctgtacatttttccacgggaatgattnacccagtaatctccagatagncctgnagtgtgccaaaaatcttccggaataagaataccatagttgctaaatatcttttaccatgaacaataatttcttcttctctccccactccccaattataaacattttatccttcaaaatacagctctcctgagttgtacttcttgtagaagttcaatctttacatctatagttctttgggtaagtttcacttccacacctgccaaaaacgtggggcttttcctgccgtggaagacagggaaggacccgtgagcatgagctgnggactgtttaaacaggctttctgctcaacatgaggccaatataacacacaaaatccaccagcactaaaagggactggagtgttgcaagtttgagtaagacttctaagcatctttaccnagtaactcagacactgcaaatccagagaaatcatttttcaggtaggaaacctcagctccagcggtccttttaaagagcagagggatgtaaatgccaacaaaaatattaagttcccatcattgcttgtttattccaagttcctgttcaggtggttgtgatatctgaaaaactactccgattcgcagaaaaaatcttctaagaacagcacgaagttcaggaatcaagtcaaattgcataatttcacataagagagggtagtagaatgatgcatgagctttaaacctattatcacttatctttagaactttagttagaaacaaaagcagtaagttagtccaggcttctcgatgactntctgatgttagagtgaggaagtaacttagtgcttcactgcagacattcaaaagcctctgctggacctcctcncaggcactaacgcggctctcatccatgtacatccggaagagaatgcgcagcccacaggccaggctgctggtctcctgcttcagaaggttgggcttggatttgcctttggcaaatctatgtgactctaataagcagtccagtagcttaaaaagttgttgtgatgttaaaaagcggtacattccttggtcttgagtatcaacgcgaacatcaaagtccaccgcatctctctgtgctgcagctaagctgcatcttctttcttacttgtggctgggaagaagacaatgttgtcgatagtctggatgagttccagctgcacaacacatttaatcaacagggcagcaaacaatttttgttctggaaattttgctgtagatttaattttgctgact

SEQ ID NO: 315567 - DNA, 881 bp, Homo Sapiens
  misc_feature (256)..(256): n is a, c, g, or t
  misc_feature (290)..(330): n is a, c, g, or t
acgtcccggaggcgaccagacgttttggagacccggggggtgggttaagcccatcgagattcctgggggtctacacgaacgttagtcccccccctatttgattccccggatctggcaggtaactccacgccccccaaagagatgccactgtcttcgaggcagttcgcaaagacatcattatgccactaagtccagagatatggcagagtccgcagacgaatttcacctttttcctatgtgaagtgcgccacacagntctggcatgtacagcctcaaatcaccacctaccnnnnnnnnnnnnnnnnnnnnnnnnnnnnnnnnnnnnnnnnngtccacccaaatgtttagtgcatttgacaaaatattatgggtatttagcaaatgaataagaaaataaagaaaacagtgcaggaagaactatataatgttttaagatttttatattacagacctgcatctctgtacatttttacacaggatgattacccagtaatctcagatagccctgagtgtgcaaaaatcttcagaataagaataccatagttgctaaatatcttttaccatgaacaataatttcttcttctctccccactccccaattataaacattttatccttcaaaatacagctctcctgagttgtacttcttgtagaagttcaatctttacatctatagttctttgggtaagtttcacttccacacctgccaaaaacgtggggcttttcctgccgtggaagacagggaaggacccgtgagcatgagctgacactgtttaaacaggctttctgctcaacatgaggccaatataacacacaaaatccaccagcactaaaagggactggagtgttgcaagtttgagtaagacttctaagcatcttta

SEQ ID NO: 315568 - DNA, 907 bp, Homo Sapiens
  misc_feature (714)..(714): n is a, c, g, or t
  misc_feature (767)..(767): n is a, c, g, or t
  misc_feature (793)..(794): n is a, c, g, or t
  misc_feature (806)..(807): n is a, c, g, or t
  misc_feature (822)..(822): n is a, c, g, or t
  misc_feature (837)..(838): n is a, c, g, or t
  misc_feature (842)..(842): n is a, c, g, or t
  misc_feature (853)..(853): n is a, c, g, or t
  misc_feature (857)..(858): n is a, c, g, or t
  misc_feature (861)..(861): n is a, c, g, or t
  misc_feature (865)..(865): n is a, c, g, or t
  misc_feature (877)..(877): n is a, c, g, or t
  misc_feature (879)..(879): n is a, c, g, or t
gactggcgggtgggttgtcgacacgttcaacccgttctgctggctcgagaacgaagtaggccgtctcgctctgggtctccaggcccgcgaccgtccgccagtcgtcccgaggccactcttcacctccaccatgagcctggacatccagagcctggacatccagtgtgaggagctgagcgacgctagatgggccgagctcctccctctgctccagcagtgccaagtggtcaggctggacgactgtggcctcacggaagcacggtgcaaggacatcagctctgcacttcgagtcaaccctgcactggcagagctcaacctgcgcagcaacgagctgggcgatgtcggcgtgcattgcgtgctccagggcctgcagaccccctcctgcaagatccagaagctgagcctccagaactgctgcctgacgggggccggctgcggggtcctgtccagcacactacgcaccctgcccaccctgcaggagctgcacctcagcgacaacctcttgggggatgcgggcctgcagctgctctgcgaaggactcctggacccccagtgccgcctggaaaagctgcagctggagtattgcagcctctcggctgccagctgcgagcccctggcctccgtgctcagggccaagccggacttcaaggagctcacggttagcaacaacgacatcaatgaggctggcgtccgtgtgctgtgccagggcctganggactccccctgccagctggaggcgctcaagctggagagctgcggtgtgacancagacaactgccgggacctgtgcggnnttgtggcctccnnggctcgctgcggganctggccctgggcaannacangctgggtgatntggnntgnggantgttcccagagntnctcacccagctcaggctcaggacctgtg

SEQ ID NO: 315569 - DNA, 958 bp, Homo Sapiens
aaataagcggatctgagcgtttctcttcaaacctaggatatgcagggtgagagcatggcaggggctggtgggccccagggttgcctcgaggccggtcgtccagggagagcagcagcaggaagagcctcaggagatgaccctcagggatggcttgtccttctccagggcctgcagccggtcctccatctcctcagaccagtaaatgtcgtacaggaccagctgctccaggaggcagcccggctgccgggacgctctccaccagctgcaggatgccggcgtcccccaggcagttgttgctgaggtccagctcacgcaggctgtggttggccaacagggttgcggcgaggctgctgcagctgctgtcactcacatcgcagtcggccaaccagagcacccgcagcacagagccaggctggcccaggccctggcacagctcccgcacgcccgcatcctccagcctgttgttgcttatctgtagctccaggagaaacctgttctgggccagcactgagctgaagtgggagcagcaggcggctgtgaagctgcaggacttcacccacagcgactccagctggcagccaggttccagcagggtctcacacagcagtcgggcaccctcatccccccagctcgttgccggccaggctgagctccttcaggctctccttggccctgaggacacggcacagatccccgcagcccttggcagtgatgccacactcccagatccacagggtcctgagcctggagctggggtggagcagccctgggcacagctccgccatgcccacatcacccagcttgttgctgcccagggccagctcccgcagcgaggccttggaggccacaatgccgcacaggtcccggcagttgtctgatgtcaccctcgtgccgaattcgccacccagcctccgtggtgtgggggggttgcacggtgaggctatggggtattttaccg

SEQ ID NO: 315570 - DNA, 985 bp, Homo Sapiens
  misc_feature (40)..(40): n is a, c, g, or t
  misc_feature (213)..(225): n is a, c, g, or t
  misc_feature (267)..(344): n is a, c, g, or t
  misc_feature (405)..(501): n is a, c, g, or t
  misc_feature (505)..(531): n is a, c, g, or t
ggtgcgcggatcgggcgcacacaagacttctgtgcgcgcngcgcgcggcgcgtgtagacagattgcgagcgacagcaggcggggggggtgtgcgcgcggggcgcttactattctcggcggcgggcgagagagagcgcacagtggcgagccgggggcggggtggtggtactggaacgcagcgcgacgtgcggggcgcaggcgcgtcgttcgtcnnnnnnnnnnnnncggcgccgccaaggacatagacgtgaaagcctggcgctagtnnnnnnnnnnnnnnnnnnnnnnnnnnnnnnnnnnnnnnnnnnnnnnnnnnnnnnnnnnnnnnnnnnnnnnnnnnnnnncgcctttgctggcgggcggggtccgggccgcggcgggcggcgccccggggctccctcgcgnnnnnnnnnnnnnnnnnnnnnnnnnnnnnnnnnnnnnnnnnnnnnnnnnnnnnnnnnnnnnnnnnnnnnnnnnnnnnnnnnnnnnnnnnnnnnnnnntccnnnnnnnnnnnnnnnnnnnnnnnnnnnccaagagtaacagtgaaccatatttcaatttattgacattgtcaatttatgaacaagacaggattttttcttttcccatggaatgagatccttttcaatctgccataacatgtgcccacacatcttcaccttggaaatgtagcatttcaagctttagtcagggtagattattccttctttactttcacaatttttacgttgctgccagaagtcttctcagcatttgctttgaattctgtcttcagtgcatctctcactgcttttgcacagatctgggagtatcggatgtagctgagtccagcctgtctccagtaggccaccatgctgtagcgaaagcggagctcgtcgggccgaatcgccaagacgccggcaatgtcggctcagccgggcggttcagccgcaggaagatcagaccacagaagcggaagaggcggggcgtgcggacctgccaatc

SEQ ID NO: 315571 - DNA, 1103 bp, Homo Sapiens
  misc_feature (151)..(277): n is a, c, g, or t
  misc_feature (326)..(398): n is a, c, g, or t
  misc_feature (445)..(483): n is a, c, g, or t
  misc_feature (492)..(511): n is a, c, g, or t
cttggttaaccagggattttgccagggggcgaagttatttagggcggttgcttacagagtttttttgaaggttgggggccttaaattacgggttaccctttagaagaaacaggtaatttggtatttgcgtttctgctgaaagcccagtacnnnnnnnnnnnnnnnnnnnnnnnnnnnnnnnnnnnnnnnnnnnnnnnnnnnnnnnnnnnnnnnnnnnnnnnnnnnnnnnnnnnnnnnnnnnnnnnnnnnnnnnnnnnnnnnnnnnnnnnnnnnnnnnacaaaaaaaagcccgctcattaggcgggttaaattcccgggtactgcannnnnnnnnnnnnnnnnnnnnnnnnnnnnnnnnnnnnnnnnnnnnnnnnnnnnnnnnnnnnnnnnnnnnnnnnaccactttgtacaagaaagctgggtcaggaaacagctatgaccatgnnnnnnnnnnnnnnnnnnnnnnnnnnnnnnnnnnnnnnngcctcgagnnnnnnnnnnnnnnnnnnnncctgccaagaaagtgctttaatgattataaagtgtccaaaatatactggcagaaataagcggatctgagcgtttctcttcaaacctaggatatgcagggtgagagcatggcaggggctggtgggccccagggttgcctcgaggccggtcgtccagggagagcagcagcaggaagagcctcaggagatgaccctcagggatggcttgtccttctccagggcctgcagccggtcctccatctcctcagaccagtaaatgtcgtacaggaccagctgctccaggaggcagcccggctgccggacgctctccaccagctgcaggatgccggcgtcccccaggcagttgttgctgaggtccagctcacgcaggctgtggttggccaacagggttgcggcgaggctgctgcagctgctgtcactcacatcgcagtcggccaaccagagcacccgcagcacagagccaggctggcccaggccctggcacagctcccgcacgcccgcatcctccagcctgttgttgcttatctgtagctccagcctcgtgccgaattcgccacccaggcctcgctacctaacaccgtggagttactgccg

SEQ ID NO: 315572 - DNA, 876 bp, Homo Sapiens
tgttcccgcagtggtctgatgtcacacggcagctctccagcttgagcgcctccaagctgctagggggtagtcctttcagtctgtggcaacagcacacgggacgccagccctcattgatgttccttgttgctacccgtgagctccttgaagtccgtcttggccctgagcacggaggccaggggctcgcagctggcagccgagagtctgcaatactccagctgcagcttttccaggcggcactggggttccaggagtccttcgcagagcagctgcaggcccgcatcccccaagaggttgtcgctgaggtgcagctcctgcagggtggtcagggtgcgtagtgtgctggacaggaccccgcagccggcccccgtcaggcagcagttctggaggctcagcttctggatcttgcaggagggggtctgcaggccctggagcacgcaatgcacgccgacatcgcccagctcgttgctgcgcaggttgagctctgccagtgcagggttgactcgaagtgcagagctgatgtccttgcaccgtgcttccgtgaggccacagtcgtccagcctgaccacttggcactgctggagcagagggaggagctcggcccatctagcgtcgctcagctcctcacactggatgtccaggctctggatgtccaggctcatggtggaggtgaagagtggcctgggtgggaggcagagggaagaggacgtcttggccgaatcccctcacagtttcacaggccggagattctcgggacgactggcggacggtcgcgggcctggagacccagagcgagacggcctacttcgttctcgagccagcagaacgggttgaacgtgtccctcgtgccgaattcgccacccaggcctcgctacg

SEQ ID NO: 315573 - DNA, 921 bp, Homo Sapiens
  misc_feature (270)..(270): n is a, c, g, or t
ctccaaggtccccggcgtgttgtcccccttgaagcccccgggaggggccaaggggggcttgtccagttctcgccagtccccgaagagggtctcgccaaaaacttccaagtgcctcacgttttttccaagggcggcccttggggggtttccagggagttcctttcgccagagccagcttgcaaggccccgcattccccgcaagagggttgtccgctgagggtgcagcttccttccgggtggggcagggtgcgtagggttgctggacagggnccccgccagccggcccccgttcaggccacagttctggaggctcagcttctggatcttgcaggagggggtctgcaggccctggagcacgcaatgcacgccgacatcgcccagctcgttgctgcgcaggttgagctctgccagtgcagggttgactcgaagtgcagagctgatgtccttgcaccgtgcttccgtgaaggccacagtcgtccagcctgaccacttggcactgctggagcagagggaggagctcggccccatctagcgtcgctcagctcctcacactggatgtccaggctctggatgtccaggctcatggtggaggtgaagagtggcctgggtgggaggcagagggaagaggacgtcttggccgaatcccctcacagtttcacaggccggagattctgagacacccctttttgctaccagactggagaaggtggaacaggttgacgatgatttgttgtagctgaggcgaacggggcgaggctgtgaggacgggttttggagcgccgctcggccgtcctcaaaactttggacacaccctccgtttctgtcagtcaagagttcttcatgcctcgggacgactggcggacggtcgcgggcctggagacccagacctcgtgccgaattcgccacccaggctcgctctta

SEQ ID NO: 315574 - DNA, 1024 bp, Homo Sapiens
  misc_feature (25)..(25): n is a, c, g, or t
ctcaccgtcaggggcgtcgcgtagncatgtctgttaccctcttcgtgtggccgcagggctcacgcagcatgaccctcatcgcccgccagacttttgttcatgccccggggacccagttcccccgcaagcggggccctttgagggcccaccaatgccgccaccgtgtccccgccaggtttattgaattcacccccgcaggttttcccagtttgagcgccttccagctggcaggggggagttctttcaggcccttggcacagcacccgggacgcccagcctccattgatgtcgttgttgctaacggtgagctcccttgaagtccgggctgggccctgagcccggagggccaggggctcgcagctggcagccgagaggctgcaatactccagctgcagctttttccaggcggcactgggggtccaggagtccttcgcagagcagctgcaggcccgcatcccccaagaggttgtcgctgaggtgcagctcctgcagggtgggcagggtgcgtagtgtgctggacaggaccccgcagccggcccccgtcaggcagcagttctggaggctcagcttctggatcttgcaggagggggtctgcaggccctggagcacgcaatgcacgccgacatcgcccagctcgttgctgcgcaggttgagctctgccagtgcagggttgactcgaagtgcagagctgatgtccttgcaccgtgcttccgtgaggccacagtcgtccagcctgaccacttggcactgctggagcagagggaggagctcggcccatctagcgtcgctcagctcctcacactggatgtccaggctctggatgtccaggctcatggtggaggtgaagagtggcctgggtgggaggcagagggaagaggacgtcttggccgaatcccctcacagtttcacaggccggagattctcgggacgactggcggacggtcgcgggcctggagacccagagcgagacggcctacttcgttctcgagccagcagaacgggtgaacgttccctcgtccgaatt

SEQ ID NO: 315575 - DNA, 1180 bp, Homo Sapiens
  misc_feature (606)..(616): n is a, c, g, or t
  misc_feature (672)..(770): n is a, c, g, or t
  misc_feature (904)..(913): n is a, c, g, or t
  misc_feature (1013)..(1022): n is a, c, g, or t
acctttttctaggggctctctgtctaatctcataattctgagtaatgagacctggttttatgttgggttgttttgttttaacagtaagctaacagaaaatcatttagcctcactcggctcagagctgccagactgcatctaatgctgagattttgcaaagtcctgggggtcaggaagtagtgtccgatccccttaaacaaagcattagcccctctctgttatgcccttcagggttacagaccccacctcattagcacaaggagatgttagtgtcttttaaaggcaaagtagtttctttattctgggagagtgtttacttttactcagcaggaaaatgcctgcttgactaagcctgtgtacttgaaccagcactttttacatctgagccacggcaatgtgaatgatagccacagttatacagttcactataaggaagttatttcttatattcatgttgagtttttaagaaaacacagagaactagccagcaacttgcattttctttttcctcctagaccctgactaaagcttgaaatgctacatttccaaggtgaagatgtgtgggcacatgttatggcagattgaaaaggatctcattccatgggnnnnnnnnnnntcctgtcttgttcataaattgacaatgtcaataaattgaaatatggttcactgttnnnnnnnnnnnnnnnnnnnnnnnnnnnnnnnnnnnnnnnnnnnnnnnnnnnnnnnnnnnnnnnnnnnnnnnnnnnnnnnnnnnnnnnnnnnnnnnnnnncccttgccggccgcctcgccccccgaaaatttttctaaacctttcgtttggggcgcgggcccagaaggaaagggaacagggccaaagctgttcccaagaaaacccggcccaggaaaagggctggaattcccacnnnnnnnnnncgcccgggggcacccgaggtttttaaacaaacccaaagggagttcggaggccttaacgggatctatcaaagggaatccaagggacctcaaaataatttannnnnnnnnntgcacctcttccaagaacggttgaaaattattaacctttttccccaactggaacccctccaaaacggcttttttgaaccttaaattccccgggggtttcccagacccttggccccttgggaaaataatatttcccccgcgggggaaaaacggcgggcc

SEQ ID NO: 315576 - DNA, 584 bp, Homo Sapiens
ttccagatggtctgctcagctttctccctgatagagcatgtgacaaggagaatcacatctgcttcttggaggttactggtccgcaggtagccactcttctgtaagatggaccaggctatctctgtgtcattcacattcatctggcagccataggtctcgaggtagacttttctctgccttccaagaagttcatccatcatgagatagggaggtgggtcttccacttctgaagacagcttctcctgaggagctgaggcactttttaaaaaatgttgaaaagtcggtccagcagccagcctggagctgaaatccttccgagctccatcctcctgcctctctggactgggacacatggtactagagagactgctgtgtgccctgcacatcctcagcgacagccaagacacagaggccaatggtccccaccccagagacctctgcacttggaggacacactgtaaagggtgcatggcactaaacagcccacagtctcccgcagcagcaacagtgcccggggtcccgcagcgtaagttctgccggcaagtcggatcccctcacaggtccgccgctgcgttcatacacaa

SEQ ID NO: 315577 - DNA, 1670 bp, Homo Sapiens
  misc_feature (128)..(128): n is a, c, g, or t
  misc_feature (145)..(145): n is a, c, g, or t
  misc_feature (154)..(155): n is a, c, g, or t
  misc_feature (160)..(160): n is a, c, g, or t
  misc_feature (169)..(169): n is a, c, g, or t
tttaacccttagtttaaggtaaattaattgactgtaaaaagtgtttcacatagccagctttaaagagaacacgttttcccactgacataaaaggtgttttcgcccccttgcagctttatctcccaccnttcatggccctgtttcntcagtggcnnaggcnaatgtctcncccttcctgttggggagggattgcccaagtcagctctgaggccatcttctcaggtcagcaatatgcagaagagtccctcagagtggtcctgcagagaacatgtcccctaagtgtctgagaactggctgaggtgatcttcaccagcacatagtccccaggctgggctctgaccctgagcccagggttattgacatcctccatctctgcatcagggaagatcaccttaaggtttccatcattcctgccacacaggtcagtggcagagcgtttactgagcccttccactagccaccaactgggtacagcccacagagggtctgattggcttttgttgcttcttctcggaagatagtgatgagttcctccaaacgccttaattttacctcttccgggacatcatccttcagcctatgatatgcccgtgtcttctgtctcatgctgtaggcaaagaggaagcccatgttgtactgaacttcccggagcaaagagactgtctggacgtgatcttcctccgtctcaccacaaaagccagcaatgaaatcgctgctgaggctcacacctggaatagattctctaatatggtgaactaactccacataagcttctcttgaatatcccctccgcatggcctccaacacacggctgcttccactctgggctggcaggtggatctgtttacagatgttatctctctcatgaatcagctgcagaacctcatcaggaaaatccttggggtggggagaggtaaaacggatcctcatttcaggatctactctggagacctgatccagaagatgagcaaaacgaagtcctccttgcttggttttatagttggtggtaaagccacgactgagattggtaggcactgcactgttgaactggacctccgaattgtcccgaaaactattaacattctgaccaagaagtgtcacttctttcagcccctgctcagaaagcttcttcacttcctctagaatggaggcaataggccgactcctctccctgccccggggtgaaaggaacaatgcagtagctacacatgttgtcacagcctcgcatgattgacacaaaggcagacgtggcactggcgcttgtctggactggcatgacatcagcataggtctcgtccagagagagcagcacgttggcagcttgctggcccgactcagcaacagccagcagccggggaaggtcccggtaggcatcaggaccagccaaaatatctaccattttctctctgttgagaatctcctccttcaacctctcagccatgcagcctagaattccaatcctcagaggaacccgggagcggggccgccttgtcttcaaggctttaagctgatgtaaacggttccagatggtctgctcagccttctccctgatagagcacgtgacaaggagaatcacatctgcctcccgcagcagcaacagtgcccggggtcccgcagcgtaagttctgccggcaagtcggatcccctcacaggtccgccgctgcgttccc

SEQ ID NO: 315578 - DNA, 617 bp, Homo Sapiens
gggccggatatgcatgaatccaagtagaaacggagcgtcatgatcctcaagcatatctcatggcagcgacggagcatgatatctctgcatatgcttctaatagttcgacttcgcaggcatgaaccatagcgcctgacctttcattatagcatctctcatacagggttatacttgataatgaagtgtcattttacgtcagaatgagatgtccctcagtggtgtttagtgagcggctcgcctattgagttctcgaatgtcatctgataggctgatatatatagcctagtaagatggcatatgattgcttcatactagggaataattctaattgtctgtgtctctgatgcgatcattatccaggacaagatgcagtatgtgcatgtcatactgatttatttaactaagtatgcctttctttaatagtctcttctagtgttacacagtatgtcaaaggctgttgtttatatcaagcatagtatgtgtctcttacgcactttcaatctgtgctgtcttcactacatagcagatagaggatcccaaagaatcgatgcttgtttcagatcagagcactgctataggaatatgtgtagcatagtcatccaggacatccagattat

SEQ ID NO: 315579 - DNA, 1010 bp, Homo Sapiens
  misc_feature (11)..(16): n is a, c, g, or t
  misc_feature (39)..(39): n is a, c, g, or t
  misc_feature (63)..(63): n is a, c, g, or t
  misc_feature (72)..(72): n is a, c, g, or t
  misc_feature (131)..(156): n is a, c, g, or t
  misc_feature (531)..(541): n is a, c, g, or t
  misc_feature (545)..(598): n is a, c, g, or t
  misc_feature (609)..(609): n is a, c, g, or t
  misc_feature (759)..(759): n is a, c, g, or t
  misc_feature (804)..(804): n is a, c, g, or t
  misc_feature (877)..(877): n is a, c, g, or t
  misc_feature (891)..(891): n is a, c, g, or t
  misc_feature (914)..(914): n is a, c, g, or t
  misc_feature (923)..(923): n is a, c, g, or t
  misc_feature (927)..(927): n is a, c, g, or t
  misc_feature (932)..(932): n is a, c, g, or t
  misc_feature (936)..(936): n is a, c, g, or t
  misc_feature (956)..(956): n is a, c, g, or t
  misc_feature (958)..(958): n is a, c, g, or t
  misc_feature (965)..(965): n is a, c, g, or t
  misc_feature (967)..(967): n is a, c, g, or t
  misc_feature (969)..(969): n is a, c, g, or t
  misc_feature (971)..(971): n is a, c, g, or t
  misc_feature (981)..(981): n is a, c, g, or t
  misc_feature (985)..(985): n is a, c, g, or t
  misc_feature (987)..(987): n is a, c, g, or t
  misc_feature (991)..(991): n is a, c, g, or t
  misc_feature (1004)..(1004): n is a, c, g, or t
attttattttnnnnnntataaaagtaaaagagtacattngttgagtagaggattaaaggagtnacgaccctntctaaagtggggtctcccatcccggatccctaagactgtaacatctgctacatacattnnnnnnnnnnnnnnnnnnnnnnnnnnatgaaacttatgacctgacttcgctccaccgttcatgcgtgcattatgacagaaactcgtccccctgctcctacttatgtatgtacatccagagctccaaacctaagctgtggccccctcctcccagccctacccacatccaccctacttcccaaaagcctgtagaagcccccacttagaaaaaaaggcagacatacacatacacagaaacacatatctatctgcagctcctccatgtgaagcccctgaaacatacacaccctggaactttcctctccttatgcacagatggacaggctgccttcccctgtctctgggctcccccaatagccagaatcccttccgactggtcccttgccctgaatatctgggaannnnnnnnnnnacannnnnnnnnnnnnnnnnnnnnnnnnnnnnnnnnnnnnnnnnnnnnnnnnnnnnntacctgctgcncattctcttcccttgggagacaaaaggatgtattgacccaaattcaggttccaccccagcttaggggcagtggcctaaggtgctatttgggcaaggtccagtggaaatcctgaaggggctgtctcgtggggtgagggtagatagggagcnccttagcctgaaagggtggatcgtgaagggggcttcttgggagtngcccttggacagtcagtggatgctcaaggccagggcagcggagtggggagatggccctgcccactcagatctnctccttgtgcttanatgggccagcttcacattctctnctcgttggngggnggggntgcncaggtggcagcgatcatcancnggaaacnananancaaaaagganccangngtgngggccgatgggcnccaccc

SEQ ID NO: 315580 - DNA, 1787 bp, Homo Sapiens
  misc_feature (518)..(585): n is a, c, g, or t
ttaatataaaagtaaaagagtacattgttgagtagaggattaaaggagtgacgaccctttctaaagtggggtctcccatcccggatccctaagactgtaacatctgctacatacattaaaagcaaaacaaaacaaaagcaaacatgaaacttatgacctgacttcactccacccttcatgcctgcattatgacagaaacacgtcccactgctcctacttatgtatgtacatccagagctccaaacctaagctgtggccccctcctcccagccctacccacatccaccctacttcccaaaagcctgtagaagcccccacttagaaaaaaaggcagacatacacatacacagaaacacatatctatctgcagctcctccatgtgaagcccctgaaacatacacaccctggaactttcctctccttatgcacagatggacaggctgccttcccctgtctctgggctcccccaatagccagaatcccttccgactggtcccttgccctgaatatctgggaannnnnnnnnnnnnnnnnnnnnnnnnnnnnnnnnnnnnnnnnnnnnnnnnnnnnnnnnnnnnnnnnnnntacctgctgcccattctcttcccttgggagacaaaaggatgtattgacccaaattccggttccaccccagcttaggggcagtggcctaaggtgctatttgggcaaggtccagtggaaatcctgaaggggctgtctcgtggggtgagggtagatagggagctccttagcctgaaagggtggatcgtgaagggggcttcttgggagtggcccttggacagtcagtggatgctcaaggccagggcagcggagtggggagatggcccctgcccactcagatctgctccttgtgcttcacatgggccagcttcacattctcttcctcgttggagggtgggggctgctccaggtggcagccgatcatcagctggtacacgaagacacccgcaatggagcccaggagtggggacacgatgggcacccaccaccaatgctggccggtcgtgaagactgcagagcccccagcccgcaagggctgtaaaaaggcgggggccaaagtcccgggcagggttgacggcatagccggagttgaagcccatggaggtgccaatgaccaggaccaccaggcccacggtgaaggcctccaggcctcgggggacggggttgttgtaggggtcaacaatggccagcacacacacgataagggaggctgtgcctatgaactggtcaaagaagccattgatcatatccaagtgtccagaggggtaggtagcaaagatgccggctgtgccattggggcccgaaacaaaaagctggttgtcggcgaagtgccagattgcatcataatacagcccaaaaactattccagcacccaagaaggctcccagcgtctgtgccagggtgtagatgggcagcttgatccagggctcacgagccaggaagcacatggcaaaggtcacggcagggttcaggtgggccccagagacctggccagcgatgaggatgcccagagtgacagcaaagccaaaggccaggttgatggtgaggaaaccaccgtgggtgccccggctgagcacaacctgggccacggagccacagccaaacatcacgaggatgagggtccccaggcactcggccagcgcctgtcggagcagccggtagcggatgtggagcatctccccgcagcgggacaccagctccttctgtcgacccatggcggggcaggcggcggcgctgtcgggcgggcaggggtggcgggaggcggt

SEQ ID NO: 315581 - DNA, 374 bp, Homo Sapiens
acatctcttaactgggttgctctaagaactgatgtctaaaccgtctcagcatggcctgtagaggaggagctgggaatggccaccgtgcctcagctacactctctcgggttagccctggaagtctttacacatgtagaacccgtacccataatatatgcatggtatctgactttttctacccaaatatgggaggcgtggaaagccacatttaccagctctctcagtgcctgattgaaagagggcataaggttataattgtcacccatgcttatggtcgagtcatgtacaaccagtctacagccacgaccctctttcacagtctgccattgctcaggtacatatttgttcgggagagagtcacgattccattcact

SEQ ID NO: 315582 - DNA, 775 bp, Homo Sapiens
  misc_feature (703)..(703): n is a, c, g, or t
  misc_feature (707)..(707): n is a, c, g, or t
  misc_feature (713)..(713): n is a, c, g, or t
  misc_feature (739)..(739): n is a, c, g, or t
gtaaagtaaaaaacctattaaattgaggctagagctggagatgtaattggtttttgagaaacattagtataaagcttgcccttgttgtgtggaagaagccattttgtactgctttaaagttaggactaatattcttcaggcacgggtgtatggggacctcattacctatttttttcatcatttaccctaggtaagaactttgatcactgcttactaggtaaagaatgtttgtactgttccaaaacccaggcttctttattcctttaccactatccatgtgagcattgacaaatcatggcttagaggtgctcactgactcgctaagacgactttggccctgttgatgactggtgctgtgctccagccttatcagttaggggacccaaggtttgtttgggacctgggtacaggtaaaagccagacttggcagggacccctctttctaggctgaaccttgagtccccctgctttttggcagacctaatggatcactgtcttgcagctagttcttcatgtggggcctcttatgccagtgccggaggaggcatgctcctctttctatgccacagaacaaacactactctagcagagcctttcttgcactttgtgagattaatttagctgtaatttggttacttcctaagagagtaaggagatggtagataccgttagattatagtcttgaggttcatgtgaagccagnggtngtaacntactttgatttccttggtcaagtcanggcctgggacgcctgtgcgggggtcactcattcatt

SEQ ID NO: 315583 - DNA, 832 bp, Homo Sapiens
  misc_feature (607)..(607): n is a, c, g, or t
  misc_feature (616)..(616): n is a, c, g, or t
  misc_feature (720)..(720): n is a, c, g, or t
  misc_feature (793)..(793): n is a, c, g, or t
ttttgagaaagtagtaaggatttttattgtcaaaacgagatcataatagaagacacaaataaattaattgttctcataattttagactccagggcctctctatggaaaggccagcttcttatacagacaaggtactatccaaaacaaaaagcaggtatttgagacagtgttcaagacaacaagtgaacttgtacacagtgaagagaaataaaaaggtggcttctgtatttccctccctcagtaaggttatgtgttgcataaagggatgaggctcattttggtgaaaaatgctttcatacagaaaattttgaattgagtgacctccccgcacaggcgttccaggccctgacctgaacaaggaaatcaaagtaagttaacaccactggcttcacatgaacctcaagactataatctaacggtatctaccatctcctttactttaaaaaagtttaatgtccatttacctataccaaatcagtagacttaattttctctcttaggaagtttttaaccaaattacagctaaagttaatctcactttaaagtgcaagaaaggctctgctagagtagtgtttgttctgtggcatagaaagaggagcatgcctcntccggcacntgcctaagaggccccacatgaagaactagctgcaagacagtgatccattaggtctgccaaaaagcagggggactcaaggttcagcctagaaagaggggtccctncaagtctggcttttacctgtacccaggtcccaaacaaaccttgggtcccctaactgataaggctggacacagnaccagtcatcaacagggccaaagtcgtcttagcgagtca

SEQ ID NO: 315584 - DNA, 395 bp, Homo Sapiens
gaataatgatgctttgtatttcagaagaaaattatattcttttaaagaaaatgaaaatatcctcaagggaaaaacttaatttaagtcaaatcttgtccttttgtcgtggagccccttgccccgcgcgcagacacaggctttcctgaagcgtggccagggcgcccctctcatcgctcctgagcgtgacccggggctggagccgcacggggattttcccgagctgagcaggggggtcggggggcccaagccaggagccctggaagagggagcagggcggcaactggggccgcaaacacccatcaaagtccccaggaccaattcccacagacaccacgtggccacaggcagtgccctttgcaggccccctccccaagggtgtcacccctcaccccctc

SEQ ID NO: 315585 - DNA, 715 bp, Homo Sapiens
  misc_feature (393)..(393): n is a, c, g, or t
  misc_feature (427)..(427): n is a, c, g, or t
  misc_feature (625)..(625): n is a, c, g, or t
  misc_feature (662)..(662): n is a, c, g, or t
gacttacctaagatacataagatattttcatagaaaataatgtattcatagtaaaatactcatattgataggaccaattttttctggcctaaatgcttatgcctacttcctaatcaattaccagcttgacttaagtaactgcttgagtagtcttctaagagttagtcttcgtaaaataaatggataggtgtgtgaatatataatcttacataccctttccagctttctagaaaggtctactgcttcatcttttacagatgtaaataggtgcaaccagagacagtttctggcctttgcatataagaatatagatgtgtaccacagtattatttcaacacaatgtgatggttctatgtatagttgaaaactctatgatcagcatacaactgtgtnttggtaatttttaatgaagtctacatttagccgncggttgtatctctcttaaatctctgacctaaactcttgtaagagcagctaataatttctaagatattccctgtgtctttttcctacctttccttttctcataactgattggagagattaatcagaagtcaaatacacgggacttcataatctagaaaccagataatcagctcccaagtcatgtagctaactatgcatnttaagtctgtctctctagatcttaagcatatatttgntgtttaattacagcaaatgaactttaattggggttgttctctacttggacgat

SEQ ID NO: 315586 - DNA, 478 bp, Homo Sapiens
  misc_feature (28)..(28): n is a, c, g, or t
gacacgttttctttctgtccttcctttntttttgggaacgtgaattttaatgagggggcagaccgaggaggtggtggctgcccggagatcagggccaggctgtgctagatggcgcctggaaggggggtcacccaagtctccctgctgtcatttcaggaggccgacccaagtctccctgctgtcatttcaggaggccgaattttttcccaatcccagagaaggtgtcagaggcctggttagcagtcttgtcgatggtttcctgggtggtcttggccagctggtccatggctttctgccccgcctctgtggcctggtccaccacttgctgagctgccgctccggccgctgacacggcttcctgggcggtcccctccacctgttgcttcaggtcctgcaagcccttgcttgccatggcttcggggtatctgtggagtcgtcaagagcagctggagcgacgttggatcctgcccagagtccc

SEQ ID NO: 315587 - DNA, 1307 bp, Homo Sapiens
ggtccccatcaccggtgcccaaaacccttgggcagatcccaaaggaaaaggaagattaataacaaaacaaaacaataaaacaggaggcctaggcacttctttacattcctctcttgtgtatgttgaatatgtgtatccttgcaaagagaagaaatggtatctcagcagtaactatttcattttaaactcacagatccaactatgccagattgtgacataatccacattttgcactgctgtccttgtccttcaacttgacttcttgctgatggctcagatcaactgtctttgtgaagcattccacaaactcacaggcagttatttccctgtattttgacagcgctttgtacaaacctctgttatatatcatcacactggagaagatgatgtttgctgccttgctcctagttttggactgtgaattcttttatggccagagcacataccggtgctcaatacactattttaaattaattaaatgttaaatggttctttctcccagtttgatgttcatttccatgtccattagaaagaataaaagggagggcaaaaataccccacattttaatttaattttaccactggctcacatcgagagcaaaagatctgtggttaaggaccttaatcccaattttgaaaaaagcagttttgaaatcatttcaatacttgaaattataatctctgctatgcctgttcccaaacgcagagctcttaatgatgtgcgtgtatgagcatcgcagtcctcggaaggagacagacccacctttgacgctggaagccacagaagacatgttgataatattgccagatttctgagcaagcattttaggaaggaatgccttgatcatcaggtacatgctgcgcacattgagattcatcgagaagtcccagtctttctcctcacaatccaggacagttccatgatggacaaaaccagcaacattaaagagaacatcaagtctctcaacttcactggcaaactgatcaatttgtttcttctttgtgacatcaaggacacgagtttgaatacccgggtacttttccagttcctgaagtttggactcattaatgtctgtggctatgactttggcaccttctcttgcaaaagctaaggcagctgcttggccaatcccctgagcagcggccgtcaggatgatgactttcccatcaagtcgacccataatggaacctgtggtttaattttaagcagcgagctgatggcgttctccagaactcggtttgagcaacaaacttgagacaacctttgtcctcgtgccgaatcctgcagcccgggggatccactagtt

SEQ ID NO: 315588 - DNA, 739 bp, Homo Sapiens
caaatcgagatttattttaaaaactattctcctgctatgagttcaatatttttatttctttacaatgatttcagaagagattacaaagagattaatatacttaaagaatcagactcttgcaaacagtgacatcattaaaaagagcttattttcattaacatgtgattaacaggaaggagatgattggtgagttttcttcgtaaccaggttcactgtggataggaagggcctgccttccttcccaccatggagatcctaaaatcacaagctccagcctccatcaatgatgacagggttaccagttacataagcagattcatcagaagccaaatacacgcagagcatggctatttcttctgcagttgcgaatcttcccgtcttttgtctcttcaggaaatcattccgtgcctcttcaggatttcctctggcttgtattctttcttgtagagatggcgtatcaactgttcctgggcacacacagttgcacctgatgccctgctggatgaaatctgcagccacagattttgtgaggccaatcacggctgccttggttgtgctgtacacacatctgttcacaactcctttgacgctggaagccacagaagacatgttgataatattgccagatttctgagcaagcattttaggaagggatgccttgatcatcaggtacatgctgcgcacattgagattcctcgagaagttccagtctttctcctcacaatccaggacagttccc

SEQ ID NO: 315589 - DNA, 716 bp, Homo Sapiens
  misc_feature (79)..(79): n is a, c, g, or t
  misc_feature (334)..(334): n is a, c, g, or t
  misc_feature (704)..(704): n is a, c, g, or t
ccccgttctttttgtcccccttccgggaaaatcaattcccgtgccctccttccaggaatttccctcctggccttgtaancctttccttgtaaaagatggccgtatcaaactgttccctgggccacacacaagttgcacctgaatgcccctgcctggaatgaaatctgcagcccacagattttgtgaggccaatcacggctgcccttggttgtgctgtacacacatctgttcacaactcctttgacgctggaagccacagaagacatgttgataatattgccagatttctgagcaagcattttaggaaggaatgccttgatcatcaggtaacatntgcgcacattgagattcatcgagaagtcccagtctttctcctcacaatccaggacagttccatgatggacaaaaccagcaacattaaagagaacatcaagtctctcaacttcactggcaaactgatcaatttgtttcttctttgtgacatcaaggacacgagtttgaatacccgggtacttttccagttcctgaagtttggactcattaatgtctgtggctatgactttggcaccttctcttgcaaaagctaaggcagctgcttggccaatcccctgagcagcggccgtcaggatgatgactttcccatcaagtcgacccataatggaacctgtggtttaattttaagcagcgagctgatggagttctcncctgtgccgaat

SEQ ID NO: 315590 - DNA, 787 bp, Homo Sapiens
  misc_feature (55)..(105): n is a, c, g, or t
  misc_feature (170)..(171): n is a, c, g, or t
ggtggaaactttgacttcctcctctgtcgctggccaagggccacagtttgcaggnnnnnnnnnnnnnnnnnnnnnnnnnnnnnnnnnnnnnnnnnnnnnnnnnnncctcatttcaatatttaaaaaactacttcagaaaaccatcaaaatatgaggattgttgtgttgannaataatctgcataagcttctagaagctggaattagaaatatttatctcctctgtttgtctcatatttgatctgcctatttgatggtctaccttccaaacggattcaaattctaaccattccatttctctgccaccccactgctatcccgatggaatcgctgccatcttttgcaatagcttactgtataccctctcttagttttctgattctatgcctacctcccacttcccagtgtctgttgcacagagcagattgggggctccatttgaaatggaagttgattatatccctcctctgctcaaacctttcaaaggctccctaaagtccttaactggcccatatgccctccacgatatggctaccactatgctttggcttcatttcctacttactctcatcttggttcaccccgcgtcagccacagagggctccttgcagtaccacacaccaaggagaccttgactctcactgttccctttgcttggaaaacttttcccccaaatatccacttggctgactctcacaccacctttcaaggtttcgctcagatctcagctctcagtcggacgtgtcctggctcctctattctttgccacaacccaatctctaccccat

SEQ ID NO: 315591 - DNA, 363 bp, Homo Sapiens
caccggaaccgatgaaggttccacgcttcttgggcagcctgatcagggccatgtagctgagtcagtagttgatcaagtcctgctgcagctccttgcccaggtggttctggatggtctgcttgtagagcagtcgtccgtgcttatcctgcaccgtcccgttctcggcaagcacataatcaatcttctcaatgacttcatctccgtcagtcagctgctcagcggtcttacagtagtcagagccgccctccactgcgatctggcgagccggcgtgagggtcccgtccacgtccaacaggcagaggacgcgctccttcttgcgggctgcctggtcggtgactgccatggctgcaggtccgcgcgcgg

SEQ ID NO: 315592 - DNA, 1957 bp, Homo Sapiens
  misc_feature (500)..(503): n is a, c, g, or t
  misc_feature (506)..(576): n is a, c, g, or t
  misc_feature (1795)..(1795): n is a, c, g, or t
  misc_feature (1823)..(1823): n is a, c, g, or t
gccccccccgggttttccaccccaaggggccaacaaattataaaacgcaaaggggcgcccaagggggccggaattccccgttgggcgaattcgggggtttctaccaaggcccgtcttggggaggggccgttcccaaatttgggccaggggaaggcccctaaaggaaattcccccacacgttccttccaatgaaattggcagaggccggggggggtaaatttgatatatcgaggcttcgcgtggggctttctcgttggaaaggattcacagtaaagcgccctcaggaactctcactttggggattgtttcaagaaccgcttgcggttcctcccggggcggttttttaatggtgggagatccacagccctcagttcctttccacgggtttctctagggaacacgggtaaggccacagtttcccctatcctactggggcccgccgggcccaaagaaatggtttagagaagctttttgagggtgccgagggcggccggcaaggnnnnaannnnnnnnnnnnnnnnnnnnnnnnnnnnnnnnnnnnnnnnnnnnnnnnnnnnnnnnnnnnnnnnnnnnnnntactttgttctgggaactttaatactgtgacaaagttctctaaaataggcaccttccccaccgtacctcatcgcccagggcaggcaggcagggcaggctagatctcgtaccgatacttgagcacgcctcctcctggtgcagaaagaaacctcttctgtaccgaaatacaagcagcagctgtggcctgggccaccaggtggagcatggggaacactctgggccctgggaggacgaagccagtgccactaggagcagactggctggggacggttgtccacacagactctggccccatctgggtgggcttgcagcaggcgtcctgggccagaggaggggccctggcatctatccaacaccaggacctctctttaggcctaggccaaactcttcagaagtcacgacacacagatgtgggccccggtcacgcctcatgagctgtctctgggaagaaaatctcccggcatcgctgcaccgtgtcctgaggagacaccacgctgtggccaacagtccgggggtcggcaaagatctcaaagtcgttcccaccagggctagtctcgttcccaaagaagtggatggtgtcgaagctgtcctggtccaggctatccaggcagtagcgcttgtcccagccctcggggaagacgtcaaatttcagggcttccacgaacttctcccggatcttctctttcttgtccagttcggagaactcgatcctctcctccagggtgcagctccggccgatgggcgagatgttcagcatgccattcgggaactcgatgaaggttccactggtggtgagggagggcggggagccagagagaaccagaacggccctgaattcaaatctagccccacctgggaccccagcctcctaggacttcaaaggggacaagaatccacactccccgcaaaaaatcaggggcccaagtatctccaggttccctctgagggacccacacttctcctccctcaggccccaggttctggagaccaggctggtgggacctcaccgcttcttgggcagcctgagcagggccatgtagctgaggcagaagttgatcaagtcctgcagcagctcctcccccaggtggttctggatggtctgcttggagagcagtcgtccgtgcttatactgcaccgtcccgttctcggcaaacacataatcaaacttctcaatgacttcatccccgtcacccagctgctcagcgatcttacagtagtnagagccgcccaccacaccgatctgcacntctacttcgtagcttctgcaggaaggcggccacctcagggtcaattttctggcgagccggcgtgagggtcccgtccacgtcaaacaggcagaggacgcgctccttctgcgggctgcctgggcggtgactgccat

SEQ ID NO: 315593 - DNA, 561 bp, Homo Sapiens
ctagcaactctgttttcagggcttccacgaacttctcccggatcttctctttcttgtccagttcggagaactcgatcctctcctccagggtgcagctccggccgatgggcgagatgttcagcatgccattccggaactcgatgaaggttccacgcttcttgggcagcctgagcagggccatgtagctgaggcagaagttgatcaagtcctgcagcagctcctcccccaggtggttctggatggtctgcttggagagcagtcgtccgtgcttatactgcaccgtcccgttctcggcaaacacataatcaaacttctcaatgacttcatccccgtcacccagctgctcagcgatcttacagtagtcagagccgcccaccacaccgatctgcactctacttcgtagcttctgcaggaaggcggccacctcagggtcaattttctggcgagccggcgtgagggtcccgtccacgtcaaacaggcagaggacgcgctccttcctgcgggctgcctgggcggtgactgccatggctgcaggtccgcgcgcggggcggagtcccgaag

SEQ ID NO: 315594 - DNA, 722 bp, Homo Sapiens
  misc_feature (689)..(689): n is a, c, g, or t
  misc_feature (702)..(702): n is a, c, g, or t
gcgcagcagccatctccactccaaagttagacaaaatgccaggaatgttcttctctgctaacccaaaggaattgaaaggaaccactcattcacttctagacgacaaaatgcaaaaaaggaggccaaagacttttggaatggatatgaaagcatacctgagatctatgatcccacatctggaatctggaatgaaatcttccaagtccaaggatgtactttctgctgctgaagtaatgcaatggtctcaatctctggaaaaacttcttgccaaccaaactggtcaaaatgtctttggaagtttcctaaagtctgaattcagtgaggagaatattgagttctggctggcttgtgaagactataagaaaacagagtctgatcttttgccctgtaaagcagaagagatatataaagcatttgtgcattcagatgctgctaaacaaatcaatattgacttccgcactcgagaatctacagccaagaagattaaagcaccaacccccacgtgttttgatgaagcacaaaaagtcatatatactcttatggaaaaggactcttatcccaggttcctcaaatcagatatttacttaaatcttctaaatgacctgcaggctaatagctaaagtgactggtccctggctgaagggaattaacagatagtatcaagccgcagaaggaatgtgccagtatgntccctggggtgancagcttggcctttttgtggg

SEQ ID NO: 315595 - DNA, 1497 bp, Homo Sapiens
  misc_feature (31)..(31): n is a, c, g, or t
  misc_feature (36)..(36): n is a, c, g, or t
  misc_feature (54)..(82): n is a, c, g, or t
  misc_feature (470)..(470): n is a, c, g, or t
ttcatagcattggacacacactcaacatatntgaanatattgattccttagagnnnnnnnnnnnnnnnnnnnnnnnnnnnnntattgcatctttctgctggagaatctcggcccccaggcatggggtgtagtgcaccagtgtcctagcctgcaggaggcgctgaggtcggccgggtcctctggggaggaaggctgtgcccattgcctggggctgtatggcaaaaattgtgttgggtgtccttggccttgccagctcaggccctcagtcgccggtcacctggggggcctgcccgtcggagggctggttggctgactggatgaacatgggctgggcgaggtcctggcccgcaggcatggtgacttgctggatctggtagagctgctgtccatctgtgaactggctgaactgctgctgtccttgctggacctctgtctgtgttatctgtaaggtttctttcaggcaccttcgnggcttcccctgacttgcatttctttgcccctgttgggcattggtggcgagtgtctggatctgtccctgcacaacttgggtgcctgatacaggctgggctaagcggatatactgcggctggccggcattcagctgcaccgggatctgctgggtctctcctgtgttagtgatgatctgctgcctcacctgcgtggtctgtccggtgccactctgggcctgttgggcttgaccctgtggctgagcctggacaatctgcacctgctgaccttctccaacctgcattgtcacaggtgtggtctggccctgctgaggctgtgcgatgatgatctgcccaggctggatggtggtcgtggagctggtggtctgctggccttgctgctggccctggacttggacagcggtgggttgctgagccagcgtgaaatagtactggactggctcggcaggagttacagactggcgcacctcctcctgacgctttggaggtttcagttcatctcttggaacaatatcgatgagaaaatcaaactgatcaaattttgtaattgccatggcgatatcatttctctgtagagtccggcgcttgttatcttctgtgtgaatccaggctcgaagagtcaactctgtgataaaaatctgggctgccttggcaaagagtacaggcgcttctgcactgatcatcttcacatcttcatccagtttcataatcttcttaatacgagccagtgggagttcctgcactcggaagtctttcactgttaaattccggatttcttccatgacccgaggccagaacgactgtaggctttgctgggcatcactgctgctagtaccaccaaatcctccttctgtggacatctcgacaactctgctcaggagtccaggaagagcaggagccgcccccgcgctcctacggagtcgggcaatgcagaggcccaggcgcggcggaggggagggggaagtgtgcgtcacggagaacggagcgcgcgcgaagcgggggcacaagcaagatggcggccacgccgttt

SEQ ID NO: 315596 - DNA, 822 bp, Homo Sapiens
  misc_feature (596)..(685): n is a, c, g, or t
aaatcttcatgaattctaagtaactcccagtcaccctgttttatttcaaccatggagaaaagtacagaggaaaggctgcatatggagagactgtcgggctgacggtgtcacagcagatccgagtccacgtgtggaaacagcagccgcccggccctgggtgtttcctccaggaaaggcctggtcagtgaatgcctgcaggcagcaggtgtcaggaatcacctgcccgatgccagcgctgctcttgtctggagggccagactgtcatgaagtcagtgacgacagctcagacaattggaaggttaactttacgtacaaaaacaaaattcaaatgatttccttcagaggtggagttttcttaggttcacatttataaattagtcttcacagttaatcctgtttgggaacaagaaataaggaacacatttctggtttcctacacatgatacaggtgtacattaattctcgacttccgtggtccatggacttcagtttgtgaagggtgagtggctaccatttttggatcatctactttttgtattagctaacttgcatattttatttcaaattctgtctgtcagcaatcctgaaggtagatnnnnnnnnnnnnnnnnnnnnnnnnnnnnnnnnnnnnnnnnnnnnnnnnnnnnnnnnnnnnnnnnnnnnnnnnnnnnnnnnnnnnnnnnnngttgcagaaccagaatttgtaaaggacagcccttcgcttttctatatcccatgcttccttcccatggaggaaaatgcttaacactgatcatgaaatgaaccgccagcattcaaggaggtgacgaagttcctggtacc

SEQ ID NO: 315597 - DNA, 1420 bp, Homo Sapiens
  misc_feature (1309)..(1309): n is a, c, g, or t
  misc_feature (1361)..(1361): n is a, c, g, or t
  misc_feature (1370)..(1370): n is a, c, g, or t
  misc_feature (1375)..(1375): n is a, c, g, or t
  misc_feature (1383)..(1383): n is a, c, g, or t
  misc_feature (1395)..(1395): n is a, c, g, or t
  misc_feature (1407)..(1407): n is a, c, g, or t
tttttttgggtggtaccaatctgtgtttattgaatatgtctgggacacagtgactgattgattgaacatcaagaaagctataggtgtaccccccttttcagtgaaaaaccaccccctcccacacccaaacaatagtgagaaaaggcacaggacatacacacaacacgcaggcgggcagggtccataaattacagtgagagtaggggaggggcaggagagaaagaaagcaggtggggtccaagcacaccccagggataacattccagcctgcatcaaggtggccctgctgtgagcaccccccagtctgtgctggggctcctgcccaccctctgctccaaccagcctgaggatgaggcacagggaggcagggcccatcactcaggaggccatgggagaaacagtctctgggaggtgctgcacctggggacccagaaaagtaggactttttctcctaggacccgcatcgaggcaggggacctcattcctagtgcccaccataggcaaccctctgcccactctgaaaagaggggcttgccgctggggagggattaggggttggtccctgccatcctggtttatttattttcagctcaagaattaattaggtttaaatatatacagatatgcctcaacttaccatggggttacttcctgataaacccatcataaatgaaaatatcctaagtcacaaattcatttaataccccaacagaccaattgtaaagttgaaacatggtttaagttgaaccactgttaagttggggacagtctgtactgtggaggtaggagatggggtagggggaggagggaacctagaagccatgctgaaggcccctggtccccagtccccatgggtggcttcatttctcccagccccctgggcctaccctgagcttgggctaacatcctaggaggcggggagtgggaaggaacaggacaattaaaataagataccatttattttttaaaaaattaaaaaataatgccaacattatttcatgcatccgcagcctgccccctgcctcccacctgcctcccaccagcctcccagggctgggccccctcctcccctggctgtcctgtgtaataaagggaaaaacaatgagcaggctcagtcaggcccaggggagggaacgcagacccagggagagaatcaagacgctacagcaactcagcctcgcatcatggcaaacccaagcacactggtagaaaacattcgtataaaaaggggagggcatgctgggcacaggcctgagggcaactgctccctggttgctcagagacttgctgtcccccaggggaaagcctngattaaaaacttgagggaggcaaaaaggagagagtaggggttcagggagtgnggatactcnggganggctgggnggccggggcttnggcagcttgggnagctccccctgct

SEQ ID NO: 315598 - DNA, 404 bp, Homo Sapiens
  misc_feature (371)..(371): n is a, c, g, or t
  misc_feature (384)..(384): n is a, c, g, or t
aggaagtaaccccatggtaagttgaggcatatctgtatatatttaaacctaattaattcttgagctgaaaataaataaaccaggatggcagggaccaacccctaatccctccccagcggcaagcccctcttttcagagtgggcagagggttgcctatggtgggcactagggaatgaggtcccctgcctcgatgcgggtcctagggagaaaaagtcctacttttctggggtccccagggtgcagcaccttcccagagatttttttctcccattggccttcttgagttgatgggggcctgccttccctgttgccttcatccttcaggctggtttgggagcagagggttggggcaaggagccccaggcacaganttgggggggttgntttaacagcagggggccacc

SEQ ID NO: 315599 - DNA, 859 bp, Homo Sapiens
ttggtgggagcagacctctactgtcctctgtaacttgctgctattgaggacaagggagtttttctttctttagcgtcttcagtgaaggatacaatacaacaatgcctaatgtatttgactttttagcttgtgtctgtgtgtataggaaaagcctaaaacaagttatttgcatttcagtggttttgtgagacaaagaatgggaaattctgtagcccttctggcttaccctgttgattataaacctagcctcaaaagagattgacaggcatgactcaagtgagtgttcacatatacaagcctgcatgagccctctgtgggtaggtggtcacacttggcatctgcagcattgacgtggccccgctgggtgccttgagcatgccctcttcctgctctgcaatttgaatcaccaccgtgccccttccaccactgttccccatgcaaaagctctgcttccagcagcccccactgaccgctctctgtgtggagcaaagtgctgtcgtgcggtgaccaccaggtgaagagcagcttgtattcagacatctagagaaggttaaatcttagtgtccctgggccaggagcatatcccaaggctcctgcgagccagtggcgaccctgtccactgccgctcttggttcactgctgtgtcctgccccaccctcctctcctcctgcctgttggttccttgacctgcactatgggttagttgagttccttacgatactacggtgaaagccgggtgctagagcccctcttgtttacaagacataatgagggatttgaaatatgtaaaaataaacatgagaagctaaaatgttcttccatcataagcttaaaggggaaaaaactaaaaactttgccc

SEQ ID NO: 315600 - DNA, 585 bp, Homo Sapiens
  misc_feature (516)..(516): n is a, c, g, or t
  misc_feature (552)..(552): n is a, c, g, or t
gccgcaggcttagcgctctcgccctgtgcatgtagcggccggcgcccggcgaggtggtcatgagccaagccatccaggcggcgcacgccactgcgcgcggcgagctgagcgcggggcagctgctcaagtggatcgacaccaccggctgtctggcggctgagaaacatgctggagtttcctgcgttacagcctcagtggatgacatacagtttgaggagacaggtagagttggacaagttatcaccatcaaagcacaagttactagagcattgagcacaagcatggagatcagtatcaaggtcatggtacaggatatgctcactggcattgagaagcttgttagtgtggctttcttgacatttgtagccaaaccagttggaaaaggattcattttgagagaaggaaagttcgattacaacatgaagatacctttaacaatttaatgaaggaaagtagcaaatttgatgatctcatatttgatgaagaggaaggagcgggtttcacaaggggcacctncgttcagagcattgctggtcctcccaccccatgcanaccatcacggtacatatggtggccagatttggc

SEQ ID NO: 315601 - DNA, 776 bp, Homo Sapiens
  misc_feature (401)..(401): n is a, c, g, or t
tattttataggctagaatacaatctctaaaaggccctttctgattatcttaacccaattcattgcaaatattcaccattaagataagagtcactctgtagaacctgtcaattttctcagtcttaaggctttgagaacactttaatttttctataaatccgagttgaatgtactgccgggaaggaaaagctggagccccagggcctatggttcactccaccatcattaatgtttacatccacctttcagatctcatttttgatgaagaggaaggagcggtttccacaaggggcacctccgttcagagcattgaactggtcctcccaccccatgcaaaccatcacggaaatacatttggtggccagattatggcgtggatggagacagtggctactatttctngcaaggttcttggttttgaccttcggcctaatgattttgggaccagtgaggagaaagtagaaagggactgagatccagttcttgggatagtcaagaagtcaaggaaaggactgaggaaaatgttgccttttataatgatttctaaatcatttactttcttactttaggattaatctgtccttttgtttgaaggtgaatgtttaaatattttggttcaaaaataaaaatgagatgacagttttaatactttattctgaattatgaatattgatcttatgaaactgcaactcattgtcttgatagcttatgacaaagtaaatgcagaacagaaatagaaagacaggcttcacacttaaaaataatcagtctaggttg

SEQ ID NO: 315602 - DNA, 705 bp, Homo Sapiens
  misc_feature (43)..(52): n is a, c, g, or t
  misc_feature (69)..(125): n is a, c, g, or t
  misc_feature (210)..(315): n is a, c, g, or t
  misc_feature (499)..(527): n is a, c, g, or t
atgccgtgctctgttttaatatacagatgtaaagatacaatcnnnnnnnnnnagacagggtctcactcnnnnnnnnnnnnnnnnnnnnnnnnnnnnnnnnnnnnnnnnnnnnnnnnnnnnnnnnntgagctcagatgatcctcccatctcagccctgaatagctgagaccatagctgtgtgccaccatgtccggctaatttttaaaacgnnnnnnnnnnnnnnnnnnnnnnnnnnnnnnnnnnnnnnnnnnnnnnnnnnnnnnnnnnnnnnnnnnnnnnnnnnnnnnnnnnnnnnnnnnnnnnnnnnnnnnnnnncgagccactgtgtctggccaaagaaacaatcttcaccccagttcatttcctgttttgtttaaagctggtattgctcacccttatctctagggttcaactctttcttttcaccagtattatttagtagatctctctctcttgctgctcctgtgaatacacacccagaccctttcattttggggcnnnnnnnnnnnnnnnnnnnnnnnnnnnnnagacaggagctctctctgttgcctaattatttaaaaaataatttctgctctacccttcttacatggattacttaatgtctttatttgtcattatgtatttttactgtaaatcacttcagattcttcttgtaaatagagtgtaaccatacaaagaaacataatcaaaccagtcttcttt

SEQ ID NO: 315603 - DNA, 792 bp, Homo Sapiens
  misc_feature (757)..(757): n is a, c, g, or t
aagaatttccattcattttagtttcctgctaattgacatcttcactacataaaatactggtataaaaatactgcgtaccaagatttgatacaactagcaaatgttcattggtttacaacaaacccaaaatactcatcaaatatgggctgttggatttagaaaaataagattcttgagcgattccagctgcatttgtttatacagaacacatttactcaggaccctgcagtgtcagcttcgttctttgggtatgcagccttctatctggatctctgcaggccagccagaatatctgttgttcttagcatcagagtggttgatcttttctctctgaatttcggaagggagttccaagccttttgctgcaataaatacccagctagacctgaatttcatgttcctgatttctttacttccaagtgcttctatggcattcttggcatcgttattcagtcttgtgcttccgtcgtcataggtcaccatgaagagcagggattttggagcagcactctgaataaactttgtcatcggtccagagttatcaccttcatacatatcaaaacatcgtgttgctgtcacattcccagttacatagttgacaatggcaatgtgtattcctctggcaacatttcccagctgttctcccataagtaggttatcctcaaagcagattttggcgtacttgcttctggcaccttcgctgagtaacctgtaggcatatgtggcagatgggcagggagtccagtgggcacatttnttgcttttgggactggaggcttgaggacaagcctc

SEQ ID NO: 315604 - DNA, 1267 bp, Homo Sapiens
  misc_feature (75)..(75): n is a, c, g, or t
  misc_feature (78)..(78): n is a, c, g, or t
  misc_feature (94)..(96): n is a, c, g, or t
tgggccccgcggcgccaaacgaatggttttaagaaagcttttgaaggggccgaagccggccgcacaagttttatntanttgtgcaatttatttnnnttggcccggaggcttttttattctaacagcactggggggcccagcctacctgccagacagttcccaggagtgaggctggtctttcctggcagataagacacagttttgttgggtgaatgagcggctcctcccttggtccaggaagagctccccctgcattgggtgatgaaattctgtctttctgaaggccgggcagtgcacagcggcccttcctctctgggaatgcccaggctcacacagtccacttcagacacctggtctcctggtgggtccccagacagcgcacagtgcagtaccgggcaccgcagctgacacaggtgtagggggatgggaagccacagacagcacagaaggggcgctggggccgcgatgggggtcccgcacaggccgtcaggtagttagggccctcggccacactcaagttctgctcctccaacagggcctgaaagttttttcggaagcgaagtttaaaatgatcacctcgggttttcttctttttctttccagtgtccgcatcgtcatcaaactgaggcagtctcttgccgagctgagggagtcccgcgtgggggtcatcctggaagttgtcattctccagggcctccagctgccggttgatgcgacgctgccgggcagcccggtccagcacccgccgctgcccggggtcctgggagcgaaccgaagttttcttctccaccattggcacaacacaactgtcggaagaaactgctgcgcacgcgtactaaccccaaggctttagtaggggcgccatcacttccggtagcttgtacttctgcgcgtgcgccacagctttgactcattacgtggcgtttccttggagacaagagagcttttcgccatgttttataggggcaaaaccacttccggcctcagtgtggaggtgtaaatcttgtgggagccacgaaatgggtcattttaaagatgtggtcacggtgttcttacgagaaatcttattttcctttggtccttgtgaagatgctgtgatcacaaaggcagcccctggagcttctccgggcagaagaggaggtgggctggactgtcaaagaaagtggctggcttccgtgggcaatccgaggttcctagtggccctctgcagaaagatgaactcgcagttcccccaggcctccgtcccgcggcggactcctaggcttcc

SEQ ID NO: 315605 - DNA, 439 bp, Homo Sapiens
ttaaaatttcattctcattattttctgtaatcttgagaggttccaatcaacatttattgccttattctttttatctcattcctttttgaatgtgtttatctcctaagattttatctgtgatggagatgggatgcctgtgaatacaaaagttgcagtggtggcaccagggtgggggggtgcggccggggcaccatggtctcccctgagagggggtgctgtcttaggtgccccaagaggccctcgggaagcaagcgtggggtgctgccaaaatacagctccccctgggtgggcaggacacacgtggcctcctggcagacaggtgcctgggtgagcccgctggctcctgattagtcatgaaatggcaccttgtctgggcgacagtcacccgcaggaaagccctgagctggccaccatcaccctgggcagtggctcccggggt

SEQ ID NO: 315606 - DNA, 844 bp, Homo Sapiens
  misc_feature (21)..(21): n is a, c, g, or t
acagcctttacaaacaggaantgcaagcagctctctgcaccccaagtcaggactagagtaacagtgagaggccttcatgcacttttgacagctcagtacctgtgagaacagaagtgatgcagggactttttaacccacaatgcatgaggtatatggaaatgtctgtgaaagaaccaccagcagctagagggaccaggcaaagttttctcacagcaactgctgatgaaggatttcccacaccatcttcttccggaagagaggcatctggtgctgagtaaatgtgataggtttgtccctagaaatataatctgcatatttacaagtaaacattccacaatcactcccattcagctgttgaggaatctcgtgtggtttcatgctgtgatgggtccactctaaaagattcagatcactatttcggtcttactttcatcctgtaaatactgaaggagaatctcacagatcctgtggcccttttgtcccatagaatccagatatttaagacacttttttcttaggtcaatcaccaccaggctccaatgtaccttccgatgaataggcaccagaataatttcttgttcaaagagatttacccctttggtccatcgtttcactgcttggtaacccccagactttaatttaggatagaagaaagtactgaatacatgaagtgctggatagccttgctttttatttctttccaccagaagattcatgtaaaaattaatgacttcatcattgagccagtgatagttctttaatgtctgaatatctcctcgagtaattcgcaatttgaaagcactacttaggatttcatcctgtgggccatggcctagggcattac

SEQ ID NO: 315607 - DNA, 758 bp, Homo Sapiens
  misc_feature (739)..(739): n is a, c, g, or t
tagtccacatgtccaacgggaatccgaatacccaaattgtcggtgtctgtgtggatggcttccacgaagagggcatctccagcatccaagcgctcttccacactggccctcgtgtactcaggtccagcagggtccaggcctgtgatctgtcccagctggcctccgaagagctgtcccaccatgcccccaacgtgggcccccaggctaacaccaatgatgtggattgaggattccgacacacccagcaccaggagtttattgaggaaaagggagatctcgaggctcaacttaatcacatttttcacagctgagaagtagactcctgtagacccataaatccagtccacggcaatcacattagcattcgttgcacgcagaagggttctaatgaatgtgtcaatccaggaaggctttgttcctaaaaccctgaatccatggataattagtttggttcccagagtggcattgaacccagagttttggaggtcactgcttccttctactagctgcccacagctaggattcgaagggacaaagaggagaaactggactttgagatcggtgccttcaaaaaggttggcgctctggaagtcagcgcactttggctgtggggtaggaggtgcatcccctgaacttccaacgctgagccacaaaatgaggccccccacccagaagcagctctcccagggacctgggggcatcgctgagctggaaatcctcgtgccgactcgtgccgaantctggccgcgagggccaat

SEQ ID NO: 315608 - DNA, 996 bp, Homo Sapiens
  misc_feature (89)..(89): n is a, c, g, or t
  misc_feature (92)..(92): n is a, c, g, or t
acacaatctaacggtgacgttggcctcaggaatttctgtgctggcttggagctctgggcaggtgggaagggactggcttctagccctcntcntgcttccccgaggcagagaccaagtttgtcctttctacctggcctggagaaggggctcagggccactgcctcgttccaactgggttgaaatctgggttgcagcttctcagctttgcccacaaagctccagatgacaagaggctgagccccagctttgacagtgaggggagtacctggaggtatcagcgtgccagagctggatgagggctgggggctcctcccaaaatactcagatgggggtttccaccttctataaatcaaagttgctggtgctcgcagcccccgtgcagggtggctggggctgtgtatcacaaggcagcccaagaccccctggtccccagatcctcccaggtcagaatcaactgaagttttggggtgaagacacaggaaagaacgtgtgtgtatattgctagaaacagtctggaagtgccccaccaggtaaatcctccagcccaggaggagtcctaacttcaaccccaagctacctgtgtctcgtgcagatgagctcaaactggagggtaaccctgtcacctgtgtccgaggaggtgggcgtgcagggcctggctgtggaggagacaggagagctgggctcggaggggaggccttcggagcctcttgggacacttccgggggaaggtgggtaggactcggtctggagcaatatcattggcccagctgacctctttagtgcaaaacccaatcaagggtgccgaggagaggcaaccgcggggtgggatgggcactcaggaactgagttgattcccaggctggaactggtgccattccccagggccagacatcagagatgggcagtgtggaggggaggagggggcagcagagaggggtcccatcccttcccaccagcagaacctgggcagagagagagtggcgggggagcctcgga

SEQ ID NO: 315609 - DNA, 645 bp, Homo Sapiens
  misc_feature (144)..(144): n is a, c, g, or t
ggggctacatataaaggggtaaactggggtgtcatcaagtcactgggtcactggccaaatccaaagtcacccaccagtggggcatccaaaaccaagtgacagtgccgcagagccaaagctatttgctttgttacttggctggcntgctttctctgtaaagtgccggtgctggctgattctgtgaaatagctctcccccttccatcatctccattacaattaagagtcgggccctagggctggactcatggggaaactggacactgttagcaaacacttcaataatctgaactatgtttgggtgtgtggcacacatcatgtgcagacgtacctcatttctagcggacgatcaagaagaattttcagcgcaaaccgttcttgagtagatttctttacacagactctaactggaccactaattccagctcccagcttctgagtccaattgatactgtattcttctaaaatggaagtttccttgatggctttgtccatgtcgctctcctccgacatactcagtggggcccccacagccgggagaggcggaggctgctcagcagccctgtccccgcgcggccgagggagcaaagggctcggcactcgggcccctgggcctcgtggcgacgggctcgtgccgaattcctca

SEQ ID NO: 315610 - DNA, 1367 bp, Homo Sapiens
  misc_feature (1002)..(1002): n is a, c, g, or t
  misc_feature (1150)..(1150): n is a, c, g, or t
ctgactcctgaacactttgtatttctctttataatgcccactgccttctcttgaataatatttcctatttatcttctccccttcaagctacaatgtcttctggacctccaacccaggactgcccctgctgacagagatggtaaagagtcgcctaaatagctggtttcagcatcggcccccaggggcctcccctgaacgctacctcggcttgccaggatccctgaagtgggaggacagaggtccaagtgggcaagggcaggggcagttcttgatacagcaggtgaccctgaaaattcccatttccatagagtttgtgtttgaatcaggcagtgcccaggcaggaggaaatcaagccctgccaagactggcaggcagtctactgacccaggccctggagagccatgctgaaggctttagagagcgctttgagaagaccttccagctgaaggagaagggcctgagctctggcgagcaggttttgggtcaggctgccctcagcggcctccttggtggaattggctacttctacggacaagggctggtattgccagacatcggggtggaagggtctgagcagaaggtggacccagccctctttccacccgtacctctttttacagcagtgccctcccggtcattcttcccacgaggcttcctttgggatgaaggctttcaccagctggtggttcagcggtgggatccctccctcacccgggaagcccttggccactggcttggggctgctaaatgctgatggctggattgggagggagcagatactgggggatgaggcccgagcccgggtgcctccagaattcctagtacaacgagcagtccacgccaaccccccaaccctacttttgcctgtagcccatatgctagaggttggtgaccctgacgacttggctttcctccgaaaggccttgccccgcctgcatgcctggttttcctggctccatcagagccaggcaggcccactggcactatcttaccgctggcggngacgggaccctgccttaccaaccttactgaaccccaagaccctaccctctgggctggatgactacccccgggcttcacacccttcagtaaccgagcggcacctggacctgcgatgttgggtggcactgggtgcccgtgtgctgacgcngctggcaaagcatctgggtgaggctgaagtaactgctgagctgggcccacttgcttgctcactggaggccagaaagagccctgatgagctgcactgggcccagagctaggagtctttgcagacttggcccacttcgcccccaacttaacttgagtatgtagatgctctttgctatggcaagcttttttccttgcttgtgggaatgcttggacccctt

SEQ ID NO: 315611 - DNA, 1013 bp, Homo Sapiens
ttcattggcagtggaaaatgcttcagtactttattgaaagaaagcaataaataatactgtgataaaaatagttcaaaagtagactgtacatactttgttacataatcaggaagttgacaaaagattaatagaaaaacagaacagtaacaatgaattgtacaagtaaattaaaagcagaaaccaactgaaaagacaggctgcctctgtctctggatctgctgcacaataaataccacgccatggtctgacacactttgctggcttgttaatatgccatttaaaaagtaaaagccacatctgcaacttacacaatccaaaatggctagagcatcaaagtctaaaaatgtcccactaggttcgttctttaaacatgtttacaaacaaatgtaaaaagatgatttacataagaaaaataaggcctttattagagctgcactgcactgctttctgggtctcctgccttcatccactgtgtgcgccgacttgcaggatgagagcgtggtgcttggtgctggccctaaggggagccacatgggtgtctctccacccgctcccaaggagcagaggcagggaagagggtgcaggggctagactggtccccaggttaccccatcccgagtctctccagctgagagaactgctcccagctcacagtctcagccactgaagacaagctccccaaatccagagactaggctaggaaagcgttaaccagtgctaggggcttctcatagtgttgtgatagtgttttcagtccacatcttattaggagctgatatttaacaccagccattttaaatctgttcatgctgcagaataaagcatctcttgctagaaaaagtacagttaaggtcagtcatgaaaatacaacaattgcttgaaattaggtatgcttatttcaggatgattgctgtagagctaggctgcgtccgtaaaggataatgcacatggcttctgtcataattttataaacgtaaaatcctttgtcatggtttatcattaaaaaattaatg

SEQ ID NO: 315612 - DNA, 870 bp, Homo Sapiens
aaaccacattttccaaagagaaattcttcgtggccttcctttttaaagagagccccttttttccccaggaaggaatcctggtttctttttctaaagggccaattccatttcttggcccataagaccaggtaataggtccacaaaaggtttttataattccaataagtttcataggattgtaaaatgttgaaaaccagtgttcaaggaaggagttcaagctgcctgtttgaaatcacgaatagccacacaataaagaaccctgatacacttttaggcggtttctcctgtcccagtctcctccttcttctattaagcttttggccttttctgtgtttcgtgtgatgagatcattatccatataaaataagccaatcctaaggagatagaatacaatatccaatcggtgacccagggccacagttttgtcatatgtcttgcgaaaggctgtcagagctccctctttgtcacctatccggcagaggtactcggcctttgccatcattgcatcgcgaatttcgctctctcctagattcttctctgcatcttccagctcctcatccaaacgcttcaactcatcttcatttgccttcttcattttattgagtaggtccacgtctatctgccagtcgagggatttgcacaaggcttcatagtaaggagccatgttgttatcgcggacggccgccatcagctcgtcgcgcacggcagcgtctccgcggtgctcgggcaggctgagcaggaagcgcagctgcgcgatacgcaagtcggggttcttgggcagaccctcctcctccaggttctccagcggcatcgcggcgaaggggacagcggctgacaggacacaacttggttacgaccggctgcggcccc

SEQ ID NO: 315613 - DNA, 375 bp, Homo Sapiens
atccatgaatatcccatctggtggcaactctggactccagtcctgaatcacaatagaacagcactgttactgttctcacaaatgatggatgctctaatgagcagtttttccaattaaaaaaactataaactttagatgatgcattcttctgatagctcatttttggttaactctgaatgttttgtcatatgcagtctcttattgtaaaactgggccacaatttattatagccatttggattttgtcacgagaaatacaaggacctctactatgcacctgagcttaccaaagggatattctgggagatccacaaacccctctttgccacagtcaggcgcgtggaaccccagaggctgcaccatgaggtgcgctttc

SEQ ID NO: 315614 - DNA, 874 bp, Homo Sapiens; identical to SEQ ID NO: 135443
  misc_feature (312)..(312): n is a, c, g, or t

SEQ ID NO: 315615 - DNA, 1243 bp, Homo Sapiens
  misc_feature (11)..(11): n is a, c, g, or t
  misc_feature (48)..(48): n is a, c, g, or t
cacaaagaggncacacaagggtcatgagatgaattttgaaataagttnaaagaaaattaaaagatgagaacaaatttttacagatgttagaggtcattcccccctcaaacagacgctggcctttttaagccctgcatagtcagccaaaactataataagatccactagtcccctaccttggtactacgcaggagataacagatactttcttggctgtacaagtaacaacacaggggagtgacataaaccagcttgaatgtgatggagaagttatgaaaaagattgtccagtcattctggttctggggaggaaatgggttcctaacttccctcacagattggtgccctcaaggtcatttttattcctcaagtctgtccttaatgtcctgccaatgccattcagaactggacccagttggatggctgtggtgcctggtttggaacagagctggaggcagtgctgaagtctccccacaagtcattgcttacagaaactggagttggtgctggtgtcgtgacaggagcaggagaatccgaatctaaaaggatatctgcatcactgcctgccatggttagatttcggaatggcgtggtggggtgacatgattgctgatggcaactgaggaggatggtgggggaatagtgactttgcctcctggcgggggtgggagtaagctcagacccccaccccttgcagtcctgggcttagaagcacctcctttcttgtttgtaatgttcccgatacacaacttgatggtttgtccttccttgaagcccagatccaacttaggacgagcatccatttcttgagattccttggaaatctcagattcctgctttacccacttgaagtgatcctgcaaggagacattaaagtcgaaggcatctccccgatctgtgaagccaatgccaatgaaagcactgcgcccagtaccatcctggatccggattacaaagtagcggctagaatctgtcaccgtctccacagcaataccaggatattgttctactggtgcctgagcaaagagctcccctgaaactttatcctcgagtttgatataggcagtcttcccttttgaagtgattcggaggcgaccagtccaatcaggctggtctaatttccagtcagaggccctgtaaccgcggttggaggcccggggcggaatccggtagacgctgacgtctggcttcacacacagcacagactcgtactccaactcggtcgccatcttgggtccgctatc

SEQ ID NO: 315616 - DNA, 767 bp, Homo Sapiens
gctgcctaggcaaatggcttttgtgaaaacacttgtatgaaaagcaatacaccatttgtttttacttaccaatcactatcattaggttttgatgcaaatgggaatttacaataaaatgaaacaaataggatcagggattatatacaatactgtgatcaagtgatttgtgattcaggcaatgtactacttgaaacacatatctggatttctcattccaattgctgcagatgctatttgaggaagcaaagaatacagaaagaaaaataattaggttcattaggctaagactaataccagtaatataaacaacaaatttataacatattgcattgcaaataagcaatgtttttagtataaaaattgcatttccacaaagaagctaataacaaatacgattaaaccacttcagaaacacgtcaaagttgtacgagtcacacatatacagtgtcacagtctacataaagctttactgagaataagccatctgaagggcatgtcccgggctgaagcgatcaaagggcttttcaactgaagttcttacttccagaaggctgttcaaaaagctgccccatcaggttcagcaggcttgatgactccaaatttggctttttaagacaagctaaaatctcctccagagaatcaaaatgtaggactgaggtaaagagatattaaacaagaaggaacttttctgttggcataagagatttgaatgaattctttcgaaaatgttggtacatttgacaggatgggtcaaccacatattcata

SEQ ID NO: 315617 - DNA, 1937 bp, Homo Sapiens
  misc_feature (1417)..(1529): n is a, c, g, or t
  misc_feature (1549)..(1566): n is a, c, g, or t
  misc_feature (1589)..(1599): n is a, c, g, or t
  misc_feature (1624)..(1711): n is a, c, g, or t
  misc_feature (1772)..(1781): n is a, c, g, or t
  misc_feature (1871)..(1881): n is a, c, g, or t
agcccagcgaggaggctcctggagtcacccaggtgggggatgtggggcctggaccagagaatcagagcggcagtatggaggcagggtggaggccttggtgatgggttggtgagagggatgggaaggaaggagatattgaggagaagtccacctggggtgactgagtgaggcccctggggtcaggccttgccatgtgagggatggagtccccagtgaagggggttcctatgatcctaactcttttcccctcccctcccctagggagtgcctgcagggcaccatccgcaacagccaggaggcggaggtctcctgccccttcattgacaacacctactcgtgctcgggcaagctgctggagagggagatcaaggcgctcctgacccctgaggattaccagcgatttctagacctgggcatctccattgctgaaaaccgcagtgccttcagctaccattgcaagaccccagattgcaagggatggtgcttctttgaggatgatgtcaatgagttcacctgccctgtgtgtttccacgtcaactgcctgctctgcaaggccatccatgagcagatgaactgcaaggagtatcaggaggacctggccctgcgggctcagaacgatgtggctgcccggcagacgacagagatgctgaaggtgatgctgcagcagggcgaggccatgcgctgcccccagtgccagatcgtggtacagaagaaggacggctgcgactggatccgctgcaccgtctgccaacaccgagatctgctgggtcaccaagggcccacgctggggccctgggggcccaggagacaccagcgggggctgccgctgcagggtaaatgggattccttgccacccaagctgtcagaactgccactgagctaaagatggtggggccacatgctgacccagccccacatccacattctgttagaatgtagctcagggagcttcgtggacggccttgcttgctgtagcgttgtaggggccctgcctgcactgcggttgtccacggtcacatctgccccagtgcctttgtccttcccttggggcttgccggtccagacttctctcccctgcggctcccactctctgcctgaccccagccttaaacatagctccctggccagaggccttgctgggtggagcctctgtgtgactccatactcctcccaccacaacactcatctgtcaaacaccaagcactctcagcctccccgccttcagctgtcagctttctggggctaacttctctgcctttgtggttaggaggcctgaggcctcttggaactcttgctaacctgttcagagccaggaaggagactgcacagttttgaaagcacagcccgtcaggtccggctctgcgtctccctctctgcagcctgtgtaagctattataattaaaatggttttccgggnnnnnnnnnnnnnnnnnnnnnnnnnnnnnnnnnnnnnnnnnnnnnnnnnnnnnnnnnnnnnnnnnnnnnnnnnnnnnnnnnnnnnnnnnnnnnnnnnnnnnnnnnnnnnnnnnttgcggccccccccgccccnnnnnnnnnnnnnnnnnncatttttttgggggcggggcccnnnnnnnnnnnggaaccggggcccccccggtccccnnnnnnnnnnnnnnnnnnnnnnnnnnnnnnnnnnnnnnnnnnnnnnnnnnnnnnnnnnnnnnnnnnnnnnnnnnnnnnnnnnnnnnnnagtttgggggttttttcggaccataaaaaaaggaccccgggggaccctcattttaattaannnnnnnnnnggggctttcgtgggggtttggggggaattttataagggattctcgcggagatggaaataaattaaaggccgcctgggggaccctaaatcnnnnnnnnnnntaaaacactttaaccccttggcgaaaaatattttcccccccgggaaaagggggggg

SEQ ID NO: 315618 - DNA, 1643 bp, Homo Sapiens
  misc_feature (502)..(502): n is a, c, g, or t
  misc_feature (833)..(845): n is a, c, g, or t
tattcgtccttgtcctccgctccgcccgcgcccggggtgcggttgccgttcgccgagcgccagggcgcgggcccgcgcgagacgtcggcgtccgttgctattctgggagtcatatagtgtttagtcctgcccccgccgtcgtctatctgtagagaagtgtccaaaacggctatggaggcgctgtcacattatgcgcgcagggtggtgttaagctcgcgcgacacggacgcgcggccttcccccacaccccaacggatccgcctgctccccgcccagaaccgatagccgagttagcctcggtcagcacctgaccctatgtcttcacaagtgacaagagatggagccggacagggacgagcgagggcagactcgccgggggacaagaatatatcgttgggaggccacatgtcagactgccgcagggtccccgccacgacacatcactcttccgccaactactagcagcgagaagaagggcgggggcgcgctgtggagggggcgncagatcacgggccgggtgtttggaagatacgcggacgtgtcgccccggcggtgcacaacgccagcctcgccgcggagaggaacgtgcccccgctcggggcaggagcctctcctctgtgaagaaaaccagcgataagagggtggcgcgccccgcgggccgagcagggcctttccggccctggggaactccccctacgcccccctgtgtcgcggtgctccgcgggttccgccgggcgggaaacgaagacgtaggggccccggttgaccccgtcccctcactgggagccggggctcaccaagggaaagtgggggcggtacaggtctctcaagannnnnnnnnnnnnccgacacgtcttgttaagcgcggcgttctccttccgtttacgaaaggatgtttattcaggcctgatgcctcgatacagctagatgtacaaaaatatatcattcaaagtcatgaaaaccatcatcatattggtgtgacctccttcctccccttgggcacagcttttgcaactacctcctttgaaatctgggagttggtggggcaagggtcacttcttggcagcttcttcttgggcagccaaatctgcctccttctgagcagccaggaagatggctcgttccttctggaaagctgcaagctcttctgaactgaggtccttcaccacgcgaatgcccagagaacgggcagacccgatgatggagcggacaacagacgacaggggtacatcctgcagggcaaatgcctcatcctgagctttgatgcgggcaatctcatacacatgcttcaaggtcaccaggcctgccacctctttccctgtttgccgggcccccttttcaatcccagctgctgccttcaggaagtaggaaacagtgggctgtccaatcttaatttcaaatgtcctgtcaggcttcactaaaatcttggtaggcagaggaatgccttccttgatgtcctttgtcctctcattgaactccttgcaaaactggttgatggaaacgcctctctcgggcttcctgaggccccgggcggcccggccgagctttgacatgatgcggggctgctggcttcagttcacctcaggggagcagcaagagcgaagctctgggcgccaccctcgtccgaattcgccacccaggcc

SEQ ID NO: 315619 - DNA, 836 bp, Homo Sapiens
  misc_feature (111)..(111): n is a, c, g, or t
  misc_feature (199)..(199): n is a, c, g, or t
  misc_feature (279)..(279): n is a, c, g, or t
ttttcaggccctgatgcctcgaataccagctaggagttccaaaatttattctttcaagtccatgaaacccctccatccatattgggtgacctccttccctcccccttgggncaagctttgcaactacctcctttgaaatcgggagttgtggggcaagggtcacttctgggcagcttcttcttgggcagccaaatctgcntctttctgagcagccaggaagatggctcgttccttctggaaagctgcaagctcttctgaactgaggtccttcaccacgcngaatgcccagagaacgggcagacccgatgatggagcggacaacagacgacaggggtacatcctgcagggcaaatgcctcatcctgagctttgatgcgggcaatctcatacacatgcttcaaggtcaccaggcctgccacctctttccctgtttgccgggcccccttttcaatcccagctgctgccttcaggaagtaggaaacagtgggctgtccaatcttaatttcaaatgtcctgtcaggcttcactaaaatcttggtaggcagaggaatgccttccttgatgtcctttgtcctctcattgaactccttgcaaaactggttgatggaaacgcctctctgacccagcactgggcctagtgggggcccgggcatggccaggcctgcccgcacgatcgcccggatcacaccgccgacctcgggcttcctgaggccccgggcggcccggccgagctttgacatgatgcggggctgctggcttcagttcacctcaggggagcagcaagagcgaagctctgggcgccaccatcttgggccagaggtcaagggtcctcacccc

SEQ ID NO: 315620 - DNA, 942 bp, Homo Sapiens
  misc_feature (654)..(654): n is a, c, g, or t
gcaggctgtaccggtccggaatctcgggatatcgtcgacccacgcgtcgcccatgagcttcgctcttgctgctcccctgaggtgaactgaagccagcagccccgcatcatgtcaaagctcggccgggccgcccggggcctcaggaagcccgaggtcggcggtgtaatccgggcgatcgtgcgggcaggcctggccatgcccgggcccccactaggcccagtgctgggtcagagaggcgtttccatcaaccagttttgcaaggagttcaatgagaggacaaaggacatcaaggaaggcattcctctgcctaccaagattttagtgaagcctgacaggacatttgaaattaagattggacagcccactgtttcctacttcctgaaggcagcagctgggattgaaaagggggcccggcaaacagggaaagaggtggcaggcctggtgaccttgaagcatgtgtatgagattgcccgcatcaaagctcaggatgaggcatttgccctgcaggatgtacccctgtcgtctgttgtccgctccatcatcgggtctgcccgttctctgggcattcgcgtggtgaaggacctcagttcagaagagcttgcagctttccagaaggaacgagccatcttcctggctgctcagaaggaggcaganttggctgccacgaagaagctgccaagaagtgacccttggccccaacaagtcccagaatttcacaggaggtagttgcaaaagcttgtgcccaagggggacggacaggaggtccccaccaatatcatgatggtttcatgactttgcactgagtctacttttagtacatctagctggagtcgaggcatcaggcctgaataacattcctttgttaaaacaaagcaaaagagaatcacaaagcaagcaggcgactcaagaccagagacacacaagccaagcgagagacaccaa

SEQ ID NO: 315621 - DNA, 573 bp, Homo Sapiens
  misc_feature (267)..(267): n is a, c, g, or t
agaaaggatgtttattcaggcctgatgcctcgatacagctagatgtacaaaaatatatcattcaaagtcatgaaaaccatcatcatattggtgtgacctccttcctccccttgggcacagcttttgcaactacctcctttgaaatctgggagttggtggggcaagggtcacttcttggcagcttcttcttgggcagccaaatctgcctccttctgagcagccaggaagatggctcgttccttctggaaagctgcaagctcttctganctgaggtccttcaccacgcgaatgcccagagaacgggcagacccgatgatggagcggacaacagactgacaggggtacatcctgcagggcaaatgcctccatccttgagctttttatgcggtcaatctcatacacatctctttccctgtttgccgggccccctgtttcaatcccagctgctgccttcaggaagtaggaaacagtggggctgtccaatcttaatttcaaatgtcctggtcaggcttcactaaaatcttgggtaggcagaggaatgccttccttgatgtcctttgtcctctcattgaa

SEQ ID NO: 315622 - DNA, 1288 bp, Homo Sapiens
  misc_feature (86)..(100): n is a, c, g, or t
  misc_feature (108)..(233): n is a, c, g, or t
gcccgggttttttttggaaaaaattttgccctgtttcctttccttttggggccgggcgcccaaaaaaaggttttaaaaaatttttnnnnnnnnnnnnnnncggccagnnnnnnnnnnnnnnnnnnnnnnnnnnnnnnnnnnnnnnnnnnnnnnnnnnnnnnnnnnnnnnnnnnnnnnnnnnnnnnnnnnnnnnnnnnnnnnnnnnnnnnnnnnnnnnnnnnnnnnnnnnnnnnacagaagtaaagtttattacatttgaaacaatacagcagaaacctcaaaagtttactcataaatatagtttaattcttacaaatcttcttttgaaaatgcaattcatatatgctgcaacctcagaagtttgaatttgaaatgaaatatgaaggtagtagtcagggaagtcacatcagagtgccttgtcaaatatccaaacaaatcagcacatacctcttccttgatacaggaggaaaaaagtgattctaaatatatccaagtgaatgcagaaaaatacattactatttgaggcagaccatgctaaaatataatttacaatgattagtttgcacttaagatggttaataacgcatttaaaccaatgaaatgaaggttaagttgaattttgtagtatttgctcagtctctgtactaaacaatagttcatctgaaaagtttggaaaaagcaaataacctgatacttctctttatgcttatcattttctcactgtcatcttaaatgcaaacaaatcaatacagcatcaagattttttacatattaaaatgaagactaatgactcatagactgtgtaccatatagtacttaatagatgagcttgcaatgaccatcacctcaattttttaaataacaccaagatccacaagccaaaataaacatttgattaaaaagttatgttattcaagataactcagtttcctttttctctttgagattgggaagggctgggtcttcaaaaacctgaagaggagttggtaagaggagaaaatcctcaatgctttaaaaaactcaactggttagaagtccatacaactactatgctggcatggacagagatgtttcctgtcacagaactgttcactttcccatagaagtacttcctccaagccaactatataaagatgtaaatcagctcacccatgattgaaactgaaataatccttcaaaatagaagtaagacacctcacccaaaaagatcttttaaatcattgctagctgaactgctattggtcatagtagttggtggctgtgcaaagttctgtgggttaaagaaagg

SEQ ID NO: 315623 - DNA, 720 bp, Homo Sapiens
  misc_feature (466)..(466): n is a, c, g, or t
  misc_feature (642)..(642): n is a, c, g, or t
  misc_feature (648)..(648): n is a, c, g, or t
  misc_feature (682)..(682): n is a, c, g, or t
  misc_feature (699)..(699): n is a, c, g, or t
  misc_feature (710)..(710): n is a, c, g, or t
gtatgagccactgtgcccagcctcaagtcacccttgttagtttggcttaccaactttaaagttttggattgcttttgtcaagccactgggttgcaagttcagatggtctttcttgtttttcttagctaattgtaagtaaaattcactttggtaatctattgtgtcacatagaattgaagtttttctcttgctaatattattcctattttcaaattttggggttcctgttagcctgattttcggatagctgccacatgagttgtccttgatctggataaatccataaaaattgtgaaggcattaaagctaactggttttccatataaaaatttttaagaacacttcatttattaaggtctgtatttctatatattctcatatttataaatctccatattgtttgagaaaaggaatgaaatacctctaaaatatgggcctcatatttttagaaaagtgtttgaaatcntttataaacttcatattttgtttgctcctttatattctgtattacttaaatatgctcagaaaagcagtggtaaacagctatttaggaattgaggctgttactcctgacttccatgtgagactgccacagaactcatattgaaaatatgtcatttatccactagggtttggtttccnactttntaaaatttggtggttaagaaagggaaaaaaaccncaaggttggtctacccnggtagaaaacnggcaagccat

SEQ ID NO: 315624 - DNA, 1082 bp, Homo Sapiens
  misc_feature (52)..(82): n is a, c, g, or t
  misc_feature (136)..(136): n is a, c, g, or t
  misc_feature (205)..(205): n is a, c, g, or t
  misc_feature (1066)..(1066): n is a, c, g, or t
aaaggaaaaccccaggttttccccctgtgggaagttgataagggggtccttnnnnnnnnnnnnnnnnnnnnnnnnnnnnnnnttattaggcaaacccaggaaaaattttagatttttagtttaaacatacctggantacgggacattttagattttgggatatagattttaccatatatacttccaaacccactttcccccggtnccagaaaacagaaacatctttaggagtggaattttatgaaaggaaaagcacaaagctaaaataacgcagcctgtaaagtttaatctcggcaataggcaagttattgtaatcatattttaccccaaaaggctgctccacaatgcatgtgctgtggggtatactttagaagcctttgtcttccattgtggtcttcaatataatagagcaggatggtctgaaacctcctccaccctacagaaaatatgattggatcttgggacttgaggattttcttataccagcgatgtttcttcagacgcatctgcacgtgtccaacatttccctcgctgttgcccaagccacccaggataatggggtaatgggggtcaaagttctgcacaaattcacagggaacattttcaatctcaacgcggacgtacatcccaggtcgaaaaccatcatactgaactctggcttcatcatcttgatcttcaaattctacgtgattcagctgtgcttctttctgcatttctcctttaagatcatcaaaatatgtgctttctccttcatcatattccgcatcaaacatctccttcaattttctcttcttatccaaatgctttttcttggcactttcttcttcgtcggggtcaatttcttccttgtttctctatatcttcattctgagtgtcggggcccgattttcccttgtgcatgtcccctgtttccaagtcttcaaagtcaccgtagagctcctcctttcacagctggggagtggacctgggcctgcgcctctccgcgccagcgcctgcgctgtgccctcgtgccgaattcgccacccaggcctcggggcttgggggagtggcgcgccgcgcgcggcanttcttcgagggaaggg

SEQ ID NO: 315625 - DNA, 722 bp, Homo Sapiens
ccccccaggggttttaacaaaagattttacttgggttaataggaccgttggatggaaccagggattccaagttcggcaggaagcaaatttggttcatcagcaggttatccttcaaagctggccctgaaaagctctttctggagctcggagtgctttcttgatctgcccccttatcccactgactgttcgaatcacagcaccttcaaatttggccacttccaaggcagaattaaacattcccttaataaatgaagtgttcttgaaaattttatatggaaaaccagttagctttaatttcttcacaatttttatggatttatccagatcaaggacaactcctgtagcagctatccgaaaatcaggcattatgccactgacagactgtattgccaagaaaccagttccctgtggagtgatagggccccaaaaggctgctccgcaatgcatgtgctgtggggtatactttagaagcctttgtcttccattgtggtcttcgatataatacagtgggatggtctgaaacctcctccaccctacagaaaatatgattggatctcgggacttgaggattttcttataccagcgatgtttcttcagacgcatcttcccgtagccaacatttctctcactgttgccttatccacccaggacaatggagaaatggctgtcaaagttctgcacaaattcacaggtaacattttcaatctcaatgcggacataca

SEQ ID NO: 315626 - DNA, 587 bp, Homo Sapiens
  misc_feature (145)..(299): n is a, c, g, or t
  misc_feature (329)..(485): n is a, c, g, or t
ccatcttctcgtatgttctcattacttggcttaagaattctggctgttgatgactatagtatggcatatcatacattttaagctcagtcagcttttaaatatcaccagtcctgtctgcattgttccattatgagacacatagctnnnnnnnnnnnnnnnnnnnnnnnnnnnnnnnnnnnnnnnnnnnnnnnnnnnnnnnnnnnnnnnnnnnnnnnnnnnnnnnnnnnnnnnnnnnnnnnnnnnnnnnnnnnnnnnnnnnnnnnnnnnnnnnnnnnnnnnnnnnnnnnnnnnnnnnnnnnacttattgaaagattaaaataattaatgtnnnnnnnnnnnnnnnnnnnnnnnnnnnnnnnnnnnnnnnnnnnnnnnnnnnnnnnnnnnnnnnnnnnnnnnnnnnnnnnnnnnnnnnnnnnnnnnnnnnnnnnnnnnnnnnnnnnnnnnnnnnnnnnnnnnnnnnnnnnnnnnnnnnnnnnnnnnnnaagaagaagagtagttaatatattattaatagtatcaactcacagatggagctcctgagagtgtttgtgactatgatgagtgctgtatatatgctgagtcgg

SEQ ID NO: 315627 - DNA, 754 bp, Homo Sapiens
  misc_feature (452)..(452): n is a, c, g, or t
  misc_feature (614)..(614): n is a, c, g, or t
  misc_feature (690)..(690): n is a, c, g, or t
gagatatcttcaggctggaaaattcttcttgctgtgtggccaatattcacgagcacttaaacacttcctgaaatgcccaagctcggaagataatgtggcaatagaaatggcaattgaaactgttggtcaggccaaagatgaactgctgaccaatcagctgatagaccatctcctgggggagaacgatggcatgcctaaggatgccaagtacctgttccgcttgtacatggctctgaagcaataccgagaagctgcccagactgccatcatcattgccagagaagagcagtctgcaggcaactaccggaatgcacacgatgttctcttcagtatgtatgcagaactgaaatcccagaagatcaaaattccctccgagatggccaccaacctcatgattctgcacagctatatactagtaaagattcatgttaaaaatggagatcacatgaaanggggctcgcatgctcattcgggtggccaacaacatcagcaaatttccatcacacattgtacccatcctgacgtcaactgtgattgagtgtcacagggcaggcctgaagaactctgctttcagcttcgcagcttatgttgatgaggcctgaataccgcagcanaatagatgcgcaatacagaagatcgagggaatggtcaggagacccgatatatctgagatagaagaggccacgactncatggccattctgctttcttctcccagagtgtgctcctctgcctggatgatgtgtcacattggc

SEQ ID NO: 315628 - DNA, 1141 bp, Homo Sapiens
tttaacgtttttagtaaatgtttattttttgtattccttaaaaacaaaacaaaaatcacaagtttaatactagtcctttgaaatactgtacaccaatcaaagccaccttactcatgcagcaagttggtctatgttctcttgacttctgtttgccagatgctcctcaataatttctgcaaacagattcctcttcaacagattatatgcaagaggtaaaagctggccagcaactttatgaaaataatgtgagccatagcaaaagagatccattcccaattcaagccccatgccataatcacattcatcattagcaaactgcacaaaagtcatcatttcctgaatgggagcaaaagcttttagtctctcctcatcacttgcagcctcaactattgtcttgcaaattctcttgaggtcagcatctgtttcagggagctctcggtacccaacatcatttttatctactggaacaaccaagcctgcaccatgaaaggtctttgtcacaactttcttatctctctgtttcatcttcacggttctctgttcaagcgagtaccccaattctctggctgcttctgtgagtttttcatctatgtttttcaagagattgattttctttttatccgttatttctttaagttttttcgtcaaaaataatttgactgcagcaaatacattatctccatttggaacaattatacaatttttctttgcttcatttataccaacatatacaggaaattcatcaggagaatccctgaaataccccatgtggtactgagttttattatctccaataataatggtctggaactcaggaggatcatagtaaaacctccagtgaaggttaaaattcaggcctgttgattttttcttcgttttatgttttccagcaaggatatcataaggaccaactaattgaagtccaaggcttgcagaaagtgaatcagatggcttttcaggatcaagttcttcacagaacttccagaagtgatagaaatcttcaggtaaagaaagcttataatgattttctacttcttttcgaaggtcactggagacatcagcttcacagaatttacttttcttcacatcagttgttttttcacactgcggcccctccccgccgggcgtgcgcttcccgcca

SEQ ID NO: 315629 - DNA, 530 bp, Homo Sapiens
aattggctaaagctgctattttttaaaaaaaggaaggaagagaacaagggctgagtccccgtgtctggcccccactcgctccctggcctcagaatggtggtgtcttcttcagttgatggagaagcgcagccgcgcttgggacatgttcacagcgggcgtgcttcatggtcagcccgtagatggggggtcaggtcgactttcacgcccggcggcacgttgaactccagttgctgtagcagtatggccagggaagaggaagatctcccactttgccagggactttccccgatacaccggcgctttcccatgccaaacagcatcatctttttcactcaagggcttgttaatggcagtgccatcggcggtgaggaaccgctcaggccggaactcagaggggtcctcccacagctctctgcaagaggaccagaggagatgggacctcagggctggagaggccctgggagaaggtgcctggggaagggagacttctgttgagaacacaagtgtgagggcactttgaaagtcctttc

SEQ ID NO: 315630 - DNA, 476 bp, Homo Sapiens
gtaggacgatgcctgtgtggagagctggcttctctgctcccgcctggtccaccacttggctagagttcagagacaggaagtgattggtctaagctaacacagcaagttggtggcagacctggttctagaggcaaaaccttcttccagatgtgaatgaaacctgcaggcttcattttcctttctgagcagtgcttcttagctctttggagacacgaagcccttggaaaatctgatgaaggttacggaccttccctaggaaaacagataactgacgtagactcaaaaaccccaagcaatttcaggagccactggactccctgaatgaaacccatccctggactccaggctaagaacctcagccctggggacttcacctgctgccctttccttacctgtcacacattgagccccgagtcaaggccactgtacaagtagttgcccttccttcccctggccaagcactctttccttggtca

SEQ ID NO: 315631 - DNA, 1165 bp, Homo Sapiens
  misc_feature (1052)..(1052): n is a, c, g, or t
taggacttcatactgtatacagagatgaggctgacgggtttcaagaacaaaagtcattgactggactgggccaaagcttttaaacagcctcttcagagccttgagattgcaatttttgctaaatggcccagcatagacagttgatatctctgtccacttgatcctcatccttttgttcatctcctcagtgaggacaggtgaaaaggctttaaaagagaactgaacaatgctgaagggaaacagggggatttccactctggcctgctcaagaacctctttatttgaaagacacttaatagtttgacaatttctggaagatggaagttcaccagcatctgtctcccgggtcaaataaaagaagcttctgacccactgaatccaagcattctaaaacacttgtgtttgggtgctgaagtacttctgctgtgtttttaggctcttggcctgctgcttgtatttcttggtgattagctagtgcttctagatttagttctgcaatcttttttgggccatgcttaaggaaataccgagccaattcaaggattgttctagcatcttctgtggcatcatgaccaagtctgtctggacactgtatatccttccccaaaataactttggctaagaacttgagcttaaatcttctgcccagtgctctgagatccaaatctaaggagtggcccactaacacagcatcaggaggaagcagtgcaactgcctctgtacatctttgagtttggtcggcactgggttaagaatcttcttcgtgattcccgaaaagctggtgaggtagtccagaatcttgttttcaggtttgaccagttcatccataacacagcagcctccttcagcaaccagtgagatgcgtgttagctctctccccttggatgtgaggcactgaaagaccaacatgtagtcaggctgctgaactgtggaagttattgcttcttcttactatttacactatgtcaactgccatctactgtaatctaccagggtccctgcagcaatggcacaaacttgctttctagaggatctagtgtgagtgaaattanagctgggcaggctgctgaatgttacacttaagaggatcaacacagtgtagtctgcacaaagaagatgaatgcaaataatattaataattgtatctaccatttacggagtgtgt

SEQ ID NO: 315632 - DNA, 1238 bp, Homo Sapiens
ggacagaagggacagccccggaccccctgattcttggggcaactggcgaccccgcggctggggaaccggggctaactctccctcaagagttccacgcgcgcatcgcggtaggcccggtccagagcccactcgggctgtgagtcggtgcccccttctcggggcaaggcgggccatctcctgttggaacagcgcttgccgcgctcggctggggtccacattaatccagttgttggcaatccacttggtgccgcgcgtgaccaggcagcccccgtgcagcgagtagtcgtctacgtcaccccacccaacccttgcccatcaggcaggtagttgtacccagaaagactgctgtgcccctgttggggcttgacacgcaggtttccccttgtccacagtgcctccgtgtgtcacggaggtccacgtcatcctgaatcagactcatttcatcgtaggttctgttatctgctacagggaaaacagtctcgcccccaccagtgacgttgttcaaataaaacagcactgtcatgtagcggcaggaggtctcgaagggtacagactcgttggctaccagcttggtatgggagcagatggtctctgggtacacaggcccactgtccacgtgggcatggtagtggcccccctcaccatatcgaacaacctgcagcggctcgctgagctccacgatctcaggcgacaggcgagtgaggcgcagcaccctctggcggatggcacgcatgatgtggtgggcaccctcaccctggtagagccaggtatggtggctgttccgcaccagctcactggactctgccttgtggctcctcatgtacttgtggaagtcccgaaggtccatgttggagaactcctgcagactcagcactccgtcaccatcagggtcagccttgatcgcggcgtacatctcctgaatgctctctggagtcatccaccatccatttcccaggcgagtctgggccagaacctcacggagctgaaggtgcccatcacggttctggtccagcagccggaagaggtccagctggctgacctgcatagtgctcattgcctcttcatactcttcagtaggcaggatctggctgcgctgtaaccccttcatctgcgccagatggatgatgagccgacactcttcatcagtcaggaagccggggatttcgaagagcagcggcttgaggctgagggttcggatgaagtgatccctgtcggtgaccagctggaccttacgctcg

SEQ ID NO: 315633 - DNA, 987 bp, Homo Sapiens
  misc_feature (777)..(777): n is a, c, g, or t
  misc_feature (820)..(820): n is a, c, g, or t
taggggtgcttccgtggtcggcggctgctgggctccgcgccggggtccgagtcccacgaagccccggcccgagccgccggatgcccgcgcgcagcggggcccagttttgccgacggatggggcaaaagaagcagcgaccagctagagcagggcagccacacagctcgtccgacgcagcccaggcacctgcagagcagccacacagctcgtccgatgcagcccaggcaccttgccccagggagcgctgcttgggaccgcccaccactccgggcccataccgcagcatctatttctcaagcccaaagggccaccttacccgactggggttggagttcttcgaccagccggcagtccccctggcccgggcatttctgggacaggtcctagtccggcgacttcctaatggcacagaactccgaggccgcatcgtggagaccgaggcatacctggggccagaggatgaagccgcccactcaaggggtggccggcagaccccccgcaaccgaggcatgttcatgaagccggggaccctgtacgtgtacatcatttacggcatgtacttctgcatgaacatctccagccaggggggacgggggcttgccgtcttgctgcgagcactggaagcccctggaaaggtctggagaccatgcgtcaagcttcgcagcaccctccggaaagggaccgccagccgtgtcctcaaggacccgcaagcttctgcagggcccctccaagctggggcaggccctgggccttcaaaagagctttggaccgaggggnccggggccgggatggagcggggatgggtgggagcgggggcccnccgggcccaaagaaacacgctagcattgaaaaaccgccccagggggggcgacgaacactcacagggtaaagatatcctgcaacgcccgttcttctttgtggttcgggcgattcaccttgtgaatgatacatgaatctatataattggttatacgctgcgcaacaacc

SEQ ID NO: 315634 - DNA, 636 bp, Homo Sapiens
  misc_feature (217)..(267): n is a, c, g, or t
tctgggtcttcttttcccatgcagcctccagcccaggctgcatactatggctgtggcccagtgacacccacccagcctgcccccaggtggacattccagccacctagaccttcctgtgagtgacccagccccttccactctcaaactggcctattggtgtgggccccgtgaggcagtcataacacagggatgaaacctggctctgccacttcccaannnnnnnnnnnnnnnnnnnnnnnnnnnnnnnnnnnnnnnnnnnnnnnnnnncctgaatgagacgtgtgtaaagtaccaagcacagtggtgagccaatggaagacacgcagctagccaccagcagtcatcaccaaagatgcctctgatttgtgactctgtcggcgccccccggcccacatcagcagtgtcaggcaggcctccacccaggtgccacgcacggtgcctcatacccagagagtagccaacattggtactcagaccacaggacccagtggggtaggatgctgtacaccaggccggccgctcctgccgtgcaaatgttcctcagcagcacatagcacctatcgggtccaggagccggctgtgcacatcccaggacaggagcccctgaccgcgtccatgctggctgcggcgcccctg

SEQ ID NO: 315635 - DNA, 552 bp, Homo Sapiens
  misc_feature (175)..(175): n is a, c, g, or t
  misc_feature (392)..(392): n is a, c, g, or t
gcacgagtgactctgaaaattcttgcaaagctgagaaggtgaaattcctctggctatattgttgaccaaaggccctcctctgtaagagtgaattgcacgctcacttgaaactatcttgagggactaaggtgtacaatcctggtgcttatgcagtttggggctctaggtagacacngagctgtctttgaaattgtggatatcctacactccccctttctgtagttctgggtctaagtgaattgactcctatattctgttgtgaatgttgtagtttccctttccattctcttggtggccctggaagcttctaaggcacagtgtgccaccctgattattcccaccacttcattcaacttttctctctctgtggtgtctgcaccacaagctggctnacccttcaggtgcctcaatggtccgggcaccaagttgtgccttggcgccccccgggccacattagcagtgtgaggcaggccttcacccaagtgccacgcacggtgcctcatacccagagagtagccaacattggtacttagaccacaggacccagtgggg

SEQ ID NO: 315636 - DNA, 928 bp, Homo Sapiens
  misc_feature (50)..(50): n is a, c, g, or t
tggagggtttctgtgtgcagcaatttctcaggagatctttgtatatttancaattcttaaaagctctggtatagacaggtctggatgtctccttgagtattcaaaagtaaacttcgcaaagaaggccttctcttagagataaatcctttggtctatcatctttgtttgagttaattatgcactggccgcgctctggtattttcttttcacagcactctttgattttgctggagatagaatcttgttttgaacaaatatggttcataaccttgctcgtgtcacggatgcactgcacaacatccccttcacagcatccatcatagttggaagaaacatcttctacaagagaaataagctccttaaattcaatcttggggaatttttgactgagtatcgcaatatatataaagtgtacaactttggttccaaatttcaaaagtgccccacagacatgtttttgataagaagaaaatgcttttaaatattgtgtgacaggtattgcccttgtttgaaggcagttgactttgttttgttcttcacaacatgatttggccacctcctcaaaatgaacagcaacagttagaagtgtaggggcgaagacaaatgggttccttctggcaacttcatataaaaagtgatttaaaagggattctctgttactttcataagcctggcatttctcttcgggatccagggtagggaaaggaggcagaaatcccacatcagatttcttgttatagaagaaacgtggcagcccctccatagcacatattttttcctgtaaaccattattctatacaacagagaagaaaaggccaatttttagtcatggtaaagtaaagcttctgtactcactgagaaaacacaatgactaattttcccaccattaccaacagagctccttctctttctcctactcctctccttc

SEQ ID NO: 315637 - DNA, 901 bp, Homo Sapiens
aactttacaaaatgttgtgtttattgcttgctgcaatgtattatttcaggtgacagttacagaaaaatccttttattttgttctcaggaaatgcgattcatcaccacacagataggaagccttccctggaaagagaagatagtatttcatgcatcaaaaaaacatgaaatgttgaaagttgggtgatagaaagtcgagtatttgaaaaaactattagtggtaaccgtgttttgtcccttgtaaatcccaacctaccttctgttgaggtccaggtctctcttcactgacactgtatataactcctatatctacgcaacattttgttgctaaagtttgtgtttcaggtcttacataagccacaaaggggagggcatctttatatatctttttgaaatcacaaacatatcgctttttgttcacgtaaatgctgtagcaatacccttggtttgtatgtggatcatatctcagtagagcaatattcttttgaggttatttgaaagggtcactgaggtctgtctgcccacctcagtccccagggagttacccctcttctttctgtcaacattcagaggttccatcatccctcctttgtggtccagacagctgaatacatgagtaggaaggcagaggacttaagcgcctcttggttatctagaaaactgattgaacagcaagagaagggcaagcacaaatgcagcattgccaccccataaggagtggctgatacccagaaaaacacaggaacaatatcggggtctgttagctacatgtgcatttcttgttcatgtaggatgaaccagaaatagacaaagaagcatgagggagaaaaggcaaggagatcagataagcttctttacatatctccagcagctggcttcagttgccaatttttggactctga

SEQ ID NO: 315638 - DNA, 1128 bp, Homo Sapiens
gaaaaataactttacaaaatgttgtgtttattgcttgctgcaatgtattatttcaggtgacagttacagaaaaatccttttattttgttctcaggaaatgcgattcatcaccacacagataggaagccttccctttggtgcttttttctttacatatctccagcagctggcttcagttgccaatttttggactctcttcattaaagcagacttcaggactctctgctttgcagcacttatccactacatttgcgaaatttgtaaacaaagactgcagctcttcatctgtgagttcatgcttcagcttcactaagttgacaagaaacctgtctgtcttcctctgaagctcctcattctgagattgacacatgtctgcgtgaaaggtaaataaatcttgagagaaaggtggaggcacatatgttttatcagctttcaaactctcaaagcagggccttctgaaggcaaagtttgttttacagcagtggtccacagcagggttgatagttcgattttcatttactccacataactctccaaaaactaaatctgccaaattatcaacacaggcaaactcttcacttagcgtacagcaagtagtgaaagctgtcaccattttctcgccaagagacaccagttcttcagtggagagttggggagctatcttcgtgagcctgatgaggtaatggtatttcaaaccatccttccccaaattctggaaatgtttacattcttgttgtaccatcttgaggcttttctcagttgtctcattgaatttgtcttccgcgtaacggtaacaacctggagggttttctgtgttgcagcaatttctcaggagatctttgtatatttgaacaattcttaaaagctctggtatagacaggtctggatgtctccttgagtattcaaaagtaaacttcgcaaagaaggtgtctgggtcagcatctcgttcttgacacacattttcactgtcagtaaattttccttctcttagagataaatcctttggtctatcatctttgtttgagttaattatgcactggccgcgctctggtattttcttttcacagcactctttgattttgctggagatagaatcttgttttgaacaaatatggttcataaccttgc

SEQ ID NO: 315639 - DNA, 486 bp, Homo Sapiens
acgagagagcttttgtgaaatgagctatagccaaaatgtgctcttaaattactctgtgaccaagacagaggagaaaattagcttttgaaagcagagtcagtattagatctgactggattacacaatagtggaattgggttttttgctctttctctaatttctaatatacaaaattttacacattgcaggtttacttttgaatactcaaggagacattcagacctgtctataccagagcttttaagaattggtcaaatatacaaagatctcctgagaaattgctgcaacacagaaaacccttcaggttgttaccgttacgcggaagacaaattcaatgagacaactgagaaaagcctcaagatggtacaacaagaatgtaaacatttccagaatttggggaaggatggtttgaaataccattacctcatcaggctcacgaagatagcttcccaactcttcactgaagaactggtgtctcttggcgag

SEQ ID NO: 315640 - DNA, 904 bp, Homo Sapiens
gagagcacaactccaaatcatcttttattaatataaaaagggcatatttagcaaaagacacacagataaaagagtcactatggctcaggacacaaggcagggaggtgccaggcctgtgcccctgctgggggagaaggaggctcgggacaaagtgggagaagtgctgggaagggctgagcggtaggggccacaaaagttccggtgggcaacactgtcggcaggtcatgggtgggactcatggggacctcgctgctaactcttgtttgtgggggggtgtccttagtgctgccacctggagggccactccttggttcctggaggggacccaccaagggacacaggacaggaagcccaggatggttagtgcaactcgggatgaaggccagggagaagcgggtgctctgcagtggccggataggtccagacgctgaggccgaggcgcttcctgttacgtgcggcgttccgctctgtctctgccaggcactctctgactagggcccgggcatggatgatacctctcttcaggcgctccatggcgctcttgctgccagcataggtaggccggatctctttgcccatctcctctatgactgacagcaggtccgtgtaggtgctctgggagccctgggcgccgggtggcttcatcgcctgcacgtagcccatggaaggcggtccaaagtcgttaaacagcggtctgaaaggagcgccggctcctggcagtgagcccgacggcgacggtacgcttcctgtagggaccggggtgcccggcccaggggtgctggagccaggggtgctgctgggagcaggggcgatgggtttgtaggacatccccaactcctgggcgcggcggacgccagccggccgctcctcgggggttggctgcggggccgctcagccgcgctct

SEQ ID NO: 315641 - DNA, 365 bp, Homo Sapiens
aaagagactcatcagacttccgggtgcgctgctctcctttctcaaaggaagaattgttgaattgtgacacagaatccacaaaaaattcttttacctctggatattgagaagcataaaagtctcttagcattttctgtcgttcttctgatgtggcattggttatatgtttagcaaattcgtttacagaagacgagttaaaataagaggccatttcttcaaattgttttcttagaactgcaaacagctatgttagcaggcagctgagaaaactgcttcaactcaaatacgtcatgtgctgcccatcggctcatgtgattttcagctttgctcgatccaattacattctggtttgagtgaatataagc

SEQ ID NO: 315642 - DNA, 616 bp, Homo Sapiens
ttcccgtgaagaagataaatatattttggaagctgcctgtgtcctctggggtgaaaagccagcatagagggccccaaacgcccaccctgccaacccatgccctcctctgacctcgctccctttctccccatagacccgccccacccccttctgtgtcgctgggcttcaggacaaggggcaagagaggcaaccagggagacaaggggaagtgtcttggggacagggggccacagcagttgtggccacatggtaccccagggccgacgcagggccgacgggcaagaggctgttatctccagcctggcgcttccgggcctttcttgaggccaccatgggaatgtgatgtgtgagagaggggctaggagagacagagacacacgcacctgggatcggcggtccggacaggggcagggaaaccacacgccctactttgccctttcctgtccatcccagacctactcagatccctcagtgcctaagaacacaggacagtgaggactgggggttaggggacggggcttagggtctggggcagggcccgtgagaggtggagggtggggaagagggagggaggggtgactgtgtggtggtgctgcctctgaacaccctccccttc

SEQ ID NO: 315643 - DNA, 382 bp, Homo Sapiens
  misc_feature (136)..(136): n is a, c, g, or t
agactggggaaggggagggtgttcagaggcagcaccaccacacagtcacccctccctccctctttcccaccctccacctctcacgggccctgtcccagcccctaagccccgtcccctaacccccagtccttactgntcctgttttcttaggcactgagggatctgagtaggtctgggatggacaggaaagggcaaagtaagggcgtgtggtttccctgcccctgtccggaccgccgatcccagggtgcgtgtgtcttctgtctctcctaggcccctcttttcacacattcacatttcccatgggtgggccttcaaggaaagggcccgggaaggcgccagggtttggaggattaacagcttttttggcccgttcgggccctgg

SEQ ID NO: 315644 - DNA, 598 bp, Homo Sapiens
ctcattttaaacaactttccactgacaacgaaagtaaagtaaagtattggatttttttaaagggaacatgtgaatgaatacacaggacttattatatcagagtgagtaatcggttggttggttgattgattgattgattgatacattcagctttctgctgctagcaatgccacgatttagatttaatgatgcttcagtggaaatcaatcagaaggtattctgaccttgtgaacatcagaaggtattttttaactcccaagcagtagcaggacgatgatagggctggagggctatggattcccagcccatccctgtgaaggagtaggccactctttaagtgaaggattggatgattgttcataatacataaagttctctgtaattacaactaaattattatgccctcttctcacagtcaaaaggaactgggtggtttggtttttggtgcttttttagatttattgtcccatgtgggatgagtttttaaatgccacaagacataatttagaataaataaactttgggggtgtatgaactgtgtttccatcctttgcatttctctgcgagtagttcacacaggtttgtaagtagtaagggc

SEQ ID NO: 315645 - DNA, 1393 bp, Homo Sapiens
tattattcacctgagtctccagtctttattgtcccatctgttcccctcactgcagcaggaaccagccccatctccactcccttccgcctagacctgccagagcaggaacctcctcaccccaccctggggccctgcctgagtcattctccgtcccccttcccccaccccagcactggggtccgggagacagtcccagccgggctgagggagggaggcagccacagcctcccagtccctccactctgccgtccagactcagtcttccagggccagaagggaagcagggaggctggaggacagggtaaaacatttgccccaggatagtgttaaacagctggaaattgctgcctagaggaggaggcttggctgaatgactgaattaatagtacatgtacagggcttacgaaagcactcaaatgtcaaaattttggcttgggagactctacccccatcctctccttttctaaggatctggatccatcaaccatttgtttccactaaaagaaaaccctggctcagaaagtctgcaagtgcagaggaatggaggatgagtaagtcacaccagcaggctggctcagatggggagaaccctgaggttgggtgaatgagtggaaacggaatgactccagtagctggctctactgcgcctttttctgcttgtggggaggctttgcattccagtagaagagcagctgggcggcgatgaggccgttgcagagagaggagaccacaaaggtcccagccatcaggggatctccggtttcctgaatggaagtgaagattcgggccagggagcccccaaacagcaggaagactgtgatggctgagagctggcctgtgtgcccgttgtggtagttggtggctgcctggagaagcctccccaccaccacagcaggcacattggaggcctggagcagggtgactacagtcaagggcgtcagaggtgagagaagcaccagcaggaccaggccgtagcaagcgaggaaagcgacacctttcacagtctgtcctctgtagtgcatgaccaggaagcagatggtgatcgtctggagcatcaggaataaggcttcaccccaagagctgaatgggaagttgttagtgatgctgtagaccatggtcccagtcaatgccactagctccagcattacagactggagactcaacccttcagcactcttggctcccaggattttaaacacctggggcagctttactagaagtgagccagccacaatgcccagccccaggcctttgctgaggagaatcttgaggcaggggacgtgaagcaagtcccactgaacgaaaagttggtcgtagcatttctcaggtaaaagaatcggcacgagcagccgtttaagcggtccgtccgcctcggccgccatattgcaaagct

SEQ ID NO: 315646 - DNA, 441 bp, Homo Sapiens
  misc_feature (110)..(110): n is a, c, g, or t
  misc_feature (387)..(387): n is a, c, g, or t
ttttattattcaactgagtctccagtctttattgtcccatctgttcccctcactgcagcaggaaccagccccatctccactcccttccgcctagacctgccagagcaggnacctcctcaccccaccctggggccctgcctgagtcattctccgtcccccttcccccaccccagcactggggtccgggagacagtcccagccgggctgagggagggaggcagccacagcctcccggtccctccactctgccgtccagactcagtcttccagggggcagaagggaagcagggaggctgggaggacaggggtaaaacattttgcccagggatagtgtttacacagctgggaaatttgcttgcttaggagggagggaggcttttggcttgnaattgacttgaatttaattagttacatgttacaggggttttacggaaagcattt

SEQ ID NO: 315647 - DNA, 1065 bp, Homo Sapiens
acagaagggaaggaaaccattttactctttttattctgctcattaatgatctgaaagaagaagatggggaaaaggggattccaccacaaggctccaaagaaccaagagtgcaaatcagtccatttcactttcactgtctgagatagggtctctaagacccaggatacaagggtggaatgtagctatatggactcgatttgcttccggaccttttccagagcctttctgtccaattgtcgctgacgaatgatgacaagacaagcgaagatcagggccacacacacgacagccccttcgaacttccaaaataagcgttgttccatcaaagctgagcggcagcttttgaactcatttctcttagatgagctgcatgtgattttctctacatatcctgtgggaccacactcaggggtagttttagcccggaaattagagcatggagagcactcttctgctaccacaaactcttccaccagccagcatggcaaatttgaggtgcttgctgacagcttctcttcctgcacgggagcctctgcttggcagagctttaaggtgaaagcacagagcaaccagcagaggtggcggccctgggggaggccaggcctcccggcacccgcaagcatggagcgccaagtgtcgcacctgtcggaacagagggacctactccacaggcctcgtgcctccgtcggagcgcagaggcggcacttactctgcagccctcccagaggttccaggtcagggcagggaaggccggagttgcctattggagcagaggatctatcaggacgtccccgttgccacagcgagaaaaatcgatatgtttttgcgggctagggaggcgagcgccttctgcggggtccgcagggcgctggaggaagggccggcgggggctcgcggccctagcgcccgctcacctccgctcccgcccccgacgcagccatctagccccgtggaggatcctcgggcgcgggaccgagctcggggcccggtgttcccgggggcgttcggtcgtcgcccgctggggcttatagtcttccgcgtcggtggcgcctcgcccacgcgtcc

SEQ ID NO: 315648 - DNA, 773 bp, Homo Sapiens
  misc_feature (23)..(23): n is a, c, g, or t
  misc_feature (93)..(93): n is a, c, g, or t
  misc_feature (161)..(161): n is a, c, g, or t
  misc_feature (175)..(175): n is a, c, g, or t
  misc_feature (188)..(188): n is a, c, g, or t
  misc_feature (202)..(202): n is a, c, g, or t
  misc_feature (314)..(314): n is a, c, g, or t
  misc_feature (348)..(348): n is a, c, g, or t
gaagtgaaagttaccttgaaagnctgcagggtattgattcaccacacaaagattgggtggaagttgtcctcctgtgacacgtgtttctgatancaaaccttactgggacctgtactgtgaagtcacatttggtcccagaaatatccatgaacttactgatntgctgcacctgtgntggtgtcaaggcnaatgcaaacaggtnttctcgaaagcgctgactgttgtctgatggttgtttgaaaatgactcctataatcttcgtgtattcagataatttctgctagactggtgggatcagttcatccagtaaatcnttaaaatggtaaatttttgaaagttttatatccnggatggactgggtgaagaagctgatgtaaagatgtgggaagttcccagttcatgttttaggtccccagaagagaaacagggagtaatggcgatgatgcagggtgaccatcgtaagtgagttgtggaatggtagatggagacaaagttgctggcataggacttgaatgtacgttggggatggacaagtctgcaggcgtcatgattttctgtgggaaccgccgcctatagagttccttaattttcatttgcacagcaggactacagccagcctttagcaaatgcagggcttttgtgagaagttcgtgtttgcgtccgtgcttgtttctcgcggcgtagcccaacagtacttggagttcagacactctaaggctcataaccatttgctttagttccgcactgtccgccatcttgcgtctgtcagcgca

SEQ ID NO: 315649 - DNA, 1663 bp, Homo Sapiens
  misc_feature (1640)..(1641): n is a, c, g, or t
cggagcgggtctccaggctggcgagcgcccaggacaggcatgttgttgggactggcggccatggagctgaaggtgtgggtggatggcatccagcgtgtggtctgtggggtctcagagcagaccacctgccaggaagtggtcatcgcactagcccaagcaataggccagactggccgctttgtgcttgtgcagcggcttcgggagaaggagcggcagttgctgccacaagagtgtccagtgggcgcccaggccacctgcggacagtttgccagcgatgtccagtttgtcctgaggcgcacagggcccagcctagctgggaggccctcctcagacagctgtccacccccggaacgctgcctaattcgtgccagcctccctgtaaagccacgggctgcgctgggctgtgagccccgcaaaacactgacccccgagccagcccccagcctctcacgccctgggcctgcggcccctgtgacacccacaccaggctgctgcacagacctgcagggcctggagctcagggtgcagaggaatgctgaggagctgggccatgaggccttctgggagcaagagctgcgccgggagcaggcccgggagcgagagggacaggcacgcctgcaggcactaagtgcggccactgctgagcatgccgcccggctgcaggccctggacgctcaggcccgtgccctggaggctgagctgcagctggcagcggaggcccctgggcccccctcacctatggcatctgccactgagcgcctgcaccaggacctggctgttcaggagcggcagagtgcggaggtgcagggcagcctggctctggtgagccggcccctggaggcagcagagcgagccttgcaggctcaggctcaggagctggaggagctgaaccgagagctccgtcagtgcaacctgcagcagttcatccagcagaccggggctgcgctgccaccgcccccacggcctgacaggggccctcctggcactcaggtcggagtggttctggggggaggctgtgaggtgaggacctgtcccagccccactccaagctgactttccaacccacaggggcctctgcctccagccagagaggagtccctcctgggcgctccctctgagtcccatgctggtgcccagcctatgccccgagggtatgtctgtgccccacctccccctgtggcaccgggccctcctgtggctgcagccacctcagcctgtgtcctcccgcagtggcgcccatgacgcagaactcctggaggtagcagcagctcctgccccagagtggtgtgctctggcagcccagccccaggctctgtgacagtctagtgagggctgcaagaccatcctgcccggaccacagaaggagagttggcggtcacagagggctcctctgccaggcagtgggaagccctgggtttggcctcatgagctgggggtgcagtgggggactgccctagtccttgccaggtcgccagcaccctggagaagcatggggcgtagccagctcggaacttgccaggccccaaaggccacgactgcctgttggggacaggagatgcatggacagtgtgctcaagctgtgggcatgtgcttgctgcgggagaggtccttcactgtgtgtacacagcaagagcatgtgnngccactcccctacccccacgtg

SEQ ID NO: 315650 - DNA, 1570 bp, Homo Sapiens
acacaactaagcttttattatactgtttaagaagggaagcaattgcagtagtatttcagaagctttatctttctttaaatgcaatatatgctcataaactctaaacagtattttaaaatatacaatctctccaaaagaaaatattcaactaaagatagataacttttagtataagcaaaatgtcacaagattttaaaattaaagtcatcagatttttcacagcacattgtacagaaaatttgcaagcttcctgtacagagcagtataatctttactcttgagcaagtcgttcaataacacgccggtaatcttccactagttcctgaaaactctcttccagctgttcatgttgcatgcttatttctatttggttcatctggtttgtcagttcttctggtctgagacattttctcatcttagcaagatctctctgctttttcttatatgggctaattagtcttcttttaatatccagtctgtagcttctgtattgttcggcatcactcatgtcagttaccagtagtcgaagaatttcataaacccttctagcgtgttgcttatttattttgaacttctgttgtgcctctatcgccatatcttcattgaatccttgcattaatttttcccgggaaaaacagggcaaatcttgacaaagcttcacaagcacaaagtctcgtaatttcacatagcttttggatggatcttccgctgtaatatcaagaactgtaggaaattcagtgtagtatctatgaactgtttcaagaagttgagcaccatggccttgaccttgaaatggagtcaaaatcagcatctgacttacacgtggccgggttttgtctgggtacacatagtaattatagactgtcatgtagcctacggtcgcaaagagcgtagctccatccttattatacttctcaaatactagaaagtagtgccatctttcatcatccacgtcaataaagctagcagtttcaataaaccacatcaaaaaggtctgaagcctttcatgatattctcgaaagcctctacatgtcatgtcagccttatatatctgaaaggtaaagttttctcctcctgttggactgagaactgagtaggtatgaagtaaggttccgaatggcttgaaatcaacttccttttccagtaaagaaaggaaatcattcgtgtttgtgcaaaatccaggtggaatgatttgtctaattttgccctcaacatcatctgcctctacacagtcaaagttctcatcaactttagatgcatattcaacacggaacattgttgacaggctaccagcaatatagtataacaggatctttagacccttgtaaccaaaagcagtttcatcatccccaaagagttgatgggtatactcaggaaagaaagttctaatgtcattttcaagatcttcaggaaaacgaactaattttagttcaattgctgtgttggtgttacatttgtactctgccagtttcttctccactgcactcttatattctaccaaaaatttctccatagcaccaaatcccgccatttccgagctacgatcacccgcggctgaggaaggacgaat

SEQ ID NO: 315651 - DNA, 1051 bp, Homo Sapiens
  misc_feature (71)..(142): n is a, c, g, or t
  misc_feature (209)..(211): n is a, c, g, or t
  misc_feature (213)..(213): n is a, c, g, or t
  misc_feature (260)..(260): n is a, c, g, or t
  misc_feature (268)..(294): n is a, c, g, or t
  misc_feature (296)..(296): n is a, c, g, or t
  misc_feature (298)..(309): n is a, c, g, or t
  misc_feature (312)..(314): n is a, c, g, or t
  misc_feature (316)..(321): n is a, c, g, or t
  misc_feature (323)..(323): n is a, c, g, or t
  misc_feature (325)..(329): n is a, c, g, or t
aaatccccaccaggccccctttttgttttcttatggcccccggggggttttctccttttgtgggaagaaannnnnnnnnnnnnnnnnnnnnnnnnnnnnnnnnnnnnnnnnnnnnnnnnnnnnnnnnnnnnnnnnnnnnnnnaaaaaaaaaaggggttttttaaaaaagtttttttcaagggggcccgaaggcggcccccacaaagagnnntnttttggggttgggggttggggttttttaccttgggtgggggttggtnttgtttgnnnnnnnnnnnnnnnnnnnnnnnnnnngntnnnnnnnnnnnnttnnntnnnnnntntnnnnntttaacatatcacaactaagcatttattatactgtttaagaagggaagcaattgcagtagtatttcagaagctttatctttctttaaatgcaatatatgctcataaactctaaacagtattttaaaatatacaatctctccaaaagaaaatattcaactaaagatagataacttttagtataagcaaaatgtcacaagattttaaaattaaagtcatcagatttttcacagcacattgtacagaaaatttgcaagcttcctgtacagagcagtataatctttactcttgagcaagtcgttcaataacacgccggtaatcttccactagttcctgaaaactctcttccagctgttcatgttgcatgcttatttctatttggttcatctggtttgtcagttcttctggtctgagacattttctcatcttagcaagatctctctgctttttcttatatgggctaattagtcttcttttaatatccagtctgtagcttctgtattgttcggcatcactcatgtcaggtaccagcagtgacagcaatgggatgggcaggcaggtggtttcatgagtccctgggcagtatgcgtggtgttggtgatggcagtagcagtggcgggtcaaccgtcaggcccccaggcagcaagcacaggcggcagtggtggtggcaatggactgggctggccagtccccccagagcacatttaggggggtcctggcggtg

SEQ ID NO: 315652 - DNA, 373 bp, Homo Sapiens
  misc_feature (96)..(113): n is a, c, g, or t
ataaaacaaatcctttaatttttcaagtgtttaaaaaacaattttatacttaagccagccttgaagataagcacaaaatttaccagtttacatttnnnnnnnnnnnnnnnnnngacaacaactcaagcacccgctctgtgcatagcactattctaggtgcaataaaagggaatcttaaccttagaaatatgagttcactttctgggattgtattatctccttttccagagagtaaaaataaataaaatcaccattgtttactacagatctgccccaaaccacatctggttcacagaaaggctaatttctgccaaattaaagatgtaatgaactcagttcctgctttcccacacgaaagcagttccttttcctg

SEQ ID NO: 315653 - DNA, 1646 bp, Homo Sapiens
  misc_feature (304)..(318): n is a, c, g, or t
taaagcgcgtcccgccatgttttgaagaagttgtttggccaatttgtgcctatgagaagtgggggccgaatagagacccttgaagggtcccgcaatgcttattttgtgccgagggaaatgggggaaaaaatctccggagatttgaaaaaggtggtaacagtggggtttaggtcccgaaaatggggttgaaaccattggtaggttttatgaaaaaaattgcaatttttcgttccaaattgggggattaggaaaactcccttttatttgcaacccaggggaggtaagttttaagaattttaggggnnnnnnnnnnnnnnngccaaaggtaaggtctaaaactagaattaaggtccattttccaatctcatggtctcatcccccaagataataaaatcgctccatgagttttttggttggtttaattttgtattttaataaaagcaaatgcaatgtaacaaaagcgtgttgaagcatatcatggtttaacttactgctcccaccacaaaatattttgtcttttacttatcgtttcagaaatcagtaccattaaagccttaaacagaaaactaattccaatctgaaaaaggtacaaaaaggcacataaaatcccagtgcttctgtactgtaaaattcaagtgtaactgagctcagtgtttttccaaacagtatggatcactgatattccctctgagcccaaattggtttgcagcctatgccaaagcctccagcaagcactgtgctagtagactacaaagttaaagcctagcttctgaatgctttttgggaatatcagttgaaattgtttgtacttgtccaaaaaccaagttcaccctgaagttcagtcatcacctccaccatacatgtcagaaagtttcttgaaccgtggcccccagtcgttcaggtaatcatagtcctgctcaccaccactacttgaggaattaagggagctcaaggacccagcagtggagccactgccttcatagtcaaacactaacagggagtcatatggtggagctgtggggtcattttcagccgctttaaggccctcattaatgaagtccccaatgtctccagggtgtggggctgcagatcggaccggatactggggctcggcgtggatgggtctttcatccattcgtcggattcccacaggcttgatggcatcaggctccacagtgtcaggctgctgcagctggctcaagtcatagtcctggtcttcttctcctccaccttcttcatcatattttaaaatattatctcttacatcatcttctggatcaattaaaagttgtttggcctggcgttctttatcccggcgtttcatccataccacaaacatcagcacaaggataagcaggatgatgatgcagagcaggatggcaatgatggcaccggtgccaagccccgcacccacaatcctgtccacatctgtgcagtccccgttggagtcacactggcaaaccttcacgcgcaggatggaaatatttgatttgggaggattacccgaatctgtgattatgatgggaacttcatagataccagcttcaagaaattttatctttaaattaagctgagcaaaatcaccattaagccgagtgatggtccaatttctcttaatagtcaccaataaattctacttcctgtcc

SEQ ID NO: 315654 - DNA, 931 bp, Homo Sapiens
ccggatttcaattcctgaaacgaggattttggcccttcgggccctggggttgcacaaaagccattctggttccaggtagtgttttggagaggcccacaaaagcatgggggagccacagcagccggcccagggttttcagctgtgcccgcaggagaggctgcttgggctgagcagcttgtagaggtcgaagtgtgcaccctcgccccagccctccatgaagaagagccgtgcctcgtgggccaggccggggaaactgccgcagggtgtagaagagtggcagcaggtcgtcatgaaagacgtgcatgaggttgtcggggttgaagcggttggcgatgagggccacgtctggcacgaacaccggcttgggcatgaagcgcagggcagcagcaggcagctccacgaagttgaagtactgagtgttgtggtcctccacggtggataggtcgagcagggctggctggaagcgccgggagcccaggttgggcagcatgacagaggtgttgccatggaagaagatgaactcctcagcctcgttggagtagcagagccacttgaagcggcagatgcggtctgtgtgcgtgcggcccgtgcacaccatgtgtgtgccgccctccatcaggatctgcagtgccttcgggtagtcgatcctcagtgctggggctggctctgtggcctgtcggctgagggccagctcctcctccagtgtggctgcatgctcacgcagccgcacatgcttccacaggaccgctgccagcaccgacaccaggagggcgttgaacaccgccgagaggtgcatcctaatgccactgtggggccctaatgagatgacggccactggaaagcaccacaggccaggcaggcttcacccatccctatgggcatcctgagaactggtgaaagcctgaagcctggactccgcgggacgaagccc

SEQ ID NO: 315655 - DNA, 616 bp, Homo Sapiens
aggttaaaaaaaaccagaagggtgcatttcctcaactggcaggccaaataaatacagttcgcacttgtttgattaaaaccgtgtagcattgataaaccagattagaaagatccaaaatatccttaaaggcataaatgcaaataaattttttaggcaaatacagatgaaaatataatgggctaatttattaatgattaagaatatattcactaagcgttttcatggatttgggagtcttgttcctatattagctttcattctagacaattaatatttatatagggaaaggcaataagcaagttttttccagtcattaagtgtgacttttatgcctagtaagactgatgcaagacatcttttcctaaagtttagtaaacaactttaataagctcctttttccccctacaagagcttgtaatattagtcaactggtattccaactgtctcttaaggggaaagggcacttttcaaaagtctttcactaaaaaataataaaagtaccagttaaacaaattctaagtactgaataagcaaattaaaggtacaattaaacctaggaaccaatttttagagttaaaactttggaggagagaacatactatataggtttttatta

SEQ ID NO: 315656 - DNA, 1581 bp, Homo Sapiens
  misc_feature (740)..(740): n is a, c, g, or t
aattttttacaaaaccgtgtgtcccggccaatcaggacagtgcaggcctcccccaggcattgaggcctgaaggaggaggccatcatgaatgagcagctgccaaccccagaagaactgtctgcccttctgcataggggccagtgtgaggaaggggtccgactggaggctctgccctgccccccaggctgctgggagagaaggccaggccctgggttcctggtgctcctagtgccaacaatgtgcgacattatccaaccactgtgacgccaatgatgactgctaggaggacgacggtgatggacacacagatggcaatcaagactttcttcttcctcgccttcttctggttctccagggccgtcttgacgtgctcctgcccacgttccacgtagtccgctgagctcaggatgttcttctcaatccgattgatcatctccccctgcatctccacttcggtagccagaaaagtgaatatgtcgtgcagctcacgaatactgcgttcaagctgctggatctcactgtgccgggccgagatctcatttaaggcctgtcgagtcacctgcgtgtccttcaggatattggacacaaacacctcgctttgcccactgtccagcatctgctccaactcctcatcagacatcatcccagcattgggtgatcttcagctgctccgaatccgctccacgttcttctcccggtattcggactgcattgaattgcacttgttgatgagctccacngaattgctgggacaggaccccatgcaggggagttcctcttcagtgttgcccaaggaagttcctcttcctgacttcttgaattccacctgggtttttctcattcttgtgttgacggagttatagttctcatcagcttcctccttctggggctctatggccttcagctgcaagcggatctccctccccagctgtttgatctcatcgcgcaggttctgcagctcctgcttcatgctctcctcgggaaggggcgtggccaggatggtgacctgctgtttctccaactcctggactttattccccagtttgacaatagtctgccgaattgtccggaccttgtggaagaactcctcgtccgggctccccagccgtgccgtgcccgggtgcaccaccagcgcgacccgctccttgtcctcttcgtccgagctgtcatccccatggtcgcgtctcttccttgcccgaggctgggaaggtggagtcggaagttgttgcgccccgagcggaagcggagatgcctggacgcgagaacttgctaccgtcaccggaaccgttgcatcttccaacggaaatctggttgccaaaaggggtaggaatacgtcatttgtacgtaatccgagacacgcatctcacatcaccccatggtgcccccaccgcgtcacgtgaccagcccggtcccaaactcgtggaccgcagaatgtgaccctgtgactgtcacgtgtcccggctctgtcgccgtcgtctctgggacgccgttctcatcacgacgtccccggcaccccaacgaccgagcgacgcccacacggcccccgcgaggtggggaggggcgcgccgaccacccccagag

SEQ ID NO: 315657 - DNA, 581 bp, Homo Sapiens
  misc_feature (295)..(295): n is a, c, g, or t
  misc_feature (303)..(303): n is a, c, g, or t
  misc_feature (307)..(307): n is a, c, g, or t
  misc_feature (309)..(309): n is a, c, g, or t
  misc_feature (311)..(312): n is a, c, g, or t
  misc_feature (314)..(315): n is a, c, g, or t
  misc_feature (317)..(317): n is a, c, g, or t
  misc_feature (320)..(320): n is a, c, g, or t
agctgcacgacatattcacttttctggctaccgaagtggagatgcagggggagatgatcaatcggattgagaagaacatcctgagctcagcggactacgtggaacgtgggcaggagcacgtcaagacggccctggagaaccagaagaaggcgaggaacaagaaagtcttgattgccatctgtgtgtccatcaccgtcgtcctcctagcagtcatcattggcgtcacagtggttggataatgtcgcacattgttggttgagatgttgtgggctgccccctggcctgccccaagccnttgccccngccntncnncnntnatncagaccctgttctccctcctttccttacaggcactaggagcaccaggaacccagggcctggccttctctcccagcagcctggggggcaggcagagcctccagtcggaccccttcctcacactggcccctatgcagaagggcagacagttcttctggggttggcagctgctcattcatgatggcctcctccttcaggcctcaatgcctgggggaggcctgcactgtcctgattggccgggacacacggttttgtaaaaaatt

SEQ ID NO: 315658 - DNA, 1059 bp, Homo Sapiens
  misc_feature (35)..(35): n is a, c, g, or t
  misc_feature (95)..(95): n is a, c, g, or t
  misc_feature (183)..(183): n is a, c, g, or t
  misc_feature (200)..(200): n is a, c, g, or t
  misc_feature (325)..(325): n is a, c, g, or t
  misc_feature (365)..(365): n is a, c, g, or t
  misc_feature (381)..(381): n is a, c, g, or t
agtgcatctcatccctccctctcttcctctcttgnaattaggattgaaagttctggtgaagaacctgggcttcacaagaagcagtctgtctgagnagggccaatacacccggttggctttggtgccatgcttagagttagcatccaaggtgttaacagagctcttgtaggccgtggggcccgnaacggggaagggccggnccacccacacccctgggctcgttagacctgtcttcttcatctgacatcagttcctctgtcacatcattccacagacgttggtcctcaggtccaaaatgcctcatgatactggatcggttgcaaanaagcggatatcggcgacttcggagtttcttctcctctttntcctcaggccctttangggggttcaggagctccttatcagtgtaattgtggggactggtcaccagctctgcttgagcttttccagaagaaacttcactactgaaatatccaagaggacttgatgctttcagacccattgaatctcttgtcattggtgatgtggttatgcacattgtggaccagtttagagagtacaagatcccgcttgcgcctggagttcttctgcccacttcctctggtcctgcatggggaaacggtcagccatagagagtgtctcagctccccagtgctcacagggcctgactcttccaaggcactgtccagcgcagctggtcctgtctctggggttgcccgctggattgccagttgtgtggctggtgagagttgcttggcataagcagggaccagaactctctgtactgcaccctcagaggccacgtaatcatccaccagaggattgagcaggggggccgcctcgctgacagccagcgtgcaccctgggagccgcatgtccctctgagttgctggaaagcccaaaggcccaggccccactgaggctgctcacagctgcagcagctcctcaatcaccacctgcacgccgctgcccacgctgtcacactcctcttccacggcagacagagccttaaaggcttccccgggactttccttgagaggcccaggctccctcaggtgg

SEQ ID NO: 315659 - DNA, 1092 bp, Homo Sapiens
ttaaagggggaggagttttttattgtgggaggtgtctggaactgcaggaaggtcagcagcgcagtggggcgcgaccccagccagctggcagttagggctgggctgggcgccatccgccccgtttcccatctccctcggcgcatccctggggagccgccatcactcggcagattccgcatcaaacctaaggtcctggagaacctcgctgatcgcctccatggttttaattaccttcattttcagctgctgcatccgtacagcgtcctcctgccccgccagctctggcgtctccatcaactgcagcagggccaccgtgcccagccgcgtctgctccagctcctgcaggctgcgcacgtggccggcgagcagcggctgcctgcgaggcccgcccagctctgcttccaccgccagcacctcccgcgaggcggcggcgaaggcctgggtcaccccgtgcactgtgctccggtagcgcgcgaagtcgtagtcagggccgctgcgcaggtactggcggtggcctctgcggcatgtggggaccctgaggccgcgcccccaggctctcaggccctgcaccggcgccaaccacctgaaaggcccccaggaagtgtccccagacaccagaggggaggactggtaggtaggaaggacgcttcctgactcccgcaggggaacgcgagacaggcccacccctgctcttggggaggagagagaagccacgaagagtgagtcgtcgggtagtggggacgtgctgtggggcctttttcgtgaaggtgaggacccggtgccccgaaatccccgccccatctgactctgcagccacacaaggacccagctcctcctccaggcacgcccgccgagaacacgcccacgcccggagcgggcgggggaccgaaccctgagcccctccgcgcccccactcactcctccagttggcggaagccctgcgcgcgctcagcctgcagctggtggatgcgctgcaccagcgtgcggatcggggcgtttttccagggccacgccggctcctcgcgtccccgagcttcggtggcctcctcagcagcaggcactgcagggaccgtagctccgccgcggtctcgg

SEQ ID NO: 315660 - DNA, 733 bp, Homo Sapiens
actcatctctctgggtagacgggatcaaggaatcctctccgcgcgggcagagccctgcagttctatgagccgttgtacaaattgatcgtcagttgagtactgcaggccagcaggacacacgagacacaggctggagacatccgatgggtagtaagcagcagtgttcagcttcaggcattctacaagctggtgtatcctcttaacttgcccatctatggacaggtcatccagggaggagcgggtggtgccctcatgtcctggcatgtccacgcagaccgagtgcaggttctttggaaggaacttgaccactctgagccacatatccttgtgggcagagaatccgtggagcatgaggatggagggtttgtgcccaggcctgccccggaaggaataacagaactgatagtcttcatggtgaacatagcggacttgcatgcccaatgtcctccgccagtaccaataatagattcttatcagtgctgaaggccacagaagaaatgcagccacaaatgccaggattgggatggccagcgtgccgcccgcaatcacaaacatgttaaccacatcaagatccatcgtgctctttcaggctggctgactctcttcaaagagcacagccttctttcccagctgctgctggctctggcagaagctgaaaatgagattctgaccagcctcagccgcgtgggtcccgccgccgggcccggacggcggccgtcggtctctagcgccg

SEQ ID NO: 315661 - DNA, 740 bp, Homo Sapiens
  misc_feature (642)..(642): n is a, c, g, or t
  misc_feature (646)..(646): n is a, c, g, or t
cagccaagagttctctttattccctttgatcctcccccaaggtgagggcttaggcagctgtagaaccccaggaaagaacggaatccaggcaatctgtttagagaccccccactccaaatttatccttttcctttccttcccctaagatgtttccagggccctctggtgcccacactgtcctcttccttccacttgggggtggggaaatccttcctgcgaggtcagggcatttctctacaaagtggcctgaatgaggccaggccctgagaaggagccaccagctggaggaaaggggctccaagccttgcttttaacacccctgcaaaacccccaccctcccaagatgttcacaaaaggtgagaaattcaggtacgaaaccatcaatggacaacttgaaaatgcatgttcctcaggcctatgcagttcccagagactcttgacaccggtctctgctgaggctcccagcctcagtttctcccacagcagcacgggccccactgtgctgctcttcaggtccccacagccctgcctttggttcctggacatttggtattctgccctccactctggtactatcagagtagggcaggctctggattaaagcttttagccggtctaaagctactttcttcaaagacagtntggnggagaggttgctggggcatcagcctggcttcccacagctccttaggcaagagcttacccagcagctgtgagcaccaagctggccagcagaggct

SEQ ID NO: 315662 - DNA, 366 bp, Homo Sapiens
ctgagttgcagctcatttttgaatttcttcgttgtccaatgtctttatagctttattgcaaagagcccttttttataactagcactcagctcacttaatcgtatcttccttatgttatagtttggatcttcttagtaattctataaatagaacttttcctacaaagttttcactactgagatgaaacattggggtagttcaaatacaggagactaacctcaatatatacatgtagttttttctgtctccattattactattttttttaaggtgttgagaggcatttcttgtgctgaacatgaatatttttaagatccatataaagctaataaagtgaccttattggtcatattgtcattatctctt

SEQ ID NO: 315663 - DNA, 675 bp, Homo Sapiens
  misc_feature (134)..(213): n is a, c, g, or t
gtgtatggcctctttatactccttgaggtaatgagccagccccttattagtttttcttttggctttcctgggtacatcatcctcagctgggcgctttcctgcagcccttgtttcactccctggctctccttcannnnnnnnnnnnnnnnnnnnnnnnnnnnnnnnnnnnnnnnnnnnnnnnnnnnnnnnnnnnnnnnnnnnnnnnnnnnnnnnctttccttcttttgcctctccctcactctctggctttcctttatcctttaacatttcctcatctcctgttttgcccttgttttctgtctttccctcgttttctaacttcttgtcttccagagtacaagttacttctggctttctctcgtcttgtggctgttcttcattttccatctttccttggtttgaagccattccttcattttcactgtagagtttttccatgtcgagatttcccctccttttcctgtcctgcggggattctggacaggttgctcctccttttcaggcttcgcagagcgctgggaacaacagacgcgcagacctggaagaagctggaccaagaattaggagcccaggaaccggagcagacgagacccagccgcggggacagagggcaggcactcggaccggtgcctacatctgcgcccgtgcagatcacgtgaatgccgcagcacaccc

SEQ ID NO: 315664 - DNA, 778 bp, Homo Sapiens
ttccaatactttatattttattatttttatgactaaagaaatctgtttttaggagaaaaatggacagatgaacaaaaaagaacagaaaaaatcacccagagataaccactgttaatcttttagtggacacagctttcagaattgttttctatactatattactaggtaagtatctttgtagttttacaaaaatgtactgatgccatatatttggttctgcaagttgtgttttttaattttacaatgcaccatcaacattttttccatgtaacagatgaacatttcctactgagaacactgcattgcagataggtcaaaaggctgctagcaacaggagggatgcctaaagtaaagtattaccgtaacgttaaagcacatggcctggtaaatgcctgccagggacactacacataaggaatgtcttcaatgtcccttcgtggggccctgcagccacccctgaattcccttggacctctagggtagaaggggtcctgtaaatttctttgcatccacaaaaacgcccccaatttctgtttgctttttctcttctcatcctgcaccttagccatattgtcaaattctcttatcatgtcctcattgctgaaattcatatcatgtatggcctctttatactccttgaggtaatgagccagccccttattagtttttcttttggctttcctgggtacatcatcctcagctgggcgctttcctgcagcccttgtttcactccctggctctccttcactctctggctttccctctatctctggttttc

SEQ ID NO: 315665 - DNA, 1385 bp, Homo Sapiens
  misc_feature (64)..(78): n is a, c, g, or t
  misc_feature (131)..(131): n is a, c, g, or t
tgtgaccggccgcgggccgcgaacttacggcagggtgtaacataccaatagacgccgctttatnnnnnnnnnnnnnnnttttccccagatttccggggcacgggaaaactgccctcttatatggcaatttnttctccgctcctggtttttctggcccaattgtaaatgcgcgcacgggggccgggggggcggatctaaattttggaataatctcggaagggcttcgcgctcttgggggaaccccgcgcgggtgggagtggggagttccccaggtaagagggcgccctcccaggaaaactcccccttgtcgggggaatttttgtttcacagggaacccgctttccggggttgtgcccgcccccggggggtgtttttgtttatttttgggggagagaaaatgccccaaggccccttagggtccatgggcccccgggggttctcccttgggggaaaacacgcttatgggcccaggtgtgcaccttaacctatctggggcccccgggccgccaaaacggaatggttttagaaaagcttcttcgaggggccgaggcggcccgacagggatgtagtaggggggtggtgtttgggttttccgtttatgacactttattgatgctgggggggtggggaggagacctggagaaatatgtgggggcaagagtccccaggtggggacagggaaagtgttgaagcctggccactactgggcagggaagacagagttgccactgtatgcacaggggatgagcagctgccggtactccaggggcaggtgccgctccactagcacgtgcagtgagacttggtcagtgaccaggccctgccgccgcatcagcagctccaggtcctctggcttcacagtcttgcggccagcatgagcagcaaatacctccagatcatcacaaagatgctggaaatatttatctaggcacttctccaccatctcaagagccttcctctccatgggcatcttggcatagaagctaaagagtttcacatagtggctcagtccagccttgtggggatcttgccggggcctgggggcggtggtccggggcctagggggatgcctgaccaacagaggctctgcaggctctgaagataagactgcagcaccaggcgctggggctggctcaagaaactgatgatgtcgcctggcctggagagactcaggggtgctggaggccgactctggacttgctgccctgccagaggcatcctcatcccctgaagatgctcctggcccgtcagcctcagcagtcccctgggatccctctgcttctgtcacctctgtgtgtccctcagcctcttctaccctgctgggtcctttctctgcctcttcaactccatcgtgtaagggctctacttcatcttctccagagaca

SEQ ID NO: 315666 - DNA, 650 bp, Homo Sapiens
  misc_feature (29)..(29): n is a, c, g, or t
  misc_feature (74)..(74): n is a, c, g, or t
  misc_feature (122)..(122): n is a, c, g, or t
  misc_feature (261)..(261): n is a, c, g, or t
aggtggcttctggcagagggcaaggaggnacaccccgggtctgcttcagttgcaggcagggtattaagctgggnaagaggaaattctctccaggaccctctccaaggtaaggactcctgggnagaagacagcagcttggttcacagaattcccgggaccagctggcagagggagcgtcgtgacagcttactcctcccggagcttctcgggggcaaggctggtgggctgggatgctgccttccgccggctgggcttgccccnacctaaagccagccccagccccagggctgccagggccaggaagtggatacagaagtagatggaggcccagtaccgaagggtgtcggccaaggagagcagcacgaagcccatgcacatgtagtcataggcgcgcatcttcaggaaccagtgcacccagtcccaggccttctggccccctgggctcagccgcccccgcagggctgactccagccggccctcggcagccaggcacagcgggatggtcaggaagctcaggtagtagcccgggtggaggccgtgccagtaggcgctcagcagcatggtccaggcgctcctgaggaggaggctgggagtcaggacctacgagtccaggtccccagtgcccactgcccccagatccaggagtccag

SEQ ID NO: 315667 - DNA, 2276 bp, Homo Sapiens
acatttctttgtccaagtgttgcgacaatcgtgtgctcgcccatgcaaggctaaaatcgggggagggtgatacgtcccacacgggaaggggggcgtttccccgctttcccaggggccctagcccccagaggtctgcgtcccccctacattgttggaagccaacggagaggggaattttgctccaataccgcggctgcccccgggggcccccttccggttttgggggaagtggcagatgctctttgggataccccgaaagctgacccaggggcccagtgattctggtctgggacaatacttgaatttgttaggagttggaggtggcctctgggcagagggcagggaggacacccccgggtctgcttcagttgcaggcagggtatttagctggggaagaggaaattctctccaggaccctctccaaggtaagggctctttctggggaggagacagcagcctggttcacagaattcccgggaccagctggcagagggagcgtcgtgacagcttactcctcccggagcttctccggggcaaggctggtgggctgggatgctgccttccgccggctggggctgcccccacataaagccagccccagccccagggctgccagggccaggaagtggatacagaagtagatggaggcccagtaccgaagggtgtcggccaaggagagcagcacgaagcccatgcacatgtagtcataggcgcgcatcttcaggaaccagtgcacccagtcccaggccttctggccccctgggctcagccgcccccgcagggctgactccagccggccctcggcagccaggcacagcgggatggtcaggaagctcaggtagtagcccgggtggaggccgtgccagtaggcgctcagcagcatggtccaggcgctccgcaggacataggaacgggcaggtgcgctcttgtagatatactgcgccagccaccactgcaccgtcatgttccagtaccgcatgccatcgcgcacccgcacgcagaaatctgtgctgtagcagtcgatgttgcggatggtctcatagtcatactccaaggaagccgccttctccggactgctggggggtgggcattggagggtggggccgcctccggcccgggctttggcggccacggggtaggccccaaagccggcggcaatgcagccgcactcggcggcaatccaggccacgtagaagcgcatgcggaaggcgaagaagacggggatcatcgtagaagaggcgggcgggcacgcgggcgggcgtagaaggcgtcctcgcgcacggcctccagcgggaagaggtgagaggagagcaggaacagcaggccgaagagcgggccggccaggcgcggcgcagcaggggccgcaggctgggcactgccccggggaagggctgctccagccagtccaggtaggtgcggtagcggaagaacgggcctgtcatgattcccacgtagcagtagctgtagctgagtgtctccatcagggagggcacgtcgggcagcagccccagggtgggccccttgctgaagcctgaggccatttccttcctctgggccagatgcaggtcctggacttcactggccaggcccaccagcttcagcgtcagcagcagctggacggcattggtgaagggcgtgggagtgggcaggcccaggaggctgagggctcggaagaacaggagataggagaaagtccaggccagagccagggcgtggcaggagcagggctgggcctgaatgagggcccaggtcccgaggatggtgaccagagaatgcaaagtgtgggggccacaggtgaacagggtgagccccaggcccacagcggctgctccccatctcttcagcccaggaccggctttcttaaagaggaagccgatggggatggagataagaagaaccactagatacgtccattcttcaggcgacatggtctgagctgctcgccgggcaggaggcggccgagcagtcccagcccgcttgccgccgcagctccggccacgcctcccccgcccagcgcgcccccgcgccgcctgctccttctgggcgcccgccgggctgcgcagatcaggccggggaagaagccacggtcagggccccgggcgggcagggaagaagccccggagcagaagccgagagcgcgagtcggcaacgggattcgagtccaggtccacactgggatccgagctccgagtacgtgaaggggcgggcattcgggctcggaacaaggaggagccaaaagctttggacccgaaggggaacagacgggctccggaaag

SEQ ID NO: 315668 - DNA, 1105 bp, Homo Sapiens
gggagaaaaaatcctgtattgcgagataacgtggacctattgggaagcttggcagatctgtacttcagagctggagacaataaaaactctgtcctcaagtttgaacaggcacagatgttggatccttatctgataaaaggaatggatgtatatggctacctactggcacgagaagggcggctagaggatgttgagaaccttggatgccgccttttcaatatctctgatcagcatgcagaaccgtgggtggtttctggctgtcacagcttctatagcaaacgctactcccgggccctctatttaggagccaaggccattcagctgaacagtaatagtgttcaagctctgctacttaagggagcagcacttaggaacatgggcagagtccaagaagcaataatccactttcgggaggccatacggctcgcaccttgtcgcttagattgttatgaaggtcttatcgaatgttacttagcctccaacagtattcgagaagcaatggtaatggctaacaacgtttacaaaactctgggagcaaatgcacagacccttacccttttagccaccgtttgtcttgaagacccagtgacacaggagaaagccaaaacattattagataaagccctgacccaaaggccagattacattaaggctgtggtgaaaaaagcagaactacttagcagagaacagaaatatgaagatggaattgctttgctgaggaacgcactggctaatcagagtgactgtgtcctgcatcggatcctaggagatttccttgtagctgtcaatgagtatcaggaggcaatgggccagtatagtatagcactaagttgagcccaaagacaggagtctctaaaggggtgcagaccatgggacggggagagtcccggtgcatccaggggggagtggacgacatgaagggggggaaaaaaggacggagggacacgtgagcgcaggggtacaggagagtagatacaagggggggaaagacgagggcgggaagatcgaagagagcaggatgccggcaaacagaggaggacactccaggcgaaggaagcgacaccccagggaggcaaaggagaaacaaggagcaccgccggtaggg

SEQ ID NO: 315669 - DNA, 981 bp, Homo Sapiens
ttcaattggcacaaaagtccacgtcatttaataacaaatgctccccctaccctcaccccatcacagcaccctgagaatcacgggtccaactgtgtgggagggggctgtggaaagccaggatgaatgggggcagtaggtagggggctgggtgggcctctgcacctcatgtcactggctcctgggagcagagaatcaggctgggcacagaggcctcttctctgaccaggcaccagcagggcagctccatccaagggaagcgagggctgcccactggcccagccagagagcatgaggggtcagggctggctggagaaaggaggaggagaagtgactctggtccatcacacttaggtcctctggcctgcctctgccacatccagctgctaggggctggcctcagccctgtgaggggccgcaggcactcactccggccttgccttcttggccttcttctcagacctcaccgcctcatcgtgggctttccgcttctccgccagcttgttggcctctcggatttttcgcctcttgccaaacatgatcttctggtacaggtacttctcccgcttcttcatcatcataatggccaggcgcttggcctcactctcctcctcctgggccagccgctgcttatcctccagcttcaaggtgcctgccatcaccctgggcttcttccccgtccatcctctgctcttccagggctgccagccgggcctcttcctccttttctgaaccagcctctgcatcttcctcctcctcctcattttctccctcttcatcaccatcaccttcgttgttgtcgtcctcttcctcctcctcttctgactcattcaggtttcctgggtcctctccccgctgcagagccagcagcttcagcttctcaggtggaacgtaatctccttccttctcggtcacaaagggtgaaaggtgtgggggcagctgcaccccagagaagtactctgccacggggagaaggagcctggc

SEQ ID NO: 315670 - DNA, 869 bp, Homo Sapiens
  misc_feature (203)..(242): n is a, c, g, or t
tttgcgtgtgcagtaacagctttaatctgtggtggcccctgccctcctgcatccaggcaggaagagccgtttctcggggaattaaagcaggagcgtttcccacactgtctcctgggagtccatgcttacagtgacagcactgctgagtggtgccatgtcaccagggctgggcctgggcacagagaggcagggtgccagtcttnnnnnnnnnnnnnnnnnnnnnnnnnnnnnnnnnnnnnnnnttcatgtgtatacacagttttctcttgaaagtattaaaaaattgatcaaccttcaatctataaaaaatacctactctacatgatagaaaaatctctcctccaagtttacactgatttacacccaaggctttccccaaatgtacaataggaggcgacctcttacatcctagcgtggaaggcggcggatgtggggccacacgtacacgcgcgcgcacacacacgcagcgggtggccagtcttggtgatggggtctgggcccacccgggaatgctgggggttggggcaggcccgcggtcctgcggggtgacaccgctgtgcctggggtgcagaccccgagaagcgcaggccccctcctgctctgctgtgagtcttccctgccctctccctcctgcaacatgcaccctcggggaagaaccacgactaagtgagacacacccagaagaaaacagggttcccgatgtttggattctggcctgggaagtgcgtggggagggtgtggcctttaggaggccgggccaggccgcacctgtggagaagcagcacctgggagccagaggggcctgtggcatccaccctgcccagggagagagcgccacacagcggtcatctcaggtcctgatgtcggag

SEQ ID NO: 315671 - DNA, 360 bp, Homo Sapiens
gttcattcatccgaagtgaatgtggattaattggtttctcaggtagattatagagattaagagaaacagggcctcaaatcagaaacctatatactaacaatatttttcagtatacaatttttataatagacagaagggatacccccatgtagttattcattttttaaacattaacttatctcttactgtttacttggatggtattacagatgtaagtttgtgtataatacttcagcatcatatttgagttaaagcatcatcattaccttgttttgaaacttgctatctaggcgcgctggacatatgctacctattttttcccttgaaggttatattgctggcttaagcattccctgggtg

SEQ ID NO: 315672 - DNA, 882 bp, Homo Sapiens
aaacaagtaagccaaagcacatagaaatgtcatgctatgtatatatccggttattttagctttataaatgagtttagttctgcaattattggggattcattgcaatggtctctgaaactttgagtcctatgtccatttgtaaacatagagctagttgggtgcatttttggagagaatagatgttttcttctcaaacggctgcactcagatgttgtcaagcagagcaagattaccagctgctgaggacaagtccaagttgcaactgagtggagaatccatctaagagtacagaatactttcccatttagagggtgttcttcctgagtaatttagcctctatttcaggatccaggcacggcagatgatccccgcacatgaaatcataagtgcaaccagtgatggttacttttcctctctaaatgaggcagccacccctgccaaatggacgggtctccctgtgctctaaggctgctgctggtattgcccttccgtggctgtgtagaaatcatccaggacgctctgtaagtagtcaaacgttggtctctcttctgccttttctttccagcacattttcataatgtcatagagctcatctgggcagttctccacacggggcatcctgtagccctgggacagggcggtcatcacgtcggcattagttctccctgggtagggaattttcccataggtgacaatttcgtataggaggattccaaaggaccacacatcagacttaatagtgaaacatccaaagttgattgcttctggagccgtccacttaatagggaacttagcaccttcccttgctgtgtactcattatcttcaattactctagcaaggccaaaatctgcaattttgcacatgagtgactcggagaccag

SEQ ID NO: 315673 - DNA, 419 bp, Homo Sapiens
  misc_feature (358)..(358): n is a, c, g, or t
tttaagtaagccaaagcacaaagaaatgtcatgctatgtatatatccggttattttagctttataaatgagtttagttctgcaattattggggattcattgcaatggtctctgaaactttgagtcctatgtccatttgtaaacatagagctagttgggtgcatttttggagagaatagatgttttcttctcaaacggctgcactcagatgttgtcaagcagagcaagattaccagctgctgaggacaagtccaagttgcaactgagtgggagaatccatctaaggaggtacaggaatactttcccatttagaggggtgttcttcctgaggtaatttaggcctctatttcagggatccnggggcacgggcaggatggatccccccggcacatggaaatccataaggtggcaaccagtgat

SEQ ID NO: 315674 - DNA, 1940 bp, Homo Sapiens
  misc_feature (20)..(20): n is a, c, g, or t
  misc_feature (457)..(471): n is a, c, g, or t
  misc_feature (781)..(889): n is a, c, g, or t
cccccaaagcacgctttgtngagccaggcgggcctcactttttgtggggttggagccggacataggcggcgctatgggtgtggtgtctatgtgccgcctgagggtattttatttatggagacgagggcgccggcacacaatatggagagacagttgtgtctttctgcgccgccgcgcggtgtttgtgcgcctcgcctcttgcgggcaaaatactagttgtggtgtgttggcggaggggcgcataccacaggcggtggcgtgcggtgactaggtcgcgttcggaggggaggtctccaacacgctgttctctcgccgcggataacggcgggttgttgttaaagagagcagcgcggcggcagtatttcgcgtcgaacaagaataacgtgctataacgtagctgtattctccccacccatgggttttcttcgggggggcgggcgatgataccaaagcagcnnnnnnnnnnnnnnnaaccatgtgggcggatcagagaattttccggaacggggggacgcggtgttttggcagggaagggcgcccatattattgacccccgcggagagaaccccccccggggatttttgtgttaaggaaggcttgcgtttgtccgcagaggggcgttttacttttgttggggaaacccaaggggggaagttcagggccgggtatttgttttggggaaaaaaatttgtgggcggggttcggggccccaaggggggcctcgcgcccaaaggaatggttttaaaaagtttttttaggggcgagggcggggcacaagggnnnnnnnnnnnnnnnnnnnnnnnnnnnnnnnnnnnnnnnnnnnnnnnnnnnnnnnnnnnnnnnnnnnnnnnnnnnnnnnnnnnnnnnnnnnnnnnnnnnnnnnnnnnnncaggagattcttaggagagttttattcattcattgatccagtatttacaggggctagaggggtcaagctgtgctcagcccagaggcagctgccacacttgccagcaccccccactcagtcactatgtacagataaaggggcctgcttggatcacctttttcaaagccatctggcagaggccatggggctgtgttggggcctgggctccagaggcactgctgggcccattaccccttggcatcaggtcctctggaacacaggggctccaacgggttgtcttgatcctgctgtcccccaccctgagtgccttgcagaggctgaggaaactggagtagcaggaagagctgagtggtgccagcttcctataagcaaccctgtctctgctacccctgagagggagacatggtaatactgaggggctggacagaggctcttctgagcctcaagcgccagggacagagacctagagcccaatttaggcccatagctagggccacaacactgaaggcgaagagccctagaaccttgctatggagagcagtcttgaacagcctggctagaacaaggaagacagttcacaggccactgaacagttcccacatgctctgctcaggccatgggatcccagcagcctgctcaccccaaccccactgggacaccctactcccaacccagcccagtgctgggtccctgagtttggcactctcctaagaggaatgaagagagaagacctggcttccttacaacagggacaggctggtggctggggctagagcagcagggcccagagcccagggcccacccaggcccccagctaggaccctgtagttgggaccgtggcatgatacaaggacctgggcccaccaggacagctcctaggagagaaagcatagtcaggtaggaacttatgtcaacatggtggcatgttgggttggagcccagaaaaatagatgtctctgataggtaaaatatatattctgctgcccaggcagaagggccaggtcctgctgctccacagccggctgtggaggaagctgcagtacctcgctgt

SEQ ID NO: 315675 - DNA, 1279 bp, Homo Sapiens
  misc_feature (103)..(103): n is a, c, g, or t
aagacacaacttagagctagtctaagtagcagcagacacctcaggcaaaggatagtaccactctcgtgtgaaactcctgcagggtcccttaataacaaataanagcatctccatcaagttcttctggatggtgttattgctgtacatctgttggtgagtcactgtgctgtgtttgctttgaagggatcttccaatgtatctccaatattcctttcttatagtgtccttttctttagctaggatttcacataactctaatgctttattaagaatgtcttccttattgtcacactgattttctagcatgtcttcatagatatccacaagaaaggcaattaggtagggggaactatgacttggttgtaaatcaagtaattgatttaacagattaggatatttggaaagaccacgatcctgcaaaatccctttcaaatagttccatgcactttcattatgtggtactagtttaatcatttccagagtgtattggacttctctctccaatacagcacgatcattgtagccagtggtgttagaaataacgaagtatctttggttccagacagagttatttctcacatcctctttcagaagttggtccacatactgcagctcattatcccaaagtttaaattcctgaataacccattgtcgatgctgccaggcatgataattctttgcatcctgattaagaatatcagcaataaattcaagctcctgagatggatctcttagccattccactaatactcgcctatgatgccaaacttgatagtttttgggctgctcctcaattattgcagtgatgtagttcatttcctcatgtagatccttctgaagtgacttcaaaagaactctccggaaatgccacactgtataattggctgcatttaactcaatagcatcccgggttagcttaaaagctcgttcacttctttcatcacgctgcaggacagctcggaagtaatcataaacatctctaaatttgtcactataaatgatgtggacctcgggattggggccatcattctgcggcaccggctctatatcagcccattctgctctgtccctgtacaggacataggagggcgagtccaggctcacaaacccgtcgtccatgggggacgccgcggcttccccagcctcggccgccatctcttccttgtgctgctgctggggcggcggtgggtgcgtctggggcgggggttgcgccgtctgcccgggctcgcccccttgcgcagcctcggcgaccccctcggtggccgccatctcgcctcgg

SEQ ID NO: 315676 - DNA, 612 bp, Homo Sapiens
agagacacagctataattttattacaaaccggttcttttggcattagttggttacagtgatagcaagataatgtgagtgtgcagaccagctctgatggaacgactgtattccctgcttactgaaccaaacttcggctacctcacatccattacatacaagtgacctgcagttattactgctacaaatcttgacgcatgtaccactgagggaggagctgatgctaagggattagattatatgttgataagactacaaaagttcctttatgggactttttcttcctcctcccatccaatgactttgctttagaagaatcacattacttagagctagtctgagtagcagcagcacccaaggagcatcagttcttgttaaaaagcaatacctgtgtgatgcacttttacaccacaggcaaagggaaggaccactctcgtgtgaaactcctgcagggtcccttaataaaaaataaaagcattccatcaagttcttctggatggtgttattgctgtacatttgttggtgagtcattttctgtgctgtgtttgctttgaagggatcttccaatgtatctccaatattcctttcttatagtgtccttttccctcgtgccg

SEQ ID NO: 315677 - DNA, 989 bp, Homo Sapiens
  misc_feature (812)..(812): n is a, c, g, or t
aggttaaagtagagcagaacagtgaaccatgtgccggctctagttctgaatctgatctccagacagtgtttaagaatgaaagcctcaacgcagaatcaaaatctggctgcaaacttcaggagcttaaagctaagcagcttataaagaaagacactgccacctattggcccctgaactggcgtagcaagttgtgtacctgccaagactgtatgaaaatgtatggagatctagatgtcttattcctgacagatgaatacgacacagttctggcttatgaaaacaaagggaagattgcccaggccactgacaggagcgatcccctaatggatacccttagcagcatgaatagagtccagcaagtggaactcatttgtgaatacaatgatttgaagactgaacttaaagactatctcaagagatttgctgatgaaggcacggttgttaagagagaggacattcagcagttctttgaagagtttcagtcaaaaaagagaagaagagtggatgggatgcagtattactgcagctagagtggagtatgaagctttctcattcaagccaatgaaaatgtgcttcccattcttggaataaaagaggtgtggttcacatttggccccctttccgtcctcctctgtttggagaggcctcgcgctcccttcattctctttagctgcagtagccaccgtgtggatgctgacttcacagccagcgtcctctgtgactcagctgatgcagctcattccacagacttctccagtgtactcctactccagtgcacccagggttatttgcatagtttttaagtttgattntgttttgagaaagcttggtgtcttgcttaatgatctcgtatttcacttccagatgtgtgtgttttgccacagagcttgtgcctttcagaaccttcttcgcaggcatcaccgaagggctctctttcccgtacctagaacctctacagggtcccttggcccttgcgtggtgccttggtt

SEQ ID NO: 315678 - DNA, 1671 bp, Homo Sapiens
  misc_feature (1472)..(1472): n is a, c, g, or t
  misc_feature (1510)..(1510): n is a, c, g, or t
gggaaggcggctgcaggctaggggcggctcggagtccgctggccacccagctgagaggagaggcgcccccggggacgcactgagattatgaggctctggcctccactggccactcactcgtgaccctttccaccacggcggagccttccaagcctacctcctgccgtgtggtgatctacctgcagcgggagatgtcgggggacacctgcctgtgcccagcctcaggggccaagcccaagctcagtggcttcaagggaggagggttgggcaacaagtatgtccagctcaacgtgggcggctctctgtactacaccactgtgcgggccctgacccgccacgacaccatgctcaaggccatgttcagtgggcgcatggaggtgctgaccgacaaagaaggctggatcctcatagaccgttgtggaaagcactttggcaccattttgaattacctccgagatgacaccatcaccctccctcagaaccggcaagaaatcaaggaattgatggctgaagcaaagtattacctcatccaggggctggtgaatatgtgccagagtgccctgcaggacaagaaggactcctaccagcctgtgtgcaacatccccatcatcacatccctaaaggaggaggagcggctcatcgaatcctccaccaagcccgtggtgaagctgctgtacaacagaagcaacaacaagtattcctacaccagcaactctgacgaccacctgctgaaaaacatcgagctgtttgacaagctctccctgcgcttcaacggccgcgtgctcttcatcaaggatgtcattggtgacgagatctgctgctggtccttttatggccagggccgtaagctggcagaggtgtgctgtacctccatcgtgtatgccacggagaagaagcagaccaaggtggaattcccagaggcccgaatctatgaggagacactcaacgtcctactctatgagactccccgcgtccccgacaactccttgttggaggccacaagccgtagccgcagccaggcttcccccagtgaagatgaggagacctttgaactgcgggaccgtgtccgccgcatccacgtcaagcgctacagcacttacgatgaccggcagctcggccaccagtctacccatcgcgactgaccagaccctcagggagtcagggcacgggaggccctatctcccatcctgtggaacccgccccattggccaccccatgctgctgctgcctgggtctctgctctagcacccagaggcatgacaggccctgctcagaggtcagagggtctgggcagaggagggaccacattcccctgccttgcccctgagcacttctggagactgcgtcctgtcctatctgctcaccatcacccttcctgcccgacggagctgcttctgctccctggggcatatggactgacccacctcctgctgagaaccttcccctaggccctgtgcagaagggctactgcnctttaggcctcagctggggaaaggcagttctggtgctngagaggccctggtgcagaaagtgggacgtcttttttcctaaggggttaaagccaggcttgataggtttgcttttaaaaaatattaggaaagggatattctaaactagtaatggggacccggccttttttttgcctccaggtggcaagaccttaatatgaca

SEQ ID NO: 315679 - DNA, 830 bp, Homo Sapiens
attgccttcctctttatcccctccctcagattgattctgcagggaagtggggattagggtagaaagacatgggtcaaggagattatcaacctcctgaataacagtacaaagtgctttaaagaaacagatcccacaggcatggagaagggccaagggttctgtcatatgtagggtcttggcaccctggagggcaaaagaaatgctcagtttcctcattactagatttagaattattcatttcctagattattttttaaaaaccaaacttatcaagcctgtgcttaaacaccttaggaaaaaagacgtcccactttctgcaccagggcctctacagcaccagaactgcctttcccccagctgaggcctacggggcagtagcccttctgcacagggcctaggggaaggttctcagcaggaggtgggtcagtccatatgccccagggagcagaagcagctccgtcgggcaggaagggtgatggtgagcagataggacaggacgcagtctccagaagtgctcaggggcaaggcaggggaatgtggtccctcctctgcccagaccctctgacctctgagcagggcctgtcatgcctctgggtgctagagcagagacccaggcagcagcagcatggggtggccaatggggcgggttccacaggatgggagatagggcctcccgtgccctgactccctgagggtctggtcagtcgcgatgggtagactggtggccgagctgccggtcatcgtaagtgctgtagcgcttgacgtggatgcggcggacacggtcccgcagttcaaagcctcgtgccgaattcgccacccaggcctcgcta

SEQ ID NO: 315680 - DNA, 837 bp, Homo Sapiens
cagcttaaaacatgtctctgcattttattttaagaaaacacaaacctggtcacaaaacatcttcagagaacaggataagtgaagaacaaacaaaatgcatgggaatagcaaatttggggccacggtcatgttcaaggggcggagctgacatgacatcattttgttcccggaaaagcaaggttaactcaagctgtgaagcccagatggccaatagatttacagccatctaaagaagagcagaatgctctcaagagctgaattatgatgacttgtaggtattgattagatgagaacaccaaccccatattcagcagagagttagggaatgagaagtagaggggagatggtggtggagatcgtctttatgtagttttcaaagtcacttccgaaaaagaagatgaggtaatagttgaatatgccagcaacggacatgaggaacaggaagagtatgatgcgtttcccaaatatgtagccaggggtgctctgcgttctctctcctaggtacccgacaaagtacttttgcctcacaaacaagtacatcagtccagcaaacgcagcaggaacttggctgcaaagtagccccgcagaccagagcacagcgaggaaagtggggtacgcatctacacagttctggttggcagtgtagacccgctcaaaggcaagtgttccggtcctctggaagctcctcccattctgggtcctgctttcgtgctccactttatgggcaaagaatccattctggaccacgctgatgagggtgacgatggccaacaggacaacattgcctacagtttcttgatccatgtttgcttcaggctccccagagaggactgcccc

SEQ ID NO: 315681 - DNA, 833 bp, Homo Sapiens
ggttcacaaaacatcttcagggaccgggataagggaagaaacaaacaaaatgcatgggaatagcaaatttggggccacggtcatgtcaaaggggcggagctgacatgacatcattttgttcccgaaaaggcaggttaactcagctgtggagcccagatggccaatagatttacagccatctaaagaggagcagaatgctctcaagagctgaaatatgatgacttgtaggtattgattagatgagaacaccaaccccatattcagcagagagttagggaatgagaagtagaggggagatggtggtggagatcgtctttatgtagttttcaaagtcacttccgaaaaagaagatgaggtaatagttgaatatgccagcaacggacatgaggaacaggaagagtatgatgcgtttcccaaatatgtagccaggggtgctctgcgttctctctcctaggtaaccgacaaagtacttttgcctcacaaacaagtacatcagtccagcaaacgcagcaggaacttggctgcaaagtagccccgcagaccagagcacagcgaggaaagtggggtacgcatctacacagttctggttggcagtgtagacccgctcaaaggcaagtgttccggtcctctggaagctcctcccattctgggtcctgctttcgtgctccactttatgggcaaagaatccattctggaccacgctgatgagggtgacgatggccaacaggacaacattgcctacagtttcttgatccatgtttgcttcaggctccccagagaggactgctctgcctccagctgcacaacctgccctgtacaggaaggaagggccc

SEQ ID NO: 315682 - DNA, 497 bp, Homo Sapiens
tttccatttttgtcatgtagaccagacccccaatacttaggaacacccaggtacttcagcttacgggtacgaatccatttctgaatttgctctggttttgcagctcgttggtagaactttaattcagtaaaaagaggtccattgtcactgggttccacttttacaacacaaggtgcatcactgccaactgactctgaagaattcatatcagcaagatatatacagccaaagcctccttggccaatgggtaatcctactttccattccttttttgccatgtcagttattatctctccaactgcaaattgttctgcaagatgtctctttgcagagctctgtcttccagcttgagctgcttttacacgaggcattttcacctaagccgcagacccgtcgcgttctgcccagtacgaacttcccgccgctttcgccgactcgtaactcggcagcggcgccggccccttcgcaccctgcagtatggagccttcccattgccc

SEQ ID NO: 315683 - DNA, 982 bp, Homo Sapiens
cgagggtgtttttccacccccccacaggaagctgtgacgggccctgcagccccagggaaggaggaagggtcctgcaagtagaccctaaggcccagcgcggcccagggggtcataagggctcttctggcggtggcatctgctggggcttccaggcggggcgggggctccacgcaacccgctgaccatccagaagtagttttgggtgcacctgggccctgcactgtcctcggtgaaccgatcatttccccatccactgcaaacacacctttcccatccttgggctccaagcggaaggcgatccacgggcacatataccaagtaggggcattcatacgtccatatgcctgcccttctccatggccaggaagaggcgcagcagcatggcacgagacactcccgcccgcacgtagaacagatgcatgacgccagctgcacagcggcccatgggtgcagcaaacatctcactgcccaggtgcgagtgcagcagtgccaggactagcacaaagtcctcgtcgggcaccactgtccagtgagagggcactggctcctccagtggcacaaggtgtgcatctaccgggccctgctggaccacaacgggggaggcaggtgtcttggaacccactcttcctacagggaggtaggccagtcggccgcggtaggtgcgcagggctgccagacgcaggaaggtgcccagagtgaagcgcatctcccccagacgccgatacttctcactctctaggtccacatcagcaatgaagccccaggccaggctgagcacagagaagaggcgcagccccgaagccgtgtgcagagacagcaggttcatgggtgacagcagccggcggcacagcaatagcgtgcagttggtcaggaggtcttcattggtgacctgctcatagccagcataatggttcaaggaagctgccagcgcgttgccagagcctgctgggaggctacacaggggcttctggatggcggtctc

SEQ ID NO: 315684 - DNA, 1356 bp, Homo Sapiens
ccggcttggcaaagacatttaatttttggaggaaaaactgcatacgcagtacaacttatatctcaggcgaaatgtctcagaatcttcctgctcattggacagaaactcagcttcaccacattgccagccgggagaccatggaagggaactggcgccactgcccccagctgcccttcccaggggcaacttcaccaagatgcggaaatcctgggcccaccccacagtcagtcatcgctccatttcttcctggcaccaccacctccatctggcctgctccccaaccccccagaagcaggtgggcccaggctccaggccagtgcccccatcaagatcagacgtaaggcatcttcccaccgtcgctgtgctccggggacttttccaatccttccttcctctctgtccagaggctgccaggctgagggggccaccgtccaggtggaacaggcacaggcatcggggaatcagatggtatcagtggggatagggcacagcactttcctgggagccatgtgacgccagatcttcctctggcagttcccactggctgtgggaagtggttttcataaagggggccaacttccaggaacatctagggctcgggagcaacccagcattgacagtgaatcagaatccacctagagctggccatggcccaggcagggggtgtcttccccacagcccccaggagtggctgcacctagtgggcgcagcatttggccttcctcgcgggccccttgttcagagccacagctgcatccccccgtggagcctggccctcctcgtcgcttctctgcagtagctcttgggccactgtattgaacacctccgacacctggtggttcagtttggccgaagtttccatgaacagcaacttctggctgtcggcaaactccttcccttcctggaaggtcacctcccgctcctggctgaggtccgtcttgttgcccaccagcatcaccaggacttctcctgggtgcagctcctcctccaggtccttcagccactgctgagccttgaggaaggaatccttcctggtgatgtcgtacaccagaagcgcagcgttggcacccctgaagtagaggtggcagacgctgtggtacttctcctggccagctgtgtcccagatctcaagcttcagagaggtggcacccacatccaccacctttgtgaagaacgcacccacggagccacttcccaggagaaccagcttgaacacacggggctggctgggggcagccctgggctggggggtcctgtgtgcctgtgccatgccctgttccccaggcccggtcacttgcagggagctgaagagcctgtcatcaccagtccacagcgttgctacctgtctccgctttc

SEQ ID NO: 315685 - DNA, 1450 bp, Homo Sapiens
  misc_feature (1111)..(1111): n is a, c, g, or t
atatatccaaaagatggaatgaaggcacgaaccattgcaagtcggaaatgtatgaacgtaggcatgctaagttgaaaatagtcttaaaaaactagtgaaaacttcatgtatataaaataattcagaaataaatctgctaacattcttcaccaggttgcatgtgtgaatccaacatgttccttcttcataaatagtcaagcgttccttcagtggtgtttgtgtggtctgtcttcgtgctggtcaccagcctcagtatgtctggtagacgtcggggatggggacctgaatggcagcagcagggaaggcctgaggtatgtagcctgcgtatcctccatacacggcggccgcggctgccgcgttcttctgtagtgtggcgatcgtggctgtagctggagcagcaaatggcatgcacggcatcctcgcggctggtgaagtgcacgaaggcgtagtcgcggatcttcttgacgcgctccacgcagccggggttgaactggccgaagctcttcttgatggtgtcctcggtggtctcgatcatgaggttgcgcacgtagaggatcttcacggtctccatcacgtcctcgtccacgtcgatctcaggctcggcccagtccacggcgatctggtggccccacagctggatgcggccaggcatgagcttgcggcgagccatggcagccgcgcggtggctctcgtactccacgaatgcgaagccgcggttcttcatcttgtcggccgcgctggcgtagacgatcacgtccagcacgccctcggtgaccttggcaatctcctccaggatttcctcgcgcttcttcatcttggggatcccgccgatgaagaggcggcagttgtccacgctgcagcacacgccgagcaggcggcccgggcggatctcgtagttgttgagctcacgcactgcgcgcttggcctcgtgcttgtggcagtacatgacgaaggcgtagccgcggttcttgccgtcaaagtccatcatgaggcgcagctcgtagatgcggcccacggcctcgaacacgggcaccagctcgtcctcgtacacgtcgcgcgggatcttgcccacgaagacctcgcagccacgctgcgggtgcgggccctcccngccgggcggtgggccgccgtacttgcgctgcccgttctcttgcaccatgctgtagcccgtgcgctccatcagcgccagcagtgctgcctcgttgggcgcgcccgccacgccctcgggcaccttggccgaggacccggcggccgagtcactgctcatggctgcggtggaatcctctgcggtcataatgtcaaaggcatccacagctggcggaaaccaaaaccactaatttgatttgtctggtcctttataagtcgcagaacgagagtatacaggcaaattcaggcagcttccttgggattcctctgttcaatttttgcagtgccctttgaggcaaatcct

SEQ ID NO: 315686 - DNA, 304 bp, Homo Sapiens
tgagccaccatgtccagcctatcctgttctttataggtatttattatagcagtatccctagcctctacccactagatgccagtagcaccccttcacccacagttgtctcaaccaaaaatgtctctagacattgccaaatgtcctaggggtggggaggagagaggcaggattgtccccgttgagaagtactggtctaaaggcattcaaactcagtgccccctgtttaggctaggtcttgatgttttgtgggcctttggatgttagggtaggcctactaatcttggctgagtgtccctagagcacc

SEQ ID NO: 315687 - DNA, 1299 bp, Homo Sapiens
  misc_feature (963)..(963): n is a, c, g, or t
gccgccgctccaccaagctggaggtggcggtgctgcaggaaagtgtcgcaaagttgggcatcgcatccagggctgagattgaggactggttcacggcagagaccctgggagtgtctggcaccatggacctgctggactggagcagcctcatcgacagcaggaccaagctgtccaagcacctggtagtccccaacgcacagacaggacagctggagcccctgctgtcccggttcactgaggaggaggagctacagatgaccaggatgctacagcggatggatgtcctggccaagaaagccacagagatgggcgtgcggctgatggtggatgccgagcagacctacttccagccggccatcagccgcctgacgctggagatgcagcggaagttcaatgtggagaagccgctcatcttcaacacataccagtgctacctcaaggatgcctatgacaatgtgaccctggacgtggagctggctcgccgtgagggctggtgttttggggccaagctggtgcggggcgcatacctggcccaggagcgagcccgtgcggcagagatcggatatgaggaccccatcaaccccacgtacgaggccaccaacgccatgtaccacaggtgcctggactacgtgttggaggagctgaagcacaacgccaaggccaaggtgatggtggcctcccacaatgaggacacagtgcgctttgcactgcgcaggatggaggagctgggcctgcatcctgctgaccaccgggtgtactttggacagctgctaggcatgtgtgaccagatcagcttcccgctgggccaggccggctaccccgtgtacaagtacgtgccctatggccccgtgatggaggtgctgccctacttgtcccgccgtgccctggagaacagcagcctcatgaagggcacccatcgggagcggcagttgctgtggctggagctcttgagggcggctccgnaactggcaaccctcttccatcgccctgcctagcacccgccagcacacccttagcctccagcaccccccgcccccgcccaggccatcaccacagctgcagccaaccccatcctcacacagattcaccttttttcaccccacacttgcagagctgctggaggtgaggtcaggtgccttcccagcctgcccagagtatgggcacttaagtgtggcccgaacctggtacctggctgggacaggcacttggaacttttgggaactttcctcgaatgtgtgggcccaggcccccaactttgtgaccccattgtccttggacctggattgtcacttttggcgg

SEQ ID NO: 315688 - DNA, 1154 bp, Homo Sapiens
ttgagggggatctcactttaatggagaggacgttatgacctccggggcatggctcttggccttgggcaagcccctggttttcatggacctgtcgatccacttgaggaaggcggtgaccttggtgtagatcccgtacttccccttacgggcacagccctctccccagctgacgatgcctgtcacgaagtaggtgtccttgaagcgggtgacgtgcgggcccccgctgtccccctggcaggcatcctcctgcttggtgtcgtagccggcacagaacatgttctgggtgatgatgaagctgctggacagcttgcagctgttgcggtccacgtagggcacctccagcatcttgagcctggtggactgccggcccttctcgtgggtgcgcccgaagccgctcacaatccccgtcttctgcgtcatcagcgtggactcggcccagtcacgctcggggaggcaggcaggcgccacgttcatgcggaaggtgatgggggtcttgagccggagcacggcgatgtcgaagtcataggtctcctttgtgaaccggttgtgcttgatgaccacctccacctcgtgcaccgcctcaccgccctcctcctgctccgtgttccggtcccctaccctcaccttgaatctcttggcttggtagagacagtgggctgccgttaggatgtagaactcgctcagaatagttccaccacagaaaccctcgttttcctcattgatgagcagggcctgccagggacactccccgtccttgcattcctggcctcccacgatcctggtgaggttgttgtcgcccctctcaggctgcgtctggttgaagtcaagcaggtcgaaggggttctcggtggggtccaggtcggctgcatcatatggcttccatgtgatgctgtcaggggcctccccgctgctgctggtggcctgggccactgacctcttcctgcgttccagggtctgtttcccacaggggtagggccctgtgggaatgcaggccttgccgttgtcagccagggtgtacccgcgggcgcaggagcacaccacagagttctgttcctcgtggcagaactggtcacagtccccgttgtccaggctgcagagcttccgtgtgaataattcacagtttttgccttcgaatccttctaaacaggtgcagg

SEQ ID NO: 315689 - DNA, 1011 bp, Homo Sapiens
ctgttctttttctccgtttttgtctttgggtcctgtgtgtcttctgtcttattttgttctttgcttgctttgttcttttctcgtttctactggcctctgcttttcagtgctactgctggaggtttatttctgatcttataactgttcttagtctccagtaatttcacattaatttatcctttatagacttaccaacttaggcctgatctgatgaactctttagtttctgtatggtatgcttgagcttttgacatctgttacgtatttttcaaatactccctcaggtgtgagcgttgagttttcctggtagtaatgttaatctagtatttaaattgcttctttataatttctaaattactggcggaaatgaaatggaagtatcaaatttcttcacttttgaagatccattgccacaggaaagatctatgtctctttcctctatgattttaactgctttcctcatttgctgttgttcccaagtatcttgcttttcatcttcctgactttcttcacttgtttcttcatttctgcttattgattcctcagccatcctttgtctaagtgtttgaggtcttagagtaaatggtattctcttttcatggtcatcaggctcactctcagggtcatcttcgctctctctcttcataccagagatggaggaggtatgttgtacatccaaagaaatatagtcatcttgggccctggccaattcacgttttctgcgggctgcctgaataaaagctgcatctgggatcttaactgttgatgaaagttctttttctccaagagagctagaactgtcagaagacaagccctgatcatccttactttctgaggagtgatgtattttatcctcttcatctgtggacacatcaagggttctggattctgagccttcgtccgcgcggggagccgctttggtggcagcgccgggagctcgcccagacccggccccggccacgagggccggacgcgtgggtcgacgatatcccgaaattccggaccgtacca

SEQ ID NO: 315690 - DNA, 611 bp, Homo Sapiens
  misc_feature (101)..(101): n is a, c, g, or t
  misc_feature (232)..(232): n is a, c, g, or t
gaactgacgctggctgaagcaatcttacataggtaattgccaaggggccagcggtattcccatagctgtgtagacagcccatagtggcaaagtcagtaaanagccataagtcagccagtgctaaattcaaaagaaaaccactggccacagtcttcagcttcatataaaagtaaatgacttatcaccaccaagctgttccaaatattcccaccacaaagatgatactgtatanagtaggaatcataataccatcttcagtagaagagttgagaatcagatcacctgggtcgaatttgttgcaaacactatatcaaatacacctggtgccgactttctgggatggcatcagtgagttattcagataaaaacccagccattttagatcaatttgtcaaatatcaaacccgcgccccgggcgctgcgtcacgtcccgccgagggccggctgcgctggtgcgggtctcccgcccgccgcctcggcgtcccggctgtgcgccctcactcgctgggtccgctccagccgctccccatcgatcaccgccgcggcccggcagagctgctagcggcgcgccggtccagacgtcctgtcactcgctgctgcctggggtcctg

SEQ ID NO: 315691 - DNA, 1394 bp, Homo Sapiens
  misc_feature (757)..(768): n is a, c, g, or t
  misc_feature (948)..(1002): n is a, c, g, or t
  misc_feature (1364)..(1364): n is a, c, g, or t
gttaggcacatttaacttgtaaaagttagtgtccctcaaattctagaacattcatagacatgaaaatcacgctgcaaaacaaaatccccttcgttcaaagagagctgctcttgcagtctctgctctctcatttctttattcactctataatattcagtgtggggttacctgtgctccagcgccaagtccagggggtggagaataacaagggcagagacatagtccttgccctccaagcacctgtgatggtaatacagtgccatgggagcttggtgaagggcctcagccggctgcagagttaggcttatcaaaagtggtgatctctacggtgaatcctggaggacacaatggggtggggaacagaaacagttgttccaggcaaagaagggaggaatctgtgccaaggcccaggggctggtgaacctcaggcgtgtgctgggggtgctgcctcctcccaaatgtcggggcacagggaagtcagtctcgcttatcatggtggccacttggctctacaaaccccccattgcccaagtccccacaggcaaaccacacaactgctcttcttctcactcttttttttaagccaagaaagaactcactgaaacagccagtcagtcagggatgagtccaaggctttcctgacagagtgaccatgtttggcttggctgaaaatcacaaagccttggtttcccagttgcgtgattctctttgttctcaaggcttagtgcagcattacagtgggatggctaaacagagnnnnnnnnnnnnggaggtctatttctttctcttcatacaaataaatatttgcccaagaatggaagtgcttaattcttaagaataaccaaatgctttggacttcttaacaagcaaatcatatacaaagcaattcagtgttcctactaattgagaaattgtttttagcaagaagatgttatgcagcatgttttnnnnnnnnnnnnnnnnnnnnnnnnnnnnnnnnnnnnnnnnnnnnnnnnnnnnnnntaactgaatcactataatatccccaaaggctggctttcacaccatccaagggtcacagctcacgctacattgaagcgtatgaaagagtgtctgcttgtgttacaaacctgatggagcagaggtggggcaggggggaaatgaaagcaaaagggacagacttgaagctgcacttttgcaatcaactaacagttaggaaggacttgacttgctggggctaaggaaaacaaatctggaggttcattttgcctgtgaaattttatactttagtaaatgctgacgccatttaaccatgaacccggtgacatttcctggcttgctgcagcgtttctgcttgtctccttgttacatttgtttgctgattntagctgctatggtttttctggtacctttac

SEQ ID NO: 315692 - DNA, 818 bp, Homo Sapiens
  misc_feature (165)..(165): n is a, c, g, or t
  misc_feature (289)..(289): n is a, c, g, or t
  misc_feature (295)..(295): n is a, c, g, or t
  misc_feature (313)..(313): n is a, c, g, or t
  misc_feature (448)..(498): n is a, c, g, or t
tgggaaacattgggccaggtgaaagtttaagggaactgctggagtccatgtgggaggccaattgagggagaaaccctgggggacagagttagggaataagaaatagtctacttggtggaccctccaaaggcccctttagtgggtctaaggggtatgacataagcntgttccagcagtgggcagctcctactcttgcacccagagccagggcactgggcctgccatagagtactccagggcagatggagcttgggagcccggtaggctcatccctgatattcccatctcntctgcngatacaagcattatatanaaccaatagtataagcagttattaataaacatatccttaatgaaaacttgaagtcattacatatgagataactaccatagtataaatcttagtcttaagatatttcatactttgaaaatttgctgaatacttacnnnnnnnnnnnnnnnnnnnnnnnnnnnnnnnnnnnnnnnnnnnnnnnnnnnatacattttgtattaaaatgtaggaagctgaagggaagaggacacttgtgtcctcagataccatttctgtcataattattggtggctcaatagacatgtcattgatccttccaatacaatggcctctcacccgatcgacttttatcttgacatcaacccacctctattcccacggtcatatccttgaccttatcattactattatggattgaattatatcgcgccaaagttcaggcactgaagtcctaacctccagcaccttagaatgtgactttatttggagacaggattgttgtagatgtaattagttgacctcgtgc

SEQ ID NO: 315693 - DNA, 680 bp, Homo Sapiens
acgcgcctgtgttgccgcccgcggccctggcttcgggcttcagggagctctggtgcagtctccgcctgtcagtgccggcagtcgtccgcggcgcccgccccggtcccgcactggtgcagccatgtcctcttccccgtgggagcctgcgaccctgcgccgggtgttcgtggtgggggttggcatgaccaagtttgtgaagcctggagctgagaattcaagagactaccctgacttggcagaagaagcaggcaagaaggctttagctgatgcacagatcccttattcagcagtggaccaggcatgtgttggctatgtttttggtgactctacctgtgggcagagggctatctatcacagtttgggaatgactggaattcctataatcaatgtcaacaataactgtgctactggttctactgctttgtttatggcccgccagctgattcagggtggtgtggcagaatgtgtcttggctcttgggtttgagaagatgagtaagggaagccttggaataaaattttcagatagaaccattcccactgataagcatgttgacctcctgatcaataagtatggattgtctgctcacccagttgctcctcagatggttgggtatgctggaaaagacatatggaaaaatatggaacaaacccgtattccagctccaagatgaatacagg

SEQ ID NO: 315694 - DNA, 1002 bp, Homo Sapiens
  misc_feature (145)..(145): n is a, c, g, or t
gggcgtgcccaattgtgggaggtttggtgtttccgccagggtgggagaaatggaaagcatgcaaggctgggcacaaaaccacgtttgtcgtttctcagacatggcccgaggccaaagatggggtttggggggcaggaacaccttntgaaagagcctttgaatgccacctcccagcgacctccaagggagcgtttccgcccagtgataacatactgatagccaacccacaacttgcgctggtccttccaaccaaagctccgctcgggctggtcccattcctgggccaggacaaagcgcagctcctgttcagtggagaaggtggcgagagagccattcaggcgctggcaggtctgcgcggcatcccagtagttctccccgctcaggtagacccggtagcagctggccgtgccttcgtagtggtgccaccctgtcgggcacttcctgctgaagcgaacgggctgcgccacgttcaccgcgtggaagtgcgaagggtcgcctcctctggcccgcccctgccgcggatccacagcctccttcccatgatgaggacgcacctccccggtcacttctggacagttggcttcgtcgctctcatcctcgcaagtcgcccagccgtcacactgccaggggagggggatgcactggatggtgccgctgcgacacgcaaactgcccagggttgcaccgcagctctggccgcagcggctcggtgacagtgagcacgagcaggaagagcagcaggaaggcgccgctgtctgccttgggcaccatttatcctccgttcatcgtccccggggcggctggaaggccggaccaggccggactgagggtcaggggaccgtgccaagcggagggtcaggcggagctgaacctgggcgaggcgcggagaggcggcgggaaagagcttcggctgggccgcgggctggcgcacactctcggctgcaacctcaggcaacgactccagctgcgcgcaattttttgaagttccggaccggtccagcct

SEQ ID NO: 315695 - DNA, 392 bp, Homo Sapiens
tctagggcaaggattccaaaagtatgttctgtataaaacttgcatagagattccaggaacacttgttcaaatgcaaattcctggtccagatctcaaagatcagtctctgcacgtttggacatttttaacaagcaaccctcatgatttttatgatccttaagtttgacaattctagggccttggtcttcaaaatgacacatgcatacccttgagaacacaccaacattttcccatgggggtaaggatacatgcatagctctatggaaaccaacttaaagatgtccaatttccatatgtgttgtcctaaaatatgtgctctgatgaggcctcttcagatctaccatttctctttacctcccttttcacaacagccatactccctatcctccaaa

SEQ ID NO: 315696 - DNA, 1700 bp, Homo Sapiens
  misc_feature (1677)..(1677): n is a, c, g, or t
  misc_feature (1679)..(1679): n is a, c, g, or t
  misc_feature (1696)..(1697): n is a, c, g, or t
ccgtgaaaatgaaatgcactccccgagggccagactcagagttggagatgctttgtttactcagggtttcagccaaggcttcaggtccacagaggaaaactcctattctggtattagggtgttgacttgcaattgtcttgaattcattatcccagttgggccgtccatacaaagtcttttgtttcaggcctgtgatcacatctttctcctcatcatggtgcacagcaaagtgattggcctgagactcatcccagccagtgaggtagatgttgtagctgaggaagccggcattgttcctttcctgcatctggctctccagcagttgcagcagatctgcaaaccactcaaaggcatgtgtgtcccggcacagccagtagaagtagatctttttgagcttcagattggtggcgttattgcaatatttgtaccagactgacttgagaatggatgcgaagggtgtgaccccaatccctgctcccactaacatcaccacctcatagctgaacacatcttcactggcagtgccaaagggcccatcaaccgctatcttaggtagtttccacgcatcttgaaactcctgcttatcacagccacaagcattgaacagcccctctgtccagtccccaacgatgcggatatggatactaaagaagtcttcctcaggggcggatgtcagtgtaaaagggtgccactccagcttggacacctttgggcacttgacaaaaatgtattgtcccacttccattttgaaccccttcttcttcatctgtagctcgatggttttgaaagggtgagtgaccaccttggtgatgaccaccttctgttgagatcgccaaaaccgcaccaacctctcacagagatacagaaacatgggacccactatccatttccaagtcataggagggtttccagcaaactgagggattgggcattcctttatttttccccattctgagattttttgttcacaaactgttatattatgcacagccaaactctctgcggtctgcccacgtacaattcgttcagctccatggatggcaaggccaatgaagaagatcacaaagagatgatgtgtgtaccaaaagacttcaaagtaagacctccggatggttttggtggaggaagtgataattaatatgaggcacagcgtgatgacaactccagtgatgcctgccaacagggtcacagccaggtagcaggcctccttcagggttctttattgtctttcgagcaaaattgagataactttcattttgcctgtctccaagttcagagagtgctactgaataaggatcagaattattgactcgggcattcacacaccattccacattaaatagatgtgcaatggtgtgaatcgcagagtgaagtgcaatcatccatgccaccattttatgaaaggtgagattcctgtccagttgtcttcgaactcttgttgagcagcacgcactggaacccctgaggaaggacagcagatttcgacagactggcaagagaatcagcatgcagtttgaattcaggcaggctgcaggggccctggccagtgccagtggtgacccaagaagttttcttgtgtaaaagaacttaggtggaatatcataaacccggtaataccagacaaagaggaagacgttcaaccccagccaaaccagaatgacaaaaatggagagcccntnattcacagcccagttcnncat

SEQ ID NO: 315697 - DNA, 773 bp, Homo Sapiens
  misc_feature (693)..(693): n is a, c, g, or t
tgctgttaatagtgcttggcttttaacttggtaccagggaattggaaggtttctgtcattttgtgacgatatttttaaatttctttgcaggtagaagaagaaaggtgccactccggcatgaagacagactcgcttagtcgccagtcacttaagctgagtgcattgtgatttccaataattgagggcagtggttctaaaagctgtctacattaatgaaaagagcaatgtgggccagcttgacttaaggccgccagcgcacagcgcggcaggacgcgcccgggtctcagcggacttgtgcatgttagctgtgtagatttatgtgagggcttgtaaaactctggtcttgtaaactagtcttaagcgcttttaatatggagacagatgagagcccctctccgctcccgtgtgggcccgcaggagaagcggtgatggagagccgagctcgccccttccaagcgctgccccgtgagcagtctccaccacctcccctgcaaacgtccagtggtgcagaggtaatggacgttggctctggtggtgatggacagtccgaactccctgctgaggaccccttcaacttctacggagcttctcttctctccaaaggatccttctctaagggccgcctcctcatagacccgaactgtagtggccacagcccgcgcaccgcccggcacgcacctgcggtccggaagntctcccctgaccttaagttgcttaaggatgtaaagattagcgtgagctttaccgagagctgcaggagtaaggacaggaag

SEQ ID NO: 315698 - DNA, 631 bp, Homo Sapiens
ttcattaatgtagacagcttttagaaccactgcctcaattattggaaatcacaatgcactcagcttaagtgactggcgactaagcgagtctgtcttcatgccggagtggcacctttcttcttctacctgggcgtcaaaacgataggatcaggctcccctcggttcccatagtagcaaatgacgtctccctttgctgtgctcaggtcggctgctatgagggttgaagccattgtacagatgggccctccatagagaccttcattccggtaggctcaggctgtcctcggttcccgtggtcagcaagtgaggtgtcccgttgtgctggcctctcgggcttgccagtccagttgcgtttgcaggtagttggtgagtgctgccagcttgccactgtgttctgatgcccagccatgtgcttccttccttgccttcctccatgtccagcccactgaggatctcgttgttgttcccccagaagtcagctaacttggagggtcggctgtagaattcatccctgttggctgccaagatgagcctgtacgcgtttttggaaacagggcgaggatcaaacttaaagaagatgatgcacatggtggtgcagggcggctctgctgacacaggttcgcaggtcgcc

SEQ ID NO: 315699 - DNA, 687 bp, Homo Sapiens
attttttattattctaaatgtggtacatattcactgtaaataatctaggaaaaaaataagacaaaaacttaagttgcctatcattttcccacttagaaagacaaccactttggcgtgttgcattttgatcttttttctctgtatagttactttatattgcttttcaggtcacatggtaaatggaaatgcagaggtattggcactggaaacttcttttcatataactcttcaggtagcataagggctccctgtctttctgttcaagtgtctcagtggagttcaaaagagcaaagaaaatgagtcttttttaaaaattgaataattagaactcatcacctatctaatgtcctcccagcatccagaaactcttgagtatcgctgtgctgagttacaaagctttgcattcttgcttccttacgaaagacaaacgccagtaaatgcaaatagggatcacctgggaatccaaagatgaaaagtgtgtttttgttaaaagggacatgcccttctcccaggaaatgtaagggccaggtctaatgtcttattaatcaccctgtgttctggtaaccaattcggatgcaagaagagtggactagcaggtaaaccccaaaagccattgattacactctatggttagaccagcctaagagatatttagctataaggctgggtgggtgcagtgcctcacac

SEQ ID NO: 315700 - DNA, 769 bp, Homo Sapiens
  misc_feature (101)..(101): n is a, c, g, or t
  misc_feature (465)..(465): n is a, c, g, or t
cagagctaacaaaggctgggcagagggccaaataatatatgaataatttcacaatgatttggttaagaatacacccatcaaatgaatcatttcacatgatnaacagagcctggacttgaatttcgtcaagagatggacgtaaaagggaatgaagcattgcttcattcccaggagggatgttctttactgcagtacccacaaaaagacagcactatcccagggctgatcttcctatgggcctccaccaatagcctttgaggtagatactgatggcttgaagagaggtaggtaaagtccaaatttgttttcaatccctgcaaatgtagcaactgccagtttgtagcccccaacgtgatcaggattcggggcaggcaggttgatcctggatttaggaactggctctgatcccatgggttttactcctccatgatcaatgtagacccatcgctgtagcaattcgtaagntcagcagagttacaccaaattggggtgaggatctaaatacacgagctttaaaaaaatggagaaatcgcagatataattagatattttaaagatttacctgatcccaaagagttagttaagaacacattatttccataccaacagctcccatccacagagcttttggtccttcgtgacgcagtatctttctagagcagtctatcactccgctgtaagtggtttgaccagcccgggcagccacttgtaatctcgtcttgataacatcagcaggggtcactaaagatgctgcagccctcccagttat

SEQ ID NO: 315701 - DNA, 747 bp, Homo Sapiens
  misc_feature (619)..(619): n is a, c, g, or t
acgatactaagaaaagcggctttttctactggctactgcgcctgaaagaggctctataagttcattcacacagctggctgatctggttttaacatgatggacaggatgagtacctagtaactgcgcagtgcttacaatatgaaaatgactacattgccctgctattgccacagagactgtgtcctgctatcaacgtgtagatgagatgaccttcaaaacgaagtaatataaaattagctctaatgagcacttcatgtgacctctgtccatatggaagaagtgaaagaactgagccttcaataagattgaacattgtctctacagcaggaagctaatactaacatccaagaggtgttactctgtaatgtagaataacagactttcctagtttgcgattagtctaatcggaaacttgggcattgttgcaatgatcttcctatacagaatctgacagttttctcacatattgatgagcctatggatcatacactgtatacgatgtgaagtggcagcaatggaatgttgagatagttctttctaatggggcaagtaccgatataaatgccacttgtcatgaggatacttaccacgattcatattgtctcagtcgtgtatctancataatactctctgatagacggcgcctggagataatttctaaatctcagagttagctcatattgtccttgtggaatgtattcatattgataatttgatatcttacttgagaccacatagataggtgtc

SEQ ID NO: 315702 - DNA, 1062 bp, Homo Sapiens
  misc_feature (105)..(105): n is a, c, g, or t
  misc_feature (108)..(108): n is a, c, g, or t
  misc_feature (159)..(159): n is a, c, g, or t
  misc_feature (181)..(190): n is a, c, g, or t
  misc_feature (263)..(263): n is a, c, g, or t
tcattaagtagaccggttaagtattttttcaaatgtttccaaggaatgttcccctattccccaaggtccatatgcatttagtaccatagcttttcccatatttcngtntttaatctcggaatccacttttgtgtatagttcatggtctatttccccctnggagaacaaactacctccactnnnnnnnnnntagtcccatatttccctcatttcctgatgccacttgtatcatattccaaattctaataaatgcataggtcttnttttgaaatctcttctgctctgctcaatcaataccacaggagtcttaatattagttgtagatgaccatgtcatctatttttgtctgttcctttccaatatttacaacttaatttttcttgttactggcgaagatctccagatctatggtggtagcaataaaaaacaggcctccattttctgttcccacttttagtgaaaatgtgcctaaactttcaccattatctctgctgcaggtttctctgttggacacagggttttaatcatatgcatgtctttctcttcagtacaaattttctggtgtcccttaagtttttagtacttgttaaagttaacctcattcgtggtgctttgcttcagaaggattatttctggggcatgatgaggtgcaaatttctaatgaaagctttcccactttcaaggctttcatggggtttttagtgagtatgaattttctggtgtctaatgtggtgtgacttgtggctgaaagctttcccacattcattgcactgataaggcttcttacctgtgtgtattctcaaatgcagacgcaagggttgagacctgagagaaagctttcccacatctcattacacccatagggcttctccccgtgtatggcttctcacatgcacagtgagagatgagctctagagagaaggcttttccacaacacattgcattggtaaggtttatcacgtgatatgaatcctcacatgcacatataagttatgttctctgagagaaggcttttccacattcgtcacattcatagggtctctctacagtgtgtatgctgcg

SEQ ID NO: 315703 - DNA, 926 bp, Homo Sapiens
ttgacatcagaactttttttattattgttttatatttgaccaaaatattctggtttagatacagatatttacagaaagtagggaggaaggggaccaagccagagagggacaggtatatgtacagggctgagctgcagagggctacaacttccatataaggtaggtttttttgtggctgttttccattgcatatgaaaatgtccatttctggtgtgtgcagacatggtggccattgcccacccaggtaccagcagcagaagactatctgacttggaaagaatgggggtttacaggagtccaggaggtcctttccgctctcctaagagccagtatgttcgcatctttccttttcccttcatttccacatccccccgaagctctagctggaagcatcctagctcatctagggcatccttggtggtagaggagacatggatcttcagcgcttgaccattagactccattcgagaagcagtgttcactgtgtctccaaaaagacaataacggggcatcttcaggtcaacaaccccagcacagactggcccagtatggacccctatgcgtcgctcagctggtcatggggtcggtggcggatgcgaataggaagaaactgcatctagtaatgctagggccatacgagcaatttctggtgcatggcgtttgacatttcggccctgggagcaggataccaccatgttagcaatccccatcgtctccaccttggtaggaaccaaagtttgccaataatggcatccaagcagggaatacggccattaagaagggtcactaccggcatgggggggtcctcctccgaacaatgtgtgtaagccaacattgtccatcgagtggatggtaaaactgttcaaaggctcaacccgtaaagttcctcccccgtttaactggctctgcacctgatgggggtagga

SEQ ID NO: 315704 - DNA, 300 bp, Homo Sapiens
  misc_feature (202)..(202): n is a, c, g, or t
  misc_feature (214)..(214): n is a, c, g, or t
  misc_feature (227)..(227): n is a, c, g, or t
  misc_feature (263)..(263): n is a, c, g, or t
  misc_feature (271)..(271): n is a, c, g, or t
ggctgttggatgtatggggagctggcagagcaggtggcagtcactgggacaaggagggacttgcctctcttctcattattgtgtcctttgctttagtgtcagtcctggacttgtgcaggcctgttttgtgtagatctgttttggaagatggcatggtctaggtggttgaaggatgtagtagaaggatggatggttgaaggtngggacgttggtngctggctgaggtncatggcccccacacaggacagttggagaatgggccntccacttngcctcgttctgcgaggggctcatgggtct

SEQ ID NO: 315705 - DNA, 664 bp, Homo Sapiens
  misc_feature (15)..(15): n is a, c, g, or t
  misc_feature (273)..(286): n is a, c, g, or t
  misc_feature (330)..(339): n is a, c, g, or t
aaaacgcttacagangtggctctggcatgcagatggcagaggacagcaagagcttaaagacacaccagacacagcccggcatccgaagagcgagggacaaagccctttctggtggcaaacggaaagagactttggtgtagagaaggctctgtgtgttaactgatgggagagactgtttgtttataaatgtgtacagttttgttttctcgtatggggagcatcatagggttactttataccagttgtaacattttcattgtttttggttgttcnnnnnnnnnnnnnnaatggcagctaaagatatacagattactgttaaattgcagtccnnnnnnnnnnaaagatattttcttgagttatttagaacatggtaagcctggtattttttaatccaaacaaaatatttatgaaatgggttttctcttaattctggattcatcatggctttctaataccaattgtaatatttacaatattcaccaaaacttagaattttgcaaatgctggaattctgccagtgtttctttgctaagccttgcatgcaaaatttgaaattttaacattggcacccaaaacctacatggaatgtatgtctggagtatttcaaactttacattgaaacataatttccttggaaaacaaaccataagcctgaggaggtttt

SEQ ID NO: 315706 - DNA, 849 bp, Homo Sapiens
ggttgaggatgtgccgggtggtgtccgtgcgtaattctgcgccgttcgcgggtgattggggcgcgtccgtcgggcttatggtgtggtgtgcgcgaggcgggtgtatggttgtcgatgtggaggtttggggttgagctggcagacattgcgttcccatgtagggttttggggtgccgagtggtttggattgtcggagtgttggcatggcagggctttggccgagtgagctgctggcagaattccagcatttgcgaattcgtgaggttgtggtgaatagttgtaaatagtgtaccattggtattagagaggccatgagtgaatccagaattaagagggaaagcccagttgtcagtaaatatgtgttgtttgagttagaggagataccaggcgttagccatgttctaaataatgtcacagggaatatctttggacatgttagaaaggactgccagtttaacagtaatctgtatatctgttagctgccagttaataaaagagaaaaagaacaaccgataaacagatgaaaatgttacaactggtataaagtaaccctatgatgctccccttacgagaaaaccaaagctgtacacatttataaacaaacagtctctcccatcagttaacacacagagccttctctacaccaaagtctctttccgtttgccaccagaaagggctttgtccctcgcttttcggatgccgggctgtgtctggtgtgtctttaagctcttgctgtcctctgccatctgcatgccagagccacatctgtaagcgttttcatcaacttctacctgagtaacactggaaactgtggatgccctcctctgggctgtgagtttcctcgcagag

SEQ ID NO: 315707 - DNA, 706 bp, Homo Sapiens
  misc_feature (303)..(303): n is a, c, g, or t
  misc_feature (307)..(307): n is a, c, g, or t
  misc_feature (324)..(356): n is a, c, g, or t
ttttcatgagaaggcacgacatcacttttatgtatgaatgtgagaagaatgaaacactacattaacagagaacaagacaaatcagacggtgagaccggacacagcttttgtccaaagtcggtttgcaggaggcggcaggattcagcgccatggggtggccacagaggacacacaggggtcagcagaggacatgtggggtccgtggccgcgaacgctgctgaggaaaggccccagaacccctggtgtatacagtccccgaaagatgacggacgatgagtgctatgtgctcaggaggccgggacntgangcaagccattccacagnnnnnnnnnnnnnnnnnnnnnnnnnnnnnnnnngggcagcaggcagtctttctccgagtttcaacttgcagcgctggaaagagcccgctccaggttcaacctccagtcgtcagagagaaaccaagaccctctggtcttcaccctcatgaccaaagtcagccgcctgtccgagcttcctgctccactccttgctgctggctagacacctggtgtttcaaggctaagacccacctggactcctacgttcccgttaatgattttggcagatggagggcagcgtggagttctgcagcacataggtgcggtccaagaacaggaagatgcttctgatcatgatcatttgtctgcagtggtcctgccagcacgtgttaatcttctttaaa

SEQ ID NO: 315708 - DNA, 392 bp, Homo Sapiens
ctcccatgctagcaagtaggaagttcggacagtttcataacatggcccattcacaatttcccattgagatttagaggcaggtcaccttctatgaatacacaaagacactattgtggtcagaagtgagctggcttagtgaacacaattctttttatactaaaaaaatttttttcttaagaaagctaacaagtaggtgatggaaacaatgaataagtttagaatttcaaggcaatttctgcagaggcgatagttacacaatcattctgttgaaagctaagatttagatggcattaggaggctgacacacagtaattactagtagtacttgttggcttgcagacaggtgggggttgggcctgcagaatcccctgcagcattctccatgaatcagg

SEQ ID NO: 315709 - DNA, 1376 bp, Homo Sapiens
  misc_feature (1149)..(1160): n is a, c, g, or t
gtttacaatctgagaaacattttttttaaaagcttccttccaaacctgtagcacattgccctttttgagtctacagtttgaagttattttccaaaagaagagaacatggcagttatattgcccccctcgtctcccatgctagcaagtaggaagttcggacagtttcataacatggcccattcacaattccccattgaaatttagaggcaggtcaccttctatgaatacacaaagacactattgtggtcagaagtgagctggcttagtgaacacaattctttttatactaaaaaaatttttttcttaagaaagctaacaagtaggtgatggaaacaatgaataaaaaataactttttctagaacatataaataattttaagtgaccattgaaatgtaagtttagaattccaaggcaatttctgcagaggcgatagttacacaatcattctgttgaaagctaagatttagatggccttagggaggcttgacacacagtaattactagtagtactttgttggcttgcagacaggtgggggttgggcctgcagaatcccctgcagcattttcctgtaatctggatgagcgatcttcaaacgtgtgctttcaaactacttaaataccatattcttcctatcttgcctttcatttttatattaccacagatactttcctcatagtcttgccagtgcttgtagaatgcttagaaaaagcttgataaaccactgggctaagtacacagagggagaggctagcagtatttttaaattggtttctaaattttttatagcttgatggtagataacacatttgcttcattgaagtaatctgaaaaaccaatcctcaaaagacctctcaattagaattcttaaatgacaatgttttctttatcatatatttgagagattgatttaaagaaaaataatgcttgactatctgaaataatattttaaccctatcataaaatctctgcctggtagaacagctgactgtggaagggtaaaatgcagagaaccagtcattggatctcccttctctactttgttactgaaatcttgaacctgtagaacattacttatcactgtgttcctttctaatgggaaaataataataaacacttgcagagtattttttaaaagtttttagctttnnnnnnnnnnnnccctgtgccttacacaatgtgtatattgagttgatactgattatgataattagatggtattatacaatcattcattcagcaaacattcacttactgagcacctactaatgttccaggtactgattgttaaaaggtgattgagacacagcctctgtcctgagcttagtctagtaggaggtgacagatttgtaaataatagatttgaagttgctgagc

SEQ ID NO: 315710 - DNA, 412 bp, Homo Sapiens
gtgagaacagtaatgggaaaaatgggtgttggaagggacttcctcatttttgggagctttcccttcccagagcccctggctgattgggtgttcgctgttccatctgagccccccaaaagcattattactgatacttgcacacagtcaaaagcgcagactggatggatggtcttttataaggcatttaagggtacactactgtgtttcactgaccatacatttttcttagcccctcaagtaatatagcacagagttatgaatgacaattcccctaaccattcctcttcatatctgcctcttccccttaccatcgtaattctccaaactggtcataaaggcactctgtgaagatattggggactgacatcttaagctctcacctggctgcagtaggaaaggccaaactgacgac

SEQ ID NO: 315711 - DNA, 2990 bp, Homo Sapiens
  misc_feature (18)..(18): n is a, c, g, or t
  misc_feature (139)..(139): n is a, c, g, or t
  misc_feature (183)..(183): n is a, c, g, or t
  misc_feature (299)..(299): n is a, c, g, or t
  misc_feature (571)..(571): n is a, c, g, or t
  misc_feature (754)..(754): n is a, c, g, or t
  misc_feature (806)..(823): n is a, c, g, or t
  misc_feature (1436)..(1436): n is a, c, g, or t
cgggtgtcacgcggcggntgggtttagaccacccactctcatgtctgtcgggggtgcgggcgatgagggtgtgatcgaagctgatgagatgttccgaggtgcgcgcggggccgcacgcacacgcacggaatgacttcgncgtccggtcacccgcgactggttacctcgaggttggcggatatncgcgcgacgtcgatcagcgctgatcacctgtcgcggcggaggagagctgggcgctccggcatattccacaccgaactataaatcctgcacgattctagtggggcacggagcgtctnagccgaatacacgtgggagggggaggaggtcccaggccccgcacgagagagcggcgcgcgcgcgcctgtcagcctctaaggagtcagcacgctcgcggacgacggaggggggcgaagtcaaagaggcgggcgccaccacggcggactccacgtctcacggtgcgttcatgatgcgcgggcgcgatacgcgcgggcgcgcgtgacattgtatgtgtccgtcgtacccgctactcttccgcgggcccgggtgccgtgtagtgcgccttttctcncccatatacgagctcgtccggagttggacgacgagcgctgacgcgtcggccggcgaacgtatcgcgctgctacatacgcgaaaagaagcggcgaggtgtgattaggttcgggtgttgggcaccttatctcccccgtcggcacctggcgcgtgcgagcgagcgccgcgagcgcggcgccgcccncccacagccgagggagttcgtcgcggggcaacaacgacttcacggataggannnnnnnnnnnnnnnnnncggcagggcgcaagcggaggaggtacggttctcccccatccgggagtggatcgcatacgcaggggggagggggaatggcggcgcgaactggccggcatccgtcgccgcgcgaggttcctttgcgtgcgggggcgtgatcgtttacggaagcgcgggcgcgaaggcctggggccgggcgcgggggtccttgcaggccacgcgggaacctggtgggtttttatttacaaaagaaaaacaataaaagaagagtctgaggctaatcagctggagacacaggagtgaaggtggcaatggggggtagggttgtttttagagagaggaagatggggaggggctctggatctagggaagcctgaggttctcagcctctgctggcttcacaaaggccagccctatcctccctcaaaggctcaaatcaatggcccgcagctgagcctcccactgcccaggtttttccaggagcctgagttcccagctcaagggggctggagtggcaggggaaacaggctggagagggcccacgagtcctgccaccactcctcactgtggtgtgatcttggcagcctcagccctgatgagggcaatgaggtcctggttgataaggaagacgaantcgcaggctggcgatctccaccacagagttgttgctgaggcgccatttggagccacaaagcaccggccgtccatcgatgtagatgggccgtcgaccctcattggcaatgaagaaatcaccgttgttcttcagcttgatgacaccttgtttccgggatatcttccaggccggaccctccagagacaggtccacatcaatctggttatccttggttgctctgcccagggtgatctcacgcgagcgcatcaggtaccgcaccatgcggccccgcagcactgccagtgtctggttgtcgaagtccggagagctcatgcctgtgatgctgtccactagcacctgccacttatgcagttcctgttccagctgccgaatctctcgcttctggcgccggtcagccaccatcagctcatgttccaggacctcatctcgcatgtccttgagcttactgtcatcaatcaggtcctctgcatcagagaagttcagcacttggtcccctttgggcagcggctgcactgtctggtcctccagcaggtaatactgcttcatgagctgccagtgggcctgcagggccttcgcggtacgggccaggtagaaggcatcagggtgtctgtgcagcaggtcctggaaggtctccaaggtgggctggctggtcgatcccactttgctcagcagctgctcctcagccttgctaaacagggccttgctctggatggctgcaatagcctctgggtgcagctgcctcatggcctgacaggccaacttggagatgacaggatcgtagagcagggcgtaccaacgctcctggacctcccgaagggtgaagcggcagctgaatttcacgcccaggtggacggaggtcaggtcgttggtctgcaacacagcatttatgagcaggaggtcatctgcaggcttccagcggcccagatccttggtcacctgaagtggctgtttactcttcttcacacgcttggtgagtccagggtctgggtctggtctgggtggcacaggagtgctgggggctttggataccttcttcttctcactggaggagggttcactccccgaacagcgccctggttccaccccactggccccctttgcccgggtagaagattttgccaggctgctctccaccagctcatcatcgaacttcttcctcttgatgaacctggaggagcttctccgtttagggatggtgcccaaggcctgggaggaggctcgcttctgccctgccagtgactcctcatcctctgagcggctggcagtgcctgatgccatcagggatgaatctagcagcccctgagaatctttgtccatcctcttacagtcccaaagccactggttccaaaccaccgggctaggaggaacggtcccacaggctcatccaaggattctgaccaggtgagcttaaaggctgagaggagattcattcctagactgccagatccaacaatttctccgcggcgacggtagcagccgcaggcccgacgcgtggtcgacgatatcccagattccggccgtaccagcctgcttataacgcggctgtttagccca

SEQ ID NO: 315712 - DNA, 821 bp, Homo Sapiens
  misc_feature (166)..(166): n is a, c, g, or t
  misc_feature (179)..(179): n is a, c, g, or t
  misc_feature (182)..(182): n is a, c, g, or t
  misc_feature (242)..(242): n is a, c, g, or t
  misc_feature (267)..(267): n is a, c, g, or t
  misc_feature (271)..(271): n is a, c, g, or t
  misc_feature (309)..(309): n is a, c, g, or t
  misc_feature (453)..(453): n is a, c, g, or t
  misc_feature (476)..(476): n is a, c, g, or t
  misc_feature (502)..(502): n is a, c, g, or t
  misc_feature (518)..(518): n is a, c, g, or t
ggcatttcggcctgcggctgctaccgtcgccgcggagaaattgttggatctggcagtctaggaatggtgagacctcgcggttcgcctctgagggttctcagaggagttggggatgaaatggagttttgcagagtgccgccggggacgaccaccccccaagtttggngccccgccccagnggngccccgaaaagctgcgcatgcgtggtccggaccgggttagaatctggctcgaagtgttangcatgcgcaaaggcatggagaccgngggntgagaatgggcttgcgagtttacccccacctccccagncaccagcctgtgggtctcaaaccaaggctacttggtgctctgctttgagttgcagaggtgacttcatcaatgctcctaccccgagttcttgagaccagacctggacccgatccccttaccttgggtgtgcaactcttgggaganacgaggggcggagggtccggtanaggaaggggcaacagacccttacctncagtttgccgtcaagnttcgggccccttcgccctctcctcagatgtcaagagttcttagtcgtagcctatggagcggagagcgacaggctctcatctggggacagggactagaacactgagctaagagccaccctggttagaagtggggactcacgagaggagcgccccgagaaagtccagtacctgggttctctaggggttgttggggcacagcgtggttgataatcacgcagttcccaaacagtggtttttggtttccacgagatggtatctcatggaaataccacttactaaatcttcagtaaaaaccccaaatgg

SEQ ID NO: 315713 - DNA, 1311 bp, Homo Sapiens
  misc_feature (78)..(78): n is a, c, g, or t
  misc_feature (194)..(194): n is a, c, g, or t
  misc_feature (509)..(532): n is a, c, g, or t
  misc_feature (832)..(832): n is a, c, g, or t
gcaggtttcatctgaatccatattattagataaatttagggggtgtcacatcaatctacctacaagcagcttgcaagnttagaaatcccaattagtttttgaccagtttagagtatgaaatgattgcgttgtccatccgatgtacaaagccgatgatggtttctgtgggagttacttacaggctgcactggtgngtgtgtttatgtgtgtacgtgtgaatcaccttgtgatcatgatatcaaaaattatccagagtatgaatttggttacaattttcttctgaaatccccgtttcttttcattatttccatagcaccctaaaaatacacaggtggcaggactagtactctgaagctaaatagtacatgtaggtaaaataaaaacagaacaaaaacccctttccactcagggtcagagtatattacatgagcgagagagacagacgtggagaactcacaaatgctataaccaacaggatctagtttttccacgtgatggagttccaagcnnnnnnnnnnnnnnnnnnnnnnnncgcaaaataaaaacaatacacattccaagagaaatgaatgcatctgttgacacgtctctatttctcatttacatatgtacacacgtcccttgagtcgctgctgttgacacggccctgtgtggacgggttcagcccgaggcccgtcgggagcagacctgtagctctctgggggatcagggcttccattagggagaaagtattagcagtttcttaaaaaataaaatggctacacggaacatgatacatggataaagcttcaaaccaagaagatgggggtgattgcctgtacttggcccttcnccgcctgcctgctggctccctgtccatcttgcggagtggcggcagaaacatgcctgtgggccgggtggatgcttggcatggaaaagtggcttgcagaggcctcgtttttgctgaggttacttatggctccaagtagtcgtccgaaaggatcagggaaggatctctccagagttcaggaccatctctgtttatgggcgttgtctacctgcacctgtcacaacctggggcttgttcccgccccggatgcctctgcacctccctcacaccctggcctggctcccagagcactccggaagagcttgtctccagactgcaggctgtaggcaccacgcacggttcagagccagccggaagggaagctctgggccgagcttgctggtggaggcttgctggagaggggacccaggaaacccgcctcaggtgctgagcccagagatggttgcaggaggtgcccggggcctgggctgcagggagcatct

SEQ ID NO: 315714 - DNA, 524 bp, Homo Sapiens
tttttgtcaatttatttagaaaaaaattaacatgggcaaatgagatacctcagtgttacaacagagtatagaaatgtctagcaatagtcaaataatttgatctttaaatacaaaataaccacatgaacacctaatatacaggtttcatctgaatacatatttattagataaatattagaggttgtcacatcatctaactacatacagctttgcaagactagaaatcacaattagttttttgaccagtttaaagtatgaaatgattgcattgtacatacgatgtacaaagacgatgatggtttctgtgggagttacttcaggctgcactggtgggtgtgtttatgtgtgtacgtgtgaatcacctgtgatcatgatatcaaaaattatacaaagtatgaatttggttacaattttcttctgaaatccccgtttcttttcattatttccataggcaccctaaaaatacacaggtgggcaggactaggtacactgaaggctaaataggtacatgtaggggaaaatta

SEQ ID NO: 315715 - DNA, 292 bp, Homo Sapiens
ggaagcagtggtatcaacgcagagtggcattacggccgggagaccagtggtagtgcccagacttctgctagacatctagtctaaaacattctcctaggaccagggaagcctggcttacagtgccatttctgctgggcaccaccacctgcctgagggcctagctcaccacagcacatcctccaggatctagccttctatctacctcttctctggaatgtttatggtggttcagaagaatgatgactcctctttgctgagaactgttcatccttcttcaagaagaagcttgcca

SEQ ID NO: 315716 - DNA, 753 bp, Homo Sapiens
  misc_feature (401)..(401): n is a, c, g, or t
  misc_feature (480)..(492): n is a, c, g, or t
  misc_feature (509)..(615): n is a, c, g, or t
  misc_feature (709)..(709): n is a, c, g, or t
  misc_feature (743)..(743): n is a, c, g, or t
gaagggaactgagaaggcctgtatcccaagcaactatacagtacagaatcttgggaaaagcttgccttagagatgaccatttcgggttttgcttgaattggaaatcttctacctgtctcaccttttagacatccttaattgttccctaaattgttcctaaatttgcttccttgtaatgtctttctggacctgccatctcttgctacaaagaacataaaaaaccaaaaaccatttcttgatgagattctgcccttcatctcctatctctctaagtctttcatttgccacatttaccatcactttgtttaaggaggaggcactgtagtccgagtgaggagggatgaagaggtgaagagatgggtctctacttctacctcttgcattgaccatactggtgactntgggtgagccacctttccattagggcctctgtttctttcttgtcaggtgagggagatggacttagatgacttagatgannnnnnnnnnnnngggacgaaatctacttnnnnnnnnnnnnnnnnnnnnnnnnnnnnnnnnnnnnnnnnnnnnnnnnnnnnnnnnnnnnnnnnnnnnnnnnnnnnnnnnnnnnnnnnnnnnnnnnnnnnnnnnnnnatgagcttctgaccccagcctagatgacctttaagcttgctttcaacctgcattctggagttattagcttttcagctgaggtttttattggttntatttgtcatcttctgtctgcccccttgtggacnttgtttgggg

SEQ ID NO: 315717 - DNA, 949 bp, Homo Sapiens
  misc_feature (354)..(463): n is a, c, g, or t
  misc_feature (480)..(492): n is a, c, g, or t
actcgtaaaaacatcatctttatcagggaggggggaaagtacaaaattatgtccctgatatgattcaaccatgtaaaatgatgtacatttatgaacgacgactagaagtgaacatgaataactgaaaacaaacagtgtgatgcaagtgaatttttggagggtgagatggtcattatattgttcttcgagcaattaaatattttattttcttcccaaaacaatgtccacaagggggcagacagaagatgacaaataaaaccatttaataaaaacctcagctgaaaagctaataactccagaatgcaggttgaaagcaagcttaaaggtcatctaggctggggtcagtagctcatnnnnnnnnnnnnnnnnnnnnnnnnnnnnnnnnnnnnnnnnnnnnnnnnnnnnnnnnnnnnnnnnnnnnnnnnnnnnnnnnnnnnnnnnnnnnnnnnnnnnnnnnnnnnnnaagtagatttcgtctcnnnnnnnnnnnnntcatccaagtcatctaagtccatctccctcacctgacaagaaagaaacagaggccctaatggaaaggtggctcacccaaagtcaccagtatggtcaatgcaagaggtagaagtagagacccatctcttcacctcttcatccctcctcactcggactacagtgcctcctccttaaacaaagtgatggtaaatgtggcaaatgaaagacttagagagataggagatgaagggcagaatctcatcaagaaatggtttttggttttttatgttctttgtagcaagagatggcaggtccagaaagacattacaaggaagcaaatttaggaacaatttagggaacaattaaggatgtctaaaaggtgagacaggtagaagatttccaattcaagcaaaacccgaaatggtcatctctaaggcaagcttttcccaagattctgtactgtatagttgcttgggac

SEQ ID NO: 315718 - DNA, 834 bp, Homo Sapiens
agggcgaaccaccttttcttgaaaggttctttctttggcccagtcttttccatgaagccttgtttgaggtagttcctggtgaggaatggcacgagctcagactctgggagttcaggaaaggccatttttaggtactgcagacgggctgcacggagggcattgaaccagtccactatctccttcccactttcatgatacacaaacaggttcctggtgtggccatctctcctgtaggtgatctgcagcccatgggggtgccctatcttctctgtctggaaggtggcattcaagtccttaatgctgatgacagctttggggcttttaccctgttcctttgtgaagtacttcaggaggccttctcttgccagaagtacaaacttccttctcagaaactgtgagttgtcccttcctcgcttccacaggaatccttctcggttacctgggagcgagatggtttccccatcagccataaattcccgtctctcatacttagctcgaatccattgttcctttaagaccaggcagtcgttggcctgggggatgtagtagaaagctgggactctggcttcgaacttggccttcacacggaggtttccattgtggatcataaactccacaatactgtcgtcccagaagtcaagtcgcacagatttaactctgctgatgtcagggaagttacggtggacgccgcagcagttgagacagatgaagatccccagcttgtaagaggcccagtcgggatctgccgccccgcagtcggcgcagtgcgcgttgcctgtgtccggcgcccgcagcagctccagcagccgcttcttgttgcgctcgcgatcgccc

SEQ ID NO: 315719 - DNA, 643 bp, Homo Sapiens
  misc_feature (42)..(42): n is a, c, g, or t
  misc_feature (107)..(107): n is a, c, g, or t
  misc_feature (127)..(127): n is a, c, g, or t
tgccatgattgcaagttttttgacacttcccagccatgtttntggttaagcctgcagaactgggccaaaattaatactaataagaagcaaagcacggaccaaagctnagaaccctcacagagtccantgcatcccccgccacctccaccagaacaggtgctgggatccacagctgagagacctataggcggttcacatcacaggactctgtgcagacaacccccagtaccagcctggagcctggtagacttgctgagtggctagacccagaagacggacaacaatcactgcagtttggctcacaggaagccacatccataggaaaagggggagagtactacatcaagagaacacctcatgggacaaaataatctaaacaacagccttcagccctagaccttccctctgacagagcctacccaaatgagaaggaaccagaaacccaactctggtaatataagaaaacaaggctcttcaacaccccccaaaaaaatcacactagccaccagcaatacaaccaaaccaaaaagaaatcccttatttacctgaaaaagaattaaggacgttagttattaaatagctaatcagggaaggccatttttaggtactgcagacgggctgcacggagggcattgaaccagtc

SEQ ID NO: 315720 - DNA, 557 bp, Homo Sapiens
  misc_feature (421)..(421): n is a, c, g, or t
  misc_feature (539)..(539): n is a, c, g, or t
ctttacattgggcttcacctttctctggtgccttagcttaataaccaacctagtgaattctttttcaagtaagtcagggatttcttcttgagtttggatccattgctggtgagctagtgtgattttttggggggggtgttaaagagccttgttttgtcgtattaccagggttggttttctggttccttctcatttgggtaggttctgtcagagggaaggtctagggctgaaggttgttgttcaggttctttggtcctatggggtcgttcccttgatgtagtactctctcccttttcctatggatgtggcttcctgagagctgaggctgtagtgattgttatctcttttctgggatctaggcccacccagcaagtctatccagctccaggctggtactgggggttgtctgcacagagtcctntgatgtgaaccgtctatgggtttctcagctgcggataccagcacctgttccagtggaggtggcaggggggtgaaatggactcctgtgaaaagttcctaagccttggtggttaaatgcnccaatttttgtgctggtt

SEQ ID NO: 315721 - DNA, 465 bp, Homo Sapiens
  misc_feature (200)..(209): n is a, c, g, or t
tttgtctttgttggattgggttaattcgaagatcttatcttcaagctctgaatttcttctacttgttcaattctattgctgagatttcccagagcattttgcatttctataagtgtgtccagtgttttgtgaagttttggggtttttttatttatactatctatttcattgaatgtttctcccttcacttcgtgtattgnnnnnnnnnnggatttccttgcattaggctttgcctttctctggtgccttcctgattagcttaataactaatatgaattcttttgcaggtaaatcagggatttcttcttggtttggatccactgttggtgagctactgtgattttttttctgggggggaggggcggtgttaaacagccttgttttgtcatattaccagagttggttttctggttccttctcatttgggtagcctctgtcagaggaaaggtctaaggctgaaggctg

SEQ ID NO: 315722 - DNA, 1365 bp, Homo Sapiens
  misc_feature (96)..(96): n is a, c, g, or t
  misc_feature (164)..(164): n is a, c, g, or t
  misc_feature (198)..(198): n is a, c, g, or t
ataattgaagttttttatatgatgaagtgctccataatttaaatgtaaaaagccaataggaaatatatgaaataaaataaaattatacgtaaaagngacaatgcctctattagatttaacagtatcttacaatagaataagttgaaacctacaaaatggaaganagtttaaaattaggcagatattatcagcctgggngaagaataaatacatatgtcaataagcatttaatgtattttgtcttagattttatatgaaataataaaaagtaagcaaaccaatagcatggtagtttcaccctgattgattcaaactgaaaaaatattaacatttctccatgagaagttggattcatggattggccctcatgctgcattcaaaggcaactttagcccggatccaacactcattgcccagagtcagcaggcctagaagtttgcttttaagatgttccccggcctgcgaccaagacgctttttcctgactacttcttcaattctgacataggttttgctgatataaatgcaaacccggctctatacctactgagtatctacttggctagagctgcaaatggagcgtttaggcactaggcaagagctcttcccacgtttccaagcacactttctagaatttcccaaaactactgacattgtctttcagaccccatctcccaaagagaatcagagagatggtctggaagccatttagaatctccagcctccaacctagtaacaatggacttggatccaaagacgcaccttactgacctcaaagacaccagcccagattctgggcattgaattcctgcctccccatgaaagatctcaactgagtcacatcaaagcccacactcttcttcaaggttcaccttccagacacgctccaaaacagtccctcagaattgtcttgagatgaaacaaaaggtgatgaaggtccaggtttggaatgcctgcctcattcttcactcctgaaaagtctacacctgctggttagcactctcatatgttagggagcccgggctctgagtgcatcctttaacaggacctcctggccttttcctacttggagtagagtgcccaagaataatagggaatacaaggcctccactctcacatggcttgattgactgatgaactgatgtcggaggaggaaacatatgtagggaacagcctgggtcttgtgaatccgtttcccagctatgatgcctatttcttcagcagaatgagcgtagcatgtctcccaggtctgttttttatttgtttgagaggtgatttcaagcagaatctcacagcttactgttggaaatgctatcagttgtaaagatagggatagttctcctcgtccgaattcgccacccaggcc

SEQ ID NO: 315723 - DNA, 835 bp, Homo Sapiens
  misc_feature (96)..(96): n is a, c, g, or t
  misc_feature (256)..(256): n is a, c, g, or t
cggcaggattttattcgtttctcaataaggtggctgctcttttttatccaaatctattaataaaaactataggacaataatatagctttcaggagngtaaaaaaagccttatattttccaaataaagggccaatataaattttgcaaaatacaaatgagcattactgaagtataaagtaaatatttggaattaaaatatatggtcatttagatacaggctaaaaagaaatagaaatcttaatgatccctttctgcntacagtgagcttaaaattacaaccaaaaattttaacaaatatgtagcacctacaagaaattttattaacagcttacataatgtgtaaatttgagcaatttattttagaacttttgaatctgaaaatcacctgcttgacattcatttgagaaagtgaaacataaaggagagtaacataagcaagacgacagaatgtgaggttctgcatccacatcccccacgacataatgcagctgccacagcaaacataagtgcattcatgaaagccttggaatccagttcagagtttgtggcacccagctgagacttaggtgacaggcctgcagaacttggttctctctatagtccctgagtcaggcaaaacacaccttctttccttctccagccatggtctggaagaaatcatttcccagcttccaggatgtcctggcaccttaactatgcgtccccaaggacctacagatcgcagggcaacaggggctgtgacagagtagcccagggctctcaaggtgcaggaggcgaaagcggagacggatcccaagttcctgtgccggcgccagcgagagacgcagatcccccc

SEQ ID NO: 315724 - DNA, 771 bp, Homo Sapiens
  misc_feature (208)..(208): n is a, c, g, or t
gccttatatttttcaaataaaaaggaccattttaattttgcaaaaatacatggagcattactgaagtataaagtaagtatttgaaattaaaatatatggtcatttagatacagactaaaaaagaatagaaatcgtaatgattcctttctgcctacagtgagcttaaaattacaaccaaaaaatttttaacaaatatgtagcacctacnaagaaattttattaacagccttacataatgtgtaaatttgagcaatttattttagaacttttgaatctgaaaatcacctgcttgacattcatttgagaaagtgaaacataaaggagagtaacataagcaagatgacagaatgtgaggttctgcatccacatcccccacgacataatgcagctgccacagcaaacataagtgcattcatgaaagccttggaatccagttcagagtttgtggcacccagctggaggcaaagaccaaggaagacattttcagagggtgagcacttgaccaagtggcaagcttgccaatcatggtcccggcttcaaaacagaatactgccacatcttactgtagacttggctataactcatttgaccttggtcctgccactgcaacaatcttctttccttctccagccatggtctggaagaaatcatttcccagcttccaggatgtcctggcaccttgactatgcgtccccaaggacctacagatcacagggcaacaggggctgtgagagagtagcccggggctcccaaggtgcaggaggcgaaccc

SEQ ID NO: 315725 - DNA, 1223 bp, Homo Sapiens
  misc_feature (19)..(19): n is a, c, g, or t
ttttataacatctgagatncaagaggtaagaatacggcacttttaataggcggcagccccaggtggtgcgtggacagaccctgtccacagcgcctggctcccgtgctgcctgtccttccatctggaatgccaaacagaagctcctctcaggtggcatctggggagtaggtcccagtcctgaaatatacaaagtggcgcctcccactgggcagtggtcactgggctgcacggtcctttcaagtcctagggtggcccctcaggtcactgcttggccttcttcacaatggtgcccacagcagagatgacggtggtcttggagccgctggcgctggtggtgaccgtgacaacagctggcagggtggctgtggtggtgaggatggtgggctgggctatcgttgtcactgggatagccgaatcccacttgctctttctcttctgagcatctgcaacagctgtgctggcagtggtagtggtggtggacgtggcgttggtcgtggtgccttttttggtgcccgtcacaaactcaatttttgttcgctcctttttggccttttccaatttgtccatctcaattttctgggccttggctaatgcctcatagtaggagtcctcagaccagccatggggatcaaacatatcctttgggtagttggtgccaagctcgtcaatggcacagaactggatcagcttctcgtagatgctagggttccgaaattctttcttcctttggataatgtagttcatatccattccctcctttatctttcgttcataaagcttctggatcttgtcttgcaagtgatttgaacatctgccagggggttctggcgggatcttgatttcatcaggcgacatgttccgaactctttcagaaaaggaggccacgagttcctgggggtctcgcttttctgcttctgtattatcctttgggtcatcagcctcaggtttttcagtctctgaatcgtcatcttccgactgtctactgttctcatcttcttcttcttcataaccatcttcatcaccccctagacgagaaaagtcatcctccccataggcatcagataccaatccgcctttctcctcagccgcgctgcccaccgcctcgattccagcctcgccatcagactcgggctctgaatcttccgcgtaaactgcgagagacgacagaacattcttcttccccgccatcttattcccacagcccgggcgtggctcactcctat

SEQ ID NO: 315726 - DNA, 786 bp, Homo Sapiens
  misc_feature (67)..(67): n is a, c, g, or t
  misc_feature (82)..(82): n is a, c, g, or t
gtccccaccagtcaggggccaggcaccaggccggccaccggaatctctttattggactatttcagancaatagggactcaancaaaagagacagggactgtgctttcaacgagccgtgccaccacgtggacctttctgtggctgcaggtcaaatcccatggaacaagcaaaggaccctgggtgtccccatcaccctccagccccgtgtgccagacgcacctttgggtagttggtgccaagctcgtcaatggcacagaactggatcagcttctcgtagatgctgaaagaacagtgccggcgctgagcaggcacaagtccacgtccctgcatgggacctgaaccatccagctcctggggctgacacaaaaccttcacaacttttaaatccagctcagctgctctaagcaagcttcctgatggccctccactctcccagggagatggacctgttagctaggggccgggaggagcacagggtcaaggtgacggcctgaagttttgtcctcactgaccttcagtcctgcacagctggattgggcttacccacactcagacccacacaagggccatgctcttttccctgtatgtcactagcttgaacattcaatggaggaagaccagacatcgctctggtcctaagacctctcacctatatgcaaaaatcagctttttagagttggaagatgaacctacagtaattgtctagtccaattccttccatgaggacaggggacttgagaggtcatgtgctttaggctcagagcagggacgagaactcagccagtt

SEQ ID NO: 315727 - DNA, 1496 bp, Homo Sapiens
  misc_feature (44)..(69): n is a, c, g, or t
  misc_feature (77)..(77): n is a, c, g, or t
  misc_feature (79)..(79): n is a, c, g, or t
ggaagatggcggcgggggcgaggtgaggtgttggcagtggaaannnnnnnnnnnnnnnnnnnnnnnnnnacgcgganantggcccgcgccggccgcaggggcggataaaaagccgtcgcgctgcgggagtgggcgggagggagagggggtgtccgagggccacaagagtatgacggggctgtacgagctggtgtggcgggtgctgcacgcgctgctctgtctgcaccgcacgctcacctcctggctccgcgttcggttcggcacctggaactggatctggcggcgctgctgccgcgccgcctctgaccgcggtcctagcgccgctcggcttcacgctccgcaagcccccggcagtcggcaggaaccgccgtcaccaccggcacccgcgcggggggtcgtgcctgacagccgcacaccaccggatgcgctggcgcgcggacggtcgttccttggagaagctgcctgtgcatatgggcctggtgatcaccgaggtggagcaggaacccagcttctcggacatcgcgagcctcgtggtgtggtgtatggccgtgggcatctcctacattagcgtctacgaccaccaaggtattttcaaaagaaataattccagattgatggatgaaattttaaaacaacagcaagaacttctgggcctagattgttcaaaatactcaccagaatttgcaaatagtaatgacaaagatgatcaagttttaaattgccatttggcagtgaaggtgctgtctccggaagatggaaaagcagatattgtaagagctgctcaggacttttgccagttagtagcccagaagcaaaagagacccacagatttggatgtagatacgttagccagtttacttagttcaaatggttgtcctgatcctgatttagtattgaagttcggtcctgtggacagcacattaggctttcttccctggcacatcagattgactgagattgtctctttgccttcccacctaaacatcagttatgaggactttttctctgcccttcgtcaatatgcagcctgtgaacagcgtctgggaaagtagtggtcattggttgcataatttgatttgaggcttgtggaggaaaggaaccaagtgactctgatgtttacaaagcacctatgaaaccctgtacacacctatttcataatcctcataatttatcaacaaacacaatgtgcacgtttgtatgtatggaaataaacttataaatggggacgtattggagaaggaaatacatagacctacaactttgagcaaatagcagtgatgttttaggaactgaaatgtcacacttaaagtcttcagcccagctacttccctatttttgtggggagaagagggcctgattagaactgttctggttgtgtttgtcggtaggggaataatttttgttcagtccttcttagtgaccctattaattttatgaatagaatattgagttactgctgcagcattctgagctggacggagctccagtctatcgtg

SEQ ID NO: 315728 - DNA, 963 bp, Homo Sapiens
ttttcggggaatcaacacgaggtctttatgaatcgccacccagccctgccaggcatctgagcaagggtacccgccacccagcagccactgatcagccttccacaaagctgcagaagagggctttccccagcatccttcctcagctgcctccaaaaggggcctgggccagggctgaggggcaggcaggatgtggagcgggcatccctgtgtgcacggccccatcccacctctctgcacagggtgaagtgcaggcaccctgcacttgctggacagggctggagagaagcaagggggctggggagagtggccggtccagcgggtagccgccgggggcacgcatctccagcagcggcacctcagtgtggcttgggggtcgtgtctaggccctgggggtgggaagctgagggtgaggctggggccccagggccccgggagaagcctttgttcctgcccaggcggctgctgggcggggcctttgggcttcggggcccaggactgggagaggtggtagatgctggcccaaggccctggcggacagaggtctttcccaagagctccttaaacacagagtccatgttctgtgccacagccttatccacctccacgtgttgctctggggagtctgggaccaagcagcgtcgtctgtgtccagagggtcccatggcctcaggtgaggtgcatggctctggccggtggaccagctccgatgccaggaggccctcgggactgctcccagactcccctgcagtctgcagccctgcgcccaccacctgcttctccgtcccggcgggcagcgtgatatacttgtggggtatgaggccccgcatgccgttgtgctccccccgccaccagtcgctcgaggccctctcgtgcagccgcagtacgtccccccgccggaagctcagctcctggtctgtgcggcccgtgtaggcaaagcaggccacagcctccacgaccccctcc

SEQ ID NO: 315729 - DNA, 787 bp, Homo Sapiens
cagctcaggttaaaatggggagaatgatatattccgactgtagacccgaaggttctgtccatctggggtacagggagtagggacgccagtcagagcctgtggtagcgcctcctgctgggcctgagggcagacaggccagggctgggcacagggacatctgggggaccaccactgacaaacctgtccctctcagcctggagctacggccaggccaatcatgattaataaaaccactgcagccttcatcctgccacaaaactaaagtggaccccaacccccagccctgccacaaagctctgctccccatcttttttggcttaaaacttagacattaagccaggttgggcctgggagttgtggcagtaaaaccagcagccataacgtcaaccacgcaaatgagctgaggaatcccatctgtacatcatccactcagaactgcctcggagcaatgcacaggctgggacagatcaatactcatggccatggatgcactcccacacccctgttggaagatggagaggctgaggggaatatggggagcccgagtggcccctcagctgggaactgaggaccgtacatgccattcacaggtcttcaattaggcctttgcatctttaggctttgttgaatcagtgcaaaagcatcttttggggggcatgcaggctggggtcccaggaggatggtgggagtggaacgtggaagaggggctcacttcctctaaactgcgagcatgcccccttctcctggagtctgcatcgctaacatcagggccgctgactctctctct

SEQ ID NO: 315730 - DNA, 734 bp, Homo Sapiens
  misc_feature (685)..(685): n is a, c, g, or t
ctagacctgagatatagaaagtgttctgtctttgtgaatttggagagaatagttggaatcagcaggtttgattcatggtctctaaggtctcttcaggtgttaagcatctgctgttatatgtttttccaagcagacctgatacacaaagctttggtgtggctgatagtgttggatgagaatttatgttatttgagcctttcttgcttacatacgtatattgcatgtgtctattgtagactcagaaagccattatctttcttcttgctgtcttctgagctttcttcttgctcacaattcactgaaagaatctgctgcttctcagacaatgcctgtgtgtgctatggccaactcactgtggggcattgtaacatgcccacttactgtggggatgtgtattgttctttactgggatatcttgtaagtacaccagtcacctcaaaactcccatgtcttagttacttctactgaggtgaaatttactctccctataatttactgtgtttaatgtgcacatgatgaaacagctctttcacactctttctcttgtgtccctctgtgataaactcctctccccatcccagtccctgccgatcctgatctgttgttgtgcttataggtttttttgttactcttaattttaagctgcctgcttatggtttcagcgtagttgagcactaataggttncatggaacatattctcatggggcgctggatatttgtgagagagtgatgc

SEQ ID NO: 315731 - DNA, 1004 bp, Homo Sapiens
  misc_feature (206)..(206): n is a, c, g, or t
  misc_feature (266)..(266): n is a, c, g, or t
ccagatgagtcttcaagtactaaagaggcataagtttagagtcccttaaggagcacaagacaacacttagtggtcgttcagccatcacaagaagaagtggagcattagataatccagaacagcagccttgctatccaatctgtttatctaacaataatagttaaggggagctctgcaggtcagcagagctagtccaggattacaanctgccatacatgagctacatgtcaattagttggattatgtataagatagcattatatganataatgctcttaatacaaaaaccccctatatgttactaagagattacacttaaaaggagggtataaaacacattcacagaaaatatttattatgctactctttgtactatgtatgggaacagtatgtttgttaagtccaagagaaaagataattcactgacatgaaacacccaaatgtcttcattttaaaagtagtttagagatagcatcaggtaggccaaacaactgtactgggcccctgtagagattagggtttggtctattaaaaaaaatctttgcttgctggaactgcaagcttggcttccctgcaagctcaataggttctggagctcatttaccatgtcgctcgctggatcccagaaagttgcccatggtcagctaagtgacggaagactatacgactaagcctccagcgccgcttcacaccacgcggacgggacgtcataacacaccgatttctgattctaacaggacagctatcccgggggagggcagcaatttcttcatcagccacatcctgaagaatttttggcaaaatggtattcttcctgagtgaattaatacgtagcctctcatctgcgtattcataggccatttttcgtctcttcacatcgcgccacattctccagtctacatagtgacttcgaacttggcctgaagctgatgaaggaaccatctgcttgaacgtccgcagcagcgagcccagcatgaaggccgccatgttgtccgctacaaact

SEQ ID NO: 315732 - DNA, 1265 bp, Homo Sapiens
  misc_feature (7)..(7): n is a, c, g, or t
  misc_feature (9)..(9): n is a, c, g, or t
  misc_feature (19)..(19): n is a, c, g, or t
  misc_feature (21)..(21): n is a, c, g, or t
  misc_feature (26)..(26): n is a, c, g, or t
  misc_feature (34)..(35): n is a, c, g, or t
  misc_feature (39)..(39): n is a, c, g, or t
  misc_feature (48)..(48): n is a, c, g, or t
  misc_feature (53)..(53): n is a, c, g, or t
  misc_feature (61)..(61): n is a, c, g, or t
  misc_feature (65)..(65): n is a, c, g, or t
  misc_feature (72)..(72): n is a, c, g, or t
  misc_feature (79)..(79): n is a, c, g, or t
  misc_feature (81)..(81): n is a, c, g, or t
  misc_feature (106)..(106): n is a, c, g, or t
  misc_feature (125)..(125): n is a, c, g, or t
  misc_feature (136)..(136): n is a, c, g, or t
  misc_feature (146)..(146): n is a, c, g, or t
  misc_feature (161)..(161): n is a, c, g, or t
  misc_feature (165)..(165): n is a, c, g, or t
  misc_feature (216)..(216): n is a, c, g, or t
  misc_feature (245)..(245): n is a, c, g, or t
  misc_feature (258)..(258): n is a, c, g, or t
  misc_feature (272)..(272): n is a, c, g, or t
ttaaatngnaagactttgnangaaantaattttnncctnattttgtgnagaanggtcccanatanggagagntcaacanancatccaatcttgttctaaatggagnagataagtgcagcagcttntggtttcattnacccctttgngctgcttgcctaaantctntcttccttcacctcccccaggccttttggcaagagggaagacactgccatncctggctctttccctggatcagtgtctgntctggtggaggtngcttgtggggcctnacttcctccagttccggcggatcctggcacttttcttcctagagtgcagatactgctcactggaggctgtctctgtggcactctgtgggttggcccagtgcagagtgggggctccaggattctgaggcgggctgcagtggtgtagcgagtggccccaggggtttctgccttgggggcctcttccctgcgcagcttcttgaggtcctcagccacaccggtggtcccctgcacattcccagatgatctgtgcccgttcctcggccagctggtccccgctgcgttgaaaccagggcttggatctgcagcagctcggcgtcctggaagatgttggccgaggcctgcttgcggccccgggcctcaatcggggcctgccaagggggtggcttactgaccaccgaggctggggtacccattgtggatgctcacactgaagggcagctccgacagacctcaaatggggatggggcaagctaagatgcgcccactccaacctcttccacagccttcagaaagggcaggcgcagctctgggcttcctgctgcgaaggtgcttacaagggccagtcggtgatcacgggcagcacaagagcatggcagagggtatcctggccgaggtcctaaggcgacatctgcagcacgaggaggccccgggactcagacgtggccgcttcgcagaacgacggggtcctaagtggatctggcggtcgcgtcccgctggcaccccggctctgactgtcgccctccggctcccaccgcagcgccgagctgggccgccgacctacgtacctggttgcttgaggcaggccgcacgcagccccaaactggtccgggccacttgggtcacagccgcggttcccgggagaaagcgctccctagccccggaacagccaatcctcggccccagccaggtatgagctcccaggcgagccttccaaacccaaggcggagttccgtgcgccaatcatcggtgggagacagggagggggcgtgtcca

SEQ ID NO: 315733 - DNA, 1077 bp, Homo Sapiens
  misc_feature (295)..(295): n is a, c, g, or t
atttgccacttaaactacagtttccctgtgctatcctgatggtgtgggggtgtggaacaggctgctggaaccatggtttacagtagtagcaggtagatgattagtagcatgagtggtgaaatgctgcatctaagtgcctgtcactttggctcccaggggaatatcatgcagcccaggaatagtgttagactgggaaggactgtggcaggaacagtcactgtctctcctcattttggtgaggaatgggtcccacataatggagagctcaacagaagcatccagtcttgttctgaantggagcaggtcagtggcagcagccttttgctttcctttgcccctttgggctgcttgcctaaagtctgtgttcgttcacctccccaggccttttggcaagagggaagacactgccattcctggctctttccctggatcagtgtctgatctggtggaggtagcttgtggggcctgacttcctccagttccggcggatcctggcacttttcttcctagagtgcagatactgctcactggaggctgtctctgtggcactctgtgggttggccagtgcagagtggggctccaggattctgaggcggctgcagtggtgtagcgagtggcccaggggtttctgccttgggggcctcttcctgcgcagcctcttgagggcctcagccacacggtggtcccctgcacattcccagatgatctgtgcccgttcctcggccagctggtccccgctgcgttgaaacagggcttggatctgcagcagctcggcgtcctggaagatgttggccgaggcctgcttgcggccccgggcctcaatcggggcctgccaagggggtggctcactgaccaccgaggctggggtacccattgtggatgctcacactgaagggcagctccgacagacctcaaatggggatggggcaagctaagatgcgcccactccaacctcttccacagccttcagaaagggcaggcgcagctctgggcttcctgctgcgaaggtgcttacaagggccagtcggtgatcacgggccctcgtgccgaattcgccacccaggcctcggtggttag

SEQ ID NO: 315734 - DNA, 728 bp, Homo Sapiens
  misc_feature (92)..(92): n is a, c, g, or t
atgaagaacatctacacattggcagtgagagaaaagcccccttcacaatgagacttcctgtgcacgccgcctgcgccttgcctcagcttagnacatggcacagtcttctttgcttgtgcccttctcattccctcctgtggtatcttctctgcataggctattgctgtctagagctttcctgacggtctgacttggatgttctgacatctcacacctctgtgtactttctgcttcacaggcatcactaatgtcctgtgagggactttcatgttcgggcagggtgcagcgatctgcgtcttcgctctttggttctgcaggactgctttgagtggcaccatctattttagcattatcttttgcaacaccttcatctaattcttcaccaccagccctcgggcgtgatgattgagcggtgtcatcctcaaaatctaatgtgtctccatcagctagtacctcctcagctgctgtttgtacatcatcaccttcttggtcgagttttccatccaacttaattttaggattctccggacaatcaacattttcactgctttctgctgcaattttctgttttggattttcagtcacctcgttttgggcttccactgctgactttctgtcagtagactttacctgctcttcttccttaatttcacttaaatctgtgttatgatacgttaactcttttttaacatctttaagggtttctgcgggtactggggattttatct

SEQ ID NO: 315735 - DNA, 499 bp, Homo Sapiens
  misc_feature (370)..(370): n is a, c, g, or t
  misc_feature (410)..(410): n is a, c, g, or t
atattcaaacaacctgtttatttgggcttatgatttactaactgcaggtctatgtgcaggaaggccagcatcccctcctgccgttgtcacccacatccacagagcagccctagtgccaggtgcagccactggcacccacggcacacgggaacaggacccatgctgcaggcctgctctcctgcccagggagatgccacgtgtgtctgtccggcagcttcatgacacagttaccaagcagctagggagggcttagatttgttggtgtccccaggcctctccctcgggggcttgggcgcatccccacagcccccaagggatgggggttcttgccacggggcccaattccacagctccacgtggcgcccctccncgtccatgggcagagccaagtatttccagaggtggcttgnaggccctggggtggcggggagaggaacagggagagcatgagacaagacccacaggctgaggccaaccctgcttttatttcacaagagct

SEQ ID NO: 315736 - DNA, 719 bp, Homo Sapiens
ttttaaaatatttaagagtttatttgagcagtgatccagaagtggctagggagctccccagagagaacatgaggaggaggctttttaggacaaatagataaaagcaaagataatatttcattggttacagttatacagttacacagttatacagttgccttatttggtctatcccatgaggaagtcctagttactaattacgtttttgttggctgcttctgattggttgagcttaagttctgtgtttctttaacataggcatttacaagaaataccacaaataaagtttcagacatgcttgcaaatcaagcaaggttaaggtcacttaggaggcccaactggctctgtctgctcaaggattcttctggcctcgtctccattttacatgaactgttgcataaataaacacagagtacctgaaacaacggaggtgatcattctgcctaccgagtgttggccacgccaagcttggagtgttgctcttattcttagggagtttatttttaagtaatctcatctgtaaatgggattacaatccacaaactgaccttgtatatgattccattccttctcccagcccagccccacactccaaggttttccctttgcttataaggggtagtcacccttttttatttcgaccttccaaacattctgggagttttcctcctttaggccaactacagcgcagaggagcgctttctcctgctgggtttctc

SEQ ID NO: 315737 - DNA, 1643 bp, Homo Sapiens
  misc_feature (1547)..(1547): n is a, c, g, or t
gggtctaattgcatcactttatttcaccgacctccactctggctcccaccccacaagcctcagagcaggaaacaagcttggctgagatgcctcaggcctggtaacctgaggaggtgtagagcacccagaaggaagggtaaaagcagggggcaaagcggtggccctccctttctgggggtcacttctgggctggggccagctgaaacctgtgtccaagtagctttcagggctggccacaccctaagccttgcaaaagggcctcctgcaagggctggcccatggggtccccaccttcccagccagtgaggttagcatggttaggagtccacatgtgtgcaagtgcttgtgtggaggctcatgtatgcatgtgtgtatatgcaaagctgcacatgacaatgtgcatgccagtccagagttagatgtacctatgcagttgccctcaagcgaagggtcatatttggaaacaaggatggctctaaacatgtaagcgtgcatgtgggcatgtatgtatctggggcctaaggaggtggggaagtgggtgttggggtaagggctggccttcagggcatttgcagaaggaggagtgggtgggagggaaaggctgggcagagcaggggaaggagtgaaagccaggcaggaaagtggaagaacaggagaagctcatgtaatggattaccctccacaggattatgttccttgattcctgagagttttttctcttgattttaccccctcagtctatcactgcaagagaaagaggtagaaaagacaaacagaccacaaaagacaagaacccagacatatagacagacgcacctgttgcatgtgcatgagccagagcctgggagagaagagagagcgtgcaagagagagctcagagcaggcaggcagcccaccccctgcagcagtgctgggcttcactggagcccctgcaggaagtccagcagccctgtatgccactcctctggtttgtccaggtaacaggggtgccccgcccccttcatgatcagcacccggtggttgggcagctgcttcaggtgctcaaagctggtctgacccatggggtcctggtctccatatacaatcagagctggagtcttcacactggcatagttggcagcattgattttgtcagtgcagatgggggccactggcacaaagcccgggagctgggagccaggggccgtgaggaagggcagggagtacatgccactcagtgatggactgatcacaaccggggggcccagctccaaggcatccaccacagccgccaggaagctgccaggggccagctccccaataggggcaggggctgctgcttccttggagtgccccagacctggcaggtcaatggccacagcccggtagccagcctgggccagcctgtgcagtgtacccaggttctgccaggtctcggaggagaagcgaataccatgcagcagcagtacagagaagcgagcctgcccactgccgggcagggcctctcggaagaagagggcctggccctgcacctggatggtgcccttgcgctgctccacgcttgctgncatgcctgctgctgctgtgctggtgaagggcctggggagctgcgtggactcgcgcagacgggaagcaggcgcgtgctggcggtgacctgatcccgg

SEQ ID NO: 315738 - DNA, 958 bp, Homo Sapiens
  misc_feature (10)..(10): n is a, c, g, or t
  misc_feature (21)..(22): n is a, c, g, or t
  misc_feature (29)..(29): n is a, c, g, or t
  misc_feature (32)..(32): n is a, c, g, or t
  misc_feature (39)..(39): n is a, c, g, or t
  misc_feature (43)..(43): n is a, c, g, or t
  misc_feature (47)..(47): n is a, c, g, or t
  misc_feature (51)..(51): n is a, c, g, or t
  misc_feature (57)..(57): n is a, c, g, or t
  misc_feature (59)..(59): n is a, c, g, or t
  misc_feature (182)..(231): n is a, c, g, or t
  misc_feature (792)..(792): n is a, c, g, or t
  misc_feature (869)..(869): n is a, c, g, or t
gagaacaggncccatggtcanncagcttnagnactgaanagcncccnaccnccggtncnatcatgaaggggcgggcaccccctgtacctgacaaaccagaggagtgcatacagggctgctggacttcctgcaggggctccagtgaagcccagcactgctgcagggggtgggctgcctgcctnnnnnnnnnnnnnnnnnnnnnnnnnnnnnnnnnnnnnnnnnnnnnnnnnnatgcacatgcaacaggtgcgtctgtctatatgtctgggttcttgtcttttgtggtctgtttgtcttttctacctctttctcttgcagtgatagactgagggggtaaaatcaagagaaaaaactctcaggaatcaaggaacataatcctgtggagggtaatccattacatgagcttctcctgttcttccactttcctgcctggctttcactccttcccctgctctgcccagcctttccctcccacccactcctccttctgcaaatgccctgaaggccagcccttaccccaacacccacttccccacctccttaggccccagatacatacatgcccacatgcacgcttacatgtttagagccatccttgtttccaaatatgacccttcgcttgagggcaactgcataggtacatctaactctggactggcatgcacattgtcatgtgcagctttgcatatacacacatgcatacatgagcctccacacaagcacttgcacacatgtggactcctaaccatgctaacctcactggctgggaaggtggggaccccatgggccagnccttgcaggaggcccttttgcaaggcttagggtgtggccagccctgaaagctacttggacacaggtttcagctggcnccagcccagaagtgacccccagaaagggagggccaccgctttgccccctgcttttacccttccttctgggtgctctacgcctcaggttg

SEQ ID NO: 315739 - DNA, 478 bp, Homo Sapiens
  misc_feature (436)..(436): n is a, c, g, or t
ttctaattgcatcactttatttcaccgacctccactctggctcccaccccacaagcctcagagcaggaaacaagcttggctgagatgcctcaggcctggtaacctgaggaggtgtagagcacccagaaggaagggtaaaagcagggggcaaagcggtggccctccctttctgggggtcacttctgggctggggcagctgaaacctgtgtccaagtagctttcagggctggccacaccctaagccttgcaaaagggcctcctgcaagggctggcccatggggtccccaccttcccagccagtgaggttagcatgggttagggagtccacatgtgttgcaagtgctttgttttggaggctcatgttttgcatgtgtgtatattgcaaagcttgcacatgacaatttcaattgccagttccagagtttagatgttaccntattgcagttttccccttcaaggcgaaggggttcatattttt

SEQ ID NO: 315740 - DNA, 572 bp, Homo Sapiens
  misc_feature (23)..(23): n is a, c, g, or t
  misc_feature (162)..(162): n is a, c, g, or t
  misc_feature (201)..(201): n is a, c, g, or t
  misc_feature (561)..(561): n is a, c, g, or t
aaaggggcaaaacggtggccccnccccttctgggggtcaacttcctgggctggggcccacctgaaaacctttgtcccaaattagctttccagggcctggcccacacccctaaagccttgccaaaaggggcctccctgccaaagggcctggccccatggggtncccccaccttccccagcccagtgaggttaagcatggttnaggaagtcccacatgtgtgcaagtgcttgtgtggaggctcatgtatgcatgtgtgtatatgcaaagctgcacatgacaatgtgcatgccagtccagagttagatgtacctatgcagttgccctcaagcgaagggtcatatttggaaacaaggatggctctaaacatgtaagcgtgcatgtgggcatgtatgtatctggggcctaaggaggtggggaagtgggtgttggggtaagggctggccttcagggcatttgcagaaggaggagtgggtgggagggaaaggctgggcagagcaggggaaggagtgaaagccaggcaggaaagtggaagaacaggagaagctcatgtaatggattacntctccacagga

SEQ ID NO: 315741 - DNA, 648 bp, Homo Sapiens
  misc_feature (21)..(21): n is a, c, g, or t
  misc_feature (33)..(33): n is a, c, g, or t
  misc_feature (103)..(103): n is a, c, g, or t
acacaacctggccaccggtcntaaagccctagngtaacctttcctaacttccacacaccttctgggttctcatgcagtttcttgggcccaaccccattcattntgtcatgaggctttgtcatgttctcaacacaaactgcctctggtgagttgggatcctaaaaaggtgaggcaaaagcagggggcttcattagtatcttccttgggtggctggctgggtcgcctccaatcctgccctaaggagcaggacaccacccaactgtcaaacatagactgggggtagttcagtgtgtctccacattaccagggcattagaagttgatgccagggagatgagaggaccaagtcaagctggtaggtaagggaggatactgtaaccctttgttgaggtgccccaaaggaaaaggcagggttgaagcggcccgttgtctgagaacatcaggtttggaagtccctcccttataatctggcctatcccagcccaaagcttcagctccaaaccatgctgagactggaaagcactgacagcagcaaagcccaaagagttgggaaagtgggggaaccagcacaggaaggctcaatacttaaccgtagcaggcaaaataaagggcgtgggcaggccctgcgcctgttgctgtgacgttcagc

SEQ ID NO: 315742 - DNA, 1689 bp, Homo Sapiens
  misc_feature (97)..(97): n is a, c, g, or t
  misc_feature (102)..(102): n is a, c, g, or t
  misc_feature (221)..(221): n is a, c, g, or t
  misc_feature (1056)..(1056): n is a, c, g, or t
  misc_feature (1058)..(1058): n is a, c, g, or t
attttcaaaaacctcacccaaaatcccacctaagtcctgcgcagaaccatttgcagagcctaactttgtctacaaagtctttggtcaggtcctgaantactntaccctcatctctccacataaactggtttcaagcgggtcttaagcctaaggctgctatcctttctcttacttccacacaacctctggtttctttcatgcagttccttgggccccacccnccattcattttgtcatgaggctttgtcatgttctcaacacaaactgcctctggtgagttgggatcctgaaaaggtgaggcaaaaagcaggggcttcattagtatcttccttgggtggctggctgggtcgcctccaatcctgccctaaggagcaggacaccacccaactgtcaaacatagactgggggtagttcagtgtgtctccacattaccagggcattagaagttgatgccagggagatgagaggaacaagtcaagctggtaggtaagggaggatactgtaaccctttgttgaggtgccccaaaggaaaaggcagggttgaagcggcccgttgtctgagaacatcaggtttggaagtccctcccttataatctggcctatcccagcccaaagcttcagctccaaaccatgctgagactggaaagcactgacagcagcaaagcccaaagagttgggaaagtgggggaaccagcacaggaaggctcaataccattggcaatatggctattgcccccagggtggattacatcactcaatgtcttttttaacttttcgtagcaggcaaaataaagggcgtgggcaggccctgcgcctgttgctgtgacgttcagccccctcatgggcctccataggccctccgttcttataatcctccagagggcctccaacacattgcgatagcgggcagctgggtcaggctgtagactctgcatccgggtctgaaattacagcaaggagaagcgcaatgtcagcaatgccaacttctcgccccacctcaacacactgggcagaccttctacatggagctgtgccaatctgtgagagggatatctngntttcagcttatttccaatctatagctgatctttcttctaagccttggacctttctttttctagtcatctatgaccctaagaatggaacaccattattttccctgaaaaaataatcccacctattgctaagtgtcctggtactccaaaatgattcagagccccagcaacaaatatcaagcctgtgtttcagaagttgcttttgtgccttaatacactcaagctgacagttctttacaaatggattctaaactccagtatttactatctatgacatactttatgctgtatacctaaagagtgcccctggccctgcttcatgaccacacactgaggggcggctaatttttttatactttttcagactatctggcaatggtggctgggtctacacagagtcttggcagaagcagcattcttaatacatgcttttatttcttgggaaagaaagtttaccctgaaactgcaaaggtgggagtgtctagctagaaaccaatctagtctccaatcctgaagggcccttccagatttctaatttaaactgattgaatcccaaaattggcattagcaaataaaatcagtctcagtgaaacataatccttggaatctctctaaaggatttgatcccgggaat

SEQ ID NO: 315743 - DNA, 820 bp, Homo Sapiens
  misc_feature (149)..(389): n is a, c, g, or t
  misc_feature (412)..(423): n is a, c, g, or t
tgatggactgatgaagacagaacccaaatttcagtgcatttgaaaagcacatgagagattaagtagagacagtaagtacagataacttcttagaacttaaatatgaagcagtgatgaaaacaggtttggggccgggcacggtggctcannnnnnnnnnnnnnnnnnnnnnnnnnnnnnnnnnnnnnnnnnnnnnnnnnnnnnnnnnnnnnnnnnnnnnnnnnnnnnnnnnnnnnnnnnnnnnnnnnnnnnnnnnnnnnnnnnnnnnnnnnnnnnnnnnnnnnnnnnnnnnnnnnnnnnnnnnnnnnnnnnnnnnnnnnnnnnnnnnnnnnnnnnnnnnnnnnnnnnnnnnnnnnnnnnnnnnnnnnnnnnnnnnnnnnnnnnnnnnnnnaacaagagtgaaactccatctcnnnnnnnnnnnnggggttgttggtagctagaggatactaaggcatttactacaagaagagatggaattaaaggctgtactttgtataaaatgggagacatgggagatgctggagaatctgtgaatgttgaagaataggatctggcatagaaggagaggttgaagactcaggaagggaagaataactgaatgggtcaagtgcttcagaagccaggaatagacaggatcacagaaataatggacaatacaaatgaagataaacttgaagatttagtgatgggtgaggaagtttccatatcaagacatttaatgtattaagaatgcagtttctaccagagagtttagaggtttgaggagagtgaagaagactgaaatcgttttgagggagatgagaccactttttagggctt

SEQ ID NO: 315744 - DNA, 1130 bp, Homo Sapiens
  misc_feature (261)..(428): n is a, c, g, or t
tccaggagggtacaaaaggttcttgggcaattgtagataagtagtgaccaagtgttgcaacggggccaaggaaaagggattggaagttagcttgtgaaaaggaaagaacccagcttgcaaaagaacccggaacttcagagcagtgactttcaacttttcctgaaacaaatcactaagtatctgttaagaatatacaaccttgggccttaacccggacccccgatcagaatttccaagagagaggcctgtaagtcttagagnnnnnnnnnnnnnnnnnnnnnnnnnnnnnnnnnnnnnnnnnnnnnnnnnnnnnnnnnnnnnnnnnnnnnnnnnnnnnnnnnnnnnnnnnnnnnnnnnnnnnnnnnnnnnnnnnnnnnnnnnnnnnnnnnnnnnnnnnnnnnnnnnnnnnnnnnnnnnnnnnnnnnnnnccagaaccttaagagagaggctactgggggtgggggtggcagcatcacatgacaggccacggaatttggactttatccttagggcagaggcctcaaacctgcctcagtctaagaatgacaggaggtgtttgttaaacatgcaggcttcctgatcccatcccagacccttaagttggaatctccaggagtgagaggctcagggagagctcgagctctattcaaggcagcaggggtgggacggggacgtgggctggagtggaagcttgaggaagtctctggaagtgggcaagtgggggcacacggaaggcagggagtgactgtggaacagcatgtcaccttcaagtccttgatgtcatccagtcctcgaagctccctgtcaagtttggtgatgcagtaactgattttctccacctggaaggaggggacaggtgcctttctctcgtgccattaacctaatgcaagagggaggtaccatctgggggaggggccccacccttgctggtaactgaggacctgacctgtttccggtacggggagatgacgcccacacttcgagggctcaggcgggctttgcccttcttggaggagggggccaggagcagcttcaggtaggaagtcactgtggcagcctcttcagggtgaagaaggatgggcaattgccttcacgctcatctttatcccgcaaattccggaccggtccag

SEQ ID NO: 315745 - DNA, 1040 bp, Homo Sapiens
  misc_feature (1027)..(1027): n is a, c, g, or t
tttgcatagaacaagattttgttttcagagttttcttccttccccttcccccaattgttagcagcttgatgtgtcattctccccagcagggaggcgggtggaatggcttgggttgtaaactccctcccccagccttcctgtcccttggaggggcagttcagctgggttctggttcagggtcaggcaggcagttaaggcttggctggtgcgagaaggctgggtgctgtgtcttcagagctcattcctccactctggctccacttgcagagacaggcccccttcaccctcccgctcctgggggaggtagtcatggctgtggggccctgaggtagaggggctgagcttgctcagaccttgcagtaaattctgtccctgttgcaggtccagtttggcagggaagggacacccggtataccctccgttttctttacagaactccaggaatactttccagtcagggtcatggcccaggagaagggggttccccacgatgatgagcagggccttggcccgggtcacagctacattgaacctcttggggttcttaaggaaacccagattaaagtccagatccagctgcacaaagctctggctgcttcgcacggtggagatgaggatgacgcttcgttcttggccttggaattcttctactgaacccaccttcaagtccttgatgtcatccagtcctcgaagctccctgtcaagtttggtgatgcagtaacggattttctccacctgtttccggtacggggagatgacgcccacacttcgagggctcaggcgagctttgcccttcttggaggagggggccaggagcagcttcaggtaggaagtcactgtggcagcctcttcagggttgaagaaggatgggctgttgccttcacgctcatctttgcccattacgccgtgaaagatgatgggaaagccctgtcgaggtagggccgcccagcggcagaagcgttctcgatccacgacatcagcacaggcctgcagctccccttcgataatagagctggttaggaatgtnccaggatggtggg

SEQ ID NO: 315746 - DNA, 459 bp, Homo Sapiens
  misc_feature (340)..(340): n is a, c, g, or t
  misc_feature (373)..(373): n is a, c, g, or t
  misc_feature (388)..(388): n is a, c, g, or t
  misc_feature (414)..(414): n is a, c, g, or t
  misc_feature (432)..(432): n is a, c, g, or t
  misc_feature (449)..(449): n is a, c, g, or t
cattctccctcttagtggccacagcccctgcctagggagttgggatcttttttaagcgcttgcttatcgctcagttaatcctcagatgtgtccattttcacagcatcactattgtatttataagttaaatgacatccagaggttgagcaagtacagctcagatgggacaggaccgtggcttagcctccagtctctgctgggcactcctctgtaccccacagattcctgggagttctgtaaagaaaacggagggtataccgggtgtcccttccctgccaaactgggacctgcaacagggacagaatttactgcaaggttctgagcaagctcagcccctctnaccttcagggccccacagccatggacttacctnccccagggagcgggnagggtgaaagggggcctgtgttctgncaagtgggagccagagtnggaggaatgagctctgnaagacacagt

SEQ ID NO: 315747 - DNA, 506 bp, Homo Sapiens
  misc_feature (54)..(54): n is a, c, g, or t
  misc_feature (154)..(186): n is a, c, g, or t
tggcatagaacaaggatttttgttttcagagttttcttcctttccccttccccncaattgttagccagcttgatgtgtcattctccccagcaggggagggggtggaatggcttgggttgtaaaactccctcccccagccttcctgtcccttggnnnnnnnnnnnnnnnnnnnnnnnnnnnnnnnnnaggcaggcagttaaggcttggctggtgcgagaaggctgggtgctgtgtcttcagagctcattcctccactctggctccacttgcagagacaggcccccttcaccctcccgctcctgggggaggtagtcatggctgtggggccctgaggtagaggggctgagcttgctcagaccttgcagtaaattctgtccctgttgcaggtccagtttggcagggaagggacacccggtataccctccgttttctttacagaactccaggaatctgtggggtacagaggagtgccagcagagactggaggctaagccacggtcctgtcc

SEQ ID NO: 315748 - DNA, 1737 bp, Homo Sapiens
  misc_feature (166)..(166): n is a, c, g, or t
  misc_feature (277)..(277): n is a, c, g, or t
  misc_feature (311)..(311): n is a, c, g, or t
gctaaaaataaaagccattacaaaattaagccccctcctttagcaataaatactgaactgatatatacatatgaggcttaggaaggcggcaacaacagggaccttggggactctgtcccatggcaagatcccaagagttctaccaattccatgctctttgcttaanacatagagagcagtggaagagacaggggagatatgccagacgagtatgtggccctgtagagagctggaacatgatgaggacagaggagagagaagaagatacgaagtgtanatacaggccggggaagggggagtcttcatttagnacattcctcccatccctgctgaatcactggttgtggctggcccggctgtccagagccttgtctcctctcctcccctccctgttgagcatgcgagtcgaaggtcattcacactgtggtcgcgatgccactgtggcaacagcctggctgctggatccctgaggcttcccattcgccactagcggggggggcgtctcacactcgaaacaacatggcaatggtattgtcctttcctttgtgctgaattcggtgaagccgcaggttgggctcaggaatggctacagagtctccaatgagcactccccagctctgcactatattgtacaccatcactgcatagcaaggtccatctgaatctaccaggccaaatgtaaaggggactttctcctctgtggtgaggctaaataccacctttcccaggatgacggcaccgctgttcaccccaggctgaagcgtactcagtggcttgagctccagggtcactttctgcccagaggctgactgatagtgcccatcactgcaagggcctagatgggctgggcgcaagcttcccagcatgctctgcagctttttggtcttcacctttcccttactctcaaggaggctggttaatctatccaggaattccagaagttgttgctctcgttgccggggctctggccaggcagggtccagggctgcagcccgagagaagccctccagggcctccccataactctcttcatatttatgcaacgtcgccctgttcagatgaaggtcaggattgctagaagcttttctgtcaactttctctgcttgggcataggcactgagggcttgctgggagatcttagggttctggccagtagagaagtaaagggaaagatatgaattcccaagaatataccaggagcggccatcatggacatccatctgaacagccaacttagcctgtcggacactgtccatgacatggtgagaatgttcatcttcagtgtcagtccgcagctgacgaagcaccattgacaggttttgcaaggagatctttgttcctgcaatgggtgagggctcctgagaagcaggtgtgggcagctgcaacatcccttttttttccagtacacctcatcccagctggttccaggcttccaccagctcgggctccagcttcacagcctttgacagaagctcctcagccttagggctatagtcaggagtcactatttagtgctttcccagttagctattagaacttgtgccttgccctggacagaacccactacttcttccatctgctgtagggttttctccatctccttctgcacatcctgttgcttcctcccagcatcctcatcactatgtgtctcgaaatagcagtctcgaaatgagtagagctgatccacgagttcctgcaatttctgcaagatcggcttgacttcttcctcttcatcag

SEQ ID NO: 315749 - DNA, 852 bp, Homo Sapiens
ggagctttggacaaatttattaaaccatacaggcggcgttagcagagaaatcattccatgattgatgtgttacatttggccactaccttggaatgtataatttaaaaattatatttttcacaactaagcctttggccaaaaaagtcatttagcacatctttaaagatcaataagaaatggattttggacattaaaaagatcaagtcactgaattaaccagtagcaacccccattaatctagaatcccatagtgctgaaggtagaggtgtctgtgcaaagctagtcatttgttaacagcaatcagaagagatgggggcaggcacacctgtcagaggtggcagcagagctggcaggacaggacggctgggctggtctggtcaggtgagcatgtcccagagacagcagcaacagagagccgtccagcaggctgtgaggcaggtggatggtcctagctcatctcttctttggtcttctaccacatacactgtggttttaggaggctcctgaggtccaccctgccagccgtactgtgggtatccttggtaggggtacccttgaggaggtgggtagggtccccccataggtcctggacccattggttgtggtggataaggtgggtatggggccgttggaccagggcctggatatggtggagggttctcttggttcatcggggacctgtaaagtgcacctctcctctccacgaaccgactggataacggtcgggtctgaacctgaggagcccggaccagcccgcagtagacttgccgcacctgtctcagagcaagtgaggagcagccgggcgcctgacgtcacggccgctcccagcgccgcgaaccgggcgacgcgtgg

SEQ ID NO: 315750 - DNA, 811 bp, Homo Sapiens
ttttttgggcttgggacaaatttattgaaacattacaggcgggttgttagcagagaatcatttccatgattgaggtgttacatttggcccctaccttgaatgtataatttaaaaatttatatttttcacaactaagcctttggccaaaaaaagtcatttagcacatctttaaggatccaataagaaatgggattttggacattaaaaagatcaagtcactgaattaaccagtagcaacccccctttaatctagaatcccatagtgctgaaggtagaggtgtctgtgcaaagctagtcatttgttaacagcaatcagaagagatgggggcaggcacacctgtcagaggtggcagcagagctggcaggacaggacggctgggctggtctggtcaggtgagcatgtcccagagacagcagcaacagagagccgtccagcaggctgtgaggcaggtggatggtcctagctcatctcttctttggtcttctaccacatacactgtggttttaggaggctcctgaggtccaccctgccagccgtactgtgggtatccttggtaggggtacccttgaggaggtgggtagggtccccccataggtcctggacccattggttgtggtggataaggtgggtatggggccgttggaccagggcctggatatggtggagggttctcttggttcattggggacctgtaaagtgcacctctgctctccacgaaccgactggataacggtcgggtctgaacctgaggagcccggaccagcccgcagtagacttgccgcacctgtctcagagcaagtgaggagcccc

SEQ ID NO: 315751 - DNA, 587 bp, Homo Sapiens
ttttgagctttggacaaatttattgaaacatacaggcggctgttagcagagaaatcattccatgattgatgtgttacatttggccactaccttgaatgtataatttaaaaattatatttttcacaactaagcctttggccaaaaaagtcatttagcacatctttaaagatcaataagaaatggattttggacattaaaaagatcaagtcactgaattaaacagtagcaacccccattaatctagaatcccatagtgctgaaggtagaggtgtctgtgcaaagctagtcatttgttaacagcaatcagaagagatgggggcaggcacacctgtcagaggtggcagcagagctggcaggacaggacggctgggctggtctggtcaggtgagcatgtcccagagacagcagcaacagagagccgtccagcaggctgtgaggcaggtggatggtcctagctcatctcttctttggtcttctaccacatacactctgctctccacgaaccgactggataacggtcgggtctgaacctgaggagcccggaccagcccgcagtagacttgccgcacctgtctcagagcaagtcc

SEQ ID NO: 315752 - DNA, 439 bp, Homo Sapiens
  misc_feature (77)..(89): n is a, c, g, or t
tttctcctcataaatcaggtagggactcttgaccctctcctaagtctcaaatcagggttattaaaaggaaccactgnnnnnnnnnnnnncagtagcacagaaatctacgtagtacttctgccaaatgccacatgagagcagtggcagaatacagagagaccggcgaccacagcaaggaactgtaacggccaacagtcctcaggcatgcaggcctgggccaacagcacaacgcagagtcgcttcttctcagtccagcaattagaatgaccatggcagccagggttctcattaggttactttcaaaaaccacctttgctggaaacaatgttggtagtttaatctgcatatacggacatctatcaggagggagacgtcatatgggataaaacgtccatcatggcacatctgggtacaccaggacagctcgtgccgtattcct

SEQ ID NO: 315753 - DNA, 344 bp, Homo Sapiens
ggaaataggctataaagtcctaagtacagtgctatattctcatatgtttaggaaaaatggctcagagaatttggctcgcctcgatttaatttactttatatttcagtgatagatgagtcttccaccttcactttcctgaggtgatatattaacacttaccctagactctgcaggtttgaggaactcttatgaccagctacatacactagatttccttggctaacccaaatctttggccaaaccacaactctcagatttcatagtcagtggtgcacaaaccttcgttagatgatgtattcatgaagtctagtcaccaagattgttctcttctggtctctgggcct

SEQ ID NO: 315754 - DNA, 593 bp, Homo Sapiens
  misc_feature (25)..(25): n is a, c, g, or t
  misc_feature (45)..(45): n is a, c, g, or t
  misc_feature (50)..(50): n is a, c, g, or t
  misc_feature (89)..(89): n is a, c, g, or t
  misc_feature (108)..(108): n is a, c, g, or t
gccaaaggttgggaattttaaaccncccaaaattaaccggtaccnccggnttaacaaatggaccttaaaataaaggatacctaatatanattaatttccacatttttntaaatcctccaaactgaaatacaattctgaaagtatttgtgccttgtcatttgttcaataaatttgatttgtttttaaacaggtcacaaaagttcaattagctaaccagaattctatatctattgcctatctactggggttcagtcttaagtctgactatatcaaaagcagcagctcagaatttatttcataaaattaatcccaagagttactgggtagcttttaaagtatttcatcgcttataatacaactcactagatagatagtctatactagtgactcgtgacatcaaaattatctggagagttttttaaaaaatacgtgggatccacatcataactacactaagaatcaagaatgtctgtattttttttaacgttcccaggttataatgctatgcagcctagcgtgggaaaccccaacgtaccactaagcctgtggttctcaacttttcaggtgcactggaatcactgggggaaacttta

SEQ ID NO: 315755 - DNA, 490 bp, Homo Sapiens
aactgggaaatgatgttcttctggacgtataaataaccatcaggtggccaattctcatccagagtggacagggtggaatgggatcatccctgctttcaaatagggacattgacgtacagagagaggagtgggttagctggggccccagggcacagcttcaccaccctggggaggtctggggagagcatcctgtccttcaggacaccccccaccagcggctggaggtgagcacgccatgagtcgccccaggtctgggaagagtgggtgcatgggtgcttaagaggctgcattctcagcaggccctgcacttgccccgtcctccaacccctgtaagccgacgtctcctctggctccacttggatgtccgaagccgggtcaagaccagctctgaggcctgaatcagtctgtgctgcaggatgtgcacgcccttcagggagaccacggcaagctcctgcagcccatccccggtcaggtccacgtgagccatggc

SEQ ID NO: 315756 - DNA, 888 bp, Homo Sapiens
  misc_feature (117)..(170): n is a, c, g, or t
  misc_feature (211)..(426): n is a, c, g, or t
gctccaaggttcgaggtcttaggcccctcgccccaaaaacttattagggtatggttccgtttatagtggactcttgtcctaagtggacaaacactcgaccctatcttggtatattcnnnnnnnnnnnnnnnnnnnnnnnnnnnnnnnnnnnnnnnnnnnnnnnnnnnnnntgccagactttaacgtgtatttttccaaaggattcacgcgnnnnnnnnnnnnnnnnnnnnnnnnnnnnnnnnnnnnnnnnnnnnnnnnnnnnnnnnnnnnnnnnnnnnnnnnnnnnnnnnnnnnnnnnnnnnnnnnnnnnnnnnnnnnnnnnnnnnnnnnnnnnnnnnnnnnnnnnnnnnnnnnnnnnnnnnnnnnnnnnnnnnnnnnnnnnnnnnnnnnnnnnnnnnnnnnnnnnnnnnnnnnnnnnnnnnnnnnaggagcttttgattcaggtgtgggatatagtctttgtggtgcgccgttttttaaggcggtttttttcccggcaagaaatcatgtttattcacattccccaccccaccacctgagagtcactttcactccaagccctgggcctgacgggagggggccaaagaggggggctgcctaaggcagggcccagaccccacagtgtgggcctctggagctgtgtctttactcttgctgccgatcaatcccatgctctgaaatgcgcacactctggctccttagtagatgccataggtgggctcatgactgtccctgtaccggtccaggtagcgcaggggctgccggtgggggaagcgcttctgcttggggtggtaagggggcggccgcacgaactcaaacaccggctcccgcatgtccagaagctggtggaagatgtaggtgacggagtcatcccagcggcactggaag

SEQ ID NO: 315757 - DNA, 659 bp, Homo Sapiens
  misc_feature (318)..(328): n is a, c, g, or t
  misc_feature (349)..(452): n is a, c, g, or t
  misc_feature (489)..(577): n is a, c, g, or t
caattatttagttggtttgggtatcttaatatcaaacggttagactttcaagagaaaaagaggacaatttttaatgacagcaaaatcaagtcatcaaaagtacataatgatcaaatgaaactgtttacaaatataacttcatagtaaaactgacatactgaagggagaaattgataaccccaccatggtagttgaaaacgtcaacatttatctctcagtatttggtaaaataagtagacaaaaaaattagtaacaatatagaaaacttggacaattcttttaatcagctccacctactttgtatgtgtacatgtgtannnnnnnnnnngagatagaatctcactccatnnnnnnnnnnnnnnnnnnnnnnnnnnnnnnnnnnnnnnnnnnnnnnnnnnnnnnnnnnnnnnnnnnnnnnnnnnnnnnnnnnnnnnnnnnnnnnnnnnnnnnnngtgcagaggaccgcaactggtttattttttaaacttnnnnnnnnnnnnnnnnnnnnnnnnnnnnnnnnnnnnnnnnnnnnnnnnnnnnnnnnnnnnnnnnnnnnnnnnnnnnnnnnnnnnnnnnnctagttgttatttataatacagtaaatgtatgattagtggtgaatggctttcagtgatattgcttctttattagtaggatgc

SEQ ID NO: 315758 - DNA, 391 bp, Homo Sapiens
gggctgcaggattcggcacgaggcagttcaagcaatttgtatcctgatttacatttcagcattgtttatgaggttgaagaagcataataccacctttgttttggcggggggtaattgaatttaaggttgcctggcttagagatgtgtgttagactttagtctccagcaaataaaacccttagtaggtccaagtattaaagtcagtcttaaaacttgaattggccatattgtacagggctggtatgaagttttttcttttctttcttcctaccacaattaattgtatacatggatttaacaattgtgtaatctattgtatattaatgcagttactttaagcgaagccttacgagtttacttttttcaatggttgttatacatcttattgtgt

SEQ ID NO: 315759 - DNA, 670 bp, Homo Sapiens
gcctaccatgacctagaagcatttatgatttatttgaagccacactgtttgcatgggtgttacttgtctgtacctcagagtctgaggatgttaactttggaactcgcagtcctctagaacagcttcagattatggctttttcttttgaggaagaaattattcactccagatgcatgccctgagccagacctcactgctgcactttccaaggtgctaagattgctgctctccaatgctaactttctgacacagtgctctagaaccctgcctgtggtcctgagcactgatcagcttagctagaccatggttgactcttcttggagattttcacttggtcctagaatgtggcaacgtagttgttgctcgccagaacgtgggaccaaattggcctcaggtgttgagtccagacttctgcttttgagagagggctgcactttttcatggtatttctaggggaggtggtaggctgcatgtgccacttggtcttgttgtgagtatgctgacaccagaaactcagagccagcttgtggcaagcagttgaagtggcgggtctctgacttgctcaggacaaactaggccagtggttttcaaactgcttggcagagccctgaagtttcctaggggatgcctcaggagtccttggtgagatgaatgggctggtgagctgaac

SEQ ID NO: 315760 - DNA, 636 bp, Homo Sapiens
  misc_feature (466)..(466): n is a, c, g, or t
ctaggtcgcgctaggggcagcgtgaccagccagggcggagagaggatgcttaactccttaggctcgaactcctcccttcctacccacctctctcccttctcgttcgggtattcaggacttccattccccagcccctgcctctccagctttctccttctgtcccataacccctgcgggtcgcgggctggacttccagtccctgcggtagcgagcagctgagggttaagggggcggggctgctgcatttttggggagtgagcgcatcctagtggctgccaagaggggcgcccgacagggacctcacaagcccccaagcaggggcaacaggtgttttggagattagagaccctagccttgttcctcaggctcctcttaaagaatctgacccctgagggtgctgggtagagtgaggtcgacaggagcggaaggtctggagtgggtggggcggagtgggagggacgcctanagatggcaggaggaagacctgggcgctcttaaccacccccaacgcccttgtctgcatgtctttttctctgtctcctccttttctgtttcttctcccagacaggtgaagaaacaagaaaactaagaaatccgagcggttggagggggagtctgtgtggatgggatggggac

SEQ ID NO: 315761 - DNA, 1332 bp, Homo Sapiens
tttaaaaggtcaattctattttattggttctgagagggaggattcacccagtggatccttttccctacactctcccctcccccaatattgaggctctctcccaactactgcctattcagcattctctatctaaccctccttccccttctacttcctatactatcctacccctggccagcagtaccccaaggccaggccctcagctgtgggggcgtgtgctgagcaccaagcagagggagctgagcccggcgccagccttctccagttctgagcaggacacaggtaccagggtgacatcagagagcttctgcagtgcctcctggctgttgggcagatccccacctccacggtgcaggaggaaagggggcacaccaggcaacccaggacgaagaaagagacagtcagcagctgcgtcatctgggagggtcagggaggcatatgggtgatctgtcagcactgccattgcccggacagccttttgggcagcgtcgctgctgcctgccacaacagtgcgaggtccccccatgccgcagagaccgcgcaggtgggagggacccgagactggcacagtggagacggcgaagtcccggaacgtgtccgccacgatctcagctcctcggtgattggtccatttggagaggcctacgaaaaactcccggccggtgaagagaacgtcagtgccatccagcgtcgcgttctcgtctcctatttccacaattcggagccccaggtcttgcagggctttgcggactccatcgacctctggcctacgagcggggctccagggccgcgtgattagggccgtgtccccttggatcacggccgtgtcgccaagcagcggtcccagcggcaatgactcctcaggtggcagttctagcagctgtagccccagtcgttgcctcagtttacctcccagcaccccgtgctccctttgagctttggccagatccagagcgggaaggccagcccccgcaccttcccccgacgccaggctctctgggactccccggatcagggcatgggagcagcggcccagcccctcccccggcgtccccatcccatccacacagactccccctccaaccgctcggatttcttagttttcttgtttcttcacctgtctccagcggccacccccactcctgtcgcgctgtgatctcggctggggccccaccccccgaggacagagttggtggagaagggagtccccgtcttcaagcctcggggactgggagctctggcttttagcgggggtccttgtgtaggcgagctcatatactacgatggggcaggggcgcgacggtctggtggctccggggcattgtctaagcg

SEQ ID NO: 315762 - DNA, 1391 bp, Homo Sapiens
  misc_feature (395)..(407): n is a, c, g, or t
  misc_feature (779)..(793): n is a, c, g, or t
  misc_feature (1312)..(1312): n is a, c, g, or t
  misc_feature (1349)..(1349): n is a, c, g, or t
caaaccaatccatgataatgtcagtaggagacttaaccttagtgtgttacacacctgacttaacatctctaaactcagattgaaaagagaccgaatgtgcagattccacagtcttaagctttccccttcagatgtcagtgtctgcatgtgggaaagccatagcacacatcttacctttccaagtaatcagattgagaaaaccctatgagtattccagactacagagtttgcccaaatcaactgtaaatgacacttgtgtaacgtatatatagtgtttcatgaggtgtatataaaatagcaaattatgacagaacagtgatcacatatatttggatttatatgatatacagttacagtttactctgcagaggtaccttacctggtattctttgaannnnnnnnnnnnngggaggaggaagagagcaacaaatttgattatatttttaagtgtcttagatcctgagaaagatttattgtgcattatttgaaccctgtcaatatctttttgagtaattgttttgtttcttacccttaaatagtcttgtgaagctgtaggcatgatagataacatggcttttactccttactgtttgaaaagataagtacttttagcttctttctgcagccatttcatctgcgccaacactttggaacctaatactgtgtaaggctttacaatatacggattggctttttgtgacccagattgattggttgccacatgttatgtttgttgaagtggttctcatgcaaaaatattacacatttgtgttctgggnnnnnnnnnnnnnnnaaccaactcaatatgtgtttgatgatagtgaattgataaaacccgaagcttttccctgtaaatcttacatctttgcctttaaagaatgggttacaaccatcactagatcacagtagtgcctaatgaaggttgagaaccgtaggagaggctctcatgctgtaaataatgttgcaggctaataacctttcatcacttcctttgtgcgcttcctgccttaagtgacaagtagcaacatggcttgggtcccctgtgcagcatcagcttatgctgccacaagtcagtttgcaccctaggtgcccaggagctagtatccttagatctttctatcgctaacttaattctcttcgttatttatctgaccctctaactccatgtctaacttgcattaaaaattaatttgttttgttaacatctgttccttctttttcagctctcctagagtatttctgagtgttgtgttcatctaatctttagtattcttttaattacaaattgacctcacagcttgaggtttcttgngtcctattctgtggactaccttgtgctctttgcttcncctcccctcgcataatacctatattgttttttttggccttgg

SEQ ID NO: 315763 - DNA, 545 bp, Homo Sapiens
  misc_feature (13)..(13): n is a, c, g, or t
  misc_feature (29)..(29): n is a, c, g, or t
  misc_feature (44)..(44): n is a, c, g, or t
  misc_feature (54)..(54): n is a, c, g, or t
  misc_feature (59)..(59): n is a, c, g, or t
  misc_feature (70)..(70): n is a, c, g, or t
  misc_feature (105)..(119): n is a, c, g, or t
aagtggaaaagtnaaattcaagtcaacanatcatcgctgtcagnaaaatgtcangaatncagggaagganaaaaataattttaaaatgcccctgtgggaatcttnnnnnnnnnnnnnnnttttaaatgttactatgaatcaacaaacacagtcactgaagctaatagcaagaacaggctctggaatttgcaattgaatgtgtgatctctggcagccgctacatattccaatggacaaagtccgatgcttcctacacagagaattctgctgggtcagctcgtggagtgtcagcaggaaaggccacccagggatgcctgtcttggttctcagtttctcatcagtgtgtactttcttcttggtgagaggaaacacacctggtccctgggcctctgcatatagcatcaggcagggtctgagggcccctgggattctcagaatagaaggctctgtcccttggacaaggccagctggtgttacttggctccacaagtgttgatgtttttcccatccacggcatcttccacgagggaaatgctgtgccgaat

SEQ ID NO: 315764 - DNA, 350 bp, Homo Sapiens
  misc_feature (215)..(229): n is a, c, g, or t
cacactgatgagaaactgagaaccaagacaggcatccctggggtggcctttcctgctgacactccgtgagctgacccagcagaattctctgtaggaagcatcggactttgtcatttgaatatgtagcggctgccagagatcacacatcaatgcaaattccagagcctgtctgctatagctcagtgactgtgttgtgattcatagtacattaaaannnnnnnnnnnnnnnaagaatcccacagggcacttatttaaaatacttctctccttccctggactcatggacactttttctggacaggcaggaatggactgtgtggaccttggaactttcacattttccccacatt

SEQ ID NO: 315765 - DNA, 871 bp, Homo Sapiens
  misc_feature (609)..(623): n is a, c, g, or t
  misc_feature (812)..(812): n is a, c, g, or t
  misc_feature (820)..(820): n is a, c, g, or t
ttttttcggtaacacatgttccttttaatctgcttatcttggaaagcttcatattcatcctcttgagccgtcaaccatttaccaaaagagaatggtcagctccccaagttgcccacccaagttacctatccattccactgacaccacaaaaggcccaaacaagtctctcttggggagaaatttttagggaaaggtgtgcaaggaattcagagtcatccacccaaacttccaaaagtatactgtgtggggacaatctgcagctattaaaaatatacacatacaaaggtacaggctacaaaatcatgggggctcagctccttaactctgcattataagaagtagggatttcacattcgaggtaagctctggggaagggggccgcattatgattatgattctgtgtttgatctccttccatctttatttttatggactagtcagaacacagtgaaccagccagtgaggagtggaaggggttaatccgaacaatccaagggccaatgtgggaaatgtgaagttcaaggtcacacagtcattctgctgtcaggaagagtgtcatgagtcagggaaggagagaagtattttaatagtgccctgtgggagttcttnnnnnnnnnnnnnnnttttaatgtactatgaatcacaacacagtcactgagctatagcagacaggctctggaatttgcattgatgtgtgatctctggcagccgctacatattcaatggacaaagtccgatgcttcctacacagagaattctgctgggtcagctcgtggagtgtcagcaggaaaggccacccagggatgcctgtncttggttnctcagtttctcatcagtgtgtactttcttcttggtgagaggaaacacacct

SEQ ID NO: 315766 - DNA, 388 bp, Homo Sapiens
aagtccactccattagccaacagattctcttgaactttgtctttgctatcttccaatacatcagccatgtattgagctactttcttaaccactccttctacaaatgcatccagtttagccagttcatctgacaagccaaccaagacatccaacgtgccaacctttaagtcaggaatattgaacttggaagtgacagcaagattctccccaggagcagatataagccagaactcagtcatgtttgttactaggtatttcctcaaaaatcaagagagattccaggaaggtgtcaaacgaggaagtagcagcagtaacaggtaccgaggcagacagcctagcggacgctatcggctcagcgatccatcccttcccgacctaagctccggcc

SEQ ID NO: 315767 - DNA, 1265 bp, Homo Sapiens
attgtcgggggaggagcccattttcacttgaattccagcaagttgcaatcaatcttgtagtacacataggggtagtattcttgttgactcaggtttaaacctggaatatccataggagcatcaataatagctgctgcactgctgtctagatgtttatacaattcatgtaatacttctctcagtttcttcaaagttttcttattgggctgaagtagcattgcttggaagttcactggcaagccataccttaaaacagactcaacgaaaacccgtaatgctttcacgtgaatccatgcaataaatgcttcactaaaattcactttcagccaccgtacaagtggtccaaattgttttttcttatcagtagaaagcctgttcatttcttctttatctgctttcatctcctcttcattatactggaagtcacgaacaatgaaatttgttttcctctggctttgtgtcctgaaagtcatcaactgcccttccctaaacaaggtgacattacacaggtaactgtcttggtcctctgaaagaacattgctagaccttggaactaccatttcggctagtgtttcatactgcttaatccagtcgttgtggtttaacttgggaactactaccagtaatgtgacgagatactctgaatcaagaacaaagtcatccttcttcacaatttctgctagacttctagttagcaaacttcctgcattctttcgttccaaattctgaagatttcctttcaggttattgtatgcagatgctcgagatttcagggactgcttgattggatatttggccatgtcccactggaaccttgttatataagtaaccaagtccactccattagccaacagattctcttgaactttgtctttgctatcttccaatacatcagccatgtattgagctactttcttaaccactccttctacaaatgcatccagtttagccagttcatctgacaagccaaccaagacatccaacgtgccaacctttaagtcaggaatattgaacttggaagtgacagcaagattattgttctttgaagttgccgcatgcaatttctcccatgtttgctgacaggttttctccccaggagcagatataagccagaactcagtcatgtttgttactaggtatttcctcaaaaatcaagagagattccaggaaggtgtcaaacgaggaagtagcagcagtaacaggtaccgaggcagacagcctagcggacgctatcggctcagcgatccatcccttcccgacctaag

SEQ ID NO: 315768 - DNA, 950 bp, Homo Sapiens
catgccctgttaatgcaggatacccataagcaacttctagagagggtgctaccggcgccctgtcctcctcctccaccctctgggtgtgtggacaaaggatgacgatgttcctttgatgtggcgtatgaagcagcatgctgcagctgttggaggaaggagttctgaatcctgagacgacagtggtggccatcttcccatctcccatgatgtatgctggaccaactgaggtccagtggcattgcagagcacggatggttgcagggagccaacttttacattgttggacgagaccctgctggcatgcctcatccagaaacagggaaggatctttatgagccaagtcatggtgccaaagtgctgacgatggcccctggtttaatcactttggaaatagttccctttcgagttgcagcttacaacaagaaaaagaagcgtatggactactatgactctgaacaccatgaagactttgaatttatttcaggaacacgaatgcgcaaacttgctcgagaaggccagaaaccacctgaaggtttcatggctcccaaggcttggaccgtgctgacagaatactacaaatccttggagaaagcttaggctgttaacccagtcactccacctttgacacattactagtaacaagaggggaccacatagtctctgttggcatttctttgtggtgtctgtctggacatgcttcctaaaaacagaccattttccttaacttgcatcagttttggtctgccttatgagttctgttttgaacaagtgtaacacactgatggttttaatgtatcttttccacttattatagttatattcctacaatacaattttaaaattgtctttttatattatatttatgcttctgtgtcatgattttttcaagctgttatattagttgtaaccagtagtattcacattaaatcttgctttttttccccttaaaa

SEQ ID NO: 315769 - DNA, 483 bp, Homo Sapiens
  misc_feature (262)..(262): n is a, c, g, or t
  misc_feature (463)..(463): n is a, c, g, or t
tgttaattcaaatgaaattcatttaaacagttgacaaactgtcattcaacaattagctccaggaaataacagttatttcatcataaaacagtcccttcaaacacacaattgttctgctgaagagttgtcatcaacaatccaatgctcacctattcagttgctctgtggtcagtgtggctgcatagcagtgggcttccatgaaaggagtcattttagtgatgagctgccagtccattcccaggccaggctgtcgctggccatnccattcagtcgattcagtcataggcgaatctgttctgcccgaggctttgtggtcaagcaaaaattcagccctgaaatcaggcacatctgttcgttgggactaaacccacaggtttagtttcagttcaaagcagggcaacccccttgtggggcactggaccctggccacttggggtgcatgggcggtttttggcagctgggngaggttttgggccccaacag

SEQ ID NO: 315770 - DNA, 828 bp, Homo Sapiens
ttttgaagcttgttgctgctttattgaaacttcctccctgtcgcacacaaagcaattacacaagggggtattgccagggagcttttgcagagccttctccctctgtaccccccgacagtccccagagaccctgcctccgtggcctccacctctgggtcagctccctggaggaccccgacacacagggaagcaggcacaggagggctgttggggccaaacctccccagctgccacaaccgccatgaccccagtggcagggtcagtgcccacaagggggttgcctgctttgactgaactaacctgtgggtttagtccaacgaacagatgtgcctgatttcagggctgaatttttgcttgaccacaagcctcgggcagaacagattcgcctatgactgaatcgactgaatggatggccagcgacagcctggcctgggaatggactggcagctcatcactaaaatgactcctttcatggaatcccactgctatgcagccacactgaccacagagcaactgaataggtgagcattggattgttgatgacaactcttcagcagaacaattgtgtgtttgaagggactgttttatgatgaaataactgttatttcctggagctaattgttgaatgacagtttgtcaactgtttaaatgaatttcatttgaattaacaattatacagccactcagaggtcctacattcgccagagttggcatccagttgatgggttcatttgaattaaatggtttggaggctaacgtgattttttaaattgaatttcatcactattctgtgtattctatttatcactattctaaatgactcatggt

SEQ ID NO: 315771 - DNA, 872 bp, Homo Sapiens
  misc_feature (49)..(278): n is a, c, g, or t
agtcgacggtaccggacatatgcccgggaattcggccattacggccggnnnnnnnnnnnnnnnnnnnnnnnnnnnnnnnnnnnnnnnnnnnnnnnnnnnnnnnnnnnnnnnnnnnnnnnnnnnnnnnnnnnnnnnnnnnnnnnnnnnnnnnnnnnnnnnnnnnnnnnnnnnnnnnnnnnnnnnnnnnnnnnnnnnnnnnnnnnnnnnnnnnnnnnnnnnnnnnnnnnnnnnnnnnnnnnnnnnnnnnnnnnnnnnnnnnnnnnnnnnnnnnnnnnnnnatgagccaccgtgcccactgagaatttaatacactttatgtaagttaattttttatgatagttatctagctttgccagaccaattttgttagtaaatttaaaacattaaaaaattttgaatcctcctaattctgtgtctctaatttagtaattttaagttttgatccttgtttcattctatcattcttttatttaacaaaaattgtcattggcttttctaaaagtgaatcgtgaatcatgattcatgtgaaataattaactctaaaacagcaaagataccttttagaaccttcattttttataaattgcattaacaagttatgcagtgatgtgaagatacaaactaaggtcattaagttttctttaatttataatttatattaacctattcattgacccaggatttgatagtttgtgattcaagcaaaacaggcaaagaccattaaaaacaaagacagaaaatgagcataaatcacttgagaaatatgagcagaatgggggaatgggacagaaatctttataccagtaatctgaaggccagatagttcctgggtttggaccttaaatttagtctgagttcctgggagcagagaa

SEQ ID NO: 315772 - DNA, 223 bp, Homo Sapiens
tgagccacatgcccggccgagaaagcattttcttaatacctcccaaggtagtattaattatcctagagatagtgacttttgtcaaccatgaaagtataggtaacataagcgctagaagttcattaaagtaacttttaaacccaccttaaattatggagcttttactagtatattaagttggtgaaatctaaattcttttctacgtcattctggatccatgtgt

SEQ ID NO: 315773 - DNA, 1213 bp, Homo Sapiens
  misc_feature (1087)..(1087): n is a, c, g, or t
  misc_feature (1113)..(1113): n is a, c, g, or t
  misc_feature (1121)..(1121): n is a, c, g, or t
  misc_feature (1128)..(1128): n is a, c, g, or t
  misc_feature (1139)..(1139): n is a, c, g, or t
  misc_feature (1154)..(1154): n is a, c, g, or t
  misc_feature (1157)..(1157): n is a, c, g, or t
  misc_feature (1163)..(1163): n is a, c, g, or t
  misc_feature (1171)..(1171): n is a, c, g, or t
  misc_feature (1177)..(1178): n is a, c, g, or t
  misc_feature (1183)..(1183): n is a, c, g, or t
  misc_feature (1188)..(1188): n is a, c, g, or t
  misc_feature (1190)..(1191): n is a, c, g, or t
  misc_feature (1202)..(1202): n is a, c, g, or t
  misc_feature (1209)..(1209): n is a, c, g, or t
tttaatctgtccacaacccaatagctttatctctaaaaaggagtccatctacacttcagcttccccattccagggaaatgaagtctttccattttggggtggaaagagcaggtattgacaatatttcccaaggaagctgtctcactttgaaaaaatgaatcactgacagtgttcagtatcaaatctagttttaatcttctataacaagtcaccttttcttcccacctatatccaactgcgcctagtggtacagtgagaatgatggcctcctctctttccctggagtctgaggtattggcaacagcagtcacccactgctgagaggacttaggacccagcagaagtcaagggtcattagtgccctgcagctgcagggatagcctcacttcaggtggggatggggtaggatgcgggcaggacagggcctaggaaaagaagaagggtacaggagccttcctgactgcagaagtttcctgtttgtctgaaggcaggaaataggagctaacggagtctaaggccaaaggttatcttttaaatagagcataggatcagggagctgggacctcactagccactgataacttccagcgccacccgggtgagagaaaaggcgcagaaatggaaagtgaaaggttcagggctagccaggcaggcccctccttttctccccgcagagcgtgcagggggaaggccaccgtgggatggtgctccggaacctggactctcttcactcagccttcttggacactcggcccatcttggtgcggatgtttcgtaggaggaagaaggcagccgttctggccgcacaaatcacttcagccacccagaaggctgtgctccaactgtagtgcttggcaatggtgctgaagggcagcccagccagaaagccgcccacattggccatgagtcccacaatggcgtgggaggtgccacacaagttgggaggggcactctcgttggctatgactccaaacagggcaatggggccatacgaggagaaaccaaatacagctcccaataccaggatccagagcttggggggagtgaattggtcactgttacccggaagaggtacatggacactgtnatgccagctatcatgaacagcaaaangcaatggngagggtnccgtagttggncagtaccgcctttgncangggccngtctacangtagcnngctgngatgngnntacagggcccnacattcnaggg

SEQ ID NO: 315774 - DNA, 566 bp, Homo Sapiens
ttactatgtgatgtatttatatttttagtcctgagattgttacttattttatatacctctgcttaattattttccccactatctatctgacctccttaccccctctactgactgcatgtcacactttgtctatctcggaccttttatatttatttattcatttttttaaatagagggtctcactctgtggtccatgctgtagtgcattgtcttgatcatatctcactgcagccttgaactcctgggtttatgcgatcctcttgcttcaacctcccaaagtgctgcgattatatgtgtgtgtgagctatcacacctggcctagtctagtatatacatatgtctatattcttcttcaagtatgggtttcttatatacttacttccttcttccttggttttcactttatatactttaagatatcctttctaaattccttgcttccaggactttgtttttcatctttccgttgccctctttttttgctttccccctcttatggcttctgttgtgcattccttctccttttgtcctttatcatcgttttttgtttctctccccttttctgt

SEQ ID NO: 315775 - DNA, 824 bp, Homo Sapiens
gtttcgagcaggaagcaggctccattttagcgccgcccgccgtcgccatctgtttcccttccctcccccatacctagcccgagtctgagccctaacgagaaggctgggcctaggccgctggatgctggagtgaaaggaagggagaaagggaaaaagcgggaagagtcgagaaggctgagtgttaagaggccaagtgcgacgcgcgtatccgggcagacggactgacggacgggcccgtgcttctgccgcggctgcggcgcccgcgcgagtcgcgtctaagcggcggcggcggtggcagcggcggaaaccgaaggggagccatggcggctgacagtcgggaggagaaagatggagaacttaatgttctggatgatattttaactgaagtaccagaacaagatgatgaactgtataatccagagagtgaacaagatacaactgagaaacagggatccccaagacccagtgatcgaatggaatctactgataccaaacgacaaaagccttctgtccattcaagacaactggtttctaagccactgagctcatctgttagcaataacaaaagaatagttagtacaaaaggaaagtcagcccagagtattgggatatcaagattgaagaaacagcgctgatgctgtcgaaatcgctataagagtgctcagagacctatagatcactgataaccgtgtcgaagggtctgatgagccattctcgccatgttgtggtgcgggactgagcaccaccctcttggaggctgaattgtcctatggtgtttccgcccagggggggtgcactagcacaagcgccgacaggcaaccacc

SEQ ID NO: 315776 - DNA, 371 bp, Homo Sapiens
  misc_feature (132)..(177): n is a, c, g, or t
gacatattcttttgactaattagaccacttatggctgggattacaggcatgagccaccacacccggcctctgctctgttttttaaaaagaaatgcaagagagggagggaggcagcctcctgaccattgtctnnnnnnnnnnnnnnnnnnnnnnnnnnnnnnnnnnnnnnnnnnnnnnggctactgggttcaagtgattgtcctgacttgaccgctgagtagctaggatgactggcacccggcacatggcccagctaaattatgtatttctagtagagacagggcttgattatactgtacaggcatggcacaaacgtcctgactacaggtgatccaaccgactaggtctccgtgatgggctatgacatggcc

SEQ ID NO: 315777 - DNA, 384 bp, Homo Sapiens
atgagccaccacgcccggcccagaataatttttttccacgtgcctttttaaaagttattaccaaaataggcatggtgattttttgtatttttatttggtaagtcttatcaaatacatacctctttttaatttggaatgagatcaaatggaggggcaacaaattaaaacagaattctcctcttaactttcaaaattaccttaaattgagcagaaattttaaaaatgcacaggcctatcaaacatgttttaatcagatgggtaaaaaaaagccttgtcgttccatttaaatgcactatgagggtacgacaaatagaaagacttgaatacctggtgaataacatcaagtatttgatagcacaacagggtgactacagtcaataataa

SEQ ID NO: 315778 - DNA, 823 bp, Homo Sapiens
gggggagagccggttcggcgcgtcgactgcccagagtccgcggccggggcgcgggaggagccaagccgccatggcctaccacagcttcctggtggagcccatcagctgccacgcctggaacaaggaccgcacccagattgccatctgccccaacaaccatgaggtgcatatctatgaaaagagcggtgccaaatggaccaaggtgcacgagctcaaggagcacaacgggcaggtgacaggcatcgactgggcccccgagagtaaccgtattgtgacctgcggcacagaccgcaacgcctacgtgtggacgctgaagggccgcacatggaagcccacgctggtcatcctgcggatcaaccgggctgcccgctgcgtgcgctgggcccccaacgagaacaagtttgctgtgggcagcggctctcgtgtgatctccatctgttatttcgagcaggagaatgactggtgggtttgcaagcacatcaagaagcccatccgctccaccgtcctcagcctggactggcaccccaacaatgtgctgctggctgccgggctcctgtgacttcaagtggtcggatcttttcagcctacatcaaggaaggtggaggaaacggccggcaccccccccgtgggggctccaagatggccctttgggggaacttgatgtttcgaatcccagccagtagcctgccgggctggggtaccatgggccgtcctggttttcttcaagccccagcggggaaaccccgcccttgggcccttggggtaaagccccacgaaaaaggcaacccgtcctggccccttggcctttaaatgccccgaaacc

SEQ ID NO: 315779 - DNA, 2463 bp, Homo Sapiens
  misc_feature (88)..(88): n is a, c, g, or t
  misc_feature (164)..(164): n is a, c, g, or t
  misc_feature (218)..(218): n is a, c, g, or t
  misc_feature (260)..(260): n is a, c, g, or t
  misc_feature (287)..(287): n is a, c, g, or t
  misc_feature (292)..(292): n is a, c, g, or t
  misc_feature (353)..(353): n is a, c, g, or t
  misc_feature (403)..(403): n is a, c, g, or t
  misc_feature (425)..(425): n is a, c, g, or t
  misc_feature (525)..(525): n is a, c, g, or t
  misc_feature (590)..(590): n is a, c, g, or t
  misc_feature (710)..(718): n is a, c, g, or t
  misc_feature (939)..(948): n is a, c, g, or t
  misc_feature (1021)..(1035): n is a, c, g, or t
ctatgggccgcccactccaccaggcgtctgtattttttctcctctacccgaccggggaggggcgcgcacaaaacaacagacctcgttngaagcaaacggccgccctcagaggtagtggccgctggtccacacagaaggaggtgtgtagaacgatgaggggaggnggagcaccccgcggcggcagcggcggtggatgaagaataaaccaagagggaggnttatttccaacaaggagagaagataggcggcccaggggtgtnagtggccgcgagacaacgttggtcagngtttnatgacccccactttatttttttcgtctagacgacaagaccaaaaaatatcgtccctcttanaacgaggtggcgagagagtttttcccgcgcgtgtttcatcatggtgtttntattctatgggcacacatatcnagatagtattttgcgacctccagggagaggggagcgcgagggggaggcacttcgtgaataatatattttttgggaaagtaatattgcccaagaaaaagcntttttacgacgggttgtggtgtgggggagacatcccccagccgcatgctttgtgaaatatatagngaaatttcgcccagaggtttagatatggtgggcccgtttcgggcgtgaggattttccgcattatctttgtagagaatattttgtgtttacccaaataacaaggccatccggtggttatannnnnnnnngcggggccgtgttatctttgtgtggggggggagggagattccccgagggccgcgttaagttggatgggcccaagggatttttctttagggaaaaacaggttgaatgagccattttttcacttttcctaaattggggctcctcgctccataaacgaaatggttctagaaaagtttctcgaggggccggagggcggcccgacacggtttgattcgtctttgcnnnnnnnnnncttatacacagttgcattttattacctccacattttgaagcagttcatgaccagcatagtgctttgggggcannnnnnnnnnnnnnncaataaatgaaagcatttaagaaaaaggcacgtattccttgaataggtaagaaaagctccccatctgtcccctccctttttgagggagcagcccctatgggaactcgtattggtaccccagaaacattcagcaaagcaaccattagcctccctgacccctctccccgcttccccagcagctaggatgaaggcaacatattcctcacaggtcatttgatcttgaggtccttcaaggctgactccaagctcttcacatcccagatactcatgccgccatccatgccagtggtgcagaactgcgagcacttggccttgccgccgctgagcaccgagatctggctgacgctgttcttgtgcagcgagtctaggcccgcgcccgcagccgtgccaccctcggagctcgccttcttgtccaggttctggaagcgctcgcgggccgtcaagccacgctgcgagctctgcttaggaacgtccagccgcccgccgaagctcagcatccccgcggcggcgtcataggtgaacagcaccgggaagcagtcgtggcccgctgccaccaggctgttgtctgtgatgaaggtcagcgccagcagtggtagtgtttcagaggccagagtcgcgacggccatcttcttgtcggcatcagccaggcagacggtgctgtcgtggcttacccaggccacgcggctcccgctggctgagaaacagacgccatgtacccagccgcagctactgctggattcgaacatcagttccccaaagggcatcttggagccccacggggtgggtgccggccgttcctccacctccttgatgtaggctgaaaagatccgacacttgaagtcacaggagccggcagccagcagcacattgttggggtgccagtccaggctgaggacggtggagcggatgggcttcttgatgtgcttgcaaacccaccagtcattctcctgctcgaaataacagatggagatcacacgagagccgctgcccacagcaaacttgttctcgttgggggcccagcgcacgcagcgggcagcccggttgatccgcaggatgaccagcgtgggcttccatgtgcggcccttcagcgtccacacgtaggcgttgcggtctgtgccgcaggtcacaatacggttactctcgggggcccagtcgatgcctgtcacctgcccgttgtgctccttgagctcgtgcaccttggtccatttggcaccgctcttttcatagatatgcacctcatggttgttggggcagatggcaatctgggtgcggtccttgttccaggcgtggcagctgatgggctccaccaggaagctgtggtaggccatggcggcttggctcctcccgcgccccggccgcggactctgggcagtcgacgcgccgaaccggctctgggctccgcgccggagcagcagccacttcctcccc

SEQ ID NO: 315780 - DNA, 1425 bp, Homo Sapiens
  misc_feature (216)..(216): n is a, c, g, or t
  misc_feature (255)..(255): n is a, c, g, or t
  misc_feature (299)..(359): n is a, c, g, or t
cctcccatgtgcaaccccatttttggtgtttcggttaacccacccttcaaaaagccacccccagctgtattcagaaaacgtagggtcaatcttttcagccctaaggggagatgtaattaaccagtatcgagcactctggaaaaatcactctgcaggtttatatggactacatggagatcatatccctgtagtgtagtgaaaagctaagtctcaagnagccatatgtatagatacacaatgttttttaataatctntaaaacagagatcaaagttcatttaagtcctgtttgcattaacnnnnnnnnnnnnnnnnnnnnnnnnnnnnnnnnnnnnnnnnnnnnnnnnnnnnnnnnnnnnntgtccaatttatacaactgtgggagacttattcaaggtttttgaaagtccaggactgtttcagctgaaccagagggcacacaatttgcatcactgaaactgtcctgggttagtcaatgaaataaaaatgtctaaccacatacacatggatatgatctttgtcggttagattattgataaagtcagtctcagacaagtttccaaactgtgctatttaactagatacaattgagaaattctcaaatgaaaattttatatagtgtcatatcaatcaaaagaaaataatgaaactaagaatacagatcactgttggaagagaaagcagtggtgatggtgtgggtactgcaggaggtggtggggccgtggcacactagaaaagttgggtcacgctgagtaggaagcatttgattttctctggtgcttttagctctggggccggtcaaaggcctctctctggcatggctgtccagggtttgtcccaatgtgtctgagtgagccagcttgagaaggggtcgtgccgtttcttctttcacacaggggaaaaaaaagaccaaacacggaggtgcccagggtgtggatctgctggtgtcccgggagaacccagctggctgggcagcccttcttccccacaggcagctgctattgcgtagggaccgccaggtcaccgagtggccatcacaacaaaccccagcacagtccagcccggccacagccgcctccttgtgtttctgttgtcttccctgctgctgcccacatcctttacccaccgtgtctctcggcccactggaggtatcagaaattccaaattttcaaagcagtttcagtattttcagtatatatgttgggattttataatggttcatggccagaaaaggttcagcacctcccacacacagacattggtccgtttcctgttcttggcatctctgtactttgttggtccaactcagacagcaactttaagatgttcagcgcggccatatcatggcaggactccacatccttgccgataccatggctgatcagaggtggctgagaggagcaattgataagagatacaaattcgt

SEQ ID NO: 315781 - DNA, 950 bp, Homo Sapiens
  misc_feature (102)..(114): n is a, c, g, or t
  misc_feature (603)..(625): n is a, c, g, or t
cattagtagctgtttattgatcaatggtttgatataaagttatttcagatcttcagacttttgcccagatggaatcacaagcattacaaagtttttttcttnnnnnnnnnnnnnggataggggcaagttgggaggggaccaacctagcagtagtggcatttgagaataaattaacaaaaaaatttagtattaccatttattgatgacaaacacttaagttttacttacattccatggggagaaaaattccagcgtaaacaatgaatggaagcagtacttaactcgcagggctaccaggctttccatacggaccacacgcagagcctcagtgcacacacttctgtgtacagtaacacaacatcaaaagcaacacagctgtatacagaaacgtaggtcattcttttcagccctaatggagatgtaattaacagtatcgagcactctggaaaatcactctgcaggtttatatggactacatggagatcatatcctgtagtgtagtgaaagctaagtcctcaagagccatatgtatagatacacaatgttttttaataatctttaaaacagagatcaaagttcatttaagtcctgtttgcattaacnnnnnnnnnnnnnnnnnnnnnnnggaaccaaatgatcatctaaagtttaaaattcctaaattgtccaatttatacaactgtgggagacttattcaaggtttttgaaagtccaggactgtttcagctgaaccagagggcacacaatttgcatcactgaaactgtcctgggttagtcaatgaaataaaaatgtctaaccacatacacatggatatgatctttgtcggttagattattgataaagtcagtctcagacaagtttccaaactgtgctatttaactagatacaattgagaaattctcaaatgaaaattttatatagtcctcgtgccgaattcgccacccaggcc

SEQ ID NO: 315782 - DNA, 714 bp, Homo Sapiens
acaagggggatctgtggtttgcgggccttgttttactgagatattcactttattgcagtggtctgaaacggaacccacaataactacaaggtatgctggtaaataccttatttttaacaaaaagtgaaaatgatttccctgttatttactaacaaatagaccagacatttgcatcagacagtgagcataaacttctctgatcacctctcaagagacatctcccatttctcttttgactctcctcaagatttcctggtaagaccaaactttatcttccatatggtctcacagggtcagtggttcataataaccatcaggttatacaacaggcaatttaatggaatctcagagtgaagacaaattgccggtttctcgagtagagggccaggataggtcacctgggatactcattgaaactaatggattctcaacttctcctgccttcaactcaccagaggaatattagacatccacttgttagtggttctctatgggggatagtagaggaaatcttgagataatatgactacagctcagatataaccatatccaataactacttcaaaccaagtaattccatattattctcactactcctatctaattgtggtatcaattggctctaaaaatattaaacacatatatattacttgagacctctagactataaaatacttcaaaagtctagtccttaaaacgtagggcaaaaaatac

SEQ ID NO: 315783 - DNA, 851 bp, Homo Sapiens
gcgccacaacttcactgccattttgtgaggtgccgccgtctctcctccagcaaggtcaggacttcaggactgaaacaatgaccgataaaacagagaaggtggctgtagatcctgaaactgtgtttaaacgtcccagggaatgtgacagtccttcgtatcagaaaaggcagaggatggccctgttggcaaggaaacaaggagcaggagacagccttattgcaggctctgccatgtccaaagcaaagaagcttatgacaggacatgctattccacccagccaattggattctcagattgatgacttcactggtttcagcaaagataggatgatgcagaaacctggtagcaatgcacctgtgggaggaaacgttaccagcagtttctctggagatgacctagaatgcagagaaacagcctcctctcccaaaagccaacgagaaattaatgctgatataaaacgtaaattagtgaaggaactccgatgcgttggacaaaaatatgaaaaaatcttcgaaatgcttgaaggagtgcaaggacctactgcagtcaggaagcgattttttgaatccatcatcaaggaagcagcaagatgtatgagacgagactttgttaagcaccttaagaagaaactgaaacgtatgatttgagaatacttgtccctggaggattatcacaccccaaatgcataatctcgttaatgattgaggagagaaaaggatcagattgctgttttctacaatggagcaggatattgctgaagtctcctggcatatgttaccgaatcaactggcccttccagaggctaagaaatttctgttagtaaaagatgttctttttcccaaagcatttta

SEQ ID NO: 315784 - DNA, 1585 bp, Homo Sapiens
  misc_feature (116)..(116): n is a, c, g, or t
  misc_feature (130)..(130): n is a, c, g, or t
  misc_feature (371)..(371): n is a, c, g, or t
  misc_feature (389)..(389): n is a, c, g, or t
  misc_feature (395)..(395): n is a, c, g, or t
ttttcttctatggatatggggattagaaggggccataggaaggggcccagggagttccaggaaggccctggggtttcttgtccctgggattataccacccaagcttcactgaggangctttgtcttcttntggatcaagagtcccacctgaaaatgaaggaactggtccagataacactggagccctttcccccaagatgcactggcattcagaggatggtgcaggtccagtcctcttctgcctgtggggtggatgctgcctggagtgtgctgggtcagcagaatccaggagctcactggggacccatcccaattcttaaagcatgggtaattcagcccaggcctcagccctcttgtgccagctgcctccnaaaccctttgggtctccnactacnccaaagtttcctgtagggtccgccgggtccaggatcacaggcctgggtttcgtgagctgccttctcaggtacttttcaataatggggtttttaaagtcataatactttgtccagtagatgcagagttgctggtagtttatgactaattccaagaccgtccgaaatccctgggctgtgttgaaatgtgttttcatgctccctcgctcccaagcatagaccgtcaggagcttccagggcatactgaggtggcagcttcccaagcttcttcttacaattttggtaccagtgcttgactaggcggatgaggctcttgagcttggtggggcgctgcttcaggaagtctctctgtagttctgtgaagcaggtggagaactcgccctctttctgcaggtcggtgcactcctcgatgagcttgacatagatttgggggttaggtttatagccgccagtcaactgacccagggcatcaaaggcaggcagcacatcgaactccaccccctccccgagctggagcgaactcagtacgaagctgagcgcacgggggttgccccagcgtggagcctggacctcaaacttcacggaaaatgctctctctctttgacaggcttccagctgtctcctaatttcctggatgaactctccccggcgatttaactgatcctgaaaagtggtgagaggactgaggaagacaaccaggtcagcgtcagatcggcctctgagggtggtgcccttgcctgaggagccaccctttaccaccttggacacacacacagggtaggagctacctcggaagcacctttccttcaggaacccacagatgatgtcaatggcatggttgatttgcatgcggaaacacgtgtctggcaagagatagtcttcaatgaacttgtccagagatttggctggggtatttctgagatccatcattgacaggagagagagtggcaacagaactgcctcccagacctgtttgcttttatctcttctgctgactgagcttggactgctgttggtttcgtttcctcagaagggaggagctgtctttgcactttccttttgcaaatcagacactcccctgatcccagtgctgaatttcatctgctcactcttctgcttcctgaaacttaccctttgtcctttagccagcaacaagcagcccagcctttctctgaactctgctctggaaatgc

SEQ ID NO: 315785 - DNA, 487 bp, Homo Sapiens
ggtatttgctttatttttattgttattgataatacattagacattaccctcccatcaggtgcacagaagaaagtcaaggctggaatttcattctcttatctaaatctctctgttctctctcagggaatattttcagagaataggtggaatgaagtgaggctgtggagaatgttatctatgataggatagagggcatagaaggccaggagtcaggagacctgggttctgtcctggattatacaccagctcactgaggagctttgtcttctctggatcaagagtcccacctgaaaatgaaggaactggtccagataacactggagccctttcccccaagatgcactggcattcagaggatggtgcaggtccagtcctcttctgcctgtgggggtggatgcggcttggagtgtgctgggtctatgagagaaatgagggtactcatgtgttccaatgtaaccatatttctgatacgtccggggtcctcggt

SEQ ID NO: 315786 - DNA, 632 bp, Homo Sapiens
  misc_feature (26)..(26): n is a, c, g, or t
  misc_feature (96)..(96): n is a, c, g, or t
  misc_feature (113)..(113): n is a, c, g, or t
  misc_feature (265)..(282): n is a, c, g, or t
  misc_feature (312)..(325): n is a, c, g, or t
aggatgaaaatagtaatgacataaanttcatatcttttacagcaaatattgaaatatttacatttgaaagactatgctagctcagatatgctttanaattatatatatataanagcatgggatatgagtagagttgtaagtgaaacaagtttggccataatctgataatgttgaagctgggtgacaggtttgtggggatttattagaagtagtacaattgtacttttatatatgcttaaacttttttcatagtacagagtgaagnnnnnnnnnnnnnnnnnngagtttatggcttttagttggtagtatttnnnnnnnnnnnnnngcagcaatgtaaaaaccctctaaggccagttacaaaataattcaatacccttgcagtgaaatgtatgtcagctacatataggtattatatgtaacttgaaaagatatccataatgtaatattaaactaaaaaacaagtggtaaacaatatgtactgtacaatgacattttagcatgcatgcgtgctttcccagtaagcatgcacctactaaagttttatgtttcctacactcatttaaaaaatgtacatttaaaaatttactaattgcatgtagccttttagtagttttctattggcttcaatatag

SEQ ID NO: 315787 - DNA, 516 bp, Homo Sapiens
  misc_feature (336)..(336): n is a, c, g, or t
  misc_feature (342)..(342): n is a, c, g, or t
  misc_feature (412)..(412): n is a, c, g, or t
  misc_feature (467)..(467): n is a, c, g, or t
  misc_feature (493)..(493): n is a, c, g, or t
caaaaacatgtatttttaagcccagtaaggataatgatcacattcttcaattgatatcttggttttaatttaatatgaaggatgtataagtaaactcttgttcctttatggtaaggcagtatatgaaagtattgatttgcatttttcactgccttacaaagtacaatttgtgccattaaaacattatctttcatcacaaaccctaggtgaagtatgctggggaagccttgctctgtgtttttgaaattgtaggtggcagcccattactgggtcatatggttcatggccagcatttgagaaacagaataaattaggaaatattatttagatgggaanacaganacatgggccagaagaatattaggaaatgagagtaaagtgatactgacagccttatggctctgaaactcantatgaaatgagaagcaagtagggacttttaccttttgataggtgatgagcagaanagatatctcaggcattaacacacatncaggtcaggtgggctacttttcc

SEQ ID NO: 315788 - DNA, 1785 bp, Homo Sapiens
  misc_feature (1683)..(1702): n is a, c, g, or t
aattcagttccattcttaaaaggggcattctttaaagcagagaaagggggcccaggcccacccccatttcaggggactggtggggggaattaaagtgctaacttgccccccagcgctgttctatgggagacccctgggccccagttctgggatgtacaggggctctgggaaggggggcagtcctggcggcagaaccccggcctgccgggggcactttgcttagaagaggactctcctagcgggagaggctgggaggggctgcatcaggccgtggagctggttgctgtggtcatcagtatggctgcttgttcaggaagcgggagaacatggtgaaggcagcgaggggcttgtcggtgggaaccatgtggccggcgcccttgatcgtgagaaaggcgatgtgggagaactccttcacgaagccggcaatctgctccccgctgtccccgtacttcactaaccagggccggcgctgcacctccatcttctggttgagggaatccacaaaccactcatcccccatgaaattgcaggccatgtctacatctccattatataataggatctggtatttctgtgagctaagcagcttcagatactgggagttcatgcttcggtagagacggcggtactgtaagtttaccagaaagttgcacatgtcccattgtggcagctgctccgggatgttgagggccttccgcacgtacgggttgttgaggtaggtggaagcagctgttgtgttggtgcagggggggtccatgcgcactttatcccctgagcgcagcagtgcctgatgccacatccgcttgagtggcaggcgagtgaagatgttgcccaaatcctggaccacaacagtgtccttctcatacctaaaatggctgggcacccctccagcacacggggcatagagattgtagatgttgaggccagagttgcccacgatgcgggccacttcctgaagattggtcacgcattccaggtctttgttgtcatagaagttacacttgttttgagagcagcagtgggtctggagagaagaccaaagcctgttccccagaaggccatggtagtaggcaaagtagaccagggagttgtcattctgctcataggaggagagtccattgcccacagccagcccctgaaggttcatgctgggatcctgcatgaccagcacggccagggtggggatgtagatgccagcatagctctccccggtcaggaaaagtttgttgttcttgtactccggaaagaggcggaagaaatcttgaagggcctcaaaattgctctgggcgacctcagtgtcattagttgcataaaacttgtcatcggagtaggagaagcccaccccagctggggactccaggtataacacattggcaatcagattccaagaataggggttgtactccagggtgacaccatctggctggaccaggaaggggccatgctctgtgaggagcccatctagtgagctgcagccgggacccccattgagccaaagcaccacagggctgttctcgggatccttctgggactccacaaaccagtagtggaggtgcttggagccggagcctttgaggtagccggagtactggcggaaagacggctgcttggccagcccggggaggcgctggatctcgtcctggtcgggggctgcctcgcctcgggacgcccaggacactaggnnnnnnnnnnnnnnnnnnnngaacagcggcggcggcgcggctcggatcatctctgctcccccgcgtccttgctctccaggaggcgcccggggactggaagtca

SEQ ID NO: 315789 - DNA, 1406 bp, Homo Sapiens
  misc_feature (1188)..(1188): n is a, c, g, or t
  misc_feature (1229)..(1231): n is a, c, g, or t
  misc_feature (1239)..(1239): n is a, c, g, or t
  misc_feature (1241)..(1241): n is a, c, g, or t
  misc_feature (1295)..(1295): n is a, c, g, or t
  misc_feature (1317)..(1317): n is a, c, g, or t
  misc_feature (1374)..(1374): n is a, c, g, or t
  misc_feature (1385)..(1385): n is a, c, g, or t
ggcccctttgaagaccatgctgcagattggggtgatgccccatgctcaaatgagcggaccctggcgtggggtgcagatcccactacctgagggcatcaactttgtgcatgaggtggtgacgaaccatgcgggattcctcaccatcggggctgatctccactttgccaaagggctgcgagaggtgattgagaagaaccggcctgctgatgtcagggcgtccactgcccccacaccgtccacagcagctgtctgagccctcaatccccaagctggcagctgtcattcaggaccccaacccctctcagcccctcttttcccacattcatagcctgtagtgccccctctaacccccagtgccacagagaagacgggatttgaagctgtacccaatttaattccataatcaatctatcaattacagtccgtccaccacctccctgtgggctgtcctgagctctgttgggttcctgggatggaatcagtgcatcataaagggcattctttaagcagagaaggggccaggccaccccattcaggaactgctgcgggaataaagtgctaacttgcccccaggctgtctatgggagaccctgggcccagtctgggatgtacagggctctgggaagggggcagtcctggcggcagaacccggcctgcaggggcactttgcttagaagaggactctcctagcgggagaggctgggaggggctgcatcaggccgtggagctggttgctgtggtcatcagtatggctgcttgttcaggaagcgggagaacatggtgaaggcagcgaggggcttgtcggtgggaaccatgtggccggcgcccttgatcgtgagaaaggcgatgtgggagaactccttcacgaagccggcaatctgctccccgctgtccccgtacttcactaaccagggccggcgctgcacctccatcttctggttgagggaatccacaaaccactcatcccccatgaaattgcaggccatgtctacatctccattatataataggatctggtatttctgtgagctaagcagcttcagatactgggagttcatgcttcggtagagacggcggtactttaagtttaccagaaagttgcacatgtcccattgtggcagctgctccgggatgttgagggccttccgcacgtacgggttgttgaggtaggtggaagcagctgttgtnttggtgcagggggggtccatgcgcactttatcccctgagcnnnagattccntnatgccacacccgcttgagttgcaggcgagttaagatgttgcccaaatcctggancacaacagttttcttctcatanctaaaatggctgggcaccctccagcacacggggcatagagattgtagatgtggaggncagagtggccncgatgcgggcacttcctgaag

SEQ ID NO: 315790 - DNA, 388 bp, Homo Sapiens
  misc_feature (102)..(102): n is a, c, g, or t
ccacgcccagcatccctgtacctttctaaatggtggtgagttgaggctgtctgaatcccagcccatccagcccaacatccaagtcagtcctagagaggtggnccccccccaaaaaggggagtggaacccagctgtctgccttctgggttggagcttggagataggagagaaggtctgatctgttgactacttttcgccccgacctgggtcttcctgggggcctgcttcgtatgttcccggcagctttctgggtaaacttacagtaccgccgttttttaccgaagcatgaactcccagtatctgaagctgcttagctcacagaaataccagatcctattatataatggagatgtagacatggcctgcaatttcatgggggatgagtggt

SEQ ID NO: 315791 - DNA, 495 bp, Homo Sapiens
  misc_feature (229)..(229): n is a, c, g, or t
  misc_feature (420)..(420): n is a, c, g, or t
gctcccaatcctccacagcagcccctatcccagggccaggaatctctaccttaccttctggttgagggaatccacaaaccactcatcccccatgaaattgcaggccatgtctacatctccattatataataggatctggtatttctaaagcaggatggggtaaaaatgaggggtgtggaacaagcccagtccccagcccttccctagttcaaggcctacccctcagganaattcaaggggccaagctagataacacgaaccagggaattttcatgttttctaacgactttactgcatgtccagtattctacttaaatgttttatctgttgaaggtagatattcattatttatccccattttacagatgggagaacctgagggttcatatttaaggaaattttgcccaaggttatgtgggntagttacaggggatttgcacccggggcctgttgacttccagaggccctggtttttaaccactgtgctgggacagt

SEQ ID NO: 315792 - DNA, 1652 bp, Homo Sapiens
  misc_feature (1403)..(1411): n is a, c, g, or t
  misc_feature (1418)..(1419): n is a, c, g, or t
  misc_feature (1421)..(1452): n is a, c, g, or t
  misc_feature (1454)..(1466): n is a, c, g, or t
  misc_feature (1468)..(1471): n is a, c, g, or t
  misc_feature (1473)..(1477): n is a, c, g, or t
  misc_feature (1479)..(1489): n is a, c, g, or t
  misc_feature (1491)..(1507): n is a, c, g, or t
  misc_feature (1514)..(1516): n is a, c, g, or t
  misc_feature (1519)..(1519): n is a, c, g, or t
  misc_feature (1521)..(1522): n is a, c, g, or t
  misc_feature (1524)..(1540): n is a, c, g, or t
  misc_feature (1551)..(1564): n is a, c, g, or t
aattgcaactgcttttctgccgtgcctctcttccctacccaaaagtgatgagttctgaacaagacaagactgtcatattgtagagactttggtatgtgataccatagaatactgattggatagccatcctagtcacttaccaatactgactagaagttaactcttaattctaagctatcttaaaatgcatatatatacttcttgcatggaagagcaaaacatattcaagttgtcatgcctgataatttcagatgccaccgtatagcaaagggtgaacatgttttcaccccttttactttttacggtgtttgaagaccagctactccttaatatttatcaatggattaagaagtttaagattttgcagatttatcaatttgggtttttgtactgaagttgtcttgcggctttgcaagtgtccctttatatttaaatttgaaagttgtaagcactgatgttaatgtgattgatcagcatgggcatatgtaaaatgtccttttctggttgcctctctatgctattgtgttcagatacttacaccataattaaacagtaagttatagacttgctgagtttggcatagatagtgcactcatttaatctgtgcctctcaaaacttcagaatattagcatattaccacaaataatttttggtgaaactattgagatattaaaatttttgaaatcactactgttacctgttatagaaaatagtgttggcttagtctagtctctgtgtaactggttacattttgatggttgtctatactcaactggatatgtgtatgtaaattagaaaatacatacctatccagacataaatgctaagtaacatttttttcttcctccaactacataatttgtagctcatcatttttccttaatcctttcctaacttgttgcagcagtttgaatttcccagatatttatgtttgaacataatggctcagaatacatatttgaacatcatagttgtatatatttttaaagtagaataaataatggaaagcaacttgatatacaagtttatactaaaatttcaactgtgtgaagatacattttaaggcattactttgctaataatctacacattcttttttctattaaataaacaaatggtttgtggttcacagctttcatccaagcttggtgataatcaattttgaaaatacagtggactgaaaagcaaatttattctttcgaagatttcatttaaatctctgtactatgcatttttgtttcagtttgtaaatgtgtaacatttatagttaaataggacaaagcaggccctatgactattgttttcaaaaaattaatatataaataattcagaggggtttttcatttacttttgaaaagaaatttctttaacaggattgcacctatcaatttcttgtagaatnnnnnnnnntctttcnncnnnnnnnnnnnnnnnnnnnnnnnnnnnnnnnncnnnnnnnnnnnnncnnnncnnnnnannnnnnnnnnncnnnnnnnnnnnnnnnnnggggggnnnacnannannnnnnnnnnnnnnnnnttttggggcgnnnnnnnnnnnnnnaaaaattttttcaaaactttcttttgggcgccgggccccccaagggaaaggaaaagggccaaaactgttttccaaggaaacccgggac

SEQ ID NO: 315793 - DNA, 1448 bp, Homo Sapiens
tttttcacagtgatcccagggctttatttacaagaggagaagggttggccctgcctggggcctggctgggctatatacagggtcagggagaggtgggggggatgcagccatttaaattacaaaagaatggggcactcctaggttcaggttgtgagtctgtccatcgcgaaatgcttccacagggtcagggctgaggcatggccacctgaggacagcaccgctcacttcctcttgagggaacccttgctcttctccttgtctgctgaccgctgcttcttcactttctcctccctcttgttcttagtgtgcaggttctcatacacatcctccttgtgtttggacgaggtgcgggaggccttggcatgggcattcttcatggctgggggataggtgatgttcccgtactccgactcctggcccttctgcgactgcaggacctccagcttcttcttagtggtttcaatgaactgggcgatggccacgtagatgaacttgtactgcgcctccgtctgcaccatgcccgagcgctgcgcccgcaccatctggatggtcttctggatgtcaatgtcacagtccaggcccttggtggagatgttctccatgagcatgtcgatgacaatgatggtgcctgtgcggccgatgccggcgctgcagtgcacgatgatgggccctgcgtgaggcagactttcctgccgctggttgatctggtccaggaagctgaggacacccccaggctcactggggaccccatggtcgggccagctcaggtactggtaatgccagatctcccgaatcaggtctccattgtccagcggggagacctgtaaggtacggagtttgtattcggttgtgtcatgctccccgcagttggtcacagagtagggcccataagcacgctgcatgcccacctcgggccagtatgggacgcatttgttccggcctttctccacctctcgggtggtcatgacgatgacacggctgttctcctgccacgccatctgccagaagtcattgaccgtggcctccagacagccctggctggcgatgtaggtcttagcgttctcatcagggcctagcagctggttcttgatgtagttggcattgatgtagtcggacccggggatgttactgtcccgtccctgcaggatcactcggctgtggtcaaaggggagaatgttcttgtagcggttcttgcccttgttctctggccgctgcccttccagacgctggtgcaagttcttcacctcctgcttctgcaaactctcaaactcctcccagaagccagccttggctgtatcctcggactcctgcttcttgttcagttccaacactcggttctcaatgtcagccgcattcaccctcgtggcatagtacggctgccgcaggtagacaaaggcgcctgaggcctcctcaatccccgatcccgggaatccggaccggtccagcct

SEQ ID NO: 315794 - DNA, 968 bp, Homo Sapiens
  misc_feature (147)..(147): n is a, c, g, or t
gggaagcccaaaaccgcctaacccctttttttgccgggggggatgccccttcttactgggatttttttgagggtttcaagccaagccggttcaaaggggattaaaaagggtaaccattggggataaatgttacccctttaaaaaaanaggggacccctttagtatattaactttttcccatgaaaacaatttcagtcattttgagaactgccaaggaagatgtttatacagtcttagtctcccttttcaacccttggaggcagatctgcagcaataatagtaacaagtaggagcaatgggtgtactatcatgaccatcttttatgatgactggtgcattaatacaaatcacatttttctgagtccattcatgctatggatgttttcttatgcataaacatagagtagacacatactaaatagatcacatctgttaagtctcttgccacaagcatcaaaacttttcagagctgtctcttccgtgaaaatccatttcatgtagtagcaagttgattttctttgtggttcatccccacgcctgagacttgcagtaatgtaaaaccagtttaccatcactgccaaaacactcatagagagttccaacttcttggtctggggaaggagcaaaggactgattcacataaataaacaactgttctgaggccacaagtttaagaaactttttgatgaagtcaatgagtccttggatggttcgtgttcgctctactgcccacttctttgttttcataataggagtgtctcccacagcctttagcaaaatgtcaatttttttcttggtgtcgccagcaggttcctctgttcccggggaaactgcagcggaagacgggggctccggggtggttgtttctggggagacatccgtaagtccttcccctccagcagcaattgaagtaggaagctgcaacacagactgcggctcctccgccatcttgcttggagacactcccc

SEQ ID NO: 315795 - DNA, 1360 bp, Homo Sapiens
gtctccatttattctgggatgggttagagtaagcctctgaggctgccatcaggctggctgagttgttgcccaacattgtatccagcagtctcaggcccgcgcagtgcacagccagcatggggctcacaggtgcagatggaatccagaagctcccaactatgctgcaaaggccaggcctaggggtccgggtacatgcagtgagtccttggggcagggccagccctgctgactacacaagcaaggttggtggtgagacaaggggtgtatgtttccccgccaggacagagggcaacacacaggtgggtggcgaccctcaaggctgacggcatccctgcccagagtgacgaccagggcctactagctctactaaattcagggtggcggaaatcctggatgtgccccttgtcatggctcaggggcctcctttcatcctagttcatgaagccccaacacttcctccctgggatcagtaccaatcccctgcaaggccctgcccctccctccaacttcatcccagtcaaccacacacgtccaatcgtgtagtctgttgcccttctttctttcctggggcatcctgagccctctgggatggcgtgtgcccagttccagcttcacggacctccatggccccatccaccaaggcaccccatcgtatcaacttgccatgtaagggtgtggaccccttcccccgcttcatggatgctcctggtggcctccactgaacatgtaggagaccgtccacccaaaagcatattggtcaaggtgtctcatttcacaagccagctgttgcccagctcttgctgggcccgtttgtaggccctcctgcaggtcggctacctgcgtttggaaggcaactagcctggaaggccactgtcagtgctcaaggtgatagccacatattcctgaacccggtgtcgtcctgttgtagctgggatactgtctcaggccagcagcatgacggcatcatcagcactggtgaggatcgtgagcggggtgagggctccaagggtgctgtgctcaggagctgttctctccaggcacgtgcctgctgtgccgcatgtatctgcagcagggcgggcgggtggaatccatccctcgtggtgggtctgcattcagaaacctgaacgtggtggtggtcactgatccggaaactgttaagggaagtcctgtgttgagaatgcaggcgcctgcccagagtttggaggtatttagcaggtggggccaggaagtgtccctctccatgagtgttgcaggcaggcattctctccttaaacacgaggtctgctgatctcacaggagtctcttcttgtcccaaccccttaatgtgtccaggagaggagataggacatgacacatccca

SEQ ID NO: 315796 - DNA, 733 bp, Homo Sapiens
cttaagtttttattgagggatgtttcctgtaagtccatgttgcttggcatttaggtgattttgccccaaggagagaatcaagctgctgagtggctgatgatgtcattttcttctgccatcttaaatcaaacctcagtggggaacagactctcactctaaattctccttaccaaggacactgtgtaagtcacctatgatacatatggtcagattctcatattttaattcaaataggggttatcttttttctttgacaaaagcaggtggcctgacctacgatggtcctggggcattctcatctgattcatatatgaattcttccacgggatcctctgtgcaaccacttgcccaaagtgctgaatccctctgcagagagaaaggaaaacactgtgagcgtcagaccatgctgtgtcctgtgtatacaggtcttttcttcagttgctgacattaggaaaccagacaagaaacagtgctcgaggtaatggccccaaaataaagcctagaagacacttcgacaatggcaatgacttgctctgaggactccccaggaagctctgctgccacaggcttgacacctttctcaaagctaagatccttccttagcaaatgggagatcccagagtgcatactgtagagctgaatcgctgagtgtgtcttcaccttcaccacagcagcagaggctgcctcccattttggtgagcagtctagctggcagttccaacacagcagcccc

SEQ ID NO: 315797 - DNA, 503 bp, Homo Sapiens
  misc_feature (133)..(181): n is a, c, g, or t
cggcacgagccacctacctaatagctttctttctgaagtcagtagtctgaagcacctcgatttaagttccaatctgctaaaaacaatcaacaaatccgcacttgaaactaagaccaccacgcccggctaaatnnnnnnnnnnnnnnnnnnnnnnnnnnnnnnnnnnnnnnnnnnnnnnnnntccacttttttcttaaatgaacatattgtcttataaccagcaaatgaagttttacttttttaatcagaaaaaatttcgtcataaagctatatttttatatttttaaaattgatacagttagataccttcagattacctaagttaagtttttgccaaaatgctattttatgccctttttgtaaagttatgatttattttgtaaatatagttccttatagttttctcttgagtgtttggacatgagaatagataagattaaattacaatttacaagatcacttcattatgcacaggagtatttaacttcaacaccctttcacat

SEQ ID NO: 315798 - DNA, 821 bp, Homo Sapiens
agcacggcagtaatctaacggtttaaggtagcgaggctgggtggcgaatcggcacgaggctgggcttggtggctcagaacaaggcactgtcactgcccacctccttgggcctcctggaacgccaggcctcggcggctgctgaagggattctatggctcagaggcccagggtgtggtgaaggacctggagccggaactgctgcggcacctggcaaaaggcatggcctccctgatgatcaccaccaagggtagccccagaggggagctccgagggcaggtgcacatagccaaccaatgtgaggttggcggactgcgcctggaggcggccggggccgagggggtgcgggcgctgggggctccggatacagcctctgctgcgccgcctgtggtgcctggtctcccggccctagcgcccgccaaacctggtggtcctgggcgtgcccgagaccccaacacatgcttcttcgaggggcagcagcgcccccacggggctcgctgggcgcccaactacgacccgctctgctcactctgcacctgccagagacgaacggtgatctgtgacccggtggtgtgcccaccggccagctgcccagacccggtgcaggctcccgaccagtgctgccctgtttgccctgagaaacaagatgtcagagacttgccagggctgccaaggagccgggacccaggagagggctgctattttgatggtgaccggagctggcgggcagcgggtacgcggtggcaccccgttgtgcccccctttggcttaattaagtgtgctgtctgcacctgcaaggggggcactggagaggtgcactgtgg

SEQ ID NO: 315799 - DNA, 743 bp, Homo Sapiens
  misc_feature (428)..(477): n is a, c, g, or t
atacagaagaggagatctcctcattgtatattttatatcttatagaactttcattaatgaatcataggaatataccagctcttcaaaaattaagacattatacaaagtgaaatactaaaaacagaaatatgtgtttttctcaaataatatgcttctcaggaaagactttacagaaacatctcttcttatccgaaattacatccaaaccctttttttgtgtgaagtgttgcttccagtctactaaggtaataagcaagtaacaagatagtattgtttgatactcttgaacgcactctgattttcaattccaattttgtttgaacctgtcagcattttgggatctgggccccgtcatgtcctaccgtcattttattcttttgggaacctgtcagcatttttgatctggccccgttatgttctactgtcannnnnnnnnnnnnnnnnnnnnnnnnnnnnnnnnnnnnnnnnnnnnnnnnncaggacaaattcctttgtatcccagtctttgaacttggtgaaaaatgtccttcttcctttcttatctcatagaatctggtgcagccactcatttcagcttgaacctatatattttgtgtgattattttattttgttgctcatgttaactagagtataatcttcatgaagccaggatatatgtttgctcaccactgtatcttcaaagctcagcatgatgctctcacataattgtgctcaataaatattttccatggccagacgcagt

SEQ ID NO: 315800 - DNA, 1562 bp, Homo Sapiens
  misc_feature (255)..(274): n is a, c, g, or t
  misc_feature (1520)..(1520): n is a, c, g, or t
aggccgcacaacccactcaaaaaaaattctctcaggatgaggtgtatttctccgttcatttcagatatgcatcagctagtcagcgtaaattgtgctatatgctcaccaggtgtaggtaagagctttggctgagatggagaaattcatcgcgggaggataataaagcgggcagggatttggcaacctcagagccgcgaggaggaggcggagtcgcggagagtttgagtatttccgtccaatcaaaaggagactgtnnnnnnnnnnnnnnnnnnnnatgactggggagcgggagctggagaatactgcccagttactctagcgcgccaggccgaaccgcagcttcttggcttaggtacttctactcacagcggccgattccgaggccaactccagcaatggcttttgcaaatctgcggaaagtgctcatcagtgacagcctggacccttgctgccggaagatcttgcaagatggagggctgcaggtggtggaaaagcagaaccttagcaaagaggagctgatagcggagctgcaggactgtgaaggccttattgttcgctctgccaccaaggtgaccgctgatgtcatcaacgcagctgagaaactccaggtggtgggcagggctggcacaggtgtggacaatgtggatctggaggccgcaacaaggaagggcatcttggttatgaacacccccaatgggaacagcctcagtgccgcagaactcacttgtggaatgatcatgtgcctggccaggcagattccccaggcgacggcttcgatgaaggacggcaaatgggagcggaagaagttcatgggaacagagctgaatggaaagaccctgggaattcttggcctgggcaggattgggagagaggtagctacccggatgcagtcctttgggatgaagactatagggtatgaccccatcatttccccagaggtctcggcctcctttggtgttcagcagctgcccctggaggagatctggcctctctgtgatttcatcactgtgcacactcctctcctgccctccacgacaggcttgctgaatgacaacacctttgcccagtgcaagaagggggtgcgtgtggtgaactgtgcccgtggagggatcgtggacgaaggcgccctgctccgggccctgcagtctggccagtgtgccggggctgcactggacgtgtttacggaagaagccggcacgggaccgggccttggtggaccatgagaatgtcatcagctgtccccacctgggtgccagcaccaaggaggctcagagccgctgtggggaggaaattgctgttcagttcgtggacatggggaaggggaaatctctcacgggggtttgtgaatgccccgcgcccttacccaatgccgttgctccccgaccccgaagccttgggattgggctgggccgaacctcccgccggaccccggactgcgagcccggggcccggggcgggcaccaccgggccccggcgggcgggaaaagcgcggggggggccatccggtggggacatgcccngcgggcagtggctcgcagaggcgggcggcgccatgggcgcgg

SEQ ID NO: 315801 - DNA, 939 bp, Homo Sapiens
tgcccgcaaaatttccccttttgtacacaaaaagggggtcaggaaacaagttaggaccacgggccatttcaattcctttttctccggcccccggcaaaaaagcctggaggtgggcctgggatgattgtcagacgatgaggtcctacgggggtagcttccttattagacggttattgctgtactacagggtcagagtgcagtgtaagcagtgtcagaggcccgcgttcagcccaagaatgtggattttctctccctattgatcacagtgggtgggtttcttcagaaaagccccagaggcagggaccagtgagctccaaggttagaagtggaactggaaggcttcagtcacatgctgcttccacgcttccaggctgggcagcaaggaggagatgcccatgacgtgccaggtctccccatctgacaccagtgaagtctggtaggacagcagccgcacgcctgcctctgccaggaggcaacccccgtgagagatttccccttcaccatgtccacgaactgaacagcaatttcctccccacagcggctctgagcctccttggtgctggcacccaggtggggacagctgatgacattctcatggtccaccaaggcccggtcccgtggcggctcttccgtaaacacgtccagtgcagccccggcacactggccagactgcagggcccggagcagggcgccttcgtccacgatccctccacgggcacagttcaccacacgcacccccttcttgcactgggcaaaggtgttgtcattcagcaagcctgtcgtggagggcaggagaggagtgtgcacagtgatgaaatcacagagaggccagatctcctccaggggcagctgctgaacaccaaaggaggccgagacctctggggaaatgatggggtcataccctatcctcgtgccgaattcgccacccagcctcgctac

SEQ ID NO: 315802 - DNA, 696 bp, Homo Sapiens
  misc_feature (683)..(683): n is a, c, g, or t
cgaggggggtaggctctttattagacggttattgctgtactacagggtcagagtgcagtgtaagcagtgtcagaggcccgcgttcagcccaagaatgtggattttctctccctattgatcacagtgggtgggtttcttcagaaaagccccagaggcagggaccagtgagctccaaggttagaagtggaactggaaggcttcagtcacatgctgcttccacgcttccaggctgggcagcaaggaggagatgcccatgacgtgccaggtctccccatctgacaccagtgaagtctggtaggacagcagccgcacgcctgcctctgccaggaggccaatcatggtaggcagcattgcagggtcagaggtctgagtccggaaataggagcaggggcaggtccctgcggagaggcacttctggcctgaagacagctccattgagcccctgcagtacagttgtagtgccttggaccaagcccacagcctggtaaggggcgcctgccagggccacggccaggaggcattccccgaagccttgctcccctggtgcagcagggctgtgggaggtggtgacattgaggccagcctctttcaccagcagcttagcgttcaccaagttcacatccgcctgcttggaagcctctttcaggaggccgacaatgactgcggggcttaggcagttcccngcattcttcagct

SEQ ID NO: 315803 - DNA, 416 bp, Homo Sapiens
  misc_feature (21)..(21): n is a, c, g, or t
  misc_feature (75)..(75): n is a, c, g, or t
cttcgaaaaatactgccccantttactctaagcgcgcccaggccgaaaccgccaaccttccttggcctttaggtnacttcctactccacagcggcccgaattccggaggcccaactcccagcaatggcttttgccaaatctgcggaaagtgcctcatcagtgaacagccctggacccttgctgcccggaagatcttgcaagatggagggctgcaggtggtggaaaagcagaaccttagcaaagaggagctgatagcggagctgcaggtaaggcgagagagagaaaattgaggtctctagggcaacctccatggaaaaaaggctgtcgcccaggccagcgcgcccccctcgcatgcaccccgtatcaattagttccggggcctcctaattggtctttctgcttcccctgtgccgaaa

SEQ ID NO: 315804 - DNA, 647 bp, Homo Sapiens
  misc_feature (481)..(539): n is a, c, g, or t
ccacactctgcagccactgacttcagctagccatgctggatgctaagacatagagtcccggccatcaaggccagtccatctcagtggcatctagacatgcacagagatgaccagggagcccctaagggacagagaggcacaccctgcctcctgatcccatctgggggctgcatgaaggaggggcacaggtgtggccttgaaggctgggtaaggggctgggagggctttaggggcattccagggggcaggcacagaactggaggctctgccgggcacacccacaggagagcaatggctggagggtgacatggactgcagggtatggccgcggcagcccagctcttaaggggacagcctgtgaaaacagacttagggacaatgatcttgagccatgaaatgatgtccaatgccccttgtgccacctgacatcagcctgattaatgaacaaacagaagaggaagcaggggacctgtgtgtcccnnnnnnnnnnnnnnnnnnnnnnnnnnnnnnnnnnnnnnnnnnnnnnnnnnnnnnnnnnnggtgcttggttttaactctgacacgccatgtgaactcggctcacttcctagggggaagctgtctggactgggccagagatgggcaccaccatttcccaatacacacgt

SEQ ID NO: 315805 - DNA, 585 bp, Homo Sapiens
acatgtgaatagatattaagtgccatatataattagttctcagaagaagggagaaatgatcataggactgggaattgttttgcaaacgttctaggagatgtgagagaaaatatgtaaccacatcttagtggcccaagaaaatacaggcctgaagggataagattgtgtctctatagagcttcaaagcatacaggtcaattaagaaagcccctctctctccagagccgtttccctagcttttggcacctggatgccacagtcctccattaggctgatgactccaaagatgtaactctagcctcttgcctgagcttcagactcgcgtcccactgcccacaggacacatccacctggatgtgactcacaggtacctccaacccatcatgtggagatactcatcctgttccccctagagctgctcttcctgctgcattctctctctcaattactgggaccaccaagctaggaacctgggagtcatccttgatactttctcttcctccttaatcctgtgtattcagcaagtaactaaaggttggtgttggccaggcatggtggctcatgcctgtaatcccagcattttgg

SEQ ID NO: 315806 - DNA, 580 bp, Homo Sapiens
gttcattcttgaagacctacctcaaatgtcacctcctctttgaagccttccttgaccctttcaggtagaattagctgcccaacccccaccccacaattaatgctaaagaagcagggaatcgatccccatgatctttgaatctccagactcttacatggcatctgaaagggaacatgattgttgatttcaattaaattgaatctcaaccttctcactaaagaattctgaagagttttaaaaagtataatttcgtccctcaacctatcctatctctacactaccactatgaagactacgggatgtaaatgctgtgttttagacctgaaagtaaacaaaggtaggaaagcaatgaaccacttctcagacttttctgccaatggatacaatctggaatctccgtattctcccgaggagcacatctacacccttgggatttgctttatttctatttctactttgctctgagcatcccttctgctgcacatctcagctctagtcaacttgatctgagggtgagaagcaggcacccggtggtctcagaccacggggtaataagttgcttgttgtggctcagcgggtg

SEQ ID NO: 315807 - DNA, 3064 bp, Homo Sapiens
  misc_feature (27)..(27): n is a, c, g, or t
  misc_feature (36)..(36): n is a, c, g, or t
  misc_feature (64)..(64): n is a, c, g, or t
  misc_feature (83)..(83): n is a, c, g, or t
  misc_feature (90)..(90): n is a, c, g, or t
  misc_feature (176)..(176): n is a, c, g, or t
  misc_feature (178)..(178): n is a, c, g, or t
  misc_feature (217)..(217): n is a, c, g, or t
  misc_feature (467)..(475): n is a, c, g, or t
  misc_feature (564)..(662): n is a, c, g, or t
  misc_feature (664)..(664): n is a, c, g, or t
cgggggagaggtgtgattatcgctcgnggggtcganatttttgagcccgtttgtttgttatttntcctctgttcgccccactnggggaancttttagttcgagggcggggtgttttcttatgtgttggcgctccgctttgtgtgcgcgtgtgtcgatgttttttagtgtcgcggantngtcggccgaggcgtttctcaagtggccctttgtgtaatnggaagggtagggggccctcccgggtggggtttatggattttggcaggggcggcgggccccaccctttcgttgaaaagacaaagcacagtgggcggcgaggggtcagtatagaacccgggggtttgtctctcggactctgcgcgcccgcgggtggccctttaaaattgtttaggggccccacagcgcgctttttttctccgcgggggtttttgtccacggggcctgggcaagggtttggcgattacaatcnnnnnnnnncgcgcccagcgttcgtttgtgaacaagtttttcgcagggaaagggtttcggaacagtttcttggggcccgatgggatggtttagacaannnnnnnnnnnnnnnnnnnnnnnnnnnnnnnnnnnnnnnnnnnnnnnnnnnnnnnnnnnnnnnnnnnnnnnnnnnnnnnnnnnnnnnnnnnnnnnnnnngntagttttccaaacgtctttaataagtaaataaaggagcaatgtaaaatgttgcagtttgcttggtaaatcttaattgcgaaatttcttcttctttcggaacttttttcctgctgcatttgctgctttttcagccatgatctctgagtacttccttcggttgtatcttctgaattcagaatcagccagcagttcttccacaatagttcttttcctttgcttcttgggaattcgtgaatggtagaaatcagctggattgtcaacaatggttccaatctggaagtacttggggaagccatctctatcatttttcttgtaaaatcttttcgggtccatgctggctctcatcttcagtgctttgagatcatttttcagttcatttgtcatttctggagctttcataccaaaccagccatcccctgctgttttttgtcgttcttttctgcgttttttctgaagttgatactttgattcactatatggtggaacacagtggtttttttcaaaatcaggtgtaatgacggctttctgcagaagctcatttttctttttctccttgatctgtgttagggttctcttgttagactgtagtttatctgcattaaaattaatatacaaaccacccaactgcttgatactcagaccagggtctatgctgctgcttgtcaacttcagaagtttagcctttgtgctatttaggaagtcttcttcatcactaaactcatcttcattttcgtcatggtctgatgaatcttcttcacttttttcatcctcttcctcttctttttcttcctcaatggcaacctcacttgccttgtcttcctcttccaagtaaaaatttttatcagcactcattccaggagttgtgtcaattacaagcaatgcattgtcacatgacagacttcctgtgtctccacttaatgactccctttggccactattttcaacaaaacataaagtatcctcttcattctcactgttttcagactgttggctttcatcactgctgagaactagtaagacagaattatctttaccctgagatgtgttgggcgcagacgtgtatagtttggtatcacattcaaaatctacattcccttcactgttcatgtcttcactgacacttataactgtggactcttcttcatcatcactaccaccacaatcaccaaactttgtcaagtcacttgcttttatggggctctttttgttgttattccatctgcctacttccacagttgcaaatgtttgagttaatgatttcattacagcctcagagttcagattagagtgcactgatacagcatttttattttggggggttgaatgtctctgagaaactaactgttgaaggctagtgtcctgaagttcagaaagattcttcagctgagaacttttctcattaatttctttcccctcatctgttattccattggcatcttcatccaaatccttacaattctgttttttttctttaagagattcaacattggcctgttcgtgcactgttaatatattttctgaacttctgtgggagaaatcatcatcaaagtcattattatagaaatttggcttatttatctcagaaagagatcttgcttgtaaatgggaagtttgtctggtatctgaatcctctgaattcacaggtgtacccacgatcgtgtttctcatttcctggtaccattcttactatctttcttttccagtttgtgcctttaatttcctctgcatactcctggttcttctagttgcaattccagagaatgaaatgtctgagcttgatgtctcagcatcagatatagcttctgtatgagattcttggcttggatctgtcagagatttagccttacttcttctggctcctgtagttttttctgtgggaagcacaattctagaaatacctgaaacatgagattctgcttcagacactatttcttcagtgtaagactcctttgttggagttactttcggctttttcctaacactggacactggggagcatgcaattaagatctgccttctcctagttacccttaaaatggtatcatggtgctcagacacagaataatttgactctgcctcagaggtctctccatccgtagatggttcagtcccctttggtagtgagcctgtagttctgctcttcctctttctagctttaggagttctagggattaaactttgcttcccagtggtctgtgattcagcagtagttcgggcatcagatccagtactactttctggatgcgcttgaatcccattagcagcaaaactcttttgcccggaactttcagccgacgcggcttggatgctggccttagcccgtgcagatctggtaaccaccatctttccggctctctcgcgaccaccacgacttccctcttccctggcgctccggaaat

SEQ ID NO: 315808 - DNA, 765 bp, Homo Sapiens
  misc_feature (726)..(726): n is a, c, g, or t
tctcagacaagtatttgcattttaatcaaggcctcctgaaaaactgcaagacccaaaggaattaaaatgaatggtagaatatcacgcaggcaggggtattattttgggtaagggagcctcaaaacatagcacagaggcacagaaactagctcacccttagggttagtcctgagtagagccctggaaggcaccctcccctcccctaatccccaggttgaaaatcgaaggccatttggttgtagctttagagtgagtcaagttggggtcctagactggtccccttctttcctgtgcttgtcccacttcagcgcctcctctgggcagagctggggctgctttctcctctgcagatcactcagccaacaagcccccttcagcctgtggctggctgcctggggtcatgcccagctggcatggcttttggtccaccctggccattccagggcctgtagtgtccatggtgagggtcagctgcctgggtcagaagctggcttgtgaaaggagtctggcagtcccttggcgtggttgaccaactcataggagtcccggatatcagccaggccaaaccagaagaagatccactgcttgttggagaagctgccatcactgtgtttgaagtacctgggtgtggggaggtgatgtaggaaacagtttttaggcaaggccagtgttcattactcactggttctgtctttaaaaaacattgattgaggacctactgcaatntgggcacccagcttggtcctgctgtgtgttatctcattt

SEQ ID NO: 315809 - DNA, 479 bp, Homo Sapiens
ggagagcagaactggtgagacttgagggaagggtccagggcctgtattcagtcagaatcactgctggaagaggaggaggaagaggaggaatgcttgccatgcttgtggtacttgtggtgcttttggtgcttgtgcatctttttatgagctttcttcattttcttctgcatcttcttgtctactatcactgctggtccaaccatgccaggagccaagggattcacaggagggattccaggggcaggcggtgggtatggaggagggtagggacccaacggttggcatcctggataccctggctgtggcacaggatgagggggcccacctggggggaaagctggattgccatggggagctcctgggggaggaggacaggggccggcattgggattccacatgtttaggtgtgtcctccagcctttccaccgccgcctgggcttgctgcgttctccttcgcagtctcggctcttcctagtcac

SEQ ID NO: 315810 - DNA, 964 bp, Homo Sapiens
  misc_feature (37)..(37): n is a, c, g, or t
ccagggagaaataactttatttgaaataggaccccangacagccatattggggctaagggaggagaggttagggttcccaaaaccccccagtcaaaagctcatcaaccaaaatgggactttacttccccagcaaaccttgcagttagtgcaaccaacaaaaaggcctgctggggaatgtatttgccactaaattcccccaagtatgccaacattacaaaaaagataggtttttcatcataattgaatttccacaaacctccccaatcacaagtattataagtggaagtaaaaaatcacattttacagatctcaaacttgtcttcaacatttagttcatcatcttcaaaaaatagctcccctgcctaattcattagctatatgatctaaccaagcagcaacaagatggccaggccatggcaatcctcttcccatttcccctagccactcagggctcaacagcagggtgaggctcaggtggaggtagggggtggggagcacaagggctacattcccccagtacaacatggcatctgaagcttgatgggagagcagaactggtgagacttgagggaagggtccagggcctgtattcagtcagaatcactgctggaagaggaggaggaagaggaggaatgcttgccatgcttgtggtacttgtggtgcttttggtgcttgtgcatctttttatgagctttcttcattttcttctgcatcttcttgtctactatcactgctggtccaaccatgccaggagccaagggattcacaggagggattccaggggcaggcggtgggtatggaggagggtagggacccaacggttggcatcctggataccctggctgtggcacaggatgagggggcccacctggggggaaagctggcctcgtgccgaattcgccacccaggcctcgcgggtttgtttgatatctatttgggctgggttcgggtgggggtttgaaa

SEQ ID NO: 315811 - DNA, 430 bp, Homo Sapiens
ttctgagaccaggagaaataactttatttgaataggacccaagacagcatattgggctaaggaggagaggtaaggttccaaaaccgcagtcaaagctcatcaaccaaatggactctacttcccagcaaccttgcagttagtgcaaccaacaaaaggcctgctggggaatgtatttgccactaaattccccaagtatgccaacattacaaaaaagataggtttttcatcataattgaatttccacaaacctccccaatcacaagtattataagtggaagtaaaaaatcacattttacagatctcaaacttgtcttcaacatttagttcatcatcttcaaaaaatagctcccctgcctaattccttagctatatgatctaaccaagcagcaacaagatgggccagggccatgggaaatcctcttccccattt

SEQ ID NO: 315812 - DNA, 756 bp, Homo Sapiens
atcaattaggctaatatggatcctaacccaaggcagccaaccaaggatgggccagggccatgggcaatccttctttcccatttccccctagccactcaggggctcaacagcagggtgaggctcaggtggaggtagggggtggggagcacaagggctacattcccccagtacaacatggcatctgaagcttgatgggagagcagaactggtgagacttgagggaagggtccagggcctgtattcagtcagaatcactgctggaagaggaggaggaagaggaggaatgcttgccatgcttgtggtacttgtggtgcttttggtgcttgtgcatctttttatgagctttcttcattttcttctgcatcttcttgtctactatcactgctggtccaaccatgccaggagccaagggattcacaggagggattccaggggcaggcggtgggtatggaggagggtagggacccaacggttggcatcctggataccctggctgtggcacaggatgagggggcccacctggggggaaagctggattgccatggggagctcctgggggaggaggacaggggcctgggggaaagggtggattaataggtggtgggtgggcaggattggaacctccagggcacccaatattggggggatatggatttggccctggctgcccggcattgggattccacatgtttaggtgtgtcctccagccccatcacctttccaccgccgcctgggcttgctgcgttctccttcccc

SEQ ID NO: 315813 - DNA, 797 bp, Homo Sapiens; identical to SEQ ID NO: 127018
  misc_feature (19)..(19): n is a, c, g, or t

SEQ ID NO: 315814 - DNA, 464 bp, Homo Sapiens
  misc_feature (173)..(173): n is a, c, g, or t
ttccaaaccaggggcatttggaagctttgaaggggggagcaagaacttgggtaagaacttgaggggaagggttccagggccctgtattcagtcagaatcccctgctgggagaggaggaggaagagggaggaatgcttgccatgcttggggtactgtggtgcttttggtgcctngtgcatctttttatgagctttcttcattttcttctgcatcttcttgtctactatcactgctggtccaaccatgccaggagccaagggattcacaggagggattccaggggcaggcggtgggtatggaggagggtagggacccaacggttggcatcctggataccctggctgtggcacaggatgagggggcccaccggcattgggattccacatgtttaggtgtgtcctccagcctttccaccgccgcctgggcttgctgcgttctccttcgcagtctcggctcttcctccc

SEQ ID NO: 315815 - DNA, 1218 bp, Homo Sapiens
  misc_feature (94)..(102): n is a, c, g, or t
  misc_feature (104)..(107): n is a, c, g, or t
  misc_feature (109)..(119): n is a, c, g, or t
gggttccctttccctacttggggccccccgcccccaaaaggaatggttctaggaagtctttttcgagggcccgagggcgcccgaacaggttttnnnnnnnnntnnnntnnnnnnnnnnnacccaggagaaatacctttatttgaataggaccccaagacagcatatggggctaaggaggagaggtaaggttccaaaacccgcagtcaaagctcatcaaccaaatggactctacttcccagcaaccttgcagttagtgcaaccaacaaaaggcctgctggggaatgtatttgccactaaattccccaagtatgccaacattacaaaaaagataggtttttcatcataattgaatttccacaaacctccccaatcacaagtattataagtggaagtaaaaaatcacattttacagatctcaaacttgtcttcaacatttagttcatcatcttcaaaaaatagctcccctgcctaattcattagctatatgatctaaccaagcagcaacaagatggccaggccatggcaatcctcttcccatttcccctagccactcagggctcaacagcagggtgaggctcaggtggaggtagggggtggggagcacaagggctacattcccccagtacaacatggcatctgaagcttgatgggagagcagaactggtgagacttgagggaagggtccagggcctgtattcagtcagaatcactgctggaagaggaggaggaagaggaggaatgcttgccatgcttgtggtacttgtggtgcttttggtgcttgtgcatctttttatgagctttcttcattttcttctgcatcttcttgtctactatcactgctggtccaaccatgccaggagccaagggattcacaggagggattccaggggcaggcggtgggtatggaggagggtagggacccaacggttggcatcctggataccctggctgtggcacaggatgagggggcccacctggggggaaagctggattgccatggggagctcctgggggaggaggacaggggcctgggggaaagggtggattaataggtggtgggtgggcaggattggaacctccagggcacccaatattggggggatatggatttggccctggctgcccggcattgggattccacatgtttaggtgtgtcctccagcctttccaccgccgcctgggcttgctgcgttctccttcgcagtctcggctcttcc

SEQ ID NO: 315816 - DNA, 820 bp, Homo Sapiens; identical to SEQ ID NO: 127017
  misc_feature (90)..(90): n is a, c, g, or t

SEQ ID NO: 315817 - DNA, 286 bp, Homo Sapiens
  misc_feature (252)..(252): n is a, c, g, or t
cacactcttgaccccaggagtctggtttcacagcctgtgctatactctgctacaatgttgctatgttgtagcagaaacaaatctcttttattcctgcccatttgcctctctgacatccactccttttgtaagaacttcttctcccttccattcacgtgggccacagtgggaaacagccatgtctgcccactgagacctaacttcctgtccttagctgattgggtccagatatagtcatcttgaaccagggtnaggcaattcaggagtcctttcccggggattatgg

SEQ ID NO: 315818 - DNA, 1101 bp, Homo Sapiens
  misc_feature (53)..(53): n is a, c, g, or t
  misc_feature (71)..(71): n is a, c, g, or t
  misc_feature (78)..(78): n is a, c, g, or t
  misc_feature (88)..(88): n is a, c, g, or t
  misc_feature (190)..(190): n is a, c, g, or t
  misc_feature (259)..(259): n is a, c, g, or t
  misc_feature (654)..(685): n is a, c, g, or t
  misc_feature (998)..(998): n is a, c, g, or t
ctgcccgtggtccttaggaaaccaggttggtgccaacagtgctgctgtccgtngtcgtgctgctccaagcnctcctgnccatgggctntaagttgtacttcttccagtcgcttgcctccggagaaacgtggctcctccacccccaaatcacatctctgccctcaaacatcgcgctgtcccctaccttgcngcagtccctggccccctcctaggaaggcccgggtcccacaggcaacacctaagtggaccaacccctctncctgtcctgccccccagacgatgactgaaggctcctttgacaccttgagatgattctgctactttccagacttttcttacaaagcaaacacttttattttctatgcaaaggtgattcagagaatttatataaaggcgggcgaggggcagccgagcagggagctttgggacaggctggggcccccatatcccccccgggccacctgctttccctcctatggctcccctggaacaggagggagagccaagggggcggcccagcctggacagcgcccgctcctgcctgggtgcacacacggcgggcctgagctccagcatctgagtttgggggtatgagaaacaggggagcagaaggagaagaaaactgcctgtgctgcaacacgtttcctcatttannnnnnnnnnnnnnnnnnnnnnnnnnnnnnnnggagggagaggtccctgcaaggtcccttcccgggcaggggagggatggaaatgccgtcacagtagtagggactggagcgtctacaaggatggaggggagctactcaggcctaacgttagctacaaggaaaaaggacgccttccgtgacagatccttgaggtgtctgtgtctgccccaagtggccggcagtggcttccctccgggcccaaggcttgcagccacctgctctaactcttgagtgggggacgggggggttatctgcaggggctcggggacaggacagcagcaagaggcaggggcctaggacggaggncttacccgacagtggggtgggttgtacattcaagtgtgaggtgaaccctttggtggggagggggcccctgaagcctcggcggggccacccctccccgcggcgc

SEQ ID NO: 315819 - DNA, 863 bp, Homo Sapiens
aaatttgtccaaaaaaaattctatttgtcaagttttcctcctttggatttgtttcatagaaatgtaccattttattacaaagaggctcacaaaaatgaaaatagtatctcaaaaaggaaactagactagcaacctccacctgcagaattaggagaagacagacagagggcaggcagtgtttcttggctcacttgaggccagtgggaaggtacgaaaacagaaccaatctaaaaatggctgatgttactttaggagcctgaaaaaaacaggagatccttgaagacccagccaccccttctagaatgttcaataagggcacctttccaaagctactaagcaggcacttggcatttcaggagtttgtcttatggttgcataaaagtatccctttcacccagacctggcaccctttatggttcaaagttaagaacgggaagaatgggtggcaaggtggctcctggaagagctcacccagcacagctgccctgagctcggggccttggtttctgtccctggggatatttatatttaataaatttttatataaatacacagagaaatagaaaatataaaatctgaggggttggggaagaaacgtgagggactcagcaggaagccagagctggagaggtccattcaggccaacttgacctcctccttgacccctttggcttctggcttctcctccttggttttctcctcttcggtgacttctttcttctcctctgggtctttctctttttcatcctctgttttgactctcttggcttttttgaagttggaagagcctcgtgcggaattcgccacccactcctcggggagttgtcctggagcacgcgcggtaaccgaggaaaggataaaaa

SEQ ID NO: 315820 - DNA, 923 bp, Homo Sapiens
agaaattctcaatatggtttattagtggcaatgtaaatcgatgacaaccaaaaaccaaataaacatatctaccaaatgaataaattcttaactactattaattgcatataatatatccagcagatgttttaaaagtcaacaatattaattccctttgtagattaattgtaaaaaaataactgttttgagtctatctccatcagtacttgaaagtacaaatatacattaaataagattataaagactgtaatacatacaacaaaaaagtctataaaacaaagataactttaaaagcattgctcaatttactttgtagcttttctatataaaatattttaaaaccgtacctattttctggatcatacatgaaagttcacatccagatgtctttttaaatcaaattcttattctttcttcattgtcaaaatcttaattttcattcctgggtggatttttcttccttggcaattctttttgttaccccactaaaatatttctcacggaaggaattatgaccttggtatggcagaaaatgatcacttagcagatgtgaatactggtcccgattctcaaatttcttcaccttttccattgtgatcaagcgccttgatgtgtgactggaaagcttctgctcgcagttgctaacgagttccaggcaagggtgccaaggcacattctcttcagtgtattctggcgtatacaccggtaaccaatagactagtcttccacctaaaacgagggtctcagctgcgaagtttaacaggtcaagaaacatatcactcaggatgataactcaaggaaacaggaacatggctttctggacatttttcccatttttctatcccctttggtatctccttctgtgaacctgttcttcttgtagattctctgataccatatggaggatcagtaatgattgcatc

SEQ ID NO: 315821 - DNA, 887 bp, Homo Sapiens
  misc_feature (299)..(299): n is a, c, g, or t
  misc_feature (398)..(398): n is a, c, g, or t
gttatcagactttggtttattgtaaaatttagcaaagtttttcttgtaatccctgacccattgctctgaaaacaaaagcaaaaacataattattgcttattcttttccccctactttgtttgtgctactgtaaaagaagggagaaaatcattgtaataaataaaaaatagagatgtaacagagaaaaataaatcagctcagatgagaagtattaggagcaacagcaataccattaagcagtttcaaaatcagcttcttttaaaaaggtcatcttattaaattaaaaatcacaccaaaanatatagcagcggagaagaaggataaatacaagttcattgcacaccagtcccatgcaaaaaactgtcactagccaaagcagtagtattcagaatccaatntaggacgcttgtgtagtgcctgtgagtcctctatgagggagctgtcactgaattggtccaagtctgaaggggtctgatggcctgggacatcatccgccaacgtgtccagataacttcccacggaaatgccatccagcccatcactgccatcgtgtaggctgttgtagctgccacgtaaggaggtgctctgactctccaacaaactgcacaggctgccactgaggctgctgcctctgctggtaatggtggctcttcgatcatccacttgatggactcgatgctctcattgattacaagcaactggcgcatgagcctgacgtctgtggctctgaggttaaccatctcttgcctgaggaggtgaagcttggctagcctctccagggcgctagagtggctacctcgtggggagccagaggttggggaggacgaagaggaggacgacaaggagggagggaagctgcagtagctgctgctgctactgcagccgcc

SEQ ID NO: 315822 - DNA, 712 bp, Homo Sapiens
  misc_feature (251)..(251): n is a, c, g, or t
ggatcaggagttttattctctctttggaatgactcccagaacagccacttatgcccagaaaatccatgatcccatctcctccatgatggaggaagctgaggaccagagatgggaagggagtagactaagggagtagccagtgcatcccaggagcaggacagaatctctgacccctgacccctagcccagtgctccttccaccacccctggctgctccttcatggaccaatgaggtgacagaggcagggctnagttcacaggctgacaagaatctgcggatgtcctcagatgtcccacaaggtgtcctcctgcagacgcccaacccagaccttgtctgctgcaatatcactaccagtgcttgcagacctccagagacaggagtctcaccacctcgcaaggcagctactccatcctgaccctgtggaaggtgtgcaaatgtgggggtgggtggggacgaggagaggtgcctcgcgagctgcggttccttctgggggatccacctgcttccttgcccactcaggctggcagtggggcagaggcgaccacacctgttcccctgccaaggaatttccctccaggggctcccctgggcctgtgtgagggggtgagaagtgtttcctgttagtggactcctcctccaggccaggcctccctggagacagagctggctgcccgggtactggaagtcagctctactctgataatacttctg

SEQ ID NO: 315823 - DNA, 347 bp, Homo Sapiens
  misc_feature (178)..(178): n is a, c, g, or t
  misc_feature (291)..(291): n is a, c, g, or t
  misc_feature (327)..(327): n is a, c, g, or t
gtgggtagaactgaaagttggctccggttccgcagcccagctccagtaagggccactttccccggaggctcctgtaagcccctttatctggctgaagagctcccgtttcttgctctccatcttgcggttgctcttgggagtcagcacggccatcaggtaggggaagtagcttttgcancaggggctgccagcagcccagcagagccatgaggtgcaggggcagggtaagaagcagcaccagcagctgcaggagtgggaccaggatgtccatggcagaccagctctgagctngtcttccgctggggcactggctttttccctgctcancctctgcaggcgctggcgtc

SEQ ID NO: 315824 - DNA, 874 bp, Homo Sapiens
gctatagttaaaaaataaaaagtttataaaatgaaagcagcatgcatattcaaggctttttcaaaacattttcaatggctgaaaaacatttaaccaggagcttaatatttattatccattaaattagagaaaataaactggctaagcctacatctggtcattcagaaacacatgttaaaatccagagctaattaagctgaacatttcttctacgaagagagcgcattttgaaagatggtcctatggtcacaaaagagagggttcttccctatatgaatgaacagcaccagtctttacaaagtttgtaaattagtatgaactttcagtctcctgatgcggcaagagttcacagttaacactcccatgattcataagtgaagagctaacttttaactcattatgatcagttcagaattttttctctattcactgaaactgttataaaatttcactgagagataactcttaaaaattctgatctgacacctgtatacacatttctgatttccacgattgtaagaacacactgagtatacatttactacgtgattctttttcacatttttggtgcagtatttatttcagagcttcaccctatccaaattaccatgtcagtttcttttccttcttcagaattaatttcctgcagtttaataaaaagcaaatcagcttctaatggaacaagtcacagtagacacagtggtattcatggatgtgtttaatgaaggatccaattattaagggccagtgaaaccataaaatcttagtgtttcaacatatataaataggctgtttttacatttgaaattgtataagcccatgcacaacttttaatcttagtgcagggtctgataagtaagacatagtaatcaat

SEQ ID NO: 315825 - DNA, 478 bp, Homo Sapiens
  misc_feature (349)..(349): n is a, c, g, or t
  misc_feature (410)..(410): n is a, c, g, or t
gattatttggagggatttaaaaaacttaattactctcaggcctcatcccaagcttgacacatgctctgtaggttgaacacataatcacaaatattctagcaaatgctgccttggttgcagcctgcactgtagacccaagggttttgctgtggctcttcttatctcccttggctcataaagccccagatgatgccagagcttcaattagagccatcatcatcccaggcagggatatctttgagaaattactctcagttcagccccaggcccctgtgactctgcttaaagcacacatttctgctgactcttgtacctgggggcagcaggataattcaccaacacactcttnaatgaggaaacaacacaccaaggcacagtgggagctgttcctagggcaacattcggcggtnttcagggttgcggtggggcgttttgttcctggcatgtgggccccagaccaccctggacccccggggcc

SEQ ID NO: 315826 - DNA, 1117 bp, Homo Sapiens
ttttttttataaagaacaatatttatttccatttacagcatcaaataccataaataaagctaaacattgtttgttttgctgtgtgcaaaatacagggttccgtgtggcactgtaaatgattaccaaaggtcacagacatgcgttgtgatgagatggggaggctagctaaagaggaggctgagaggggaggagggcactctttggttgacattctataaagggagggagactctgtaagagaagataagacaagagcaacgactttgtactggccgggatctgcacaaatacagtgagcgtgcagcatgcagggccaggcaggcaggcccgggggtcagggtggtctgggccacatgcaggacagacgcccaccgcagcctgagaccgcgagtgttgcctaggacagctccactgtgcttggtgtgttgtttctcgttaagagtgtgttggtgattatcctgctgccccaggtacaagagtcagcagaaatgtgtgctttaagcagagtcacaggggcctggggctgaactgagtcatttctcaaagatatccctgcctgggatgatgatggctctaattgaagctctggcatcatctggggctttatgagccaagggagataagaagagccacagcaaaacccttgggtctacagtgcaggctgcaaccaaggcagcatttgctagaatatttgtgattatgtgttcaacctacagagcatgtgtcaagcttgggatgaggcctgagagtaattaagttttttaaatccctccaaataatcacctatggttttgataaatgacattaacaatctttacattagagccaatttaagaaggcgctggtatgtatgagctttttgaggctgctcaaaaagtgttcttttcaaaggtgacagaggccccctcatggtattgtttcatgatcaaggtcgaccctcccaagaaagtaggctacttcgcagacgcaactggagaagcatgcacgcaggcagacccaagggagagaggagaggcggggcatgcacttggggtagaccaggctgccagctccatgggaaatgaacacaggcagcgtggagtagggagagctgaggactcttctagatacccagagt

SEQ ID NO: 315827 - DNA, 708 bp, Homo Sapiens
aggtgtctccctacaggtcgccataagcaccaaccaaccggtatctcagatgccccaggtaaaaaaatcggagtccccctaggaaagtgtgtggcggtccttcaggggcctgaacatttggagcgcctccccacctcatccatagtcgtcgtagtctttgggggctctgctgatgttgcctgttggcgacagcgtcttaggtatgtgctccagagtgaaggcgtctgggtggatcatcatgtagagcctcatcatcaggtacttctgggagcctttatatgtgcagcagttaccggggtaaatgtcagtctgtatgaccacgcgcggggactgcgagaagtaccacagcgggatcccatgcagactcatcagcgccgttttggtttcgtaagtttcagatacagcgagtactcaagatgctgccgcctccagattccagagcagagtccgccatcgcggtcttatcttgggaatacagcttcaaggcgctgttcacgatggcacgtgcttgcgcctctgttattccagacgcccccgcctcgctcacagcagacaccgcggcttctgaggttgggagctgcttggtcacggaaacgtggtgggtgacgttccgcaggatctgcagctgcaggtctcgcagcatcgtctgcaagtcgcctttgctcacaaactgtgatgagaacctctgcagcagctgttccagagaac

SEQ ID NO: 315828 - DNA, 794 bp, Homo Sapiens
tgatcttcttcaacttggatttatgtccatgattcgtgcaaatagctatccagggatggacagccaccctaatctgggcttctggcaccacaggcctccagctatggggtccagggtctgaacctcagggcctggcagcttcaggctggcgcccctcggcgaacgtggctggcatggccttctcccatctgtgatggcttcagcaaggctactgtgagtggtggtggagagggccccagagccagaatatccatcattctcttctgttctggagacaaacccacacttcccacagctcctcacagaggggtaggggtttgcgtggggcaggtcctgctacagagcttgaagcaaaaaattaaacacacacacaaattggtcatggcaacttagagggcctgaaaccacttccgggaggttttgaaggaagggggtcttggctgcctcccactcttaggattgctgcttcctggaggcttctgcaacggatggtgggtcaaagccggatgaggcctctctccactcagcagcagggaaggagtttttcccagtcactcccagcagagtacaaatgaaagccttctgggtggagcctccccagtcctgtaaacagctcagttcagggactggtgtacaagctggccacccatctcagcctctcatccagctgagctctggccacaccgtgcaagtggcttctagtttcttggcaatctgagatcagctggctctgcaagatgaaggtggagccaaatgacacaatctggtctcactgaggccctcacggtcatttc

SEQ ID NO: 315829 - DNA, 376 bp, Homo Sapiens
gcataaagagacaatgtgatgattgatcttttgcatgtttgcatatttaggacttttagatgattggctcctttaactctcaattcccaggaaatcatcttgccttatgcatgaaattgcaaataggtttgttttgtaatgcagctttggctagaccccatgtttttcactacttatggaaatctgcctggccttgggttggtacagttgatgtcagtattagaaagcacatccttagcactgaaacaaccggacaagtggttgatgagaaatgtctcacttctgtcaatttacagttattgaccactcggttttgtttttttaaaggtgtagataagcttatttttagtgtttacatctattcttttgggtctgt

SEQ ID NO: 315830 - DNA, 470 bp, Homo Sapiens
ggaacagtctggtccctgattggggcctctccccctgcccctccccagtctggttacagctcagttcgtcgctctattttgagcagctccacctcgaacaccagggttgcaccgcctggaatctttgggggagctccccgctctccataccctagctcggatgggatcaccagcttgcgcttttccccctcacacatccccagcagcccctggtcccagcccttgatgacctggcctgtgccaagggagaagacaaagggctggttctggggcaggctgctgtcaaactctgtcccatcttccagcttccccgtgtagtgcatgtgcaggacatcccctttgcgcgatttgatgggacagtggtccacccgcttcttgaccccgatctggagcttccttttgccctcggcccccgtgggctggtgacgggcttcagggaagatggacagtactgtcaggacccggaacca

SEQ ID NO: 315831 - DNA, 837 bp, Homo Sapiens
  misc_feature (303)..(303): n is a, c, g, or t
  misc_feature (409)..(409): n is a, c, g, or t
  misc_feature (680)..(680): n is a, c, g, or t
gttaaattatggaagcccctcaggttcctccctgtcccgcagacctcttatttatactaaagttccctgttttctcagcgggtctgtccccttcggaggagatgatgtagaggacctgtgtgtgtactctgtggttctaggcagtccgctttccccagaggaggagtgcaggcctgctcccagcccagcgcctcccaccccttttcatagcaggaaaagccggagcccagggagggaacggacctgcgagtcacacaactggtgacccacaccagcggctgggagcagggaccctcttggggnagaagagcatccttgcccgcagccagggcccctcatcaaagtcctcggtgttttttaaattatcagaactgcccaggaccacgtttcccaggccctgcccagctgngactcctcggtccttgcctcctagtttctcaggcctggccctctcaaggcccaggcaccccaggccggttggaggccccgacttccactcttgagaaccgtccacccttgaaagaagagctcagattcctcttgggctctcgagccgcagggagtgtgtcttcccgcgccacccttcaccccccgaaatggttctggttctaatcccagcccttgccagaaatgtgctccccgccagggcccaggagctattttgggtctcgtttgccagngagggcttggctcaccactttctccccagcctttggcaagaggtcacccctggtcaggctctgatggtgccccttcctggtcctgtcctaacaaccctttccaacttctgggaaattcacaattacaacttcacttggcgtcgttttacccgtcggc

SEQ ID NO: 315832 - DNA, 531 bp, Homo Sapiens
  misc_feature (197)..(197): n is a, c, g, or t
atgaaactgatggtaacctcccagagtcaagaattgaaggttggctttcagtaccaaatagaggaaatatcaaacgatatggctggaagaaacagtatgttgtggtaagcagcaaaaaaattttgttctataatgaccgaacaagataaggagcaatccaatccatctatggtattggccatagataacctgtttcnccgttagaccctgtaaccccaaggagatgtgtatagagctgaaactgaagaaattcctaaaatattccagatactatatgcaaatgaaggtgaatgtagaaaagatgtagagatggaaccagtacaacaagctgaactaatttccgtgatgcctgtgccaaacctctctggcatgtttttaagccaccccctgccctagagtgtcgaagatgccatgttaagtgccacagagatcacttagataagaaagaggacttaatttgtccatgtaaagtaagttatgatgtaacatcagcaagagatatgctgctgttagcatgttctcaggatgaac

SEQ ID NO: 315833 - DNA, 1090 bp, Homo Sapiens
tttgacattatgcaagaacaaatttaataataagctgtatctataattccagactttttttccctgcaaaacctgggaaacaagagggatgaaggaatataaacatcctaaaagcctcatattgttgaaggagactttgaaattcttggcgttgatagatacatgctcagatatttattaaacatttacagataccaaccagcaaaataaaaagggaattggaacttctgtacctcccttttcttttatcatgtgggaaagtctcaaagccctggcactgggagctgctcagaaggcaagggccacatgtgcccccagcttccccccacccccagcacagggccaggaaagccactgctggtggctccctgtctgctgcctcccgagcagtaggtcccagcgaggtggggtggtaataggttgggctgggagcagattagcaaaccctctcctccccgcaaggaaataaccaggcccagataagactagccataaaacaaaacaagggctgatgtagaaaaggattggatcataagacacgagcaagccatagcatcactcattacacagagctgagctttactgctcccagcactacagtcctgggcctgacaccagcccaggcatcggagaaccaggtgccacccccaaaaaacagtgtcacagaactaaacattatccacactgccccaggtgacacagacccaggcacccaggagaaaatagagaaattaggatcctagtcacaaaggtcacagggactttggtggcccctggtcacatgtgtgaaatcttggcaatgtgtaggaatcagtgagtgcgcgctgagtgtgtgtttgtctgaaattagaaaatacccaagtgtgggcctgagtctccctccctaccccagggcccagacttgcccacccagggccctaaggcaggtgttgggcctcaccctcaaccgtggctccctgagggcaagggctagaatttcctgagatggagagtgagtctccccgcttcagctaaggattcctggggcccccacacaggcctcttgaaggccctgccaagtctgggtgtcccactcctgaggccagctccg

SEQ ID NO: 315834 - DNA, 470 bp, Homo Sapiens
  misc_feature (20)..(20): n is a, c, g, or t
  misc_feature (35)..(35): n is a, c, g, or t
  misc_feature (48)..(48): n is a, c, g, or t
  misc_feature (98)..(98): n is a, c, g, or t
  misc_feature (127)..(127): n is a, c, g, or t
atcataagaacacgaacaanccaatagcatcactnaattaacacaganctgaacttttactgctccccagcaacttacagtcctgggcctgaacaccnagccccaggcatcggagaacccaggtgcnaccccccaaaaaacagtgtcacagaactaaacattatcccacactgccccccaggtgacacagaccccaggcaccccaggagaaaatagagaaattaggatcctagtcacaaaggtcacagggactttggtggcccctggtcacatgtgtgaaatcttggcaatgtgtaggaatcagtgagtgcgcgctgagtgtgtgtttgtctgaaattagaaaatacccaagtgtgggcctgagtctccctccctaccccagggcccagacttgcccacccagggccctaaggcaggtgttgggcctcaccctcaaccgtggctccctgagggcaagggctagaatttcc

SEQ ID NO: 315835 - DNA, 805 bp, Homo Sapiens
  misc_feature (95)..(95): n is a, c, g, or t
ccattcccaaatgaacctctactgaaaacccgggctgtttgttcctattaaaattggtttaaccaaaccaagtccttcctttgtaggaactcccngctctcccagaaccaatggttcttttccttgattctgagtccactactatcctcatactgcttttattgggaggcttttctctgggtggcaaatccatatcccctgatgttagtcctatcaagttgggcctttgtgcatgcactctgtgtctatacataggtctggaagtgtttgttatgcttggggcttcaggattgtagccatctgtgtcatatgtatctggtaatacaaaaactgcagtaaaaagagagggtggagcaggaggaggctggtgatgaatgccagttgttactacagtaggaacagaactggttgcagagtttggaggagcatccatgccagatggctgcaaaggaggaagtggaggtggtggtcctgtcaaaaccaaagaataagaaatatcatctgtaacaggtgggagactgggtggcaatggacctggcggtggcactgggggcctgagattcacaggtgggggtgtaagaattggtggaggtggggggagtccaggaggaggtggtccttcaacaacaggaggctgtgctgggaaaggcagcataccaggaagattcacatcttctacaactactggatcacttccatgatcaaaaggacacatgtctcctctcatacaaaaacccttttcatcatagtctctacaccgtttctttggcatgggtggtcttacgtaagagttatggtcccaccc

SEQ ID NO: 315836 - DNA, 718 bp, Homo Sapiens
actgttttactgtagctgtcatggtggaatcaggaatacatagtccctagtggcattaacagaacaagaaccatacaaattaaagctcatagaaacacaaagggaagacagaacctcagagaacaatgccaaccatgacagtctgaaatagatgcttgggccacacatgaaggctagaaggaaaatccaaactgtacgtggatctttgatgcggactttgtggagacaactgtggaaaccaacacatctctttgagaatggaagtcaagcagctcagggtgttttcaggatacttttgattggcagagaaaataaccaggaaaatgagcaggaagcaggctgtctccctgtatggtggggttccaatacctgactaatgtcttcttcacttctgcctggcaaatctcatgcaagtgaggctataagtgaatttcaacatggatctataaagggaacagattctaggaaatttacctgtgtcgacaggtagcaggagggccacgtccagctctagattttattgtccctatcacaggtgtccttcctgaattcaaactctactattcaaatcccagacagaattataaaaaaaggcgaaaataataattcgcataagaatatatgataaacttcacatacttaccaacttatgccagatgtttaataaaaaggaaaatggaataaggctcttctagctgaaattcattttatttattta

SEQ ID NO: 315837 - DNA, 731 bp, Homo Sapiens
aaacacttttgctttgctagttcttgtattagatcttcatatacttgcaaaaagaggtcctcttcagattttgttccatccaggtacacaacttcccatgtgatgtcctgcatttcttgtctgtactttagatacatgggccacacatggccatcaaagtatcccggagagtctggaggctgatagacccttgtactcctcctccttttacattcttcatatggaatcgtcaggaaatagcttctattccatatagtgtcaaggggcttataattaaaaagaagaaaaccttcgatgattaaaatgggaatttcctcagcactttcctggtctgttgataccacagagtgtcttgcgctttccatccagcaggaaatggctgacatcattttttccatgttaagtgcttcaagcacatcgtactgcaaaaatccatttttatctgtctctatctcagactctggcttgaagaaatcatcctgagatatgacactgcaatttgggaggtgtttctgcaaattcttagccagtgttgttttgccactgtttgtcacaccactgattccaatgataaatgttttcataattagctttgaaaatcacagcttcctaatatttcctggcgccagttcgagtcctcccaaacacagcggcagaggcgacagccaagcgcgcgcctgtacccagtgcgccgctacccgcagctcgctccccctcgtgccgaatcctgc

SEQ ID NO: 315838 - DNA, 936 bp, Homo Sapiens
  misc_feature (441)..(441): n is a, c, g, or t
  misc_feature (813)..(822): n is a, c, g, or t
ttttttcctattcctttcagataataaatttattattgtattatttctattaaaaataatgtagtaaacaattagtcatagggaaaaacttctaggaggtaccaagtttcatctcatgaaatttagtatgaaactcagaaatcaagataacaggatacagaacagagatattcactctcagaaatttaccctgcagaaagaggaactaatgttttataaatttatgtaactcaccaattatctacaatatttcctcgtggagatgtattcattttctacagccaatatcggaggagattttccctattattttcgttggtagcattctaagagctgagccttggaattctttttgacatcacctacagaaaacacacctgagaaaattcctaaactctctcttggaaagaaaaaggtaagtaagtattttttacatacganaatatatgattagatattaatattttttgaaacccaccacttatatgccctgtgtaaatgtttttgaacctttcgagctctactaataaaatgctatttacagtttaagaaattgaaatcaatatgagtgcacatatcttttcaaggtgacgaacacagggtgtagcagtgatgattaaaacacagatgtgtctgactcatgtgtcaagtcaggtcatccaatcacgtgagagattctcccaccccagcgtgctcacttaactgctcaatgactaacctctcaggagactctgctctatgttccagtgagtggcccaggttttactttcggaaatttttgcagcatctctctggggtcaggttttcttgtgnnnnnnnnnnaggggggatactattttttctttcacaaatcttagagaattcaggggacagaaattatttctgttttccccttaacaccagcctctgattggctgaccagcaatgtgtcaccaa

SEQ ID NO: 315839 - DNA, 645 bp, Homo Sapiens
agacaccgtgaaaggcccacctcaccagcccaggtccctcagtataagccacagcataagcagatccagcctctggaggcccaggtcctcgacactccctctcctgtcccctcagcaggggtccaacccataagcacagaagagcgcgttggggagcatgcctcgggctgaggttagattgcatatggtttgtacaaggtgaggtatctcacagaaggtgcctactggggaagatgtcatgctcaattcttggcccccacccatcaccaagataggtacatccatgtgtcagagttggtgtgatgctggtttggagctcagcacctcccacatggggcatgcagggggagacggactggaggctcagggcactggaggtagaaaggagccctccccgcctccttccccaggccaggaaggggtaaacacacatataaggcagccccaattccagcagggcctgaggctgggaatgatgtgtttcccaggggtggttatggttcaggacctggctgcaggcacttcctcccaagcctggtggggtgaaggggacccccggaagggggtcctatcagcccctccagacaggagaatgaggtcttcagtggcaaccactggggtctggcggcagggacagagccttct

SEQ ID NO: 315840 - DNA, 1111 bp, Homo Sapiens
  misc_feature (4)..(5): n is a, c, g, or t
  misc_feature (11)..(11): n is a, c, g, or t
  misc_feature (21)..(21): n is a, c, g, or t
  misc_feature (39)..(39): n is a, c, g, or t
  misc_feature (46)..(46): n is a, c, g, or t
  misc_feature (50)..(50): n is a, c, g, or t
  misc_feature (54)..(54): n is a, c, g, or t
  misc_feature (56)..(56): n is a, c, g, or t
  misc_feature (75)..(75): n is a, c, g, or t
  misc_feature (78)..(78): n is a, c, g, or t
  misc_feature (87)..(87): n is a, c, g, or t
  misc_feature (89)..(89): n is a, c, g, or t
  misc_feature (98)..(99): n is a, c, g, or t
  misc_feature (106)..(106): n is a, c, g, or t
  misc_feature (113)..(113): n is a, c, g, or t
  misc_feature (117)..(117): n is a, c, g, or t
  misc_feature (119)..(119): n is a, c, g, or t
  misc_feature (121)..(121): n is a, c, g, or t
  misc_feature (125)..(125): n is a, c, g, or t
  misc_feature (145)..(145): n is a, c, g, or t
  misc_feature (148)..(148): n is a, c, g, or t
  misc_feature (159)..(160): n is a, c, g, or t
  misc_feature (188)..(188): n is a, c, g, or t
  misc_feature (193)..(193): n is a, c, g, or t
  misc_feature (200)..(201): n is a, c, g, or t
  misc_feature (210)..(210): n is a, c, g, or t
  misc_feature (232)..(232): n is a, c, g, or t
  misc_feature (257)..(257): n is a, c, g, or t
  misc_feature (286)..(286): n is a, c, g, or t
  misc_feature (344)..(344): n is a, c, g, or t
  misc_feature (360)..(360): n is a, c, g, or t
  misc_feature (385)..(385): n is a, c, g, or t
  misc_feature (643)..(687): n is a, c, g, or t
  misc_feature (1063)..(1063): n is a, c, g, or t
tggnnccccantatcagaaanctgtgggttcattccggnggcttanattncctntnacccttatattgtctaaangcnaaataattntnagagggtanncaaaatncaattgncgtnantngttngcttcagtagaatgaaacgngangaattgcattnnataactgctagtcatttaacatttctcnttatnagtaccnnggttccctnaaagtttgttgattaaagctanttttgtagatgctttttcatacagnacttagatgaattattgatcttcctaatnttaggcgcctacttaacctatggtgtgtactttttgtaagttgtaacttgaaattttnagatgctttgaacttnaaacatactctagcaattcattggnacaccaaggcaaaaacaccaacctgctaaaagagatcttttcatttttcttattttcagctttaaaacttagctgtcgttcagttaagcttaaagataggttaatttgtaaatggcaaagtttgttttgaggtttttcctcaataacttgtttcccaggcctattaggccatctctaaaattgatctagctgttttatttttatgtactcttagttttatgtaagaaaccttaggatgagctcccttttctaaggtgnnnnnnnnnnnnnnnnnnnnnnnnnnnnnnnnnnnnnnnnnnnnnccatttacggcagtggtaccatgttttggatgtgtgatgtttatatgggagaacaaaaagctgatgtatagccctgtatacagtgtagatactatttttgtaaaaacacaaggctaaattaatgaacaagaatactgaatatttcatcattaaaaatttcttgtatttcttgtgcattaatctgacgataatttccctgtatattatgttcatttagctgtttgtaatttttgttaattagatcaggttgtctgcatttgttggtgtaagtgaacatcatcacagttatcctgagttgagtttaagccaaatacatgcatagaaaagggtcttcctattaatggaagaaggtaatttttaggatgtgtattatttncagttttgtatgtttaacttttattaaataaagtgtttttaaaatctc

SEQ ID NO: 315841 - DNA, 340 bp, Homo Sapiens
  misc_feature (151)..(168): n is a, c, g, or t
aagaattgaagtacaccaagatgatggaataccctgtgattattaaggtgaaaaagagcaggttaaaaaagaatagcatatatgatatgattctaaataaagcaaacaaaaccaaaagcttaatagatgttgcaacaaaaagtgtatatannnnnnnnnnnnnnnnnncatacatataatatacacacacatatataaggatatatgtacatacctacatataaaatacttcagcattttaacaccagaagaggccttacattttatcacatacttaaacctcctaatcctacatataagaaagcagcaactaaacatttttcactagaatgggtctagg

SEQ ID NO: 315842 - DNA, 546 bp, Homo Sapiens
cagttgtttcggaaggacagtctccgggggacatggcccggtcctgggcagcctcttctggtacccgcgtttccccagacttgggggtgtcgcccgcatgctgggggctctccgggacgtcccgagacctccgccgcacgatgcacaggtccccgacggtgatgggggaggtggcaagcgcggttctgcggctctgtgccagcttcttcaggacgccgctgaccttgctgctggaggcggatccgggggcagaggggaaccaggagcggctgatgatctcggtccgcttgagtttctgcttgtcctcgtaggagtccagggtgtggaacttcagcagagccgccagcttgcggtcatcttccgtctcgggcaccagcgggatggtcaggttcttttccttgtgctaggctttgttctggacactcggcatacagtggcaggcagggaaaaacccttgccctggtggagctggcctctagtggtgagacagtgataaggagaaaaaaaatgcaggacaggtgggtaggggatgggctgggtggttcc

SEQ ID NO: 315843 - DNA, 1944 bp, Homo Sapiens
  misc_feature (1313)..(1313): n is a, c, g, or t
  misc_feature (1897)..(1897): n is a, c, g, or t
gaagagacaggtctttaatgtacggagtctcacaaggcacaaacaccctcaccaggaccaaataaataactccacggttgcaggaaggcgcggtctggggaggatgcggcatctgagctctcccagggctggtgggcgagccgggggtctgcagtctgtgaggggcctcctgggtgtgtccgggcctctagagcgggtccagtctccaggatggggatcgctcactcactctccgagtcggagtagtccgccacgagggaggagccgagactgcaggggtgccgcgtgtcgggggtgtcagctgcctcctgggaggagcctgctggcgacaggggcttgtcctgacggctcccttcctgccccctcgggctgctgcacttgggggtctcagttgtttccggaggacagtctccgggggacatgggccggtcctgggcagcctcctctggtacccgcggttccccagacttgggggtgtcggccgcatgctgggggctctccgggacgtcccgagacctccgccgcacgatgcccaggtccccgacggtgatgggggaggtggcaagcgcggttctgcggctctgtgccagcttcttcaggacgccgctgaccttgctgctggaggcggatccgggggcagaggggaaccaggagcggctgatgatctcggtccgcttgagtttctgcttgtcctcgtaggctagaggagaggagaggacatttcaggggcggcaggggagggggtccagaactgccctctggtagaccagagtccactcatggctgaggaccccccatctccaggcaactctgagcctccctgtccccttttccccctggcctcctacgcacagtccagggtgtggaacttcagcagagccgccagcttgcggtcatcttccgtctcgggcaccagcgggatggtcaggctcgccttggcctgcaaggcctggtctctctcctcctcctcctggatggcttttttcttttcccggaaccttctccgcagcatgctgttgagggcgaagtcgtccttccaggcgctctgggcctcctggatgtggctcagtgtgggcagcgccttcttgagtgtgctgcggtcggcctcgccatgctccagccggaacatggcgtccgtctccagcttctgcttcttctcatgctctgcaacgatcagagctcggctgggctttggggccccagcgcagactcagggccagggcccccaggcaggtaagtgggtggcgctcacctgtggtcagcacctgctcattgtccgccatgtcccagcgctcctccttgcgctgggcgcnactcacgatcacgtagtcgcagttggcggggtccgtctgcatctcgatgtagttgacacagaggtggcatttcatccggaacctgtagatcggggttgtgtagtaattgcccaccttcttcttttctgcattgtaacgaacacccatgccgatgtggttcttgcagccatcgcaccagatgttatatggcatttcgaatcggatgatgaggatgccctgtgacagcttccgagcccgctcccgaagcgggtggctgttgtggtatcggttgagagagccatgcttctcagggttgaagtctggaggatagtacttgttgacccctttcctttcacccatcttgggagctgcctactggtcctcagcctcggggcggacgatcagaaactggccttgtgaacacactgcactgtcctgacctcttgtggagcctggcagagggtccacaggcttccctgcgaagatgtcgtgggccgtgtggtggtgccagctcagacaagactcccgccaggcataggaggcatccaaaaagcggcgtgtctgccctcctcccgacgtcacgccctgaccgtgcccggaagtgncgctgagagcgcggtgaacctgggcgccctctccgcgcccccaggac

SEQ ID NO: 315844 - DNA, 1938 bp, Homo Sapiens
ttttttagatctcattagttttatttctataacctttcgatctgatgtcacgttagattttgtcacaactggatttagtggaagcaggggaatcaagttcactattttctgaaacacacaaaaaagggatgggaacaatgacttagaactaagattgctcataaaagaccatcagaaagatccctaaacaaaagctaaatagttacagttaatggtaactggcaagggatttaatgcatttgctggtattaagtttcttatggaatgaatgaatgaacccagcagcattttatgacacagctgccagaacatcccatagaaaaacaattttgtaggaacgtgatggcaacaatcagcagccaatattctcaagagttcctaattaccaaaagcatatacaattttagtctagaaaaataagtcaattttataaaattaagtttttagatcgaaaagcaccccctttaacaggtacagagatacttgaaaaatagtccctaaaaatctcactaaatagtttacggagagaaaggcatgccatgttgagttacggagtgcagcgcgtgccctcagctgctggcgagggactggtggatgggcggctggaagcagcgcacatgcttccactggcgtgccctccccgtcgcctgacttcaggtacttatccaggatggtgatgatctcatcattgagaatctggaacttgcgaattctctccaccatcttcttcaaaggcacatttttaataatctcatctttgccatcatgtttctggactttaagtagatggtagcagaaatcccagcacagcaaaacgccgctgctgcccaagaagtacgatgatcatacagccagcccagtgtagcccatcaccaaagcactgctcgactgtgaactcgtgtgtccccacgggaatgcagtagacaaactgcatggcactccacagtctgtgaaactccacacactggtccacatgcatgaccccattgctgggcagaggcccgcgccagatggggtcatccagaaagctccggatccgtgtcaggatgacctcaaacatggacaggccgcagcagaggcgctcctttgtcagcaggtccccctctcttgcgatggcaatttgctgaggggtccccagtctttcaatcagtgggacaagatgcagcggggcgtactttgattctagtcttttcattttggcatcaagtctctccccctctttcacatggactcgcggcaagatgttctggaaaggagccgcgtgcagcaggtcacacacttcttctaaagacaggctctgctcgatgagcaggcagaagaggatggcgttccccacctcccgcaggttctggaagcacaccgtcttcagctctgcgtactccacgatgtccttcagctggtggtggaagaactccaggataccaggagagccgtactcgtgccggggcaggcggcagatcttgggcatcacctccatcagcgtcttcacgtactgcaggattgtgccttgcagcaggctcttgacgaccttcagcagctcctccatgaccacggcgataccctggtagccgagaagccggcagatgacttgaaagtgtggaggtcccacgaagttccggtagctgccgtaaatgctggagtaggccaagttcaaagccttggatccatgcagatactgaggctgtgcattaggctgcttatctctttgaaattcctgagaaaatggtaacactgtccgaacaaaccggttggtagagccgttgtagcagtagttgggcaggaagtcatagttgagctcccagaagacgtgcagggtgatcctcccgtagggcgctgacacgttgtggttggcctcccggaacatggcgtcgaagccgtccagcgtcaggtaccggctcagcagcctcgtgccgaattcgccacccaggcctcgctcct

SEQ ID NO: 315845 - DNA, 997 bp, Homo Sapiens
  misc_feature (435)..(447): n is a, c, g, or t
  misc_feature (882)..(902): n is a, c, g, or t
  misc_feature (909)..(909): n is a, c, g, or t
  misc_feature (962)..(962): n is a, c, g, or t
  misc_feature (983)..(983): n is a, c, g, or t
ttgaagctcacacttggtattggtatctctcatttttactgagccagtgtggaataccactgtatgtactcatataagcccttgacttttactgctcatcaggattggaatattactctagcagtcttcacacataggcaagttacagtccttttaaaaagcatctcatttccctataatggaacctaatagccaactttttcatagaaattgctagaagagtttgatcaactataaatgataaagtgtttataagcatagtcagtgtgacacagaaaccaatcttaaaattgaatttaatgttttatcatatcagattaaatattttctccatgtcttatttttactgcaacaagttagaaagtgggaacactttgattaatgtcttaaaatttgtgggccctcatttggataaaggcagcaatcctaaggacnnnnnnnnnnnnnaacataatctgagaatttctctgtagagcagagactttcaaaccttttggctgtaacccacagtaaaaaacgcatttatatcaaaccttagaatatgtttaatgaacaatacttaccattctgatgctttttattgtttcagtttttaaaatatgccagttgcaacccactaaattgatatctaccaatgggttgcaacccttagcttgaaaaaaacaccctcacagaggaactggtatttcttgaataccttctgtttgccaggcacttcaccaggcattttacaagtaaggaaactgggcttcagagaaaataatttgcagaggtttactcaactacaaaggggtgaagccaggaatgttaactaggtctgttgagctacaaaaacttttatgtctctcagactatacagcctcttattacaaaattgaggtnnnnnnnnnnnnnnnnnnnnnctcatgnctggcaatcccagcacttaggggagggcagagggccaggagggatccactttnaggccccgggggggttttttnggacccagcccggg

SEQ ID NO: 315846 - DNA, 1018 bp, Homo Sapiens
aaggagcgaggcctgggtggcgaattcggcacgagggcgggatctcggggcggggtgaggaggatggtgaccttgggagtcgccctgtcagcacgcacatgcttgggacccactccacacactccctgccagctttgttgcagcctcagctggtggtgtctccgtccttatcctagcctagctcgcagggtgagaaccactggagtggctggggctggccagaggtcaccgtttctccttcctgtgtgctccagtggcttttgaagacactgggttgggacctttttcctgaagagagctgggtgtagccagagctactggcacctaccccgagcatctctctctgtaagcagcttcaggggcagtccgtttctctgtgcttctgaaacccccttctcacgtttcaggccccagttttaactcaaggcctggggcaggggcgtttaattgatgatgacagaggacacaggtttttgccagcaaaaaggaaaaccagggcttggtggaagggaaaggtggtgtgtcccctgttccctattccatctccctgggacttcctgcctcatcatagtacccagggagcccagagatcctactagactggggcagcagttctaaagaaccttcccgaatagtcggcgaacctgggtcaggggggaaggggtccccccaacaaagggtagcccggcgaattcccctcggcggacgcgcgcggggatcgagcgcccgcggaccctgccagcgcgggcccacctcactgctcccacggcccgagcgaaacgaggtgccagccatagcggcgcgggttaatgccgtagagcaggacccggcaagcacccaagagatccccgttgggctcgcccgcgatagctccaaccttgaacaccgccgttagactgcggcagcggcgacccggccgaccagagaaaggacgtgagacaaatctgaccgtagagtgaagtatggcgccgcgcacgctacagcactggtgagcgcccagcgcggtcctggcagcgca

SEQ ID NO: 315847 - DNA, 367 bp, Homo Sapiens
aaataatagggctctggttattttgtagagtgtctctgatgaatggacagaattgtcctggctaactacaagctacggttcacagtggataaatgttggcgtgcttttttactttctgactttttaaaattttgcttttatatcttgtagttccaatcaattttatatgaatgctattataaaattcagtgtaaaatcttttcttgtctagcttaaaacttgtgtgtgtctagtatttttcttcaatgatttaacatttctgaaaatgtcaagttctcttcatttagtcaggggggtttaaattgatctgaattttcagttttctatttgtttttaatgattaggtacaatatcttgtctcagattc

SEQ ID NO: 315848 - DNA, 396 bp, Homo Sapiens
ctgagcaggaaagaaaacagagtccaaccttggtgtcttctttgagttgcctggacagtatttcttgaaactcaaaacctaaaatgccccccatttggggacggtgggaggggttcagacctctaacctggattcagagccttagaggccgagagggaatctggaatctggtattactgagatcctaggtaaaagaaccagcctggcagtctttcccacctcattggtccgtgcttttatttttaaaccctttgacctggtagaaataaacttgcctgcctgctcttaaatgccagacagttggaagcaaatgccgagggaaaggtgcccagagccatgcttgataggactttgaatattttctccttaattgtacgttgcttgtatttagacttg

SEQ ID NO: 315849 - DNA, 651 bp, Homo Sapiens
  misc_feature (452)..(452): n is a, c, g, or t
  misc_feature (557)..(557): n is a, c, g, or t
tgagactccaagatcaccccaatgctaggctaatctccatggcgcctagatctatgcccactccattccccatgttggtccccatagtttcaggcaccaggctccaacaccaggttgggccctacagccccagtctccaggttggcaccagtggatataggctttaggtccactgactgctggtccctacagccccaggttccagtgaacccaggttccaggcctgctccaacaaacccaaggtccaggtctaccccagtagaccctggcaccagaactaccccagagggcctagcctacaggctaccacccacaaacccagcctccatgatggcctctgaagaatcaggctttaggtcttccccagcaccagactagactgctagactgatgttccacttttgtccccatggacccaggcaccaggcccatctgagaggtttcttcagttntatttttcagtaataactctcattcttctttctcagtgataactgtagtactcagtgggctttctatttctggctcccattttccatctttctttttaacacttntgggaaatatccaagttaaactctatatagtggggtaagtggacaatgaaagataagtaatacataatatgtatatcacgagtgggacgcctgc

SEQ ID NO: 315850 - DNA, 738 bp, Homo Sapiens
  misc_feature (82)..(82): n is a, c, g, or t
  misc_feature (114)..(114): n is a, c, g, or t
  misc_feature (241)..(241): n is a, c, g, or t
ttgaccaaattagtctatgttctgctagaccagtcacctggtttagttactaagttgagtttagaaaggtaccactgaaatnccgcagtaaaagaacatcagtgaatctggtanatttatcaatggtgatccatttcatctcaaatagccttgaaaggcgtgaaagaatgtaaaatatggtctgcacaaatgttctcactcatttcctttaatgtcagaccagatttctgtttagagttanatattcccttccatgtttacaaagccagacactgcctctagacaataatccttgagtgggtgaaatgttgcaaaaaagaaatgctcctgaatgcgttgccaattcttcttggcattccctgctccgtgcatgctttccacttgatggaggctggattcaatcacaggagtcagggcatcaaattcttcaacacttaacactttacacacagtccagagtttcttaagagcaactaaagcatacagtcgaacactaaaattgtgattgaaacaccactgcagcacaactataagggcttgcttcagaattactctcacttgtatgacacaaaaaaagtacacgaatgatacaactgctcctagtaaaacttcttccactggctttgctaccagggcctctcattcttccctcctggtcaaatgcggtgcacaggcatttgcaatttactcaaggaaaaacacattctcccagctctagttttcattaacgctgcagta

SEQ ID NO: 315851 - DNA, 1181 bp, Homo Sapiens
cgaaagtgaaaattgttgcccaattaaaatttcagaaattcgtgtttggtttaagtcccagatagggtgtttgttaaaaaaaagtttggaccaagccggcgggcgattccggtaaggaagggggccatgcatgggctggttatcttccggggcgagaacaaggtgggtgcctgggggtactcgccggatcaagcaggggtccgatcacatggacattcagggaagcggataatgccctgttgaggaatttccacacaaacgtccaacggttggatcagatttgctggaattccttcacgttcatttcccacaaagagcagagatttctcaggaaagcaatatgggggtagggtgtaaacttttggcagtttgttccactccaatgatggtatacctttctgttttgttgtgctgcagataatcaattagctgaggtggttttacctcctaaattggtcggtttgtcgatgagcgaggccacaacgatgagtctactaattgactttccaagtctggcagcacgatcctgaaacaggagctccaggtctaagtcggaaacacgactgttccacgggataatcttcttctgaacgtcgggtccactctgcttggttatctgcttcaaccaaattagtacctatgtcttgctgagaccagtcacctggttttagtttactaagttgagtttgagaaaggtaccactgaaatcccgcagctaaaggaacatcagtgaatctggtaaatttatcaatggtgatccattccatcttcaataaggcctgaaaggcgtggaaggatgtaaaatatggtctctagacaataatccttgagtgggtgaaatgttgcaaaaaagaaatgctcctgaatgcgttgccaattcttcttggcattccctgctccgtgcatgctttccacttgatggaggctggattcaatcacaggagtcagggcatcaaattcttcaacacttaacactttacacacagtccagagtttcttaagagcaactaaagcatacagtcgaacactaaaattgtgattgaaacaccactgcagcacaactataagggcttgcttcagaattagtttcttttctggaatattttgagtaataatgtctaaatgtgataaaactgctaaaaacgtacaaatgcttgttttaagattttcttcaccataag

SEQ ID NO: 315852 - DNA, 1080 bp, Homo Sapiens
  misc_feature (131)..(140): n is a, c, g, or t
  misc_feature (616)..(628): n is a, c, g, or t
gcacaaatgttctcactcatttccttttaatgtcagaacagatttctgtttagagttaaatattcccttccattgtttacaagccagacactgcctctagacaataatccttgagtgggtgaaatgttgcnnnnnnnnnntgctcctgaatgcgttgccaattcttcttggcattccctgctccgtgcatgctttccacttgatggaggctggattcaatcacaggagtcagggcatcaaattcttcaacacttaacactttacacacagtccagagtttcttaagagcaactaaagcatacagtcgaacactaaaattgtgattgaaacaccactgcagcacaactataagggcttgcttcagaattagtttctgaaaagaaaggcaaaaaattcctcaaaacacagacatggaccattttactctcacttgtatgacacaaaaaaagtacacgaatgatacaactgctcctagtaaaacttcttccactggctttgctaccagggcctctcattcttccctcctggtcaaatgcggtgcacaggcatttgcaatttactcaaggaaaaacacattctcccagctctagttttcattaatgctgcagtacatttnnnnnnnnnnnnnatactctagtacctgagttaacttgaaaaaagtatgttttatgctaaccattatacaaccaaaatgtttttcaaatggagcctccatctcctattatcttaatttgtgctgagaaagtcagaaatagtcttcaagagtcccacttctgatggcttgaaaatgctcctagagcaagataccacacaaagtgctgtcctcctcctcactactgatttctgagctactctgtcttccctaatggtgatcctggacccacacagtactgagtagtggcaggaaaattaagaaatgagggggaaaataataaaactgtttaaatttccttgtagtcttttcctgtgaactttagtcttcacagcctggagatgtcaagcaatcccttgctttctaaaatcacatggttcaacagacactgaaggtcaaaggaagtgacatatactaatgaaggaacc

SEQ ID NO: 315853 - DNA, 992 bp, Homo Sapiens
  misc_feature (194)..(194): n is a, c, g, or t
ttatttccacaattgcttaaaatattttattaaaggaagaatacaatttaacaaaaagtgtttattaaaggggaaaatatatagtaatatgtttaaggcacatggcaaacttttggcattaaattgcaagaaaaaagaaatacaaattatcacaataaatttcagaatctgtttctttagtccaaatagttttntttaaaaaagtctgaacagcagcagcagttcactaaggaaggcacatcatggcttggtatctccgtgcgagagcagctgctgcctgggtgtactcccagatcagcagggctccactcacatggacattcagggagcggataatgccctgttgagggatttccacacaaacgtccaactgttggatcagatttgctggaattccctcacgttcatttcccaacaagagcagagatttctcaggaaagcaatattgggttaggtctaaacttttggcagtttgttccactccaatgatggtataaccttctgttttcttctgctgcagatagtcaattagctgaggtggttttacctccactagaggaagccactgttctgcagagacactgaggtgctgaaactgtttgtcgctgatacactgaaggctgccaacaacgagcactgaagccccaaatacctcacaggtcctgcacagtcctcctaaattggtcggtttgtcgatgagcgaggccacaacgatgagtctactaattgactttccaagtctggcagcacgatcctgaaacaggagctccaggtctaagtcggaaacacgactgttccatgggataatcttcttctgaacatcggtccactctgcttggttatctgcttcaaccaaattagtacctctagacaataatccttgagtgggtgaaatgttgcaaaaaagaaatgctcctgaatgcgttgccaattcttcttggcattccctgctccgtgcatgctttccacttgatggaggctggattcaatca

SEQ ID NO: 315854 - DNA, 451 bp, Homo Sapiens
  misc_feature (332)..(332): n is a, c, g, or t
ggtgtactttttttgtgtcatacaagtgagagtaaaatggtccatgtctgtgttttgaggaattttttgcctttcttttcagaaactaattctgaagcaagcccttatagttgtgctgcagtggtgtttcaatcacaattttagtgttcgactgtatgctttagttgctcttaagaaactctggactgtgtgtaaagtgttaagtgtttgaagaatttgatgccctgactcctgtgattgaatccagcctccatcaagtggaaagcatgcacggagcagggaatgccaaggaagaattggccaacgcatttcaggagtcatttcttttttgncaacattttcacccactcaaggattattgtctaagagaccatattttacatccttccacgcctttcaaggccttattgaagatggaatgggatcaccattgataaattttaccagattc

SEQ ID NO: 315855 - DNA, 454 bp, Homo Sapiens
  misc_feature (66)..(66): n is a, c, g, or t
  misc_feature (77)..(77): n is a, c, g, or t
  misc_feature (87)..(87): n is a, c, g, or t
  misc_feature (121)..(121): n is a, c, g, or t
caaaaagaacactgaaggtgcctgaaaaatggtttgtcgcctggaataacactgaaaggctgcccnaaacaaacgancaactgaaanccccccaaaatacctcaacaggtccctgccacantccctccctaaaattggtcggtttgtccgaatgagcgaaggcccacaacgatgagtcctactaattgactttcccaagtctggcagcacgatcctgaaacaggagctcccaggtcctaagtcggaaacacgactgttccatgggataatcttcttctgaacatcggtccactctgcttggttatctgcttcaaccaaattagtacctctagacaataatccttgagtgggtgaaatgttgcaaaaaagaaatgctcctgaatcgttgccaattcttcttggcattccctgctccgtgcatgctttccacttgatggaggctggattcaatcac

SEQ ID NO: 315856 - DNA, 567 bp, Homo Sapiens
  misc_feature (342)..(342): n is a, c, g, or t
  misc_feature (361)..(361): n is a, c, g, or t
  misc_feature (368)..(368): n is a, c, g, or t
  misc_feature (386)..(386): n is a, c, g, or t
agagccaagtgtgttagaaataaaaatgggaaattgtagccataaatataagtcttcagatcaacattagtatgtatttatgcgcaataaaatcatttacaagttgaactggaaatttaaccagaagtttaacagctcttattatattcaataaccaaaacaccttttattcccaaaattggtaaagaataaataatataatttacaatatggtacaaaaaatagccaggtgaaggcaggcattctgctttatacatacactgtatatgcatatttatgatctatatagcgaattcatatctgaaacgagcggaggcctcgctatggctttaaccgagttangagagagaaggggagcggnggcgggnggaggcagggccaggggnctggggctccccacacctcacccaccccaaggacacgcagccactgtgacatcaggagagcgctgacagccgcgaagggtgtgctgtgggtttttttccttcgttgtaaattactctttccttgctttctttttttaacttgagacccagtttcgctcttcttgcccaggctggagtgcac

SEQ ID NO: 315857 - DNA, 656 bp, Homo Sapiens
gattcggcacgagcccagtcctagttcctcagtcccgcccagcttctctcgaaagtcactctaattttcattgattcagtgctcaaaataagttgtccattgcttatcctattatactgggatattccgtttacccttggcattgctgatcttcagtactgactccttgaccattttcagttaatgcatacaatcccatttgtctgtgatctcaggacaaagaatttccttactcggtacgttgaagttagggaatgtcaattgagagctttctatcagagcattattgcccacaatttgagttacttatcattttctcgatcccctgcccttaaaggagaaaccatttctctgtcattgcttctgtagtcacagtcccaattttgagtagtgatcttttcttgtgtactgtgttggccacctaaaactctttgcattgagtaaaattctaattgccaataatcctacccattggattagacagcactctgaaccccatttgcattcagcaaggggttgcagacaacccgtcttttgttggacagttaaaatgctcagtcccaattgtcataactttgcctattaaacaaaggcaccctactgggctttttgctgggcttctggagaatcctgctggtcttgggccaattaagaac

SEQ ID NO: 315858 - DNA, 860 bp, Homo Sapiens
ctatttgaaacccaggcggccgacttagccggtggcacgacagttgctgcagggaatcttttaaacgagagcgagaaggactgcgggcaggaccggcgggctcctggggttcagccgtgccgcctcgttacgatgaccagtgtggttaagacagtgtatagcctgcagcccccctctgcgctgagcggcggccagccggcagacacacaaactcgggccacttctaagagtctcttacctgttaggtccaaagaagtcgatgtttccaaacagcttcattcaggaggtccagagaatgatgttacaaaaatcaccaaactgagacgagagaatgggcaaatgaaagctactgacactgccaccagaaggaatgtcagaaaaggctacaaaccactgagtaagcaaaaatcagaggaagagctcaaggacaagaaccagctgttagaagccgtcaacaagcagttgcaccagaagttgactgaaactcagggagagctgaaggacctgacccagaaggtagagctgctggagaagtttcgggacaattgtttggcaattttggagagcaagggcccttgatcccagctttaggcagtgagaccctggcatcacgacaagaatccactactgatcacatggactctatgttgctgttagaaactttgcaagaagaactgaagcttttttacgaaacggccaaaagccgatgggaggagttacgggcccttaaagggtaaagcttggagattgaaagagggaaggaggtcccgattcctaaaacagcaaacctttatggaacaatcaaggtacatggatttaacaacgggccctttaaagggaaaggggagccgcctattaaa

SEQ ID NO: 315859 - DNA, 821 bp, Homo Sapiens
ggagggacccatctgccactgccttcttctaacatttctaatactgccccatttcccttaaggcctgttgttaaatcatttacttgattgtacataaggtttgctgttctaggaatcggactctttcctctttcatctcccagctttacctttaaggcctgtaactcctccatctgctttttggctgtttcgttaaaaagcttcagctcctcttgcaaagtttctaacagcacatagagtccatgtgatcagtagtggattcttgtcgtgatgccagggtctcactgcctaaagctggatcaaggcccttgctctccaaaattgccaaacagttgtcccgaaacttctccagcagctctaccttctgggtcaggtccttcagctctccctgagtttcagtcaacttctggtgcaactgcttgttgacggcttctaacagctggttcttgtccttgagctcttcctctgatttttgcttactcagtggtttgtagccttttctgacattccttctggtggcagtgtcagtagctttcatttgcccattctctcgtctcagtttggtgatttttgtaacatcattctctggacctcctgaatgaagctgtttggaaacatcgacttctttggacctaacaggtaagagactcttagaagtggcccgagtttgtgtgtctggctccagttcttccagcaactcctagtccccgctggtgccaggattaccattcaggtgttctgccggctggccgccgctcagcgcagaggggggctgcaggctatacactgtcttaaccacactggtcatcgtaacgaggcgg

SEQ ID NO: 315860 - DNA, 728 bp, Homo Sapiens
  misc_feature (634)..(652): n is a, c, g, or t
agaagtcttaatgcttaagtgcagcaaaacttgggttagtttttttaaaagcaggaagataatggtttacattcagaacctagtagtttaatatttagcacgtcatcagttgtattaagtggattattttacaggctctaggagtttcgtatttttatgacttgaaagttctcattcttaggaaatgtaaaattaatgccagtttttgactagctaacggaaacttgtaacactacctataatttagccttacaggtttctacaataaagtaattcatttttttgtggaattatattaagtgagctatttgggctagttaaatatttactaatgacttctcccattagcacacaagtatattccctattttaaaagattgtaatattactttttcaataactgctcttttgttctcaattccagttcagtagctgctgctttaaacataagttgatttcttccaaagacctgaggcagcagcagtgggctatcactgggccactagctttcttcagcagcgaatggtatcaatggcagtgcagcactgtaaatactgctactttacccagttgggttgcaattgagtgagaaagtattgcaaacctctaagtgggctttgactgtcagacttgnnnnnnnnnnnnnnnnnnngttacaaaaaaacgtagttggtttagtgatgagaatgtacaactctgggtgtgataaatagaccggattctgtttc

SEQ ID NO: 315861 - DNA, 424 bp, Homo Sapiens
aacaaatttgaaacctaaatcttctttataaccttttaacctgtcatttcagagcaagcagtaattttaaggtggttgaaaatatgaatgtgaacacaaagatggggctcacagtggtagactggtccaccatgatagcatatgagaagcccatgtgaccaccatgagcatgtgcaccgaccacaggccataagagatacgactcagtcataggttacaaacatttggtttgcttggcatgcacattcctctcttgtaaaatgatgcatgagactctcagagctaaattcattaaaccatctccttttcctctgtccctgtcactctgccctaggcattttcagccatgctgtgagttttgtgttagtctaggctgtgtatttcagcttctggcgagtttgtgagcatgacttagcatccttgt

SEQ ID NO: 315862 - DNA, 360 bp, Homo Sapiens
cgatctcatgaccttatgatctgaccgccttggacaccgagctgtgattacacgcgccagtgagcgcaaactatgcctggctcctgatgcataaacagtgctctgagctgcgcctttcaggagagctttgcggggcatcatagcctttctgaggtcatggtatgagatgtacggtggctgagcgacctggattgagcaagtggcttaacctatctggagctttacgagaagggtcagtagatcttcgcatgggcacttaagagaatgcccggcatattagaagggcttcatgtctgctttaaaggtagcccttgccaaggatcttgtaaggcgcacttgtttgagcaaggagtgaggcct

SEQ ID NO: 315863 - DNA, 929 bp, Homo Sapiens
  misc_feature (211)..(469): n is a, c, g, or t
  misc_feature (870)..(879): n is a, c, g, or t
ggattccagggtcattcagtgtcccgcctctgtagacaatggctctgactccctgcaacttcctgcctctgagagacctgctgcaagccagcttccttcccttccatggcaccagttgtctgaggtcgcattgcaagtgagtgggaggatgtgagattattcgaaaattataatatacgaaattatatatatatattttgagacagagtcnnnnnnnnnnnnnnnnnnnnnnnnnnnnnnnnnnnnnnnnnnnnnnnnnnnnnnnnnnnnnnnnnnnnnnnnnnnnnnnnnnnnnnnnnnnnnnnnnnnnnnnnnnnnnnnnnnnnnnnnnnnnnnnnnnnnnnnnnnnnnnnnnnnnnnnnnnnnnnnnnnnnnnnnnnnnnnnnnnnnnnnnnnnnnnnnnnnnnnnnnnnnnnnnnnnnnnnnnnnnnnnnnnnnnnnnnnnnnnnnnnnnnnnnnnnnnnnnnnnaccatgcccggccatgtatatatataattttaaaaattaagatgaaattcacataagataaaattagccattttaaagtgtacaatttagtgggtgtgtggttcattcacaaagctgtacaaccaccaccatctagttccaaacattttctttttttctgagacggagtctcactctgtcacccaggttcgagttcagtggtcttgaactcctgatgtcaggtgattctcctagttccaaatgttttcattatctccccccaacataacccatacctatcaagctgtcactccccataccccattctctttttcatctcagcccctgtcaatctggtttttgtccttatggacttaccaattctgaatatttcctataaacagaatcacacaatatttgannnnnnnnnnaaaactaagccttgctctgtctcccaggcctggaaatgctgttggccgtg

SEQ ID NO: 315864 - DNA, 653 bp, Homo Sapiens
  misc_feature (562)..(562): n is a, c, g, or t
  misc_feature (565)..(565): n is a, c, g, or t
  misc_feature (594)..(594): n is a, c, g, or t
gcagatcacatcaacgcaagttgattctcatgtgtcaaatatatgtgaattcagctgttaaattactggatatttatcttaacattgctgagagggacctactgtaaatgtgacatcctcacacttcccatatctttaactttgaaaaatcttcttgtaaacttaaagcctagaagtattccaaagcaagggttagagcagtctttattctcaggctcactgaattaaacccaggactaattccacagcacaggcacaagaagcctgttgtgtagtgtactctgccagtaccttggatttaggagctccatggggaactgactaaaccaggagagagaggatttggagctagtcagtcctggtaatctatgaaatgctcatttatacccaggtttcataagcttccaattctatagcaaacccaggctctgagtgttttagaatttcctaattcatgaagtgtttcttgtcttgatcccgtgaccaacagttgaagtttggtaaggacttttctacagtctgaacacaacctaaagccctctttcattggtcacacactaanctnctactgccgacgaaccgtaattaatgcanaggagatttatgtcttagccataacttcagttgtacactcaatcgccctcctctttcgg

SEQ ID NO: 315865 - DNA, 1754 bp, Homo Sapiens
ttttctgttttcataataaactttattgtgacaggcggggctgatccctcccatgttgggagacaccatgtggcaagtgacaaagctctgagcccgcccctcttggggccacagtggtagggatgggggaaggggatggaccccatggctggggtagtaccatgactggaggcgggggaggcaaccagaggcctgctgctttggggaggtgcattcccccaaccatgtcccgacacctctggagttcaggcaaggaccttccagtcctacttgtcctgcatcttctcaaggataggcacaatcatgtcaaatttgggtcgctttgcagggtcttcattcatgcagatcttcatgagcttacacacatgaggggaaatacctggtgggatggtaggccgaaggccttccaatgccaccttcattccaatctccatattggagaggtcagcaaagggtacctcccgtgtcaccagttcccacagaagcactgcaaaactccacatgtctgctgagcgtctgtttgtgtcttcaggcttcttctgcagagcttcgggggctacccaggcaggtgcatacatgcgaccaggacattggaaagagaacttgacatcagccatgctaattcgggcagtcatgtcctcatcaatcattacactacggctattgagtgcatgtcgtgggatgaggggctctagtgtgtgtaggaaggccatgccccttgccatgtccaaagcaaacttcacagcctggctctggtccacgacgaaattggtgccttcatgtagtacattgtagagggatccatatggcatccagtgtgtgatgagagtaggatgaggagcaggtggagactggcaggcacctagcactgggagcacatttggatgcgagaaaatcctgagccggggacactcttcattgaagtccctgctcttccttgtactccagtctcgaaccttcagcaccttcacgacaatgtcattgccctgccagcggcccttccatagctctccagagtgattctcgttgagcttcgtcaggaagttaagctgtttgaagtcaatgccagagtgttttgttcagggttccatttcggggccgagtgcgggtggtccccttccagaatgtgtccttgtatggaatacggttgagattctggcccatcttctctgcccgctctcggagaagctctctcaggggtgccttggctttgtccacaggcatctctccatacttgttacagatgctgacaagggccccatttgccaccaggtcctctgccacttgatcttggccccaaaaacaggcatagtgcaggggcacattcccgtgttcattcactgcattgatgtctgccttgtactgcaatagcttctgtacaatatcacggtgtccatgactggctgccagatgcaggggggtgtcatccccacggttcattacattgatccgtgccccccgcatgatcaacatctcaaccacagcagagcggccctctcggcaggcccagtgcaagggggagaagccatgatcgtccccctggttgaggtcgttctccgtgttgtccagccacaggcgaacggcgactgcgttgccctcccggcactgagtgaaaatgtcgtccatagcagcgtcccggcgccgagtcccctggattggggaagcctgaggactgtggagtgatccagggaaggaggatgaaccccaagctttatcctcgggactcgggctgcaggatccttctccggggaact

SEQ ID NO: 315866 - DNA, 1507 bp, Homo Sapiens
  misc_feature (15)..(15): n is a, c, g, or t
  misc_feature (37)..(37): n is a, c, g, or t
  misc_feature (73)..(73): n is a, c, g, or t
  misc_feature (156)..(156): n is a, c, g, or t
  misc_feature (562)..(578): n is a, c, g, or t
  misc_feature (1266)..(1266): n is a, c, g, or t
  misc_feature (1283)..(1283): n is a, c, g, or t
  misc_feature (1305)..(1305): n is a, c, g, or t
  misc_feature (1341)..(1341): n is a, c, g, or t
atactgtgaataaancaaatgatccttaaaactaaanaattatgtgccagtgtatactaatgctatagattcntgtcttagaagtttttaaagcattctgttaatgcccactgaaacaatgggactccaaaaatatagtcaataatcatgataaanaattataatatgattatcaagtgaagcaggtattgagaaataaaaattctcacttgctcactggcaatttctttctaacagatattatggagaaggcctgaagtaattcagacagatagctgtttatggtgaattataataatacttcatgagggcagagctaattaaaactagtaattgcttaaaattcaaagccatttctggacatataaaatgagagatgaatctgaaagtttttcttttgtaaaacctctttccagttcttaaagtccagtttgctacatcccccaatctgatctaccattgcatattaatgatcaacttaaatgtggtatttagatgtgcaatgtcacattgttataataataattataaaaagactttatttaggcctcaactttctccnnnnnnnnnnnnnnnnncagaaaagaaggagtgcggaatttcttctttttcttggatggcgattttgaaggggagccttcaggtgacaggacttcttcgattttctctggagacttaatagtaatctcgatgttttctatggttgtacttgtgcttaacctactcactcgcttagcaagctcatcttcaacatcatgcatatcatccttgccatttactaccatgacaggcacttccatggagatgaagctcttggaaaacagctcatggttttcttctaggccttgttgtttacgttcgattgtcctcttatactcttcaagttctccttctgtgagatgactaaatgggttaggaggagctggtgggccatgatcatcatcttcaaattgcatagtagaaggtggcttatccacaacaattccagcaagcaactgagattgtggtcctgctgttttcaagtcatatcgattttgttcccgaatcttatttctcttttctagtacctcattcgggtttgtgtttaaaggaacaaactgatttggatcttcaattttgataggtgttccaccactaactttagatgagtcttctgctttcatccacgtgattttggttcggggactggtttctccgttccgagacttcctcaggcacattcactttcatgtaagtatttggtgagttcagccatcttgttttttnacgctgttgcctctgtnccatgtatttgagaggagagantggcactgtatcgtcttcaaaggaaaaaagccagtnacagttgctgggatttccacatcactcttgtgcctaggcttctctcgaatgagaggatgcctgtaagcatagcctgttctataccccaagttgtccagagtcctcataagcccttcaaactcaatttcgccaaccttccatttttgatgggaacccatattcacac

SEQ ID NO: 315867 - DNA, 1033 bp, Homo Sapiens
tgaaagatttgaattttttttattatcccagcaaacattacactagagaaaatgattgggaaaatacaaataagttcattaaaaacacaggctgattattcatatctattacattcagaattatgcgaaacaattagttatattgcaaagctgtaattctttttctaacaaagcatgattttataaaactttaatgttgccactgattcaattttaatacaaaatacttatgtacacaatacaatataaaggttaactgtgtaggtgccttgcacaaagggatatattaaggcgctttacaaatataccaatattttgacccaaattactttttgctttagattaaaatgaacaggctcaatgtgccactttaaataccacagggatgtttatgtaaaattttttatgtaaaataccttgggtaacagcagcagcaatgtctaaaaatcctcccactgtattctctaatttctaacacattaagtcagaataaaacaattccactcacagttttgcactttgcaacagcagaaggtaataactttttaaaaaagtcaatctcaaagtgactttttagtcatacattctatagtttctattacaaataagaaagttgcaaagataccgcagtggggcctggcttatgatgtgactggacaatgcatgacagtatcttcaattacataattatagaacacatcttataaatactattgatatgcgtaaaaagggtaagtataataaagacagcaagtttttaataagaaaattattttaaaagaaaacatcatagaaccaatgttttcactcccatttcaatggaaagcatctatatttttaacattgtttttctcatctttttggtcaggaagcaccagattctatactggaagaagtagatgtagttttggaataagatagctgataagtatatccaaactgttaaaattgctgataccaaaggcatgtatactgcttcagataaatgcaaaaagcttatagtatcagaggaaattttaaaagaatacataat

SEQ ID NO: 315868 - DNA, 469 bp, Homo Sapiens
agaacgtggagaggaaaaaagtttgggtcaaaatgacaccggagaacggatactggactatgggcctgactgatgggaataagtatcgggctctcactgagcccagaaccaacctgaaacttcctgagcctcctaggaaagtgggggtcatcctggactatgagactggacatatctcgttctacaatgccacggatggatctcatatctacacatttctgcacgcctcttcctctgagcctctgtatcctgtattcagaattttgaccttggagcccactgccctgaccgtttgcccaataccaccactgaccccaggcttagctaatgaaagtggggagcctcaggctgaagtaacatctctgcttctccctgcccagcctggagctaagggtctcaccctccacaacagccagtcagaaccataaagctacaggcacacactgaagcactttactgatattcattc

SEQ ID NO: 315869 - DNA, 1317 bp, Homo Sapiens
  misc_feature (418)..(426): n is a, c, g, or t
  misc_feature (1307)..(1307): n is a, c, g, or t
gggagaggcagcgtgtggctctgctcagcctcctgtttctgtcgttatgggttccaggagacagggccagaagagaaccagacagagatggagtaagtgccagagcgttggcgtgctgtagtgcagacactcagcctccccgttctgtttgtgtgactgaccgggaggctgcgtgggccgcctgcactgacggcgccatccgcctcctgccttgcagtgacctgaccaacggtgcagatgggatgctggccacaagctccaatgtgtctcagtacagcggctccagggtggagactccggtgtcctacgtcggggaggacgacgaggaggacgatgacttcaacgagaatgacgaggacgactgacgtcctccccacttcagattcggcttcaggaaaacgtttagcgaaaagaaacnnnnnnnnnaatgtgggttttctgtttccttttggcctactcccaagaagatattggtaagctattgaatttagatatgcacctctgataagcaaggattgtttcccgtaggattaggacgtgctgtggatgtgtgttttgataccagtgtgctgatgcagagcgtttatttacttgttaggattttgtgttttcatttgctatttttctttaagtgcagagttcatttttgcccctgaaaagtttttgctgagtttgctgaagaaattgtatttcaaccacatccatgaaaataaaacacctcctgttgtggatggtgagcccctgatgccgcttatttgccgtgagtttggacggcacccctgctggcggatagcaagactctgtggagtttgttcagtggtacggtgtccaagcaaacagcagaatgcaactttctaaacagccccaagcaaacagcagaattcaactttttaaacaataaacaccatcaaccttattgactttattgtcccttaaattatattgactgttgtgattccatcaagtttgtacactcttttctctccctgttttgcagcaacaaattgcgaagtgcttttgtttgtttgttttcgtttggttaaagcttattgccatgctggtgcggctatggagactgtctggaaggcttggaatggtttattgcttatggtaaaatttgcctgatttcttacaggcagcgtttggaaaccttttattatatagttgtttacatacttataagtctatcatttaaagacatgtactgaaacaaatgtatttgtttcataagcatcttcctgtaatctattataaaattgaaattaaatatagagaatgttttaacaattttttaactcaaaatttgncaatcatttt

SEQ ID NO: 315870 - DNA, 465 bp, Homo Sapiens
ttttattgatgttttgtaaaaaggcccatgcgcgttttattaataaaaactaacagggccaagttaaacaagtcaaacaattaaagtctttttatttaccataaaatattacagaaaagtttatttgtgtttcaataaaaagactatcgttttagaacaggcagctaatagcaactgtgcagttaatgggttttgtgaataaattttaaaagagactactgcctgtccttaaattcctttttctttttataaaaaaagaactattaaaaatgattgacaaattttgagttaaaaaattgttaaaacattctctatatttaatttcaattttataatagattacaggaagatgcttatgaaacaaatacatttgtttcagtacatgtctttaaatgatagacttataagtttgtaaacaactatataataaaaggtttccaaacgctgcctgtaagaaatcaggca

SEQ ID NO: 315871 - DNA, 932 bp, Homo Sapiens
  misc_feature (564)..(594): n is a, c, g, or t
  misc_feature (862)..(862): n is a, c, g, or t
ttttaatgtgggttttctgtttccttttggcctactcccaagaatatattggtaagctattgaatttagatatgcacctccgataagcaaggattgtttcccatagaattaggatgtgctgtggatgtgtggtttgatgccagtgtgctaatgcagagccttcatatactttttaggattttgtgtttccgttttctatttttcttaaaatgcagagttcatatttgccccttaagagtttttgctgagcttgctgaagaaattgtacttcatccacataaatgcccgcctgttgtgaatggtgagcaccaaatgccctttatttgccatgaatttggacggcaccccctgttggcggatagctagactctgcagagttttgtttattcagtgggtgtggtctctagagccccaagcaaatagccgaattcgactttccaaacaatagacaccatcaaccttatcgactttattttcccttaaattatattgacagttgtgattccatcaagtttatatactctttttttctccccattttgcagcaacaaattgcaaagtgcnnnnnnnnnnnnnnnnnnnnnnnnnnnnnnngttaaaggttattgcccactggtacagctactggtacactgtctggaaagctcggaatggtttattgcttatagtaaaatttgcctgatttcttacaggctgcgtttggaaaccttttattatatagttgcttacatacttaaaagtctttcatttaaagacatactgaaacaaatgttgtacttgtttcttaagcatcttcctgtaatctgttataaaattgaaattaaatatagaggaatgtttcgacaaaaaataatgaaaaaantaaagtgggccttctaatgcaggtcggattcttatggattttgtcactttcccaaatgaccctgcctccc

SEQ ID NO: 315872 - DNA, 591 bp, Homo Sapiens
  misc_feature (515)..(515): n is a, c, g, or t
  misc_feature (573)..(573): n is a, c, g, or t
ggataatcaggaacgttttaatagccttttctctctaagggagaagtggacagaagaagatattgctccatatattcaagatttgtgtggagagaagcaaaccataggtgcattactcactaaatattctcgttcttcgatgcaaaatggtgttaaagtttataattcgagaagacccatttcttaaaagaacaacagtcttttcttcaggactcaagttgctttataaagttgctggatacaagaaaaataacttgtacttttatttctgacttttagaaacctagtcttctaaggcatttttctcctcatcttaagcattttgaaactactgttatttcttaaatgttataggatgtagctttaaaattatatttgtactatgtacacagtgtaaacaaggacgaattctttcctatattatgtctgaggtctctatgatttatttaaaggttggctttttatatttttttccagagaactaaatagtaataggttcatagaagagaactatntattcactttatcatttctcgtgagtgagttcccctctacttttagcctttcacccanacctggagcctctggtgc

SEQ ID NO: 315873 - DNA, 991 bp, Homo Sapiens
cacaattggaaaattgcccatgtggtgctcaaagaggaacagaagtttcgctaccttttccagggcacggcgaccctcagaactcaactgggggaatttacctagatgacatcactctgacagaaaccccctgccccacaggggtctggacagtccggaatttctcccaagtccttgagaacaccagcaaaggggacaagcttcagagccctcgattctacaattcggagggatatggttttggggtaactttatacccaaatagcagagcttgctctggttacttgagacttgcttttcatgtgtgcagtggggagaacgatgctatcctggagtggccggtagaaaacagacaggtgataattaccatccttgaccaggagcctgatgtccggaacaggatgtcctcaagcatggtgttcactacctcgaagtcgcacacatctccagcgataaatgacactgtcatctgggacaggccgtccagggtgggaacctatcatacagactgtaattgttttagaagcatcgacttgggctggagtggtttcatttcccaccaaatgctgaaaaggaggagtttcctgaaaaatgatgacctcatcatatttgtggactttgaagatatcacccacctcagccagactgaagttccctctaaaggcaaaagactgagcccccaaggcctcattctccaaggccaggagcagcaggtctccgaagaaggttcgggaaaggccatgttagaggaagccctacctgtcagcctgagccaggggcagcccagccgacagaagcggtcggtggagaacacaggccccctggaggaccataactggccacagtacttcagagacccatgtgacccaaacccttgccaaaatgacggcatctgtgtgaacgtgaaggggatggcgagctgcaggtgcatctctggacatgctttcttctacacgggggagcgctgtcaggccgtgcaggtgcacggcag

SEQ ID NO: 315874 - DNA, 2292 bp, Homo Sapiens
aaatttgcacaatcattatatcttttatttacatatagaaattagtaaaacttaaaacaaaacccaatgcgacttgtacagaaatcctttaattttctttattttcacacattaaaaaatgaaacacactatacaaatggttttcatagcaggttacatgtgggtccactcagacttgctctcaaagtgctgccaacgtgacaagtgctgccaagacgacagctgcgaatcggggagcccatgtattgacttagtgcggtagcatgcagccctcggcacggagggtcagtccccgctgttcttaaattagggtaaatggcgttggtgtccgtatttacagacttgaaatgtatcaatcctgagcagttccgatgtaaatccgagaccagctgatgggagtcttggtctcagtttttaaaagggaggtccaatggcggcaggctggctgctatgaacttgagttgttttcattctttccaacatgaactatttgctgcgggtcacacagtcagacccttccagaagggttaagccaagtaactgtaggtgtccttttcaccatccactcgctccaaatattctttctcaattagaatgtcaatgcatttcttgatcacagggactcgaggtttgaacctggaggacagctgagtgaggacctcgccaagtaactgctggtgtttcagaaccttcctcatcttcatgattctcacgatggccgcctgaatcagtagtttgcggtcttcctcgatgtttttgtgtgtggtttcttgttcctgcttctgttcggttttcattggcacattgatgttaacccttaatttcttatttttataaccaagatataattttattaaggtatctggcttcaattccacctcatcaacatttgcattttcatcttccaagaccaatagcttcgactttaataaaatctgtaaaacttgcgccaaaatgtccattttaatttgagtgctgtcggtcagctgctgcacagtgtaggcatcttccgtgttgtactgaagcaggatagccatctggaatgtcgacgcctgcaaagtatatctgtttttgaagcagttagttaccaattctcctttagacaactgatataaccacgtcaattttcggccactgtggcggctggcgtagaaagctgtgaatcgctgataactacgttccaactctgacggcaaggcaaatgtacaagactgctggaagggccaggacccggagctcagcacttgaatgctgaaatccaagtctaggggttctgagtttgtcaagtgctttttgaattgctcgttcagatctttgctcacgccaatgtcttgaaacatgcgctgaagtttagaggtgtactcgaacccgcccaggttgctttaacttggagatcatgctggcttcggcatcgtcacttgcactgttctggtggacgagcctcttggcgagcatcttcgcatagaacttctgaaatacgtctttgtcttctatgtacttgaagacaaccatcacttgattgagtgtgtcttctagttctgcctcctctgggttcttggaacttttcttcaacaaggagtcacagtatcgagccagcaactcaggggatttactggatgattgggccatcttggtaaccgcgttgttgtttatgaagcgaccacaagccttatcaagagcagccacaaagccagcgtcattgttgaatgcagacattaccagggcattgtattttttatgaacatcaagcactgtctgtacatacattttggggtcatttaaagcagcttctccacacttttcaatggctgcaagaccctgattatgaatgtgtgtctccaacagttttttcaattctcctaggccatcctggattctagatacaagattatacatgcgtcccaaatcttcatttttgtcagcatccaataaattctgaaattctgtgtggaaaatttccaagtgtttttcaatgaggacttgttcacatttccttgctaattcatcttgtgtgctttcatgaaggtaaacctgaactcttcgttgttcctcaagcagacgagcctctgcctttttcatatattcagtaactgggttctgctgcaagaattcagtactctctctggtataaaatctctctgtgtcagccaaaaattgagattcaaaggattctttatacactgttaacgtagggccctttgcaaatgcatcatcttcattcagccccaattccacgtaagactgtacaactccactaatcaatccctcgtgccgaattcgccacccaggcct

SEQ ID NO: 315875 - DNA, 370 bp, Homo Sapiens
  misc_feature (26)..(26): n is a, c, g, or t
  misc_feature (194)..(194): n is a, c, g, or t
  misc_feature (335)..(335): n is a, c, g, or t
  misc_feature (344)..(344): n is a, c, g, or t
  misc_feature (351)..(351): n is a, c, g, or t
ttttgtacagaaatcctttaattttntttattttcacacattaaaaaatgaaacacactatacaaatggttttcatagcaggttacatgtgggtccactcagacttgctctcaaagtgctgccaacgtgacaagtgctgccaagacgacagctgcgaatcggggagcccatgtattgacttagtgcggtcgtgncagccctcggcacggaggggtcagtccccggctggttcttaaattagggtaaatgggcgttgggtgtccgtatttacagacttggaaatggtatcaatcctgaggcaggttccggatggtaaatccgaggaccaggctggngggggagtnttggggnctcaggtttttaaagggga

SEQ ID NO: 315876 - DNA, 1041 bp, Homo Sapiens
  misc_feature (35)..(35): n is a, c, g, or t
  misc_feature (476)..(489): n is a, c, g, or t
cgccccaagaagacccccgtttcggtggcaacagnggtaggagaagcccccggccccagcgagaggaacacccagcacgcacaacaggaccctccctgttggcccaaagtgatagaattcccccgaatcttcttataaaattaggtgaaagtggcaatgcccagaaaagtcccacatggttccaagggttctttggtggccccggtcaaggcggagattatctgctcgagtgggtttaaggttctcccccaaaatgaggtaccaagaggagcacggagagccggccagactccagtaaacagtgtcccaggacgagaagtccgatcagaccagtttttaaaaatcatataaagttagtgtaaaagtatgtgaagccaagttgtatagggcgtagaaagcagtatttaaaaatcgcctgctggaacagctcccgagcagactcgctcctcctcgcccaggaaatccagatattcccnnnnnnnnnnnnnngatggtgttccctgagcggttgctgcgggtgatggatactcttctgatactggctcttcgtgctataatttcttttctcaccaagagcaggtgccctttcagaagggaatgggagtggagggagggtcacagaaacacctcggcactgggggaaacgtggcctagcctctggcgacggcgagcagcggccggaaggcacgggggctgcgggccggcgcgggttcagaggcttctttttccgcggacggagacactgtacagcccaacctcgggaaaacgccaacgccgacgccttctccaacaaaagatggcctcggactcaagagtgcggctccagggcaatgcagccccaacctaaagatttagaggcctcccgtttcgctggcccccagagccgcccaccgcgactgcacttccccaccgataaaaggtggtttccagggtacctccctcagatggcggcggcggctcccgacggcttcctcaccagcatccctcgcgggcggcggctctcgccagcgcggcgcggccccagtaaccagagtaaccgtc

SEQ ID NO: 315877 - DNA, 771 bp, Homo Sapiens
  misc_feature (659)..(659): n is a, c, g, or t
  misc_feature (718)..(719): n is a, c, g, or t
gggaccttcccccagcggccccgggcgaccagcgcgctccggccttgccgccgccacctcgcggagaagccagccatgggcgccggcggctcctccgcgctggcgcgctttgtcctcctcgcgcaatcccggcccgggtggctcggggttgcctcgctgggcctgaccgcggtggcgctgggggctgtcgcctggcgccgtgcatggcccacgcggcgccggcggctgctgcagcaggtgggcacagtggtgcagctctggatctaccctgtgaaatcctgctctggggtgccggtgagcgaggcggagtgcacggccatggggctgcgcagcggcaacctgcgggacaggttttggcttgtgatcaaccaggagggaaacatggttactgctcgccaggaacctcgcctggtcctgatttccctgacctgcgatggtgacaccctgactctcagtgcagcctacacaaaggacctactactgcctatcaaaatgcccaccacaaatgcagtgcacaagtgcagagtgcacgggcctgggagatagagggcagggactgtggcgaggccaccgcccagtggataaccagcttcctgaagtcacagccctaccgcctggtgcacttcgagcctcacatgcgaccgagacgtcctcatcanatagcagacttgttccgacccaaggaccagattgcttactcagacaccagccccattcnnttgatcctttctggaggcgtcggctgggcggatctccaactccagggctaga

SEQ ID NO: 315878 - DNA, 807 bp, Homo Sapiens
gagaatttaaaatcatatttattgttttgcaaacaataacttagacatttcttaatattttaaaaaccccaacacaaagtaataaatttggcttcttttccccacaaaaatgggaaatacctttcagtaaaggaaattttaaattatttttacacaccagttggttgttggaatttatagctctttaacatatgacatcagcaaaaataattagcattaactgattaatacataaaacaatttacaatcatatggtaagcaggaaacaaaaaccgatcagaaaacaccgttttatagtaattttcaaacagataaattattacagtatactttatccccaacatctctgagcccattatcagagtacttctatacatataaagatataataaaaggatacggtatttattgcaacagcaaattaaaggttgttaaaatatatgtaacttaaatacccccccaacattgatatagtggcttcttattccttaaacatagaaattccactcttcattgtagaaagataaagttctttcatcaaaaggcacattcttatcttcgaggatgattggcatcaaacaacgtgttgtcatcatcctcatcatcctgttctaaaggtgtcaattccatattttctatgttagtgtccaaaactccatatctcctagtctttcggtttcttcttctcatcctgaccgtcctgaccacgaagtacaccagcaccgcgccgctcaccaccatcaacacggtcagggcccgctgggtcatgggcttgtcgccagggttggggctcacagcaaggccgcc

SEQ ID NO: 315879 - DNA, 688 bp, Homo Sapiens
cccaggctggtcctccgaaactcccctagggttccaagtggatccctccctgcccttgtccctgccccaaagtgcctggggaattaacagccatgaagcccgcccacgccccagcctgagattcacattactttgagtgtttaatttcactatgacaggaagtagcctaatacatacttttttgtgttaattttctggattcatcctgatttttagtcttcgtacctgagtacaacaataaaggaaatcacttcttagatacattaaaattacttctaaacttgccccccacacatgaactgttttcagtttgctatttttaatggcccatgcttatttatatagacatagcataacactgctaacattttatggcctactgtcctctttcttagtattatattataaaatatttttctatatttccacatagttattgactcattttaatggctgcaaaatcaggtactcatttaagctcaaatggtttagtatcactcctcagaaatgtattcctccttctcttgattggtagtcataatcaaatgaagtgacattattctttgtagctggttacttacatttcaaatacactcatgagtggagccaaaactccattagttcattagtctggaagcactattaaatctccattaaaatgtcttcacttttcaattttgtgtgtgtg

SEQ ID NO: 315880 - DNA, 1261 bp, Homo Sapiens
cagactccaaaaggccctgggcaattagctcctccttgatgcggctctccagggacttagtatgcggcacactgaagggcttgttctgattgcgaggggaggtgcttgccccgtcagcccctgattctttcccagacatgtcaggaataggagaatcctccataggggaaataatattttcctccaccagggcctgcaggaggcgctgcgtcagggcaccaaaggggcatccatcttccggctgttcatgctgggcctcagacttcttcagcagggcatccacatctttagtgtccagttcggtcagtggccccatgaggcctttcttcttgtcagccacagccgctgcccgggccccatccttctgctcctccagcaggtcctcctgggcccagcgctgggagtagtgcttccccaggggtgggatcttgtaatgctcagcctcatcttctgggggcttcagtaactcctcaagtgtgcggacctcctcgctggtgatgtcagcacagtagggctccactgaagcccagaacctgttgggggcatcatttttggggatccgtggcacgtcgatagggtcatcagtgaattcatattcctggatcttgggctgaaggtttttggatttgggccgtcctgggccagggcccggcccatgtcctgccttcccttccagtttctgcttcttgggcttcccatgtttggggggagctccaagttcatggtctcgacccagcttcaggaatcgtctgtcacctttcttatcctgccagtcggtgaggatctgggtttcggcctcaagcacacgcaggcgccggctggcagaagacagcagggtctccagctccagctgcagggtgtccagctcctcgatgccgatgccatcatcctcagagcgtgccagcactgccgtgtagcggggacagaccttcaggtgatccacagacttgaagtcgtggaactgcaaggggcagtctttcaactcactcatggcccaggatatggggatcctgtggagctccctgggatgttctgaggattaagagatgatgcccgtcaagagcccagttcagtgtctggcacagaagtgggactgtttaatggctggccccgcccgggggtcgcccaaatgtcccgccttcagagtcctcgttctctagggacaccctagtgcgacccccgccccctctacctcctcgctgcggcctcctacggccccaggggccgcgggaggcctcgtgccgaattcgccacccaggcc

SEQ ID NO: 315881 - DNA, 944 bp, Homo Sapiens
aaacccccaggccgttgcccggggcccccttcctttttgttcctcccagcaggttcttcctggggcccagcgctgggagtagtgtttcccccagggggtgggttcttgtaatgctcagcctcatctttttgggggtttcagtaactcttcaaggtgtgcggaccttcctcgctgggtgatgtcagcccagtagggctccactgaagccccagaacctgttgggggcatcatttttggggatccgtggcacgtcgatagggtcatcagtgaattcatattccctggatcttgggctgaaggtttttggatttgggccgtcctgggccagggcccggcccatgtcctgccttcccttccagtttctgcttcttgggcttcccatgtttggggggagctccaagttcatggtctcgacccagcttcaggaatcgtctgtcacctttcttatcctgccagtcggtgaggatctgggtttcggcctcaagcacacgcaggcgccggctggcagaagacagcagggtctccagctccagctgcagggtgtccagctcctcgatgccgatgccatcatcctcagagcgtgccagcactgccgtgtagcggggacagaccttcaggtgatccacagacttgaagtcgtggaactgcaaggggcagtctttcaactcactcatggcccaggatatggggatcctgtggagctccctgggatgttctgaggattaagagatgatgcccgtcaagagcccagttcagtgtctggcacagaagtgggactgtttaatggctggccccgcccgggggtcgcccaaatgtcccgccttcagagtcctcgttctctagggacaccctagtgcgacccccgccccctctacctcctcgctgcggcctcctacggccccaggggccgcgggaggcctcgtgccgaattcgccacccaggcc

SEQ ID NO: 315882 - DNA, 1086 bp, Homo Sapiens
  misc_feature (27)..(27): n is a, c, g, or t
  misc_feature (917)..(993): n is a, c, g, or t
aaggtagcgaggcctggggtggcgaantccggcacgaggccgcagcgaggaggtagaggcggcgggggtcgcactagggtgtccctagagaacgaggactctgaaggcgggacatttgggcgacccccgggcggggccagccattaaacagtcccacttctgtgccagacactgaactgggctcttgacgggcatcatctcttaatcctcagaacatcccagggagctccacaggatccccatatcctgggccatgagtgagttgaaagactgccccttgcagttccacgacttcaagtctgtggatcacctgaaggtctgtccccgctacacggcagtgctggcacgctctgaggatgatggcctcggcatcgaggagctggacaccctgcagctggagctggagaccctgctgtcttatgccaaccggcgccctgcgggtgcctgaggccggaacccagacccgcacgcactggcgagatgagaaaggtggcggagcgattccccgagactcgcgccgaaaccctgaactttggactgcgccccaagcgtggggaaggccgaaaaccagcaaaccgaaagaggacagggcgagaaaagggcccagggccggcgcgccggcacgggcccgaaggccacacaggacctgggggggcgtatgggccccaaacgcggatcttttgcggacgggccgctttacgaagcgcaccaaggagacgcacggggacgcagccacccccacgggaaggcgcgggcctcaggggagaaggcgctacacacagctaaggtccgagcggacctgtgaggtgacgcaagcaggctgaccaatctcccgtccggacgcgccgagtcttggcgggccgcaggagggagaacgcgcgacccaaccccggggggggcgcggtggcgcaaccgtnnnnnnnnnnnnnnnnnnnnnnnnnnnnnnnnnnnnnnnnnnnnnnnnnnnnnnnnnnnnnnnnnnnnnnnnnnnnncgacgaccgccccacgggcgtcgaagggggagtatccaaacccactaacagccgccgtaagaggccccgagtcgctcaagactctatgacagt

SEQ ID NO: 315883 - DNA, 910 bp, Homo Sapiens
  misc_feature (653)..(714): n is a, c, g, or t
  misc_feature (721)..(729): n is a, c, g, or t
gtcgttatcagaggtggagacatttagaagttgttcttaatcagagtgaagcttgtgcttcggaaagtcaacctcactcctcagcactcacagcacctagctctccaggttcctcatggatgaagaaggaccagcccacatttaccctccgacaagttggcataatatgtgagcgcctcttaaaagactatgaagataaaattcgggaggagtatgagcaaatcctcaataccaaactagcagaacaatatgaatcttttgtgaaattcacacatgatcagattatgcgacggtatgggacaaggccaacaagctatgtgtcatgaagctttgtcacatatctgggtaccaggtttgacctcaagagatggctgctgtacactttttgcaactggtttgatgtcacatttcagctccaactttgcatcctgagaacacttaaacgtttctgcaggtccattttatacaacttgaaagaccgtaaaactttctggttgccacaagcatatctttcttttctgctcatccaataaacagctgtgccctactgtgatagattttccaaacaaaaatacctggagcagcagtttagcaaaatatgccttcagtggcattcaacaaatggagtttccccaagcacagttctgtaagannnnnnnnnnnnnnnnnnnnnnnnnnnnnnnnnnnnnnnnnnnnnnnnnnnnnnnnnnnnnncaaaaannnnnnnnngatcttggggattctggctgtgaatttggtgcacgacaattatggtaaaaaaacatttgcttggtctaaagaagatcattaatgttttgtgaccatacaagttgtaacagtggattgtttttatgtgtaagtattgttaaatacagggactgtttccaggcacagaatatgaatcgtaagt

SEQ ID NO: 315884 - DNA, 673 bp, Homo Sapiens
  misc_feature (13)..(13): n is a, c, g, or t
  misc_feature (21)..(21): n is a, c, g, or t
  misc_feature (45)..(45): n is a, c, g, or t
accccttaattcncccaaagnaaaacttgaacaccccttcaggancccagcatgtgaaatcctcaatgtcccacatgaaagatgtggtaagatggggctgcaaccgacctcgggccaggaaacccactgaacaccgggctcccagccaaatgccagcataattttgtggaagtctagaaatgctgactgtccttgggaactgctcaatattgggaaaatgttatcagctccgcacactgccagctctccccaaagagacatgagagcctccaaccggaagaggcagggcggtggggaacagctctcaggaggaggcagcccagggcaagggaaagttgctgagtcggctgaaagtctgaatggtgccagctccactgcacacaggctgtgtgacctctggggagcccctcaacctttctgagcttcaaattcctcacctgggatataagactcctacctcggcctccctaatgaaggctgagacgattggtacacagctccagcgtggtgtcaggcacacaacaggtgctctccctaagggcttcatgagagcgactcagcagcacaaagccatgggagaggcaccgggggaatgtgaggctgcgaacagcaaagggcttggcaaacccattggtcccgtttgtcatttacccacgagggccagagacgcatg

SEQ ID NO: 315885 - DNA, 1437 bp, Homo Sapiens
  misc_feature (78)..(92): n is a, c, g, or t
  misc_feature (199)..(209): n is a, c, g, or t
  misc_feature (250)..(337): n is a, c, g, or t
  misc_feature (469)..(482): n is a, c, g, or t
  misc_feature (490)..(598): n is a, c, g, or t
ctccccccaagggggggcccacaaagggtgtgtggtgatatccccccccggggggggaatatttaagggggttctcannnnnnnnnnnnnnnttttttggggagagggggtgtttcccccattttgggggcccggaaaaaattttttaaagggaaaatttccccccacccctttttttttcaaataaaatgggccaaannnnnnnnnnncgggtaaattttgttattttgggggctccccccttggggannnnnnnnnnnnnnnnnnnnnnnnnnnnnnnnnnnnnnnnnnnnnnnnnnnnnnnnnnnnnnnnnnnnnnnnnnnnnnnnnnnnnnnngggggttttttatttgggggggaatcccaacccctttttcttggcccggtttttcttggggacacagtgattggccaggttcccttccctttggggccccccgcccaaacgaaagttttaaaaaattttttnnnnnnnnnnnnnnccgccaannnnnnnnnnnnnnnnnnnnnnnnnnnnnnnnnnnnnnnnnnnnnnnnnnnnnnnnnnnnnnnnnnnnnnnnnnnnnnnnnnnnnnnnnnnnnnnnnnnnnnnnnnnnnttcgagagatttaaagattttatttttacaaatcacagctgatagacagcgaagccttccccatagagaccgtgctccaactcgggcctggggcactgctcgctgctcccaggaagggggtggcgtgacaggcaggaacctgcgaagtccagagtccagggtggagcgcgccagcctcagccagagcagccacgacagccacagtgtgtgcactcgatgatgcggcccacttccagcttgcttttgggcacgcggcagatgcagttcgtcccgaagttggtgtcccgtgtctgaatgcaccgcaggcagcacaagttctcatatccttgctttttccattttgcaatcaggtttttgtctgcatagccttctttaatacaatattcatagagttctctgctgatggctttccgcttgtaaaagaggtcgaagatgtagcgggttttctggtggtggatcctgaagatgggccacagagattccactttcctctttccctcatgcggttctgtttcagcttctctcatcttttgatctaattcatccagtgttggctcaatcaactcccagccatctgggggtgctttccggcttcttttgactttaggcattttccttccacaggataatctgcaaagatcttaggatgtgctttccaagagtatagacagcagaaagatctctcgtctctgcagttgcaggcttggattcttgttcagctctaaaaaattattctgtgactttcaggtcaccttccctctctggtcctgtttcttcggaagctcctggagcttgggtagctgcttctcgacagaaggcttccgctcttcaggcgatct

SEQ ID NO: 315886 - DNA, 894 bp, Homo Sapiens
ggggccagcctcagccagaagcaggcaggacagccccaggggtggcactggatgatggggccccacttccaggttggttttgggcaacgcggcagatgcagttcgtcccgaagttggtgtccccgtgtctgaatgcaccgcaggcagcacaagttctcatatccttgctttttccattttgcaatcaggtttttgtctgcatagccttctttaatacaatattcatagagttctctgctgatggctttccgcttgtaaaagaggtcgaagatgtagcgggttttctggtggtggatcctgaagatgggccacagagattccactttcctctttccctcatgcggttctgtttcagcttctctcatcttttgatctaattcatccagtgttggctcaatcaactcccagccatctgggggtgctttccggcttcttttgactttaggcattttccttccacaggataatctgcaaagatcttaggatgtgctttccaagagtatagacagcagaaagatctctcgtctctgcagttgcaggcttggattcttgttcagctctaaaaaattattctgtgactttcaggtcaccttccctctctggtcctgtttcttcagaggaaacggcgcgagaatcctagaggaaaacccccaaatctaccgtcccctcagaagaacgaacgtggcgccgcctcctctcgggagctctctccggcctcaaggtccaaagcccgaacacatcccagtggctggctgagagtccagccactcatatctccctccaggacggtgcagaccaccggtctcccgcctcagccgttgccaaggtaatcgagaacagagggaaaacacataccggaagctcctggagcttgggtagctgcttctcgacccc

SEQ ID NO: 315887 - DNA, 466 bp, Homo Sapiens
tttttaactcaatacacatttattgaacagctgttattttctgggtacaaagtcacttgggatatggcccttggtccttgccccctggagtcttccatctcagtgtgatcagtgctgtgacagaagcaggtcaaggctatgggagcaggagtgggaacttgacccaggtctggacgttgcggcagcttcctggcgaagggacacttaactggggtcacagtgtattccaaggtatgcggattcatggcaagcaaagggagaaggacagagaagcacaggcacagtggctcccaggctgtttgtgctgcccgctgtggggcttacccttaaatacagagtaacatgtcttgattccttgaggttttaacaagtcatgtctctccaactgcttctcaaggccatagagagtttgtgcatatttgggttagagagtaggaagaggcagttttagtgctttggatagtcc

SEQ ID NO: 315888 - DNA, 936 bp, Homo Sapiens
  misc_feature (152)..(152): n is a, c, g, or t
ccaaggcattgggaacacacgggagttgccttatcttcaaagataagtctatttgtttctagaccagtctgcaactcagctgccttagcttgcatgcgtttcctttcctgtttttcttcatggagttttgcttccaactcttgcattttttnttctgcaagggcctgcattgtggtaagtttgttatactcctgttcaagaagatccaatttttcaagttggctctgaacatgtgtttgatcatgttgtcgttctctttctagggaaacttgtttctctaagacagatgtcctctccatttcggcatgctttatcatatttcgcatgtattccaattgtttttctaatagattgcatttattttctgcagctaacaactgagatgtcagttcttgattgtgctttgattcctcattctttgaattctccctttcttgtatctgttcatccagtactttcttatattcaattgtttctctagacaaggttttcacactttcttctgcctgaatcctctcaagttccaagcgtcgaatcttatcttgaagattcttaagagcagaaaatatggctctgctgttgctttctggataggcaagtgtaggcttacttggggagcgtcgtagatcactattaaggaaaggcttatccgaaggatatactacatatggagatgaagaatgccgaaccatgcttccattagaccttgatggctcagcaaagctgttcgacaagtgagaaccagaagccgcagagacagacgccgccgccatctttcagcctgcccagggggtctccgcacttcgggggcggtctaggttctcgtgctcttctccaagactcgggagccgcccaccagcggggaccctaggctgaacccctgatggaaaagggcaagggtgctggtgctgggcttggaaacccctgcaacacccc

SEQ ID NO: 315889 - DNA, 2077 bp, Homo Sapiens
  misc_feature (278)..(336): n is a, c, g, or t
atctatgtacactctgcctactcctttttaccaccatctaccacaagaaaaatgagactcatcttttaaacttatggtacaacaaaaagacctgggtcagaatcttggctctgcatttactggtgttataggtacagtcactaattccgttttctcaactataaaatgggaataatatcacctactttgcaagactgtgagaagtagagatactatgtaaagttcctagtatagtaccaagggtataaagtcatcatcaccattatcagcctcatgcnnnnnnnnnnnnnnnnnnnnnnnnnnnnnnnnnnnnnnnnnnnnnnnnnnnnnnnnnnnttattttttaaaaaagatacacaagtcaatatggtaagattctgaaaaccctgtcacctgctttatttctggagaagggtaaagggagaagggaaaatattcacttgaatttgaggggcagctaaactggaagcaacaatttcaggcctctaaggttcctctgatccataagggaatgctgaaacttccttgtttggagattcaaagagtttaatttttccctacagcaagatcaacaattttcactgggataaaagaataaagaacaaactcaatagcaccaaatggggttttaacacagaaaacagggccactccttttaaatgcaaatttttacattaaaatatgtttataaatcatagtagttgttttccctcttgattcaacatttctccctcccctaacaggagccctagaacctgaagagcatgtacattactaacgagatatacaatccagccaccctgtccaaactggaatctgattactaatggactacactcgaggctgcccccaagggatgggaagcagtaactacgctctcagggagaatgggtactgaggatgccaccagtcaaagagccgaacgctgtgcactgggtccaggatgacttgcacaccctgttcactgcgcagtttccgaccaccatggacaggggaatcttggaacaccagtctcactcgatgatgccgcatgtccgtgctcacattgatagtaaacagagtaaatatcattccccatgacaatcggaataaagatgaaattgagggtggtgacctgcagtaggcagcagtcctggtctggattggtatgaacatcttcgtactgaacgggaggctgcaatcctcctgtacacttgctctttaacctaggggactgttttttgaacttgaagttgaattcccacattggttcctgtctgttcccaacaatctttctgcaccagaaaagtaagcatttggaattctttaatgtgctgggggtgctttctggaatggctggattcttggagattcgagcagcaaatggctcatacatatggtacagagatcggatcacacaagcccggagacagcgcagcttctccattgactctggtcgcagacgcaaaggcagggaagcatccagcgtgtagtgccttcggtacaacctggtccaaaaggcagcagtgcaagtgacagtccaggcattcttacaaatcagggaaaaattcacaatgtcctcaggacggatataggaggccagcaatagcccaaatatccatgggatactcttctcctccagccccgtccaagttcttctttgtgtctcttgcttttcttttttctggagacagttctctcatggatgctttcctcctgggcatccatctcatcactgctgtcgatgatgtcacagggctcaccagccccagaaagagcttcctctgcaggaacctgagaggcttccaagccacaaagagattttacttcctgctgaacagcgttggctacggctttcttgactcgtccagacctcacgaccgccggatccgagttggcgtaatccgccacggtcactcggccggagcaggcgtcgtgggcccggaacttgagtcgctttcctctcttgggcatggcgaccgtatcggggcgaggcctgcctagcgggccgggcccccgggccatgtctccggccggagagccggccccgggagccgcaagccagctccgcccggctccgcggccatcccacaccccc

SEQ ID NO: 315890 - DNA, 412 bp, Homo Sapiens
  misc_feature (299)..(299): n is a, c, g, or t
  misc_feature (361)..(361): n is a, c, g, or t
  misc_feature (367)..(367): n is a, c, g, or t
  misc_feature (376)..(376): n is a, c, g, or t
  misc_feature (382)..(382): n is a, c, g, or t
  misc_feature (392)..(392): n is a, c, g, or t
attcaaagagtttaatttttccctacagcaagatcaacaattttcactgggataaaagaataaagaacaaactcaatagcaccaaatggggttttaacacagaaaacagggccactccttttaaatgcaaatttttacattaaaatatgtttataaatcatagtagttgttttccctcttgattcaacatttctccctcccctaacaggagccctagaacctgaagagcatgtacattactaacgagatatacaatccagccaccctgtccaaactgggaatctggattactaatgggnctacactcgagggctgcccccaaggggatgggggaggcaggtaactacggttctcagggggnggaatngggggactnaggggntggccacccngtcaaaggggccgaacggtt

SEQ ID NO: 315891 - DNA, 750 bp, Homo Sapiens
gggttgtggcggaaggaggagctttctgggagaagccggtgctgagagaaccgtggctggcaaagatgattcaggcgattctggttttcaacaaccatgggaagccacggctagtccgcttctaccagcgtttcccagaagaaattcaacagcagattgttcgagagactttccatctagtcctcaagcgggatgacagcatctgtaacttcttggagggtggaagtttgattggtggctctgactacaaactgatctaccggcactatgcataccctctactttgtattttgtgtggattcctcagagagtgaacttggaatcttggacctcatccaggtttttgtggaaactctggataagtgtttcgaaaatgtgtgtgcaattggatttgatcttcccatatggataaggtgcactacatcctccaggaggtggtgatgggtgggatggtgtttggaaacaaacctgaatgaaatcgtggctcccgattgaggctcaaaacaggctggagaaatccgagggtggcctttcagcagcccctgcgcgggctgtgtctgctgtgatcaaagttcccaacctgtcccagtttgtctgaggatcaagtattggcctgaaattagagccttaagacaagcatagacaagcaatgcaagcacgtctggaaacagaaccccattctgagccttagaagagtcaagcctcatgacctggctttgtgtctgggggactgtttgcatgggatagggg

SEQ ID NO: 315892 - DNA, 1822 bp, Homo Sapiens
  misc_feature (97)..(110): n is a, c, g, or t
  misc_feature (806)..(1119): n is a, c, g, or t
ggggggggctgttctaagaagggaaaaaccaagttggccctgggccccgggtttttctgggcaccctttcaagaccctggcgtggcaacagcatcannnnnnnnnnnnnntccccagcccaaaaggcccaagaagggcccaggcctggaaactttctgtggaggcagccctcatcttagggtggctcaccaccaccccggggatctagcccatgcgacagtatggaagcaggaggccctactcccccacagaaagaacatttatgggcgcctaaggccctgggagaatggcacctgagggaacagagcgtgcccacaagcagaccttgggagggagaagaggcagccctgctcctagtcgcagccagcgtgcgtcatgtccaggccccacaagggtgaccctggctcaggttctcatgctccagaagctggcccaggtggcagtgggttccctatggaggcagctcatcattcacaacacagcaacaaaccttctgctctcatgaggagaatgtattttaaacttgggaagagtcataattctgggatgtttcacatgttgtcagctttaaccttctacagacacaggccctctcctctgtgaggagggacctctggcatgtgtgggtgtgtggtgggtccctctccctattagcagaaatgtgttgggcatgagccaggtttatgatttggattgtgtcctgcacataacacctgtgagaatacaactgggactaggacaatgcgggaagcatattcttcatgaggcggtaaccaaaaggcttggctataccaaaggattctggnnnnnnnnnnnnnnnnnnnnnnnnnnnnnnnnnnnnnnnnnnnnnnnnnnnnnnnnnnnnnnnnnnnnnnnnnnnnnnnnnnnnnnnnnnnnnnnnnnnnnnnnnnnnnnnnnnnnnnnnnnnnnnnnnnnnnnnnnnnnnnnnnnnnnnnnnnnnnnnnnnnnnnnnnnnnnnnnnnnnnnnnnnnnnnnnnnnnnnnnnnnnnnnnnnnnnnnnnnnnnnnnnnnnnnnnnnnnnnnnnnnnnnnnnnnnnnnnnnnnnnnnnnnnnnnnnnnnnnnnnnnnnnnnnnnnnnnnnnnnnnnnnnnnnnnnnnggattctgggtgtaacaatctcagtagagccagcgggtgactctggttctcctaaaattctgcccttacttgccactcaccacacccccagatctgaagggccagcccttttctacctatgacacctcaccagcaagtaaagggcacaggacctcagaagtctgtggtgctaaggatgaagactctactcagagaaggtgctcagccctagtgaggaggttctgggaagcaggtgggcctgctcaatgcagtccctaacccttgggagcatccatgtgagaggtaaaggtgcaaatgacttaggcatgttgactccctactgaggaaggcagggcccctcacatctgcagtggccgtatgcatcagagaacggcatgactgcacatgtgagaactgggtgcacccgagcagtgtcaataggaatcccttccctattccatgccaaacagtcttccccagacacaaagtttccaggtcctgaggcttgactcttctaaggctcaaaatgggttctgtttccagacgtgcttgccttgcttgtctttgcttgtcttaaggactctatttcaggccaatacttgatcctcagacaaactgggacaggttgggaactttgatgttgagatcgccaatgttgatgttccgaggaatctctggcaggttgatgcctcgtgccgaattcgccacccaggcctcgctcttt

SEQ ID NO: 315893 - DNA, 401 bp, Homo Sapiens
ggcagcggcgccgcgtccgctctcgcccgctctcgcccgctcgccagccggctctcctcccgccgcaggacccgcgcgccgcgctcgggggccatgcagcgcctggccatggacctgcggatgttgtcccgggagctctccctctacctggaacaccaagtccgggtggggttcttcggctcgggggtgggcttatcccttatcctgggcttcagcgtcgcttatgccttctactacctgagcagcattgccaagaaaccccagttagtgaccgggggtgagagtttcagccgcttccttcaagaccactgtcccgtggttacagcgtactacccgacggtctggtgctgggagggtcgaggacagaccctgcttagacctttcatccttcggcccccggt

SEQ ID NO: 315894 - DNA, 412 bp, Homo Sapiens
aggctgagacccccgctcttcctgggtgtaatgttaacatcctctgccatggctggctgcaggatttggtattcatgctgtttaaagagggatatgcagagcctgtggattaccaagtcccaactgggacaatggccatattctccattgacaacctgacacctgagggatgaaggggtttacatctgccgcactcatattcagatgctccccaccctgtggttcagagcccagcaaccccctggaagctggttgtagcaagtgggtgtggctatggctgctggcatctggcaattgttgtcccacgtatcatggctggctgagctaggggttctgattttactttcctcagccaggttctaggccctgcaagggcccatgagctacagtcgtttgggtttactgagatttt

SEQ ID NO: 315895 - DNA, 751 bp, Homo Sapiens
atcttttgctacaacctgttaactgactggactgttggtaacaaagtaattgtgagaaccatgtcggtcaaaaatttggcatctgctgaaaaaaatgaatgccattttcaagttcccaaattacttctatactgatttcactttccagaaatggagatatgaaaagattctctggaatccttgaaagacttaatagagatacatgagactaagttaatcttggaacaaaattatactttttttgtctttcatgggagtgatactcagttattgcatatctttacaaaattgtaacctttggagaattacagtatttcatcaagaaattagagtttttacataatcaagagcatattctatggaattaacatttagtggactagaattacataagcaggccatcagtgatcacaaggcatatgagtttgtatttatttcctggaacatgagagctaatttggagtacagacagacaccctgctgagtagaatataaaagttaatgtaaagttctgaactataaagagtagtccttttaaatagatgcattgatttgtatatctttgagttgattatgatttgtgtgtgggtagttaattacaatttagggtaacaaccaggatgtatggattcttgaggttttggcttcttgagctttctcttgagtacttgatacttgttgtctgaatattttgaggtttctaattaatgggatgctagtttctactgttttatatttttgtggcttgggt

SEQ ID NO: 315896 - DNA, 419 bp, Homo Sapiens
  misc_feature (150)..(150): n is a, c, g, or t
gacccggaggtcttctgccatgagccatgtagccgcccttcttcaggggtgccttggcggactttggtgcttgtgcccccatccacacgcaccccagttctcaaaacttgtacttgcagtcggctccaaactctttcttccagttgcagnggcaccctgcaccggatgcgctgggtctgggccccgcaggtgccctcgcggaaacccacgccgcaatccttgctgctgggggtgcagggcccccaggcccactcagcgcactcgctccccgggccgcccttcttcaccttatctttctttttggcgaccgcggaggtgagcgccagcagggcgaggagggtgaggaggaggaagcctcggtgctgcatctcgctcgctgcccgcgctgcttcgctccctcccgcgccgggcccgttttt

SEQ ID NO: 315897 - DNA, 1245 bp, Homo Sapiens
  misc_feature (77)..(86): n is a, c, g, or t
  misc_feature (113)..(124): n is a, c, g, or t
  misc_feature (136)..(271): n is a, c, g, or t
gggggggaaaccaaccccttttatgtcccgggtttttttggagaaaagtattgcccattttcctttacctttggggnnnnnnnnnnaaaaaaagggtttaaaaaattttttannnnnnnnnnnncgcccccagggnnnnnnnnnnnnnnnnnnnnnnnnnnnnnnnnnnnnnnnnnnnnnnnnnnnnnnnnnnnnnnnnnnnnnnnnnnnnnnnnnnnnnnnnnnnnnnnnnnnnnnnnnnnnnnnnnnnnnnnnnnnnnnnnnnnnnnnnggggggaaaaagtcagtttatttgatgtgtttcttagtaatggaattgtggggaagaacaaaagcgggctctgggactcacattgctttgggggaggctcaagcttcccagaatcccttgtccctccccactttgggcacttaggggtggggctggggagtgagagggacaaggcagggcatgattgattaaagctaacgagcagacagaaggcactggtgggtcacatctcgggcctgggagagggagggcgtgggccaggccccatgtgacaccaggggctccttggcatccaggcttggcgtctagtcctttcccttccctttcttggctttggcctttgctttggtcttgggggtgcagggcttggtgacgcggatggtctcctggcactgagcattgtagcgcgccttcttcagggtgccttggcggactttggtgcctgtgcccccatcacacgcaccccagttctcaaacttgtacttgcagtcggctccaaactccttcttccagttgcagggcaccctgcaccggatgcgctgggtctgggccccgcaggtgccctcgcggaaacccacgccgcaatccttgctgctgggggtgcagggcccccaggcccactcagcgcactcgctccccgggccgcccttcttcaccttatctttctttttggcgaccgcggaggtgagcgccagcagggcgaggagggtgaggaggaggaagcctcggtgctgcatcctggggcggtttccgcgggtgggcagggaagcgctctgctgtgctggggggagtctgggacccgggcgcccagagaaagccacgggtgcggtcgcccagtgcctttccgggagcacaggcttgagggactgcgagtgggggtcctgggggaggagcccgcaggcctggatttggtgaaacttggcgctgacaggagccgtctgagaagttccctcgtgccgaattcgccacccagc

SEQ ID NO: 315898 - DNA, 3084 bp, Homo Sapiens
  misc_feature (200)..(209): n is a, c, g, or t
  misc_feature (311)..(319): n is a, c, g, or t
  misc_feature (405)..(424): n is a, c, g, or t
  misc_feature (459)..(585): n is a, c, g, or t
ttttcccgcgttaattttttactggggccataaagggaaaatttttttactccccgttttttcccaggggaaatatttttttccgggccgccaaagggggttttaacctgggccgatttgggttatttcttccctttggtgtggcttccccgccgggcaaaatacttaaggggttcaacccttttttgcataattggaannnnnnnnnncattttgtttttgaaggcctccgggtcccctgtattcttaccgggatttcacctgggatcccccttttggtttgttccggacccctgggatcccccgggggnnnnnnnnncggggggatccaaaccgtatgttttcacaggtttcctttggaaaaggcattacccctcgttcctttccctaggggcccgccggccnnnnnnnnnnnnnnnnnnnnttttcagggggcccaggggaaccaccaaaaaaccnnnnnnnnnnnnnnnnnnnnnnnnnnnnnnnnnnnnnnnnnnnnnnnnnnnnnnnnnnnnnnnnnnnnnnnnnnnnnnnnnnnnnnnnnnnnnnnnnnnnnnnnnnnnnnnnnnnnnnnnnnnnnnngtgtgattccatttatatgaaatgtccagaacagggaaaacctattttagacaacagagacacaaagtcgatcagcagttgccaggggaggaggaagacgggaggggaaatgattgcttcacggggtgatgacagaatgttccagaacgtgacagaggtggtgcctacacaactttctggatgtactaaatgccgctgattgttcactttcaagtgattgatttttaggttatttgaatttcatctcaattaaaaaacccaaacacgcaaactgctcccgccagctcagccccgagcagacggcgcagcccgtggaggatgctgagccacccaggcttctccccgccccttcctggactcttctctcttttgcctttaatccactctgcgcagtcattgcctgtgttcatcctacctggccgacttctctctcaatatttccttggtgaaacatcctaagaggaagttacattagagaaaatcacatatttcatctcataggccgtaaacagggccatttaggaagccatgtgttaacgaggggagacggatgctctgtgccgtgtgcagggataacggtgccaggccaggcagttaccaatcacgcgtgtgtttagggctcaggaaagcgaaggagaagtgggcaagggtggcgggcccgctccgcaccgcccagcgctccggacttcacttctggtcccgctcctgggcggccacgaagttcagcaagtcaatggcggtgaccaccccgaacaccatctgccgctgactggacttcccggtgctgtggtactggatctgctcgtgcaccaccagggcgaagtggtccatctccaggatgtgcgagagcctgcccagcgtgtccgtgaggcggatctgtttgaactgcttgtagatgactttgccaacttggtctgacggctgcaccttcccggcaagcagggacgagagcatgttcccaagcgtcaccattcccaggattacccccgcctcatccaccacgggcgcctggtcgaagcccttctcccggaggatctcgatggtgtgcccacaggtgatggtcgggagcacggtcagcggggctgacaggcccagctcctgaacacggaggtgccaccaccagggcttcttctccgtgaggtcctcctccttcagaaagcccttctgcagcatccacctgtcgctcaggaacttggtcatgtagttccgcactgagtcgggcagaatgaccacgcagcgctggccctcctgcagctcctgcgcagccttcacggccaccgccaccgtgctgccagcactgccaccgcacagcagcccctcttgcgcgatcagcatgcgggcaaaggtgaacgcctcctcatcgttgctcttgaaccacttgtccaccaccgtcctgtccagcaccgtggggatgaagtcgtagccgatcccttccacctcgtaggttgtctgctccgtctggttcagctcctccggctctgcgaggatggacccttcgggatccaccccaatgatcctgcatccaggacacttctccttcagcttcctggcaatgcccgtgatggtgccgcccgtgcccactgaagccaccagcatgtccagcttcccatcacactgctgcaggatctcatcagcggtggtgtcgtagtgagccagggggttgctggcgttgcggtactggtctaggatgtgagaattggggatttcgttcttcagccgccaggccacccccacgtgtgactccggggagtcgaacctggcattggtgggcgtcctcacaatctcagccccccagtgcccgcagcacgtccaccttctcggagctcatcttctctggcatcacgatgatgcagcgatagcccctcactgccgcagccagggccagcccgatcccggtgttcccggatgtcggctcgataatcgtgtccccgggcttcagcgtcccgtcgcgctcagcatcctcaatcatccgcaggctgatgcggtccttcacgctcccgcccgcgttgaagaactcacacttggccaagagctcacacttcaggccgaacttcttcccaatcttgttgattctgaccataggggtgtccccgattttcttcagaatatctggcaagatttttggagattttgccggggcagtgtggtgatgtggggactcggaggcaggccggcccagctgccaggtgcacctgctcggagcatcgggccggatccacaggggctccttggcttccttatcctctggggaccccttctccaggctccccttcgccgagtgtggccctgagcggtgggggcagcctgtgggccccacttctgcctggggggtctcagaaggcatgctgggaccggacagatggtgctgacagttcagcaccgctcaaactctgtaaggagacgtgacaacagaatctgtcatgggatcctggacggatacatggaaaagaggggcgagcggctgccccgactgcggcgaggcggagacggcgaccccgg

SEQ ID NO: 315899 - DNA, 925 bp, Homo Sapiens
ccaatggggttaaaggccatgaaccccagttttatgacactgcgttgggcaaaaactcccttttccccccagcactgagcatgcctaagcccccatagccagctggcaagggacccaactgcccctgcctggctctagctcccagcattgctactgtgcaggccaagggtactgaagttagtcccactgtccccctgtccatgcatgttggagggaccaggccatcgtggtggggtgggacaggagtatagttgtggccaagggcttgtgagtgggcctcctactccccagcacaggtgcaggaggaactctggaagcactgctctctgtcagtgatacagcttccaaggtgttcttgagtagcagacattgtccctcagaaggggtgaccccacgggcatgcgcaccctgttccagcgggggccttttttgtagatgggcttgacggagccaggagcccagcgcgtcaggtaccggttgagttggggtttgctcttcggaacaactccttcaggaagccgaggcctgtgatttggtaatagacctgctcggtgggccatcttcacacactcctcgatcttgcggtgttcttcctggcataggcctgtgatctttcggggcagcatgcctccatgaggccggatgaactggctaagcagcagaacatcgtcatagttatacttgtgcttcaggttccaacggcagatggggcactggccagaggggttaggaggatttggactctccttgggagtcgctgtgatacggccttcaattatagttgtcttcccttcttgggtctccaccacttccctgaacccgcgagctggaagccgagaccagctggtcgctgccgggcccgctagtagcccacggagaagccgcccacagccggacaccagagccttgaggcctcgtgccgaat

SEQ ID NO: 315900 - DNA, 1068 bp, Homo Sapiens
catgaagaggatgggacctgtttggcccatgaattcaattgactcattggccccatcacaagagatcagtgactcaatgctcagcacccagctggcaatgtgcccaggaccccctgcacttcccaagcagtgagcgcacacccaatgggtaagcccatgaacccagtttatgacactgcgttgggcaaaactcctgtccccagcactgagcatggcctaagccccatagcagctggcaagggacccaactgccctgcctgcctctagctcccagcattgctactgtgcaggccaagggtactgaagttagtcccactgtcccctgtccatgcatgttggagggaccaggccatcgtggtggggtgggacaggagtatagttgtggccaagggcttgtgagtgggcctcctactccccagcacaggtgcaggaggaactctggaagcactgctctctgtcagtgatacagcttccaaggtgttcttgagtagcagacattgtccctcagaaggggtgaccccacgggcatgcgcaccctgttccagcgggggccttttttgtagatgggcttgacggagccaggagcccagcgcgtcaggtaccggttgagttggggtttgctcttcggaacaactccttcaggaagccgaggcctgtgatttggtaatagacctgctcggtgggccatcttcacacactcctcgatcttgcggtgttcttcctggcataggcctgtgatctttcggggcagcatgcctccatgaggccggatgaactggctaagcagcagaacatcgtcatagttatacttgtgcttcaggttccaacggcagatggggcactggccagaggggttaggaggatttggactctccttgggagtcgctgtgatacggccttcaattatagttgtcttcccttcttgggtctccaccacttccctgaacccgcgagctggaagccgagaccagctggtcgctgccgggcccgctagtagcccacggagaagccgcccacagccggacaccagagccttgagggccgccatcttcaaaaacctaccctccc

SEQ ID NO: 315901 - DNA, 392 bp, Homo Sapiens
  misc_feature (67)..(67): n is a, c, g, or t
  misc_feature (210)..(210): n is a, c, g, or t
  misc_feature (299)..(299): n is a, c, g, or t
gctctggtgtccggctgtgggcggcttctccgtgggctactagcgggcccggcagcgaccagctggntctcggcttccagctcgcgggttcgggaagtggtggagacccaagaagggaagacaactataattgaaggccgtatcacagcgactcccaaggagagtccaaatcctcctaacccctctgggccagtgccccatctgccgttnggaacctgaagcacaagtataactatggacgatgttctgcttgcttagccagtttcatccggcctcatgggagggattgcttgccccgnaaagattcacagggcctattgccagggggaggaacaccgcaagattcgagggagtgttgttgaagatgggccccaccgaggcaggtttttttt

SEQ ID NO: 315902 - DNA, 1022 bp, Homo Sapiens
  misc_feature (1000)..(1000): n is a, c, g, or t
attttccttgagaaaattcctgactttaaaaataacccttatataagtacacgtgattgtgacaaatgacgtaaaaatggcattcatgatgtctgaaacaagcctaaatagaattcaagattagactaaatgattttcacaaagcacattcaagggtttacattctatgattgaaaaaaattttttgaaaactttttatttcattctttcctgtaggattttgctacaaataactttgggaatgaataaagtggaatggtaactttccagtggttcagaattgaattagacttcttgtgactgtgatgtttggtttccattgaaatatatgaagtgagatgtcatatcctgaatatagtttgtcttccccaattacttgatagcatgtctgtcagccagtaaagattaagaacagagtttctctaaattcctccgattattccactaaggcacattaaaatacttaattttgggaaaccagacatcacagatttctccatgaagtcctaaatcttctttaaggtcagaataggtatcttagttactgacagtattcaggtttttttctcccttggtgatatgtcattccatcagtgaaaaaatattttctcccagggataagaaaggtattctggtaatacattatcatcaatccttaaacagtaacagtcttggcacttatcacaaaaccgacccatttcttataaccagaaagattatcttagactgtccttcacattatactttacctactgccttgtaagaataagagttgctcactgtgtttacttgctgtcctccatattctccattgcaccattggtgtataacgttaagagtttcattgaatattattttaagtattacaaaaggcagcttgcttcttaatctatgcatctttggggttttttgaagaaatttaattctttgatgtaaaaagggaactgttaaaaaagttgggaagcctctgcaccctgtgtatatatatattttagcaatnaagcagcatgggctgagaatgc

SEQ ID NO: 315903 - DNA, 744 bp, Homo Sapiens
  misc_feature (27)..(27): n is a, c, g, or t
ctcatttgaaaccacacaggccagccntggatgctttgtgtagcaggagcaaggttcacaccacagccacctgtgcttcattcgggggatccaagcttggcatgtcttggtaaaggcattcatggtgctgcccaggacgccaagcaagcattgaagtcaccagctctgagcctggacacttacaggcacactgtatgttcaagtcagttattctgtctccatctagaaaggcctttggatactcttaacaatactggcaatctatactgagaataaaactgaaggccccagcatcagtcaattgaaaagagcctgcttaattgatgcaaccaaacttgcttcctaaacctgactcagttcaactctcgtatgatttttactatctatagctcaagtcactgtgtctttggatgctccttgtttgggaaaaagtttaacttaggtttatgcctgattatattctaagagaaactgaattcaattctaatgatctccaactccagtagaaacttgttcgccacaggtacttatttccatctgcccaccacatgatgtgtgattctgtctactctatttcttcaagctgtgcaaagggaaggaaatgcagcaggaagtgttgacctagcgcaatactgaaagtttcccccacttgctggcactactgaaccccacattagaagcctgttcactgcctgcaccaggacccccacctttgtgattgcaacaagttggtcagcaggcctg

SEQ ID NO: 315904 - DNA, 889 bp, Homo Sapiens
cttttctccccgccgcattcccggtgtcgacttactagctgcaagcctctgcctgccttcctgcgcgccgttccccgctagtcgctgctgctggcgcgcactcgccgggtttttcctcccacggcctcgagatggtggtgaatgtggcacggaggagccgggccttccaacccggtgggcccgagctccgaaaggccccctcggcagtgagaggggcgggagcccgcgggggccgcgcccttctctcgcttcggactgcgcaacgctgcgctctgggctgacaggcggataaaacggtcccatcaagactgagaaaaagcacaccagctattggcacagcgtgggcagtggggcctacaggatgactgacttagtctacagagatcccggcgtacttaagcagatgaagactcttaagatgacagaaggtgatttttctggtgatcgaggacttccggggtaatgacagtgatgaaatgcaggggacctggttgcccccaagtttcctggcagtgtgtgatactgaggaggtgagcttgtttctggagctgtgctttaaggtaaagttgatcagcttaatcctcctgatccctttcccatcggatctgaacactgggtcttggtggtcgtaaaaggaggaaaagtaatagtgaagctggcctaaatgttgtaatctggtatatggcatgtgggctagtttcagacaggtttcaaaagatggttggatctctgaaattgtaaaatgaagtataatcttacgctaaggggacgatgcctgtgaaagctctggaagttgggatagtaattagctggacctatttactggcttttggggagggatctggtcattaccttcctttgcctccttatttaagggggggtggttttt

SEQ ID NO: 315905 - DNA, 1048 bp, Homo Sapiens
cttggaaatttttttattctccttgccaacatttcttttgacattttattacttaattatgtgacattaagaaataatttggttgcatattattttcaaaaagcagtaagaaagtagctattgagaaagaaggagggccataggtttttcaataaaacgttagaaacattataaaaaacgagactcccattacatggaaacacatgatcaaagatcagactaacacacattcaaacaggcttggttcgaaatagagttctccatttctttcagatgagccttttttcttaggctctttcagaagcacttcacaatgaacagaggtcttgccagctcatttcattagcggagaagcaaaggtatgatggcagaatcatgagaagatggaaataaggcctgaggatatggcttgatctctgagaccaattatctttgagttattcaggcccaggatagaagcttagagaggatcgaggcaaaccatgaagggaagggaatgcaggacaatgcccattactggctttaccacaaactccaaatctcctggacccacttcgcaaggttgtaaagttaaatgaggaaggagcctgcattgtttgtaacataatacaatactttcactttgtcttattttttaaggtgcagctcttcaagaatttcattttttaaaaaatcatctttcacagcacgggcgaactcgctcttctgctgacttactttctactcgggtttctgatcctagtcatgtacttgtctgggctaccggcgctcattaccgtagtataaattgtgaggttgttataaactggaaccaccgacaaaatctggaaaagtgcctccaggctgaggtttgcttgtcctgtagcattaagggccttgatggcagatgttctccggtcatcttccttgggtgctggcttccagtggtcgtaatttgtctcaactcggaaccacgctccattcaaaggatctagaggccaaatgtctgctgggccatctctgttcctcgtgatgaccaccccctcccggggggacgccgccaccaaca

SEQ ID NO: 315906 - DNA, 1036 bp, Homo Sapiens
ggggcactgagggcttgctccacagatgaggagaaggtgggaggtagatacctgaggaccaagcagtcaaggttcttcaagccacaggcgttctcgggaagcaagagccccaggcagcattgaaagttccatgtcctgggaccccaggacagcctggtcacccctgttgcctgaccataccctaaggatgccaggttgagggcctcagaagaaccaggtcatcagggctttgggcgttggcctgggagctggctggctacaaatccccgtggtccacatcgccttctgcccccaggaggccatgacaaggcagccaggctgctgctggactggacagtggtgagggtggccatctaatcactttagacaagagctgcaggtgtaactgactctgctgttctctgggccacctctcccgcagctcaggagtgatgctagagggacggagcactcaggacttcccaccccgccaatttgttaactgtggggaatgacagagctgacgtgacttgctccccattcccagcctgctggtcctcgggctcctacatgaatgttcttgccctgcagcagtgccagcccatattcccaccacagctctcccaggactcctagttcaggttcccaccagtccagggaccacaggactgaagactgggccctgcagagggccgcatccaggtcagttctcaggaagcaataaatagatggaggttgtcttctcttctcagggcagcaactggctctcagcactaaaaacaaggcctcaaacccgcaggggctcagaaaatacctggcaatgcccacctgtgcctgctgatctggaggtaacttggaggcacgtactgcttaaaaacctccagggaggccaaaggagggaaagggtcctgttttttttcaagtgacaaggctcagagagggcaggagatctgcctgagtttgcacagcagctgtgagtgccgagtccaggctgcaggccccaccttgcctcttcccttgggcattccagcctcgtgccgaattcgccacccaggcc

SEQ ID NO: 315907 - DNA, 904 bp, Homo Sapiens
cgatgtggaccacgggatttgtagccagccagctcccaggccaacgcccaaagccctgatgacctggttcttctgaggccctcaacctggcatcttagggtatggtcaggcaacagggtgaccagctgtcctggtttcccaggacatggaactttcaatgctaaaactgggacattacccagcaagtggggatggttggtcccctaccagggagagggcctggggctctttgcttcccgagaacgcctgtggctttgaagaaccttgactgcttggtcctcaggtatcttacctcccaccttctccttcatctgtgggagcaagccaactcagtgccccagaccccaccttgatttgcatcttttgttttgcatcttccagagacacctgagggccccagagtttgaggcaaagccaggccgtccaaatcctgtgtgccgtggacgagtggccactttactactcctaaggctaagatgttgagagctcagaccactgctcagagcagtaatccctgctcagaatgctcccagttccctcgtccctgcccaggtctcttgtctcttgggaaggaactgataggtcgggccattgttgggccatcactgagcgctcagtatctcaagagactctgttcattctgctcgtatcccaaggcctggttggtcaaactctgggcaaagggtgttcaggatgaggaggtcaagacaggatgtccagagctaccgagttcatctgtgggctgttgggggcaagtgggggctgaagtcctgtgcaggctgcgctggacccacttgcttgtgccctggagtggagtttctcttgtggaagaagagggatcttctctgatgtgcacaaacacaatgtatgaccagaggcttgcaactccaaagtgtggcctgtg

SEQ ID NO: 315908 - DNA, 815 bp, Homo Sapiens
ttccgtgaccatggaattttgcggcaaccaaaaattatgttttaattggggagaaacaggggagaattgcatatttggataatttcactgcagttctgcatcaatcatctcgtatattcccaaaatttcggtcttaaggccgtttagtattttaactttccggaagaaaggggggttatcttagatactttttaatatcgtaaggtattttccaattcacgatacagggagaaaagaaatgtgtccaggcccttagaagaaaatactttgaatttaaatgtgacacatacattaaacccgcgtgacacgccaggcaggcggtggaagtcaagtgcatttgtttttgtttcatccaccagggcgatctctttcacaattctgggagaggcctgtttgttcctccactcccacagctgaagtttgggacaaagtttgagaaaatcccaggcacctgcggctcctatcgaagccggcgaggagcacagggtagagcgtctcttcccagttttcagtcttcagatcgcaggcctctcggacccgcagagcgagcttcacgctgcagcgcttgagaaataagagctattccaaggaggggccctgggtcctcactgacgcttcgcaaaggtgtacgtccgcccagggaaggccggcggcgcagcgacggcgaggagtccccatccatcttctcttcaagcagcagtagctgggttcgggtacccaaccgacgagccgagacgccagaggccagagtacgaagttggaagcctgcgccccaagccaaccgggattccacttagctccgcgcggtccgcccc

SEQ ID NO: 315909 - DNA, 1319 bp, Homo Sapiens
cccattttctaaagaaatatatctttattgaccttttccattttcttacaaagcagttaaaaactcattcttacccttgcatgctattcaatggttatgatggctgcctccttatgagactgttagtggagctctagtaagtttccttaagcaccacagaagatcatcattgcttggtcccacttttataggaaagaatccaagtttcaccagatagtgtatacttagctctcttgaagaagaccagtttagtggattaatgtctaatttacatatagtaataaagacaaactttgaatctttacatattaaatgcccactttataccatggtgtaattgtttgaattatgggtgagtgtacagtatagagatgtagatgcactagatatatctataaataaaatagtgctttaaggtaacaatattctttggctgacttaaatgcctgtggttgactcttagaaaagactaaaatgaaaatggccccactattattgtcaatcttaacacagagcttgtgcggaaggtccctatactgctgactgtcagcatctccaggtccacgatatgttctcttggtcctgataatgacttcacgagcacaagcattgcacttacaggacttgtttgtcgtaggtagaactctccattttcatttccagatttaatccgaaaagtattgatggtgttggcataaatagttgtggcctgtatctggaagatgtctgatggcacagacctatcagatcggatgctcatgtatttgtagactattgactggggcagttctcggcacatggcatttgagactgggcaaacacatcggttctctggtgttagaatgtagggatcttgacaaggatttcgtggataacaacggaagccgccatgataattccaacacatttcatcctcccggcattcatttgtggtctcacactcatttatatcttgacatgttctacttctcaccacttggtatccctgggggcacatacatgagaatttcccaggttcattgacacattgatattgacacaggtagcttgaggttctgcattcatcaatgtcttcacagttgagcctgtcactgcttagctcatatccttgattgcactgacagatgaatgaaccaagaatgttgtagcactgctgagcacattgattgctggcatcacattcatttatatctacgcaggtatagttgtttgctgccaattgaaacccaggactgcactggcaataaaatgagcctggtgtattcacgcatctttggtggcaatatggagggatggtacattcatctatgtcttacgac

SEQ ID NO: 315910 - DNA, 660 bp, Homo Sapiens
  misc_feature (48)..(48): n is a, c, g, or t
  misc_feature (71)..(71): n is a, c, g, or t
ccagcaccagaaaagctcaagggaagagacatgggcacagcaaggcanaacgtgatcaccacagctccgcntgcagtgacacaacatactcagcatcttcatgaattctaaatcagaaaatagtcaatagttaatccatgactcttcagggtatttcccttcacgtcctctgaagagtttccccagaacattcttgtgaaaaggaatgccctccccaacaatggagagcaacaatagcaacaggcatctgaatcagccctggcctctgaaaacagaccaaagaggagtttatctgctttcttccagtgaagaaagaaaatcaagaacgtggtattggccgagggaaagtgaatgagggaaggtaagtaaaggacccaggccagtctgtggcaaaggaagcacttaggaaatgactgcagtgatctctagtgagcagtaaaattccactccaacgttaggccatggatgcaggaacctatctgccatcatatttaattaagatggagtgttacgcacctaataaagaaggtgaagttctaggtagcattttaaattcataagaagtctagaagaccaagaagaaaagagataaggtagctaggatttcaagcagcactaagcaaaacttaaaattgtatcgtgcagtaaagctgaatgtac

SEQ ID NO: 315911 - DNA, 689 bp, Homo Sapiens
  misc_feature (43)..(63): n is a, c, g, or t
  misc_feature (303)..(507): n is a, c, g, or t
  misc_feature (671)..(671): n is a, c, g, or t
aaatatacacaatttttatttgtcataccttaacaaagctggnnnnnnnnnnnnnnnnnnnnnggagccagtgggaagcctgttcagaaggagctctgcttcctgcaggctgccacctggagaaacacttcttcccaggatgggcttggtatgtcttcatttcaggccacgctgcctctgtccagattaacagatgttttctcttgcacttcatccctcccccacagtttccaggtagaggcttttttcaagccacaggatcgattcgtcgtggaaggaatcaatactggtgtttttcgggcnnnnnnnnnnnnnnnnnnnnnnnnnnnnnnnnnnnnnnnnnnnnnnnnnnnnnnnnnnnnnnnnnnnnnnnnnnnnnnnnnnnnnnnnnnnnnnnnnnnnnnnnnnnnnnnnnnnnnnnnnnnnnnnnnnnnnnnnnnnnnnnnnnnnnnnnnnnnnnnnnnnnnnnnnnnnnnnnnnnnnnnnnnnnnnnnnnnnnnnnnnnnnagggggggccaacccacattaattgggtggccctacatgccccttttcagtcgggaaacccggcggggcaccttgattaaatgaatcgcccaaccgcggggagagagccgtttgggtattggggctttttccgcttcccggtcactgactccgtgggctcgggnggttcggttgggggaggg

SEQ ID NO: 315912 - DNA, 1425 bp, Homo Sapiens
attcttgaaatagacttttctttaagacaaaagtaatgacatttggttcattttcacaaattgcacactgggtgagatcatacaattactgcagggaactgtaggcaagcaatttggtcataggaatttgtttctttgtcttgttttaaatgaaaaagctatatgaaatgcatagctttgattaacctaaagatacagtttccttctttgtaaaactccagatttagggatgctgggcaaaggcagtgctggcaaagtatttaatgcacatggaaatgctattctattttggcttccagaagtagccctagtaaattctatgcaccaatgcattggctaataataatttcagttttactataaattatctaaatgtcacttaagtacttaagaagtagcgctcgctcctttctagaagctgtctaaggcagctgatgcgtaaagcacctcatctagacctccaactagttcagcagttcaatctgtgcccctcagccacaggactgccctcagtatccctcactacacagctcccctctcctggggacttttcatgttcatttctgccttgtcaaaggcagtccaggcaaggaagagaaacgtcagaaacacgatcgtcaaggactgctccgtgtagcaatctcaattctaagaataattacatgggtgtgaggaacacaaaaatcccacctcacagaagataaatgagttgcactcacactgccaactcttcagggattatccccactatctcctcagaaagcatgctttctttgttatatcatctactgctctgttggccagactttcattcacactatgttaactttcatctcaatcatctcagccttcatgtgatttgcttattgtgtttctctagttttcactgaacacacagtgcaaacaaaggcaaagactgaagcaatcatttcaaaaacaagagctcacactacaaacacacatgagcatcacatattgaaacgtaggctttctcttgtctttattctggggaggaggaatcctcctcatcatcttcctcatcttcatcattgaacgaacagggggtctcgcctcgggactcggagcagtgagaggccgcactgctggactggtgactgtttggggccaggaactgcccagttgctaaggccacttctgcatccaagcataacccttggtttacacttgactggggtaaggtggcaccagtggtcaggtctaaatttgaaactgattgggtagagttcagaagtagtccctgatttaaccaagaaggtcctgtggagatatctgtgatataaccttctaaagcctttggcaccagggatttcgcaagtttcagatcctccagagagcatttgcctgactccaggccaaacgacattcccatccgctttagtacttctatgtcatcatggatctcaa

SEQ ID NO: 315913 - DNA, 1138 bp, Homo Sapiens
  misc_feature (66)..(88): n is a, c, g, or t
  misc_feature (739)..(739): n is a, c, g, or t
  misc_feature (808)..(831): n is a, c, g, or t
  misc_feature (1080)..(1080): n is a, c, g, or t
gagagaaaaaataattgatttttacatcagagatagcaaactaagacctggggaggggggtcagcnnnnnnnnnnnnnnnnnnnnnnnaagtttgctagttgggtcaaatgtgaggaggagggagtctacctgccacctcttctcttgcccctcttctgcccacacatccagcatccaaaatccattcatttaatgaattgataaagtgccgtgcaaactggtgcacaaacaggcccccagtccacgcagcctggctcctaggaaaagtggtgaccgggcgtgggggggcatgccgcagccctgggacacagtcgggcaccttccccggacccccaggccttggctgtgcctcaagtcagagagggtcagccttcaggccccggagacgagtgactggccgatcatttcacaataaaatcactcacttttggcaacttcactttttttaaggcacagtcagttccttttctcatgtacctcacaaaagatgaagaccatgtagtactctttttggtaaagttacagtgttcatgttaaatatcacttttttctacattgtgtggtaaaaagaactacgttaatagctatatcttaaatactgtgatttgactttttgaaaaatatcctaatacaaatattttactaacttacaatcactcatttaataagaaacatttggattcttttgaaatcagtgttaattgactcatattcttaaaagccttgctcttgaccctnattggaaacacaaaggaagctgaaatcaaacatctaaaatacactgcgtacacgtgtgcgtgcaccacnnnnnnnnnnnnnnnnnnnnnnnngctcttcatttctcctgagccatgcagaatttactttcaatgtggaaatctgttcccttgtaccacactgtatatgcacagtggcacaagtggggctattctctagtcacttccaccagcgaggccttagactccgtattagaggccaccgatttcatacaacagtgtttcgctaaagacccttcactattcttgtttaggtaaatagctgttctgctctttcaggggaactgtttacctatggggttnatttacccaaaggaacggctgggccaattgggggaaatgttcctggatggggaaattt

SEQ ID NO: 315914 - DNA, 1181 bp, Homo Sapiens
  misc_feature (184)..(192): n is a, c, g, or t
  misc_feature (1002)..(1021): n is a, c, g, or t
  misc_feature (1024)..(1024): n is a, c, g, or t
aaaattttaaaaaatagtttattttttaaaaccattaaggcaaaactgtaccctgaaattaactctgtacattcatcagtcttacagtaggacatcccaaacacagaagttcccatatattcaggatataaatcaatacatgtggtcagttcagtctcctaataggaaaacgaagacccaagannnnnnnnnaaaattaaggttattttatagccattttctaattgcctgggaaccaatcagttcatgtgactagaaaaattactttcgctcttctctgcacatccttgattccggaggtcctgggatgcccgctccccccaccagggagagagggtatgaagttggagagaggatgctggggcctgtgtggcagttcctactttgggaactgcacctttttagcacaaataagaagctgtaagccccaaaatactgagagtataaggcactcactagtagagcacatgtggagagtctgggcccagtccttgctctgggatctgcctcattctcgcgtgtgtttctgtcaaccctctctcttagggttttagcctaatggcattatgaatcccagagggtgtaaccaatatgcaccaagaagttttgccaagttattggaaacaaggtatggggagactcacggggtctgtggtttctgctttctgctttgggttgggccacctggaggatgccagagaaccggcacgtgcaaagaatttccatcaggacatttccaattgccagcgttctttggtaataacccataggtaacagttccctgaagagcagacagcctatttactaaacaagaatagtgaagggtctttagcgaaacactgttgtatgaaatcggtggcctctaatacggagtctaaggcctcgctggtggaagtgactagagatagcctctcttgtgctctgtgcatatacagtgtggtaaagggaacagatttccacattgaaagtaaattctgcatggctcaggagaaatgaagagcnnnnnnnnnnnnnnnnnnnngtngtgcacgcacacgtgtacgcagtgtattttagatgtttgatttcagcttcctttgtgtttccaatagggtcaagagccaggcttttaagaatatgagtcaattaacactgatttcaaaagaatccaaatgtttcttattaaatgagtgattgtaagt

SEQ ID NO: 315915 - DNA, 1313 bp, Homo Sapiens
  misc_feature (434)..(434): n is a, c, g, or t
gattttcggaaatagagccagtggcagacttttttgttacacgaacatacacgagtgagcataaagctgttgctttctctacgatgctacaaaagaaattcctttggtttttatattttaagaaaaagcaagctgcttttagatatgtgggggcaaatttttaatcttgcagtaatattaaacaggaatatccaatttaaaatgatgtaaagatgtaataaaattccttttcattgtaaaatagtaattaagtcaatttacacagacctttgtatttaatatgtctccctatttgtatagaatttcagatgggtctagatgagaaccctatgcataagcttggatcttgatgaaaggttaccaggatcaggatcaaaaattgggaaatactaagctcttgaagatatttttctgatataattagattgaaaagnggcaattttggaaaatgctgtgttctccagaagtacagggtgcattatttgacatccaattcccttaaagaaagttatgagttgttccccccaaacagattttaaaaacagcaaaataaaagcactttaagatataattttacctgagtttaacttcacagaattatctttttaatgcttggagacatattgaataaactgtagtcttaaatcatgtgatctgcaatcgtttgcttttgcttaaaacataattactgaaacccttggtattggttgtatatgaagttaactatttgagttggtacacactgcttgtgagtttcatagttattgtaatgcagagaaggaatttgagaatttgtttctcctcaacatgactaattaacactgaaaagtcagtcaaggtttaagatttattttcccagaaataaatataaagcaattgaataaccatccatttagtcgtatttccaaagtataactatcttcagctcctttccctcacttttaacaggatattgtccacacaacatagggctcttctttactccagttcctttttggttttccaatgttccccacggctgaggagcagctctccacttgcatagccttgctgtcggtgactgaggtagaataaatggtagggctggaagaggtggtaaaggagctgcaagcaccgcccatggaggaagaggagggagctgaagaagcatcagcagcaacaacagctggaggaggcgagcctgcctcaccaccgcttgtctgactcattgatgctacagatgtttctctagatggaggtaactgtaactcctttgggagaagatcatagacagattctcgcgagtagagggacttgggcgattccaggtctag

SEQ ID NO: 315916 - DNA, 449 bp, Homo Sapiens
caaaggaaaagaaggcagccttcacagtagaataacctgaagtagtcagtgaaacaaaagatctgagggaggaggtgtaagaactgaagagttgagatactaaagactttacaaaaagaaacccgacattaaaaaggaaatgagaataggaactaattttgtactttataatgcagaatattattaaaatgttccactaagagactgcggaagtagaactgctaaataaaaatgcagacaacgctttggttttgagcataatgctgaaccaattatttcacctttcagtttaaattcctcacatgtaaatggaaaaattaacatctatccctcagtgttcttttgtggaatcaatgtgttactatattaaataaaatgtcttggcctggcgtggtggctctgagtactttaagagcattattttctttattcctcgtgccgaatcctgc

SEQ ID NO: 315917 - DNA, 685 bp, Homo Sapiens
aagagttaaatgaattagtttattgaacttggagatggacactccttataagggcaatacccaacaaaaatagatataggtttgagttataacacacaagaataaaattagatgtaaagacgactttcctcagttttaaggtggataagtgggttgttaaattataacagatttctctaggagggtctggtgtactccaggctcgctgggaggcagacctggataatctctgagtatatctgtccccacctggcattgttgagacccttcagagtacttctttaggtccatgattgaaaattaagaggcagccagtgcctccattgttataagggccataaggtttggttatctttgataaagagaaatggaaacatataacagagctcttcctcaagtcctgcattgggaacattagcacacaccaggacctttcctatatgtagacacagtgcagatttgatctgtggtgcagccaaactaaaacacaggtcatggcattgtttccccacttttggtacaaacaagcccttaatcgagtctctaatctagggacagtaacatcggctatttgagtgcaggcaccctaggttgttaatgtctgtttcccaacactattccattccaatatttttctttacctaaagtgggataatgatcataaaaaaccacacactaattttcc

SEQ ID NO: 315918 - DNA, 620 bp, Homo Sapiens
ctggaatttattctacatccacaaaaatgtaaatatgtgcagaagaaggaaataaacttctaggaaagctctaagtctgagcatggcctgaagcaaacactaagaacatatgcttaacttctgacctctgccatgggccttgcttattcagttagaacgcccacctcccatttgatttctgtaccatgtctttcgtgactgcaagacagctgcagtgttgcaggagactgctactctgccatggccccatgacaggcccagaacctctccccagtcactccctccacctcctttacagtgattcggaatgtcaagtttaagatcctggatgcggtggttgcccaggagcccctgcaccggggcgggggccagatcatccccacagccaggagagtcgtctactctgccttcctcatggctactcctcgtctgatggagccttactactttgtagaggtccaggcccctgcagattgcgtctctgcagtttataccgtcctggccaggcgcagggggcacgtgactcaggatgcacccatcccaggctcccctctgtacaccatcgcttttatacggccatcgactcttttgctttgagactgatctccggactcacaccc

SEQ ID NO: 315919 - DNA, 1854 bp, Homo Sapiens
ggcagtgaagcctcttggggagatgacatatattcagaatgtaagcaccagacggggcaggggagacgaggatgaaaggagcagagcaagacagaggtcagaatgttctgttcacttgcaaaccatggctaaggtcaaacttgtagaaaataaaattccatgtaaatcccaaagatagggccccttggggtttcatccccttctctttctgtgagcccaagctcctctcttttccttgggaatggagcccggcagaggccacagaaggaagcaggaggccaaatgctcctctctcactggggctctgggttggaggttggtgagttgttcaagatggcaacagcagcttccagacactctctgacaacacgaaggccacgtcatatgaggtctcagcttcaagtacaggagttgcagcccactgtagggagcaggagctcccaggagtccacgcactcacatggggtaattgagcacaacatcctgtttggcaagttccagcaacataggatcatcgaagaatttgctgatgctcacatcttcactgaggcccttcctacggcgggttttgatcatgaattcccgggccaggtgaggagctggctgtggctccaaggggcggatgacaatgctcttgtccaggggatcaccaggcacaatctgccagtggtggaagacagacagagaaaaggcttgtccctgggtgtgagtccggagatcagtctcaaagccaaaagagtcgatggccgggataaaagctttgatggtgtacagaggggagcctgggatgggtgcatcctgagtcacgtgccccctgcgcctggccaggacggtataaactgcagagacgcaatctgcaggggcctggacctctacaaagtagtaaggctccatcagacgaggagtagccatgaggaaggcagagtagacgactctcctggctgtggggatgatctggcccccgccccggtgcaggggctcctgggcaaccaccgcatccaggatcttaaacttgacattccgaatcaattcatcacagagggggccctccctggttccccactggaaaccttgaacgatgctgtccttcactgaaccaagaagagccttgtccacctcagagggcagagtatcatccaccagaatgttggggccagtcgcatcagggccaaaagcccagatggaacgggcagccagcagatcccaatcgtacttggtctggaagaactctcccagcttcttcctgttccacgtaatctggaccacctcattctctatgtcctctgccaggcccttctcaagaggctcagcaatcatggtgatcttgttcttcttattaggcgtttcagcaaagcacttgagggaggatgtttccaccaccgtctcacaaaacgtgacaactgggtcagccaccttgatgtctatctctgagtacatcttccgcaaatcatgcatcacacagtccaggtagagctccccagtgcccaggatcacatgctcgccagactcctccaccttggtggtgagggatggatagctcttgttgaccttgcgcaggccatcaagcatcttgggcagctctgaggggttgactggctccacagcaatcttgataacagatgtggtattgaacttcaagggtcggaaaatctgagcctcctcattgcctcggggttcggttatggttgctgtcttcacaattggttgatcaacaccttcaatcagaacccagttgccagcaggaacacggttcacctcgatgtggtacctggccacagagatccaaaggcggcccacggtgcatatctgggagtcttcctcatcctccagggtgtagttctcccccagtacccc

SEQ ID NO: 315920 - DNA, 770 bp, Homo Sapiens
  misc_feature (619)..(664): n is a, c, g, or t
gcaatcctcctgcattggcttcttaaattactggcatgagccaccatgccttactttggctagtcctatattctctagaattctctttactttgtgctagccaatctctcatgctgttcccctgttataatgaataattatctatattaaattttagcactttgggcttttgagtggtttatgtctcctgattggaccctgactaatacagagttgatgctgggaagggtcccaggagacagacccacacagatgggatttggggatcagtttggttatcttaggggccgtgctgagctccttgcaatgggaaatgggatgctgttgatttccaggaagtgacctcacaatgactcaagctaccacttagtgttgattgtgatgaaatgccagctgtggcatatgccttgggagctaaagtggctgctgcacttgaccactatgaagactggtgtggaagggtccttctggatgtacttgggcagggtccccaacgccagagccatggaactgtaaggagccacacagccggaggtgaatggtgttgaatgagggaagcttcatctgtgtttacagccactccccattgctcacattcctgcctgagctctgccttctnnnnnnnnnnnnnnnnnnnnnnnnnnnnnnnnnnnnnnnnnnnnnnttgtgaaccatgcatgtgagggatctacgttgcgctgtccctatgagaatctaatgcctgatgctctgtcactttctccaatattatcttccagctcatgccgaat

SEQ ID NO: 315921 - DNA, 1794 bp, Homo Sapiens
  misc_feature (158)..(159): n is a, c, g, or t
  misc_feature (511)..(511): n is a, c, g, or t
  misc_feature (514)..(514): n is a, c, g, or t
  misc_feature (516)..(516): n is a, c, g, or t
  misc_feature (528)..(528): n is a, c, g, or t
  misc_feature (538)..(538): n is a, c, g, or t
  misc_feature (541)..(541): n is a, c, g, or t
  misc_feature (559)..(559): n is a, c, g, or t
  misc_feature (563)..(563): n is a, c, g, or t
  misc_feature (580)..(580): n is a, c, g, or t
  misc_feature (583)..(583): n is a, c, g, or t
  misc_feature (671)..(671): n is a, c, g, or t
  misc_feature (724)..(725): n is a, c, g, or t
  misc_feature (727)..(733): n is a, c, g, or t
  misc_feature (738)..(738): n is a, c, g, or t
  misc_feature (748)..(748): n is a, c, g, or t
  misc_feature (750)..(750): n is a, c, g, or t
  misc_feature (753)..(753): n is a, c, g, or t
  misc_feature (759)..(759): n is a, c, g, or t
  misc_feature (763)..(763): n is a, c, g, or t
  misc_feature (771)..(771): n is a, c, g, or t
  misc_feature (794)..(794): n is a, c, g, or t
cccgggggatgctgggctcagtgaagatggaggcccatgacctggccgagtggagctactacccggaggcgggcgaggtctactcgccggtgaccccagtgcccaccatggcccccctcaactcctacatgaccctgaatcctctaagctctccctanncccctggggggctccctgcctccccactgccctcaggacccctggcacccccagcacctgcagcccccctggggcccactttcccaggcctgggtgtcagcggtggcagcagcagctccgggtacggggccccgggtcctgggctggtgcacgggaaggagatgccgaagggtatcggcggcccctggcacacgccaagccaccgtattcctatatctcactcatcaccatggccatccagcaggcgccgggcaagatgctgaccttgagtgaaatctaccagtggatcatggacctcttcccttactaccgggagaatcagcagcgctggcagaactccattcgccactcnctntntttcaacgactncttcgtcaangtngcgcgttccccagacaancctngcaagggctcctactgngcnctacaccccagctctagggaacatgtttgagaatggctgctacctgcgccgccagaaacgcttcaagctggaggagaaggtgaaaaangggggcagcggggctgcaccaccaccaggaacgggacagggtctgctgcctcnncnnnnnnntttgnggccacagtnanctncccgcnccanccccgccnccagcccctgagcctgaggccangggcggggaagatgtgggggctctggactgtggctcacccgcttcctccacaccctatttcactggcctggagctcccaggggagctgaagctggacgcgccctacaacttcaaccaccctttctccatcaacaacctaatgtcagaacagacaccagcacctcccaaactggacgtggggtttgggggctacggggctgaaggtggggagcctggagtctactaccagggcctctattcccgctctttgcttaatgcatcctagcaggggttgggaacatggtggtgggtatggctggagctcacaccacgaagctcttggggcctgatccttctggtgacacttcacttgtcccattggttaacatctgggtgggtctattacttactgtgatgactgctgtctcagtgggcatggtgttgatccacggggtactgtgataaccaccatggatacattttggtggcccactgggtactgtgaggactgctacattgatggatgttattggctaatccactgcatggtttgatggccaccatctcggttggccctttgggtgtgatggtgatagcatttcagtgacatcttctttggccccccccattaggtgctgtgcccacttcttttttggtgtacttggcacagtaggtgccaagttggccaccattctgtgtaacaccttttttggcccattgggtgctttgatggacatcatactgggtaggtgacaacgtcagtgggccaccatgtgccatgatggctgctgcagccccgtgttggccatgtcgtcaccattctctctggcatgggttgggtaggggatggaggtgagaatactccttggttttctctgaagcccaccctttcccccaactctggtccaggagaaaccagaaaaggctggttagggtgtggggaatttctactgaagtctgattctttcccgggaagcggggtactggctgtgtttaatcattaaaggtaccgtgtccgcca

SEQ ID NO: 315922 - DNA, 686 bp, Homo Sapiens
  misc_feature (40)..(40): n is a, c, g, or t
gctcacctcccagtgagggtctgggctgtgagggccaggntggcaggcaggggtggggcaaggaccctggagtcaggacttccccaccttttggcttacagtggcagcaggcccacctggcagtctccagggctctgagggtcccctccgatgggagcaccttccattcccagatcccaagttagaccaggggcttccgaagctggaaatctgctctctggaggcaaggctgcccaaacagcctctgttacagagtggggcgcacctcagacactcctcgggatgtagaaccagcattcttgctgctgagccactgccttgcattaggcagcagtggaggaaggggacggaggagagagaattgggaggcagaagggctgggtgtgggcctgggtcctcaggggacgtcttgacccccagctgctggcacttctccatcctcctgccatcactggagcagacatcagggacgagacaagatgccacctcctgccaccacagggcctgctctctcccccaccccgcgccagaatacttgtccccctgcttggcagttgccctgggctctctgagtccagagaggtgggccctgctttgcagggggacagttcctcaggtcaccacttgctggatacagctgatcacacctgtgatgcgggtgtacacgccgaagtagttagcccggc

SEQ ID NO: 315923 - DNA, 1059 bp, Homo Sapiens
  misc_feature (103)..(111): n is a, c, g, or t
  misc_feature (215)..(223): n is a, c, g, or t
  misc_feature (454)..(472): n is a, c, g, or t
ggatctaggggtgaatggtcggcttgggggtgaaaagcacagtttcccctttctgaaaaagaagagtgtgggaaggctttctcaatttccggccaaaacaaannnnnnnnngctggggagccgggggggttttgttttttgtgccaagccagcccggtttttcttgccaggaaaaaagaagggatcttccaggaaggttcccttgggatccaccnnnnnnnnngccccgcccctttaggcgggggtaaaatttcccgggttctggcagccgagttccattaaaggcagggttaaccggggcttattgggaaatttaattcgggctccattataggggggcccggcaagattctaccccctttgttccaagaaaagctgggtccaggaaacaactatggcccatgtgccatttcattacctctttctcccgcacccgaacatagatgcctcgagnnnnnnnnnnnnnnnnnnngaatgaggaagctctcttcatttatttcatatgaggatgaagaagaggattatgtgatcacaggaatgttgcatgcgggataatccaaagctggttatctccaggccctcactctgccaagagatctctctggaagaagcagccagttcacagatgccctggatccctccgtgcccaatcataaaaaagtcatgaccgtccctatcttgccaatctgccaggactccaaggggaaaaagcggataagtatccggtcctggcccagggctagctccttggtgagaaactcaaagaagtgggcgctgtggctgcggttgtcctcggcggtgcccactacgccgatggaggagatggacagctgcgcgcagggctcggtggacccgctcagcgccatggccaggcccggccgtaccgtcacgttcacgcggtccgcaggtttgcccaggatggaggcagcggcggcgcagagtcgtttctccagccccgcgggcactcggttggcgggcaaattcgtgtccagctccaggaacggcatggcgggcagaggcctcgtgccgaattcgccacccaggctcgctacttagacc

SEQ ID NO: 315924 - DNA, 651 bp, Homo Sapiens
  misc_feature (552)..(593): n is a, c, g, or t
atagaggctttagaaatttattacaaggccctcatagtagaaataaaaatatagatatctatgcttcccatctcgctctcagtggttcgaataacaagtgcaagtaacaaaatagattgtctctataattcgcaaactgggagttcatgggtacagagcaacttcagccccagctcccaagtcccaaagtgtggtcttgtcgagggtgcagacaaggaccaaccaagttcaaccaagtctctcgtatgcagacgccagctccagtctcaaggagggtggggcttgcagtcagtctcactccacccccgagtggacagtctggaccctccgtgatggggaaggcggcagcgtgccccgccactccggcttctgctccatcccaaggcctcagcttcgggggtcctgtctcctgctggcctgggtccccccttctccatcggatcggcggccgccagctcctggatctcctccctgggggcggccgctcactccccttctcctcctcctcttcctcttcagtctccaacgactctgcccccgatggtcctcgtnnnnnnnnnnnnnnnnnnnnnnnnnnnnnnnnnnnnnnnnnnttcaaatatttattgtattttttgtttgtggcagcaactcaacagattctgctgctgg

SEQ ID NO: 315925 - DNA, 1180 bp, Homo Sapiens
tgagttatggccccaggaatagattagatctggacataggacaaggtgacatcacactggatttccaatgtgtccaccctctggaaggccgagaggcgatgggcaaagtcaaagaggtgctggccattggcgtaaacattgaagcgatccaagccacagcgaatggacagatcaaagacctgtccgggaccaaatgggttgtgggtgatcttcttctcctcggatccccacgagccattcagaaggctgttccggaccacggtaccgttgcccatgcggggattaatgtgcagagctatgtcccctgaggagcccaccttgaagttgatagcaaagctcttgcctgtgggaggcacatagcccttgatgatgatggttcttcgagctgtgagccctccttgcagcctcccgaaatatggcacaggcgggttgaaggttgggggtccttccatggtgggcaggctgttcagctgttgatggcaatgtccgggaccagggtaaggtggcatcatcgggggtccctggggccggaggggctggcctccgatgaagttgattgattgaagttgcagatccccatccacttgcaggtgggtgaccatctgtaggggaagccggtgcccgtactcatagaagggatttccatttaccaccaccttgtagtgctcagccaggactatgaagaccagctcaaaggcggcaccctttttgaagggcatgctcctcttcctctcctcgctgccccacttcccgccctgcaacgtgttgaagaccaccttgtcccggccgtcaaaccgcggattgaagtggaaggcgacgtctgagcccggatcctgcccaaccacaaagttcacgaagaaccgcttcatgtgctcgctggccactccttggatgtaaacagacattcccacgttgagcccgcccgggatgggctggtagtaaggcagcgtcgggttgtaggtgggctggtagcccggtgcggggacataggccatcgctcgaggctgcgctagtggctggtcctgtgagaagagctgcaggagtgggagatggtggcggatggcaggcggtggtggctcttatacacagggtaagggagtggctggcaggggagggtccacagggctcctcttctgggactctcaggctgtcggcttctcatagagcgcaccatagtctt

SEQ ID NO: 315926 - DNA, 251 bp, Homo Sapiens
  misc_feature (1)..(1): n is a, c, g, or t
nttacaggggtgagccaccgcaccccgcccaagtactacacagatttttatctcctcttattcccactgattcttcttacccccatctcacagatgaggaaattgagtcttggagagagtagggactggtgggaggccccacagctcagaaggaactgtgcagaactgaaatctgcctctgggtgtgagctagaaagaagtgggtgagtagagacttctgtgtgagcaggtcatttgagcaaggctcgtgc

SEQ ID NO: 315927 - DNA, 863 bp, Homo Sapiens
  misc_feature (95)..(155): n is a, c, g, or t
atctgaatgtctgctgaacaaaagaatcactttcaatagcttcaatttcttttactctttttacttgttctaccagggtggcttggtcttcctcnnnnnnnnnnnnnnnnnnnnnnnnnnnnnnnnnnnnnnnnnnnnnnnnnnnnnnnnnnnnngcagcagcttcaagaaccagctgtagtctggctttggcctgttcagctggtggcagatgttctaatccagctttgatgtttccagattccccacgtttgatgttatgtaattccttgtccttccctttatccttctcctttctcttttctctttatctctgcccttacgtcgttctctatcccgagaccgactacgcgttcttctgtgactggacctttcactgctacgactatgagaacggagacgaggtcttgacctggaccttcttgttctgctttttgacctagacctctgaactctataggatttccctcgaccccttgaacgacttcgacttcgtttccttctggagccataagaagagctactgcttgatcgatgcctgcgtcttctatcataagaatgtgaacgaggctgaagatctctggaccaagatcttgactttgatcttgatttccttcctcctttctttcggctgtatgttctactatctgaagaactgctcgaggaggaccgtctacggtgtttcttttttctcttgcttctgctttcttcttcagtatctgatgaccgacgtcccatttctttgggctcacacctcccgttgacgtgcaagcgccgcagtccctgagtcgtttctttagatcagggcgccgccggcgtccaccgaacttgcttcagtttaagctcagcgccttcctggttct

SEQ ID NO: 315928 - DNA, 1364 bp, Homo Sapiens
  misc_feature (1132)..(1144): n is a, c, g, or t
tttcggttgaaaagagctttttattactaaaaaacccacaaggtgctgtctcactcatttccagttaatcatttctaaagagaaaatttacattttgtttttgttttaatgttggtcataaatttatacagttgttttttgatagaggtaagaattagactcgatgcatttttgttagaattgctgtttaaatgttaacatcagaatgcaaattaaatataaattgctttaacctttgttacaggtatactggactttctgaaaggaaaaccaggtctcattaatgctagttattactttatcacagcaccagatttccattttatttatgggtcctctctgggacaccactgtcggtttaataaaacaataaataattcattgcacagatccgaagacctcaggaaccagatcacaagggaaaccgattagcagcagaatttgttcatgtttggtggcagactggtggccaactggagggaggggagttttactgtgggtttttgaagaggtctcgtcacaagaccagagatgcctcttgaagagatttttaggttgtaggtttgcttactctaaagaacatcttgcccagaagtctgatttgagatgaaatgaagagaaacagtctgcttttgaaccaagtaaggtattcttgggaataatttttagagccatgagaaatctattcttacaggggtgcttttcaggcaaatgcagaaaatttaaaagagtctagaacaaaaaagtgacaatgtcacaaccttgctggaatctcaggaaaaagaattaaagatggcagctgctgtgaaaagctgtgtgactcctggcggagactgcagggacaaggtcatctttcacaaaaaatggaaaggtggcctagatgaggaggacacagactctccagaagttatgcaaacaaaatcaggcaagatgaagaattttaaggcacacctccattggcccacagagagtgttcttcatatgacaatgatgttaaacaccatctgtcacgtaccaggccatgtcctaagtattttaaatatgttaacacatctacaaagaggaaactattagaatctgtaggacctcttaagcccaaagggtctactgcaggcaggatgggcgttacagnnnnnnnnnnnnnctctcattccaaattgctcctaagatggacaaattggttacttctccagaaggtctaatcaaggttaacaaaataggtaagttcgtggagttagaatgcatcttccctggagttcagaggtatttgggatgaccaaaggagtctgctggacagtatgtgtgttttacaaaatggcccccacagtgattaaagaccagagacttatatctctgcatttgtc

SEQ ID NO: 315929 - DNA, 464 bp, Homo Sapiens
ctaacccctaaactttcaacttttttctaagggaaagtcctcaaaactgtgtcccttccccactctcggcattttccataaatgctggtcatgggacccttatcaatcctaatcattcttcaaaataataatgacctcagaagagcaaaattttctaaagatgggggagaggcatcgacgatacctcccaggtgcccagcgactccctggaggcggtggtcctggcagttccagtccagatctaaaaattctcaacaggacaatttatctaccaggtggacagagagagaaagtgtttccaggtccatatattcttgacaaactaccataatcaacgctgccttcccagctggactgaggttggtaagttggttttgaaggctaaaacaaaaattttagatgttgaaaaaactaccttacatacgaaaggagacttaacaacctaaaccattgtaaaaaataac

SEQ ID NO: 315930 - DNA, 594 bp, Homo Sapiens
  misc_feature (151)..(159): n is a, c, g, or t
  misc_feature (164)..(164): n is a, c, g, or t
ggaaaagggcaacgccggcccgaatagcccacctggcaaaggggtatgtcttcaagcctaattggggacagcaggttttttcccgtcacggctttgtaaaccacggccattcaatgtaaacccctccttataggcaaattcgggaccgggnnnnnnnnnagttncgagatggaaaataggatttattgggggaaccgtacaagcagaggagaagcaggggtgcccaggctgtcacagccttgcagtgcatggtgggttccgtggccaacttgccaggggacaggcctgttgctggcactccccccacaattacagggtgggagtgaaggacctcgcggctgcggacaggtccttgttagtaaggaggaggctctgcagtcccggtggggtcatcttgcctctccggactgctccctctgactggtgaagccacactctgtgaagctgtctgacagaaggggacacgcctttgctgcccaggatggacctgggccacccaggatgccgctggcctcagccagggcacgtgtgcccagcgctggctcctgctgacccctggactggctcccatctcgggaatgacgcctaccgtgg

SEQ ID NO: 315931 - DNA, 1407 bp, Homo Sapiens
  misc_feature (494)..(510): n is a, c, g, or t
gggtccttttcacaggccaaccctgagcaatgatatcagaaccttttaaatgatctagtatctgtgatgttagcgcccttgggattcagaaagtggtgtgcatagtaaaagctttcattgtaactcaccctgcctagatatgcagaaagcaaattcagtgataagatctttcctgggagaccaatcagcagcctcaggctctgttggggtctatcacaatgatgttatctaaatttaggcaaggaaccctttccccatcttttagaggcagtgagtgttctaatcacttcaagataagtatctgataaaagtcttgggccaactttttcatacttagaagacacaactaaaatgatatactaaaatgtatcaaaagaagattagtgtacactctactaagtgtaaagtatattcatacaaaatgccttagaaaacaagttatgtaacaccatgaaattttaaatcatatcaaaatgaactaagtcaaagcaggnnnnnnnnnnnnnnnnngttcaatctaatcctactttacacccacaggtaactttaaaaggagcagtgtgcactggcagacttactacttccagaggtgaaggccgccggcgcctccagctgtcagaaagagctccctgttctgcggcaggtgtcggacctgccacacagtagatttatgagccttttctgaaacagaggcaaaacctttggttggatgctgtgttctcatgtcaaaaacatggaactttccttccagagatgtggctactaacttattcatacttatgtcttttctgtcaaactcccaaggtacacaccccatttttgatgtttgtctcccaccgtaatggcatatttctgagatcaaatagtttgatatccccattgtcatagccagcacaaacaacacgttcttcttgattataagcattgccaaatgccacagtccaacagtctctcttgttttctccttgtacaggttccatattagcaacaggatcatctttttgccttgggtcccacaccttcacagttccatctcggctgccagtcacaatttcaggtgctccttctccaattcctagtccacctatgccatctatggcatttataatttctttatggccctttacagaatatactggcatctctggagcttctaaattccatatatgaaggtttccaccaaaatctccagtagctaaatatctctgctgtaaagatgttgcaccaaatgttccacatttaataggtttggccttttcaatagtcaaacaccgtgtagttgaagcccttctggatatgggcgatgatctgaggcttctcgaaggccgacatggtgcagccaatttcagctacggcaaccgccacacccagagcccccaaaaacggcaacctggaaaccagactccc

SEQ ID NO: 315932 - DNA, 2222 bp, Homo Sapiens
  misc_feature (911)..(919): n is a, c, g, or t
aacatcaaatttggtttatttcaagtttgtaacaaaatatattctaggcaacttttcagacattgttttatagcatcataaaccccataccactgctgtcattccaaaagctgccaggacactggaagttatcaagtggtccagcccaggaatacaggtagaattcacatgataggtgataagaaagcaatgtctgtgggccactctgatccctctttttaccttggtaggtaaggtatgatcttaagactatatgtactgagtcctattagtcagtgaaaaagattaaagtgacaagttatgtgctttgttcctatagctttgaagttcatccacctcaccagcaattggaaggtctcaggtcttgcaggctctacccatgtgtaatcctggggcaggtgtgaatcttgatttttttaagagattactcaagggagagaacaacagaaacggaagccatgagtactgccccaattctagattaggttagaggttagaataaattaactaatggggagtggtagtgggtagcagtcagacccaggagacagatttgtgtggtttcctgatctcagcaaggtctaaggaaaaaagcctccccgcccccccaccttaaatagtggcatcaagtcatgaaggccagtgaaacgtggttagtctcgtaaaatgacttccagttcttccaggtccttctggatagccaaatcctccttcgtgacatctggcagctccagggccaacttcatccaccatctagcttcagagtttttccctagttctctgtagcacttggaaatatatacccttcctgctttggaaaatcctggctgtagttcttcagcctttaggaagctctggagggcatcttccacagtggcactgagagggctttcaagcaaggctgtagcagnnnnnnnnnctagccagctcaggtgagagacctgatagcaccacctgccaagaagaaagtgagccatggggttttctggctggagagcaatggctttgtccacatgctccttgaagctaaagccactctggatgcgcctctggatgctctcatgctcagccagctgaccacaaagcgctgcatcccacaggtgacagtcagcactctcatcccccttctccagagcagcctctgcttcttcttttccatctagggcatatgacttcttctcgctcacctcctcagtgagctcacacatgtcactgtaggctcgggccaggcgccagagaaagtcctgccggcttccatacaccagcttgttgttgagcagcagctggaagccctcccgcttgccttgctcatcacccctgtgcagctcgtcggcctgctgcaggaggggcagcacatcctccaagcctgaggaacctccagcctccagggcactggaggcacctgaagctgcctcttcctccaagtcaagagaatcctttctccccatcttcacagtctcacagctcacttcatcttccccgtcctcactttctttgtcagagtcccgctcattgtcagactccgcattggctgttgtgtaacccccttcactctcagcatctgtgaacgtggctcccgaggaggccgtgaagtagacagagctggagccagtggagtcactcctctcccggacaaacggaaaccttcgccgccgagccactctctggttctcttcccatgtggcatcggacctccccaacaatctcccccgcaagccctcgcaggctgcttctcagctcctccacctcccgccgcagcgccacaaggctggtcagcacaaagtccaggcggtccagcaccttctcctgtccttcccgtggaaggctgggcagcactgaggcatctccagccccacctgggacagcccgcaggagcatcacgtggcgtccgggatctgaagtctgcgtatagtccagggagttgggcaggctctggctgcggccatgacgctgggtccgtttccatcgctggctgtaaaggaggcacaggaatccaaggccggcggcggtacccagcaacagtcccagcccggcacgggcaccacccagggctcccagtctagacatgctgcacctcagcctcacgacactgcagaccacaaacccggcgccctggctgcaaactcctggccttccgccgcggcccccgaaggcgctctggcctggcaggagatccactcagacccttacccggccgccagccaccatggcagcagccgccg

SEQ ID NO: 315933 - DNA, 789 bp, Homo Sapiens
taacctaatgtctttttctgtcaaaactccaaagctaccacacccccattttttgatgtttgtctcccaccgtaaatgccatatttctgagatcaaatagtttgatatccccattgtcatagccagcacaaacaacacgttcttcttgattataagcattgccaaatgccacagtccaacagtctctcttgttttctccttgtacaggttccatattagcaacaggatcatctttttgccttgggtcccacaccttcacagttccatctcggctgccagtcacaatttcaggtgctccttctccaattcctagtccacctatgccatctatggcatttataatttctttatggccctttacagaatatactggcatctctggagcttctaaattccatatatgaaggtttccaccaaaatctccagtagctaaatatctctgctgtaaagatgttgcaccaaatgttccacatttaataggtttggccttttcaatctcccgaagcagcttcaggtccccgtgctggatctcgtacagctgaatgacgccggtgccccgtgcgaagttgcccatggtcacaaatttggcgctgcagggcacccacttacagtcaaacaccgtgtagttgaagcctttctggatatgggcgatgatctgaggcttctcgaaggccgacatggtgcagccaatttcagctacggcaaccgccacacccagagcccccaaaaacggcaacctggaaaccagactccaaacattggcaatttgtccctcccgctttccgtccc

SEQ ID NO: 315934 - DNA, 1898 bp, Homo Sapiens
  misc_feature (957)..(969): n is a, c, g, or t
  misc_feature (1261)..(1262): n is a, c, g, or t
  misc_feature (1431)..(1447): n is a, c, g, or t
actatagggaatttggccctcgaggccaagaattcggcacgagcggcacgaggtgagctggagcagattgagttacataacagtatcagggacaggcaggggaggcggcactgttcccgggagaccgtcatcaagctgacgatggagcgggagcgacagcagtttgagggatatggccttgagattccagacattctaaatgcaagtaatctgaaaacatttagggaatgggactttgatctgaagaaattaccaaacattaaaatgagaaaaatttgcgctaatgatgcaattcccaagacgtgcaagaggaaaactattataactgtagaccaagatttgggggaattggaactaaacgatgaatcaagtgattcagatgaggaaatgactgcagtggcctaattgtcttcacttgaattgaaaataaataatttgagagcttcaaattatattcattgattatggtacctaattgtcatgatacaaaaatttgatactgacatgctcttatatgatgagagtttcatttgcgtttcaaaaatggtgttatgatacttattttaaaatgaagattgcttttcatttccattaagttgctaaaatagatagatgtgatctgcagaagttgtttagtcttcatctgaatttcaggctgggagggatcaatataactaaggacaaaaaatggttttgtttttcttgtgtatttatgatcacctaatttcacgttttgtgaaatgtacagtaacctgtttcctgaaagattcctgtgggtactttttgagctgtgataatagcaaaattgtttttcggtaataatatcacactaatgcttcttttaaacattaaacctattttccttttttacagaataagggaaaatgtgataagaagtttgtatacatttctggattatagattattatttatcttttgaaccagagctaaatggtnnnnnnnnnnnnntcagtgatgattgttatgttgatctcccacaattaatttatcttttgacaaaggggataaagagtttcagtttagctccttttgattgtatattattttttgcttttttattgtgaaaagaggtaggttttatttgtggagagagagttgaagattagggaaccagtgattttaattatgctactttttcttctaagagataaattgatatatcattcagtgtcatgaaaaacatgaatgttgtacaattttcttcctcaaaaaactttttaaatgtaagtatccttatttnntttttaaaagagcacaatgtaggtgtatttgagtattttcaagaaaagaataaaaacattaatgcagtattaggttaactggatatcaacttaagcccttgttaacagttaaagtattataaccttttttttactttctgaaaattaaaaataaaatttatttcgtgcnnnnnnnnnnnnnnnnngagaggggcggcgcgctctctagagagagattattccctctgcgagaggggcccaagagttataggggttacccagagtttttttgttaaaaggtgggctccctataataggggagcgcggaataaaaagcgctaggggagagtgggcgcggtctgttataacaacgtgtcggtgatgtgaggaggacgaatgtggttatatcgcttggggagactcttgtgggagaaggagaaccttatacttctctgtgggggggtggttgaccattacttgggcgcaaattaccttactaggggagatttaaaagggctcatagggtaaattattaaaaccttttcacggtcgtttacgtggtggttaccacatagctggaataatgtgggcggctggaagagtttgggtaacaggaggtattgtttatgaaaattttttccggagtgttgaataaat

SEQ ID NO: 315935 - DNA, 1040 bp, Homo Sapiens
  misc_feature (612)..(743): n is a, c, g, or t
  misc_feature (755)..(858): n is a, c, g, or t
tagcaggtcataattctacttttattcccacattttgtatctcaggcaacatgaactaaatagatccacctcagcagtggaaaaaggttttcatgaagtttttctaagccatgaaaatggaagattcactctcaaatgctgcattctattcccagtgaaaaataacaatcttatctgtcaggtagaaaaatttttgtaacgacaatctgaaaaacagggactaaaaaacaagtagggaagtttatctttctcacataatagcaagtccggaggctgcagtttgggatgtggcagatcctcttgagaagtccattctgcctactctacctccatcagcactcagccttccttctccttgaggagaatgcagatggctggtgtatgactgagaagggtataggataaggggcaaaaccattttcattttgaggctttgtcttgtttacctgaaaacaatatttccatatttttttcccaaagaatattaattctgttaaatggctactgtaattttaatgaagaacggggattttcaaatttcatattcacacatcaaaaacagaggaagagaaagaaacaattaagttagaaagccaggaacagtggctcatnnnnnnnnnnnnnnnnnnnnnnnnnnnnnnnnnnnnnnnnnnnnnnnnnnnnnnnnnnnnnnnnnnnnnnnnnnnnnnnnnnnnnnnnnnnnnnnnnnnnnnnnnnnnnnnnnnnnnnnnnnnnnnnnnnnnagtggcaacacnnnnnnnnnnnnnnnnnnnnnnnnnnnnnnnnnnnnnnnnnnnnnnnnnnnnnnnnnnnnnnnnnnnnnnnnnnnnnnnnnnnnnnnnnnnnnnnnnnnnnnnntggacagagggacaccctttctcaaacaacagcaacaacaaaacccacaaacatgttgcagaccaaatacctgttaccaattatattaatgacaacgtggtcaccataattttgggaagagccagattacctcgtgccgctcgtgccgaattcttggcctcgagggccaaattccctatagt

SEQ ID NO: 315936 - DNA, 861 bp, Homo Sapiens
  misc_feature (556)..(628): n is a, c, g, or t
  misc_feature (641)..(742): n is a, c, g, or t
  misc_feature (764)..(786): n is a, c, g, or t
ttacctttgattcagaggaactgtggaatgatcgattttttcaaatgcataagtatttcttctatttatctttgaatatattttttgggtagtttttagtattaggtcatttacatttaaagattcctaatttgagttccttatataatcacctaaaatttgcgtgactgcaactaacctgattgatgaaagtaactgacagcttttacacttggctatttacttcttgcaaaatatctactaccttactcatttgtttaaaagtagtttattattacttctacaactttttccatttactctacagaccgtagttttatttgcattggttcttttttatcaatttaaaaagctgtttaattctagtttcagagcaaaccacagcaaagacatggaaagacaagaaaacaaaacctcctttggcattgtcgagagtccggtttcagtggctgcttcataactgtttgaaatgaaagtggaagaagggggtggtggctcatgcctataatgccagcactctggcagacagagacaagcagactgctttaactcaggnnnnnnnnnnnnnnnnnnnnnnnnnnnnnnnnnnnnnnnnnnnnnnnnnnnnnnnnnnnnnnnnnnnnnnnnnagtggcacacacnnnnnnnnnnnnnnnnnnnnnnnnnnnnnnnnnnnnnnnnnnnnnnnnnnnnnnnnnnnnnnnnnnnnnnnnnnnnnnnnnnnnnnnnnnnnnnnnnnnnnntgacaagtgagaccctgtctcnnnnnnnnnnnnnnnnnnnnnnnatattctacattaagttcagtaaatttatctaagataattatttcattaaccggagattattaactagtattttc

SEQ ID NO: 315937 - DNA, 450 bp, Homo Sapiens
  misc_feature (179)..(243): n is a, c, g, or t
  misc_feature (255)..(386): n is a, c, g, or t
  misc_feature (426)..(426): n is a, c, g, or t
ggcacgaggtaatctggctcttcccaaaattatggtgaccacgttgtcattaatataattggtaacaggtatttggtctgcaacatgtttgtgggttttgttgttgctgttgtttgagaaagggtgtccctctgtccagcccaggctgcagtgcagtaagtgtgatcacagcttgttgnnnnnnnnnnnnnnnnnnnnnnnnnnnnnnnnnnnnnnnnnnnnnnnnnnnnnnnnnnnnnnnnngtgttgccactnnnnnnnnnnnnnnnnnnnnnnnnnnnnnnnnnnnnnnnnnnnnnnnnnnnnnnnnnnnnnnnnnnnnnnnnnnnnnnnnnnnnnnnnnnnnnnnnnnnnnnnnnnnnnnnnnnnnnnnnnnnnnnnnnnnnatgagccactgttcctggctttctaacttaattgtttctntctcttcctctgtttttgatgtgg

SEQ ID NO: 315938 - DNA, 889 bp, Homo Sapiens
  misc_feature (33)..(33): n is a, c, g, or t
  misc_feature (37)..(37): n is a, c, g, or t
tggcaaaccttaggcattgttaaaattaggaanccangttccaatttttttgacctgaccaaggagaatttaaagcaaggcatatcatacatccaaaaacacatatccattgatgagtcaccaaatctggggaaaagcaactgggattgactatgaggctgccttaattaatcttcgtcgtctcgttgcaaaggtataacctgaatttctttagctatcctttctgctaatattctattatttgcagcaattactcttcgtgacatcaaatcaaatggtccacctgtaacatccattagcacgccaccagcttcagtaacaataatgccagctcctgcaacatcccagcagtgaattcccatttcataatatgcatctgctccgccagttgccacaaggcacatattaacagctgctgttccaacactccggatcccatgaacaggaatgcaaaaaagcttttccatattagaaaggaaccattctcacagtctctgggtgttctggaagagcccaactcagtcaccaagagagatttggtaatatcttcttgttgtgaaacttgtagtttttgaccattacaaaaggcaccttttccttttctggcagtgtacatcttgccttccacacaactgtacacaactccaaattctatctttttatttacagcaaagccaattgaaacagctacaaaaggaaatctatgtacaaagttagttgttccatcaatagggtcaatgatccatgtggggttgtcggttaagatacttttttccccagctgccacagattcttcaccaatgaaactgtgagatggatacttttcctttatggaagagataagcattttttcaactttttggtccgtagcagttaccaaatcaactgg

SEQ ID NO: 315939 - DNA, 1953 bp, Homo Sapiens
  misc_feature (86)..(86): n is a, c, g, or t
  misc_feature (89)..(189): n is a, c, g, or t
  misc_feature (206)..(206): n is a, c, g, or t
  misc_feature (396)..(396): n is a, c, g, or t
  misc_feature (644)..(701): n is a, c, g, or t
  misc_feature (810)..(831): n is a, c, g, or t
ccggggggtgacggaatacaggcgacaggggggaaactggggagggtgtatagcggggaggggaaaggagggcggtaaattggaanacnnnnnnnnnnnnnnnnnnnnnnnnnnnnnnnnnnnnnnnnnnnnnnnnnnnnnnnnnnnnnnnnnnnnnnnnnnnnnnnnnnnnnnnnnnnnnnnnnnnnngaggtggccagggcgtntatagtgaaaggggggtagtgcctctgggtgaggggagggcgataatgtgtggcggggtgaggcatcggcggagatgggtaggggcgaacacggggaaggattaacactcggcggggaaagcgctgtgttgtttcgcgcgaggcgagcattcacggtctttgggccgcgccgcggcaaccgcgaggcgtntggcctttattgtggatggggagtagggggagcggctaaacgaaggaccggcgcttttagcgatcggccccgcggaggcttttgtggtcgagggaacgcggaagcgagagacctgcggccgttatctgtctcgcgccggggagagggccggccaagcgaaaagggaaaaagtgcggtgaaaagacggggtttcgtgggagcggacgagcgagcgcgcaaacgaaggaacgttggaggggaaaggagcnnnnnnnnnnnnnnnnnnnnnnnnnnnnnnnnnnnnnnnnnnnnnnnnnnnnnnnnnnggacgggggattgggtatcttttggtgtgtgggtttaagtggtttggtttggtatggtatgggtgatagggttttggtgttgtttttgtggttattggggggtgtgtannnnnnnnnnnnnnnnnnnnnnctgggggacatctgtatttatttgaggcaccaaagcagcaggagggctccaatgtgggggtgggctggggcaggactggctggatttggggcagggcctagacccggaagtggcagaaaccccaacccccaaaggctgcccttgaagtgcatgcagctgtgccagggcagggggctacagggactgaggctctccaggctgctggcacacctccctccccaaacatggcccccagaagccgccacgtgctctcacgtgcactgcacacccacgtacacagccaggcacacatccctactgacacggtctcccgggggaccctgtcagcatgtccatgggacttggtcctgatgttggaccgtaagactccagggaaccctcgtcccttccgcagtcccccaaggaaggtcacatcatccaccccaggaagtgagggcagctggccccacttggggcagaggcaggggctggggcaggtggaggtgcagggggtgggcctgacctgggaccaagggcacagatcaggcacgtgaggagtcaggggctcccatacactgtgggatccagaaagggctgggctttccttcctgagctgggggatcgggggacagggtctgggcggtcaggggccaaaccgcagcagggccggcagcaggctcagcagcagcccggcacccagcagggtgacgcttgcccgcagcccgccatcggccgcactgaaattgcacagaaagctctggcagcagctgatgcccatggaagccacaccaacattgacgccttctgggatggggcaggccggggaacaggtcttgctcaggctgtggccaaatgtcacgagattcccaatgccggcactagcagacacagtcacgcagtagttgtcctggtcggagcagatggtcggcttcaggcagtacagattgctcttctggttcaagcaggagaagcacatcagcgagctggctcgctccacacccagaagggcagccagcagcactggcaagaagatcttcattctggagaggatggccgtcctgcctggaggtcacaaaccaaagcagcctgtcctgctcgccgggcggacgcaggtaccagcagcctggcggagataccccgaac

SEQ ID NO: 315940 - DNA, 942 bp, Homo Sapiens
tactggcaccaccccaccgtaccccagcccaggcaccacatcccttactgaccacgggtctcccttggggaaccctgtcaggcatgttccatggggacttggttcctgatgttggaccgtaaagactcccagggaacccctcgtccctttccgcggtcccccaaggaaggtcacatcatccacccccagaagtgagggcagctggccccacttggggcagaggcaggggctggggcaggtggaggtgcagggggtgggcctgacctgggaccaagggcacagatcaggcacgtgaggagtcaggggctcccatacactgtgggatccagaaagggctgggctttccttcctgagctgggggatcgggggacagggtctgggcggtcaggggccaaaccgcagcagggccggcagcaggctcagcagcagcccggcacccagcagggtgacgcttgcccgcagcccgccatcggccgcactgaaattgcacagaaagctctggcagcagctgatgcccatggaagccacaccaacattgacgccttctgggatggggcaggccggggaacaggtcttgctcaggctgtggccaaatgtcacgagattcccaatgccggcactagcagacacagtcacgcagtagttgtcctggtcggagcagatggtcggcttcaggcagtacagattgctcttctggttcaagcaggagaagcacatcagcgagctggctcgctccacacccagaagggcagccagcagcactggcaagaagatcttcattctggagaggatggccgtcctgcctggaggtcacaaaccaaagcagcctgtcctgctcgccgggcggacgcaggtaccagcagcctggccgagctccccgaacctcgcgcgctctggaccgcggctggcccggagcctcccaggcagccgcgcggccccccc

SEQ ID NO: 315941 - DNA, 387 bp, Homo Sapiens
  misc_feature (301)..(301): n is a, c, g, or t
gaactgtcaacagaaaaatgggtggccgtggggagcaccgggacctgcacttgcacacaatctagggcagcttctaatgagtctatgagttactcagggatctcattaaaatgagatcagccttgagtggggttttctttatagacttctgtcaccatattttgaagagcaagggtttagttgattttaaggcaggtgtgtacccccctgggacagtgcttgtaggaaaaacaggaacttattaccccatgggattttcatggattatacttgcttaggctttcttgggttaagggggctngagttagggcatttcatttgcaggataggaaaccaaagcaggtggcatggctttattcagtgagtaccttgagatattttaggcat

SEQ ID NO: 315942 - DNA, 768 bp, Homo Sapiens
gatacaatcagcttggagtgcagattttcacatttggatgcaacagcgtctactgctggggctaaaacatcattggtgataatgcagtttgcttttgaagattgtagtctgtagagaatgtctttctgggtcagctgagtggttcctggaattaaaactgtccctgttcgcagacaggccacatttgcaagccaccactctgggaccctgggcagaatcagaattacccgatctcctctttgtagggaacaggcttctgaaagtatattggcaaattttctggacagagatcccagttcctcaaaactccatcgcatctcttctccatttctgttgatccaccagaaggctggatttgaaggtttctttccagccttttccttatcagtccattggtccaggacatctttagcaaagttgaaatactctggaatccccagtttgaagtcctgtttcatggattcatagttggagaaattctgaggggttgctgttctattatctttatgcagtgccctcacagaaccaaaaattgctaggcgctgaaaacacttggcatgacgtagcatcttcctggtgacacgagctagcatcagtcttgttggaagctttagcactcaggatttgcacagagaccagttcattagttaacagattccaacacagatggagattatggcagacttgtttcttagaagagcagccctgaaccttgagttctcacatctgctttttccctccgtgccgaattcggcaccagggctcgag

SEQ ID NO: 315943 - DNA, 800 bp, Homo Sapiens
  misc_feature (711)..(711): n is a, c, g, or t
gagccatcaagccctgccgtatttcattgtatgaacatattacagttcatttatccattcacttgttgaagaacatcttggttgcttacaagatttggcaattatgaataaagctgctataaacatctgtgcagaggtttttgtgttgctatatgttttcaactcatttgggttaataccgaagagcatgattgctgtagcacatggtaagaatatgtttagctttgcaagaaaccgccaatttgtcttccaaagtagctgtgtcattttgcattcccaccatcaatgaatgacagttcctgttgagccacctccttgtcagcatttgatgttgtcagctttggattttagccattctaataggtgagtagtggtacatcattattgtttcaatttgaaatggctactgacatatgatatggagcatctttccttatgcttatttgctatgtgtatattttctttggggaggtgtctgctcagatcgtttgcccattctttaattgggttgttttctattgagttttaacagttctttgtgtattttgaatgtaaagcccttatcaggtatgtcccctgcaaatatgttctcctagtctgtagcttgtattgtcattctcttgacaattcttttgcagagcagaagcttctaattttaatgacccagaacttatcaattggttctttcaaggattgtgcttttgggggtgntttaaaaaggcatccccaaactaaaggcatctagattttttctacattaacttctagaaattttttgggcccgaattctggagcccggg

SEQ ID NO: 315944 - DNA, 1590 bp, Homo Sapiens
gctttccctggcactcttaagttagacaagagtaaatatgttagcctctcaattctgcctcttcatctttcatctatacttagatttttctttatctttggacttctttggacttctgcttcggtctctctttttactcctttctctttcataaagatctgtttggtattttgatttatgactattactataatggccatccctctctcgagatcggctacgacttcggttctgagttcggtctctcttttcactcttttgtttctcgcaacagctttcttcttcttcatagtgaccaaaccccatttctctatagatatcgtgattagtatttttgattggcatgtagtcctcatcttctttctcttcagaacagtgatgggttttcttcttgtgttttttacttgtgtgtgagtgacttgattttgagtcttcggcctgctcatctaatataagatcgtattttgtatcctgtttgggctttactttatctttcagaaccaaattaggtggtttatcctgttctttttcatactccttgaaatcactcttggtgtatttcccaccttttcctttccatttaacctttgcaaccgactggctaaaatccacatgtattcttctgtcatctataagcacattgtccattttgaagaatgctttctcacaatcttcttccttttcaaattcaataaaagcgtaacagagggactctcctgtcttccagtctcggataacttcacaacttcttattggcccaaatctagagaatattatttccagatcctcatctgtggtcactgggttcaatttacacacaaacagtacattttctggaggtttaatatctgcatcaggtaggtctcccaaccatctccaaaagtatagcctgagttttagcctctttttctgcctttatttcttctacttcctcagctgatcttcctttgaaatcatcaatttcttcatctgctcctattcgaccactatctaattgttcccttgtaggttctggtgatcgatcagggattaataaatcaggagggtcatcaaatggatcatctaaaatcaccgtatgatttatcctgatatcctgatatggtacaaagtccttgtcaacaaaggtctcattaattttcttaattatgtccatgccttctgtcacctcaccaaacaccgtatggacaccatcaagataatctagattttctcctgtggtgataagaaactgagatccatgttgatcactgccattattcaccatggacactgtgcctttcttcttgtgcttaattcttgggactttttctgcctcaaaaaagcttgcttgatcaccatacagttggccaaagatagactctcctccacggccagtccctgtaggatcgccagtttgtatgataaaatccctctgtacattgtgaataaggcaataattgtaatattttattttgcacagtttcaagaaattcaagcaggcacgcggccgttcttcggtgtacaagtcgatgacgacgtcgcctaaagtggtctccagtagaaccgccatggcgcccgctcctcctccgctacaaaccccgggaggagccc

SEQ ID NO: 315945 - DNA, 925 bp, Homo Sapiens
  misc_feature (13)..(13): n is a, c, g, or t
aaaacacttgccnaaatgccaatatgaagaccttgcctttcaaagatccatcgggatttcctgaacagccctccttcaagatacttaacccacgaatccccagcgcgtggaatagccccaaatgtcactgattgggttgctgcccctggtacgcaggccgtgtgatgggatttgaagggcagggctccgcaggtggtagggcagggtggtgtatgactccagggcatggcaaagcacatcaaagccactgttggcgaccactcgggcaggcatgtggagggtgtgcagaggatcaatcagtcccagtgtgggtttgatggctctcgaagtgatgccaatttttactttcaagtgtttatagtcaaaaaatggcaaccccagttgtttcactccgggttcctgaggtagttggcactgcaattagaggcttaagaggcacagacacagggttttccttgccaatgggggcactgacataatctaggaattcagaatgagggctggatgcatacagattagcaggccttacaggtgtccatggtagagccacccacggccagcaacataggcatcaaaagctcccttttgggcaaactcaatagcttccatgaagcttgaatccgttggttccactctcacattatcataaaccgtaaagtggatgccattcttcactagggaatccatagctacttgcacagaagggagcttggagaggttcttgtctgtcatcaagcacacatttttagcacccatgttttttaggtccattcatacttcctttgtaactgctgctccatatctaatatttgaaacagccatctcaaaggcataatctgttgttttcccagaaggtgaaagtccagggggctgcgcgttgcagttgcctcagcaagtacgcgacccgggctcgggcggcagcggc

SEQ ID NO: 315946 - DNA, 639 bp, Homo Sapiens
gaagccagtgaaggcctataatggccttatgttaaggatcagataaggtggaaaggagatattagccatgacgtatacatacggtcttagactactaaaagctagcatccgtctgtgcaagtgtgcggtaacgcagttgttctgcactgatatagatgtgcattcagcggccaatggtctcctataggtacatacctaggatctcaaggtatcaggcatcaccgcagaattctcatcagtccgatgagtcatggacagattgagtcaatgtaagttaggacattgtcagtatgtgtagcgcaatcttagagtcttatcgactagtatctaacatatagcgattagggcagttctagtaagtacagtccgtacaggacagtgatattctacatgacttccgttcagatccataaagtagtactacggagaacttcttcgaatgtcgaggaacatcagttaagctgctgactgtgccttatagctagtataagttgaccacatagacgagaatttattgtataatgtccggccagtcaatagtctaccgtacttgaagtcacacgctctctcgcctgaggccatcccgatacatgggtgcacactgaagatgcctcagtgtgtccagtacattcagcatgc

SEQ ID NO: 315947 - DNA, 644 bp, Homo Sapiens
gcatgctgtatgtactggacacactgaggcatcttcattatgcacctatttattggtatggcctcaggctacatagggtatgtcttcaagtccggtcgactattaacttgccgggccttatacattacattctctctatgcggtcaactttactttgtgtcaggcacagttcgctgcttcactgatagtgcttctcatgtcgacaaatgtctccgtagtactattttatggctctgagtcgatagttactgtcgaatatcagtgtcctatacgtactgtacctgctagaactgcgctaatcggtatatgtcagctcctgtaggaaagactctgccattgcgatcgaacctgacagtcttactactcacactgacacaatctatccatgatactcggactgatgtgagttctgacagtaatgcttgactcaccagacctcctaggctatcgagactattggacactagccagacgctatatagcacatctaacatcaaggcgaatgaactgcctatacaccacacactgctcagatccgcactgctttaggaggtgtacgtgcgctattgtataccatctagcctagatatactccatcatcacactgatgctgatcactcaccatatagtgttgcccatggccc

SEQ ID NO: 315948 - DNA, 1750 bp, Homo Sapiens
  misc_feature (58)..(58): n is a, c, g, or t
  misc_feature (116)..(116): n is a, c, g, or t
  misc_feature (166)..(166): n is a, c, g, or t
  misc_feature (173)..(173): n is a, c, g, or t
  misc_feature (176)..(367): n is a, c, g, or t
  misc_feature (442)..(454): n is a, c, g, or t
cacacaaagtggtctttgggtgcccgcggtgggtttgtttttagaaagactccggggnccgggggagcctatttattttgtttggggtttccctctttattttttctctccgggtntggttggggacgcgccgtttacgcatttttgtttttaataaatggagagnaccgcanaannnnnnnnnnnnnnnnnnnnnnnnnnnnnnnnnnnnnnnnnnnnnnnnnnnnnnnnnnnnnnnnnnnnnnnnnnnnnnnnnnnnnnnnnnnnnnnnnnnnnnnnnnnnnnnnnnnnnnnnnnnnnnnnnnnnnnnnnnnnnnnnnnnnnnnnnnnnnnnnnnnnnnnnnnnnnnnnnnnnnnnnnnnnnnnntaaagggacgacatttattccttttccaaatgttacagtaaaaccaggtggaagagaatggttttagcagttagnnnnnnnnnnnnngtacaaatctggggtttggccattaaaagttatttacaacagtgggagaaaaaaagacaagaaggttgtttcacattacagacctcccccccacccccaaagcctaatacttgcttaccaagtcaaaaaagagacacagttgattcacaggctggaggtttgaacttgagtaagacatttataaaaacctagacggggcagtgtcctccccagcccaggtgccactaggcacagcacaagagactaaaaacaacaggggaaggctggacactcaaggtttgggagtataagcaccccacttctggctcagggatttggggagtagggtaaacaaaacctacttggaaaagaattggggaagaaaaccaacaactgccttatgcaggggtggggacagggaaggaggtagggccagggacaggagcatttcacatcactaacctaacttgggaagctgtaagggaccatcttcaactggccttaagaggagaaccagatggctgatgggagaatccacaggagggagaggaggaaagggaacgtggctgggaggaggcaatagccccttcctttctgggcacaggaaggcagccagggcaccaggtccaggcagtgacctcacaaggacagcacagtttttgcagcttagagatcacccacctgcccctacctagctactcattctgctcagcgctggctggtgtagggccactctccggccccgagggagtggatggctctgtagcctggggccctgcctcttcttctgaggctgcactagcctctgcccccttggcctggggttcctggctctcaggggtggctgcggccttcccttcctgagcagtgccctcgtcgctgcaggcaccgatctccccctgctcctgctcttcctctgtgggtgaggaggcagaagaatcacccccaccctccttccgatttctcttgaaggacaggccgctcaatttgaaaggcttcttgaaagagaatttcttcttcttcttgggggtctccttgggggggacctcccccttggcctcagcaccctggctagggggtgctggctcgatggcatcgccagtggccccggctgcctcatctgttccgttcacagggggcgactccccttcacccttgggggataagtctccattgcttttcacgtggccattctcctggccgttggccttcgcgggggaagcgcctgctgcctcctcggcggtcacgtcgccccggggagccttggagctctggctgcccatgatggggcctcgtgccgaattcgccacccaggcc

SEQ ID NO: 315949 - DNA, 830 bp, Homo Sapiens
ctctttcttcacaagggggggccccaagaagacccaagtctctttccccggccccccgtgggccattagtttgggaagaggcaacccacttcttttccaccacctccccggttttgaaaaagcccctagaacttggggggtggggtgggacacaggggtaacgtccccccactggtggccaaaggctagctctgcttcttcagcccacaagttcccagtccttcgctcctgagcaccaggttcagtctccaggaagggattttggggaagtcaagtgggcaggccgaagttggggcccatccctgccgtccggtttccgccaggagaggttcccggggtcccaggcagaacgggcgccagcacctgcgttctggaggtgtcaggacacgcccgagtcagtggcaaaagctccttttgtcgttggagatgacaagttccggagcgagctcggctgtctggatgggaaggtgggggccatcagggggtccaggggctggctcggccaggactacctgcaggtcgagaatgtagtcgatgacgcgctgtaggatttccacctggctaagctgagtgcctctcgggactccgggtaccagttcccgcaggcgggagtagcagtggttcatgtcgtccagcaagctcagcggctcctcagctgccgggcccttccctcggcccgggcgatggccagactgcgttccgacaggcagcacaccgcctcgtagcagccgcgcaccgggctcagcgccttcatgctggggagtgagtccagaggtgccccaaagagaaagaaaaccaaaagaagtcccgctacagtgacctgcaacccc

SEQ ID NO: 315950 - DNA, 952 bp, Homo Sapiens
cacaagtgtttaaaaatcgtttattatgcaaaatgttaacttttataaaaagtttaatatacatcgcattgttacagaaagtcaccttcctgtaaaaaaaggtacaaaacctatatactctattatagagttcataaatcagggcaacagaacctttctccaaggagaccagaagaccagctctgccgccgccttggcatagtttggagagcagccactccttccacacctccacgctctgaaaagaccttagaacttgggggtggggtgggagcagggtgacgtcgcccagctggtggccagagctagctctggttcttcaggccacaagttcacagtccttcgctcctgagcaccaggtttagtctccaggaagggatttggtgaagtcaagtgggcagggcgaagttggggcccatccctgccgtccggcttccggcaggagaggttcccggggtcccaggcagaacgggcgccagcacctgcgttctggaggtgtcaggacacggccgagtcagtggcaaaagctccttttgtcgttggagatgacaagttccggagcgagctcggctgtctggatgggaaggtgggggccatcagggggtccaggggctggctcggccaggactacctgcaggtcgagaatgtagtcgatgacgcgctgtaggatttccacctggctaagctgagtgcctctcgggactccgggtaccagttcccgcaggcgggagtagcagtggttcatgtcgtccagcaagctcagcggctcctcagctgccgggcccttccctcggccccgggcgatggccagactgcgttccgacaggcagcacaccgcctcgtagcagccgcgcaccgggctcagcgccttcatgctggggagtgagtccagaggtgccccaaagagaaagaaaaccaaaagaagtcccgctacagtgacctgcaacgcccc

SEQ ID NO: 315951 - DNA, 689 bp, Homo Sapiens
gaacaggcagaggtactttatttggcaattttaacatgacacgtagagaaaagaaccctgccctccttcaccagcctccccagaaatcccaccttcctatttcaagacagagtaataacagcaccattttacacgaaagggaacagccacagccttggcaccatttctggttccactttccatggaagggcagagaagcattgctcaaaccccaccactgggtcagaaaccaggcaaacagcagcagtcacatctgaccttttgcacacacgagagcccgacactcatcctggctcccaagccttcccaaggtgaccctgtctcagccaccatcatgcagctcttctagtcccctcccggcccactctgaggagctgagcaatgatgagcagaatcttcatgtctctggcaggcggaggagggttcctgaagtggtagagatgcagtccactagctgggccccaatgaggtcgtgcacatggtaggtgaggccaagccgcaccacgacaggcgcccgcgggcccaggagctctgataggagcagttcccggtactttgccttccggaccatgccaaggacagcctggcgccctttaacaaagtacttgatgaatctcccagctccaggcacagctagccaccagctcccagcatctcggacggtgaggactccaggaactagttctctc

SEQ ID NO: 315952 - DNA, 803 bp, Homo Sapiens
  misc_feature (37)..(37): n is a, c, g, or t
  misc_feature (63)..(63): n is a, c, g, or t
  misc_feature (78)..(78): n is a, c, g, or t
  misc_feature (83)..(83): n is a, c, g, or t
  misc_feature (89)..(89): n is a, c, g, or t
ctgggctggcaatcctcttcctgcctccttccccatnaactgaaccccgggggccccatctgnaaaaatggaaaaccnacaanctgaancttgccctactttgcccaagttgaatgaatggctgcaagtgaaaaactgccggatgccacgtggagagccagcatcacctggggctctcttgctgttggggttctcctcccctggccccaagccccattgccgtcaagcgcagaagcctggcatcgatggagaggaaggtgacctcatctgacttacagcaggaggacactgaggagcaaagcagctagacaacggcagtggtgagggtccccacttggcatcagcgatgtggtcactgctggccagttccttccagggcagggaacacggccaccgactccatggctgggcggttccagactgtcacataaatcaacctgggctttatgaagctaatgaatttgcgtccaagatttggtttggagcctcgggtggcaggatgatttaatcagcgagcagccacagtggggcagccaggtcttccttgctcttggcctgaccactgcaggcccctgctctacccaacctgagaggcctcctgggaggaagtcgcaatgatagatggagaaggggcatttgtttttcccgtggatggaaagtgacacgtggggacaagctatgagaaacactgaggtgcgacggcacagagaaagcgggctgaggccaattacaccacgcagggactctcccaggcttcagctgccagggcagaggtggcgcagcccgtgggctccccgagttcc

SEQ ID NO: 315953 - DNA, 681 bp, Homo Sapiens
ccttgtactcctacgacttactccctccttgtctccacccactcctccatgagaaccgagttgggaatttccacgggaagtcgggggtggcggggagagacagggtagaaataaagagcgcatccttgagagggggtaggttctaggacaagggtggggctcaaaggccttgtctccacgacaacacaaacacagacttcaggcacagactacaaccacctgacccctgaccctgtgactgcaggatgttcaacacgccccctctccctccctccatgtgcaatctactctgtggagcaggggcttcagtgtacccatcagagggaaaggaagggtttagttctggaaataccttgggggggaggggttgagtagtagaatgggcgggcgatggtgaaactgtggttccccttccagaatatatacaagtccacagagataaaggaagacagtaagtgtggtgggagatcacccgggggccacagcgcccttgcatcgtgctccttattccctttcccgaaagctaccccaccccagtagcctgccccttcagtttgctcctccacctccaccgaagcccatctccaccttgtggactctgggtggggaccagacacgtctgctggacgggggcgtggccgcacctcgcttcgtcgccgctgcccccgcccacgccgggag

SEQ ID NO: 315954 - DNA, 723 bp, Homo Sapiens
  misc_feature (102)..(245): n is a, c, g, or t
gctggaaacggccagtagccaacccattaatgtaggtagctcactcttaggcacccagcctttacatttatgctccggttcgtatgttgtggaatttgtacnnnnnnnnnnnnnnnnnnnnnnnnnnnnnnnnnnnnnnnnnnnnnnnnnnnnnnnnnnnnnnnnnnnnnnnnnnnnnnnnnnnnnnnnnnnnnnnnnnnnnnnnnnnnnnnnnnnnnnnnnnnnnnnnnnnnnnnnnnnnnnnngcacgagcaattacagctgagatgtctgcttgtagagacggtaattaaagccacaaggtggaacaagatatccatggaagcaggtattggataaacaagagaagaaaccaatggactcagaatcccagctccaaacttaacacagtgacctcaggcaagcatctctgagttttagattgctcacctgtaaaataggaaaaccaccataaatacgagtgtgcaatgagacaactagcagataggaagtgttgcccaaatattggcaaaagtagaactagatattacttctctaacacagctctgtgactgaaacacagttaaaacaaaagggaaatgatgaactaataaaacaaaaacaaaccagatgatcccaagtgacctccctgcaccaggggagcacagggcccctgtcaaacaggacagcagctggccaaagccttgggaaggcggctgacggaagctaacagagccacagcct

SEQ ID NO: 315955 - DNA, 1493 bp, Homo Sapiens
  misc_feature (988)..(988): n is a, c, g, or t
aacctgtctcaggtaggaatgcttgacccttttatttcgaagcaactcatgcactcttttcagcactcagaaggaactgtgagcttttatactactacagccccagtatctcagcggtaaccatggggaaaaaagtcttgttttccaaaggaaaatgagagttgggaggagccttaatataagcagtgaggccagccgggtggccccaggaagaactaggtgtcttgacacctaatccacacagcagggaaaggggctgggtgtgatgcacagtgcactgattttatttacagatcaaaagccacttaaataatctgcagacacaagtgctgtccagggcagaagcctggggtccaaatcagccttatccctcctcatgcccacagtcagcccaatgctgtctccgttccatgggccagcacaggcaggcgccactctgctgacatgaggacctggggtagctcagacatttgactacccaagcccagaaaggagctgggtcccgcgcttacggggaattcctttaattcccccaggccaggtgagtgctgactcagtgatgacaacagctgtagaagtaggggtttggcttctggcccagatccacgcccttgtcctctgtcatcacctggaaggcagccacactgacgtaatcctctgccactttctggaagagctcgtccacactctggcctgtcttgctggatgtttcaaagagctgagctttgatattgtctgcatagtcctggacgtcgtggaagtccacacgtcggcgcttccggtcttcttccagcaggtcattcttggtgccacataagtagatttggcagccctcctctagggtgcgcagttccttcacccagaactttgctcgctcaaagctgctgctgtctgtgaggtcatagcagacgatggcagccttggcaccccgatagtagattctactcatggcctcatagcgctcagagcctgctgtgtcccaaatacntaatgtcacagtccggtctccgaccgacatcaccttggccacgaaggcggccccgatggtgttctgataaggccccaccagaaagcggtcgtgcacgtagcgctccaccaggctagtcttgcccacgtactccttgcccagcatcaccaccttgacgtccaggcgctgcccgctcatgctcccggggccgcttcagccacgtcagggtcctacgactccagacagcgcgtcgggctcgagctctggccgtggccttgcacttcggcagcgccccgtgtgcccccgctgttcggccccgggcgccgattatccttcgaagaccccaagcctcggggcggcctgggagcgcgcgggacagcgtcctcaacagcgcagcacgccgccgtgcagctcgctactccgtcattcgctcgcctgcccggcttaagctccgttctggctgggaatcccaaccgaacctggggtctcccgcaacccggctcctacccgcagcgccgcgactccc

SEQ ID NO: 315956 - DNA, 1167 bp, Homo Sapiens
  misc_feature (530)..(530): n is a, c, g, or t
  misc_feature (666)..(666): n is a, c, g, or t
ctttactgaccggttcttggaaacctggagaacagccaacaagaggcccttgaatctctacgtggccactgaactgctgggcccgggagactggactacaacacctcacactggtcagctggtttctacttggtgtttggtttttcccagccccattttatcttcagcggagccgcggtgtttgttttgtgaaagcttctgattaatttattatattgacgataaaactcaaacctacccagccttccccccactccatggaagtccttgggatgggcgtctgctctggacaccccaaagagctcctgccctctcagccctttattcaagcctcagatttctgctcatgatctacatagatttggaaactggttttcctctgttttggtctcttgggcaacatttttggcccaagtttgggcaacatttggcccaagtttgggcattttggcagtagctgtatgggagaaaaagagtaagaggaaatattcccacagccatgaagggtgaaagggcaccttgtgcttagnactagggctgcctggtcagtcccaggtgaggccaagggctttctggccatctcagggaggggccaccaggttcctcccctcaccccatattccatcacctttcctcctctgctctgggtgggtaagggaagccctnccggttcccacaggctatgatgctgcatggcagaggcaggtataacacagcactacatattggaaattttttatttttctaaataccaatgcagttttgctacggttacaattttgaaatattaactgagcctcaaaatcaccctttctgtcaagcatatcttggcctctcccatgtctcagtgttgcctgcatttctcccaggacttgggggtggggtgaaaagcgtacaaaagatacttaaaagggctcctggggtacacaagcccagcaggtcctgagtgaagccgtgggccctccaaatgctcgttttatagcaacctctctctaccctagttctccaaattcacttctgccttcctcaggtttgatatctggcaggtttgactatccagaggaaattaaatatttttatataaaattaaattataataaatattgccaaatgctttcctttagcattggttccaagtctaaatggttaacctcaagcctcggggcg

SEQ ID NO: 315957 - DNA, 916 bp, Homo Sapiens
tatacttctgtttatttttcctgcttatgaaaacagccaacaattgcctttcaagggaagggaaggtaatgctgggaaaggtcctcaggagccctgagccaagttctcaagagagaagtgaggcagctggggatctgggaggccagagtccgggccagggcctcagcatcctagaaccagggctgcctcccgaagagcagttcagagggcgtgactccatacgggcagggcggctccacacaggcctggaacacccttctcctcagcccagggagctcatcagggtctgggcctgcttcagttctgccaggaggacctggaacttgtctgctgagagggacatggcaacaggctgggctggggtccctggggcagctgccacctccagccgcaggtgcaccatgggctcttccacggattgcagcaggctggagctcagggtgtagtccacccgccagcccacacctgccaacctattcatgcgtaggctgcagacccgcaagtgcttctgcaaggggctttgcttctcctcataacagcggcacaggctggccgcgtgctctttgggcagccccagctgctgcagttcactggacaaggattcgccatcgacactgtgcttggccgcactggagaggatgaaactcagcactgccactgtggccttcacatcgcctgactcaaacttggcgtcagccgtgagcttcaggatcttctcataatcaatcccctgtcccagcagctcctttagtacctggctgcagagcagccgcaacttcacagaggacatcttggccagcgtgctgatttctgccaggacccagtcgggacagtccagatcaccacagaaccggaacctcatcgcgccaagaagccagggcccgggaatttctttttccggtcccgcagggtcccc

SEQ ID NO: 315958 - DNA, 505 bp, Homo Sapiens
  misc_feature (73)..(73): n is a, c, g, or t
gaagaggcgcagagcccataaagtggtctgcagggaagttatttttcaatcaaagttgggctttgcctcgctnaatccttctcctcccatgggggctgagtgcagaaaactcatctctgcataaagagaccccaggcctggctcgggtccttggacccaagtttagaacctgtgcctggagctatgagaataagtaaaaggaagggaatgtgtctcagaaaaccactaggctctgaggagctccagcactccaacaaaagagacagttgaacaatgggaagaggtgctgttcaccagcaaaggccccacaattctccctgtgacactgcatgttcccagaattacagccaatctttctaagacattgagaatatcatttttatgtgtgtgaccctgagcataaaattcctttacctttctgagcctcagtttcctcctctactaattacaggttcctagatttcacactcaagggtatactgacctttttgattcagatgctggt

SEQ ID NO: 315959 - DNA, 543 bp, Homo Sapiens
cactagacatgtatcataaaactaaaaaaatctagactacaaagaaagttccttcttcagtgaagggagtcaatctgtaaaaactgtcacatttctaaaaactagtctgtaaaaacacaatctgtaaaaattagtcacatttctgaattcaacctcttctaataatccagacaaaggaggaaaggggagggatgggtaagaggacaaagagaaggagaaggcggcgaggagtggggtggtaaaggaactcagaggtaaaattagaatattaaagactcctaacaatctgcttcccgcctcatacacatatagccagaaaaactaacttcctacagcagccaggaagcagccaacagctctactaaatcaccactctctactcaccctaggcaaacacgaaaaagaccagttcaaacagatgacatcctagctggcaatgacaaaggaggccaggggtgcaaccagcctgtccaaactgttacacatcactctaaatcattcagaccatgtctgcaaactttttaaggaaatattacaatggag

SEQ ID NO: 315960 - DNA, 580 bp, Homo Sapiens
  misc_feature (222)..(222): n is a, c, g, or t
  misc_feature (313)..(313): n is a, c, g, or t
atgacacctgtaatcctaacactttaggaataatgtaataatggcgcccggcctataaatggttccattctaaataatgaaccttggcttaaatgctcagggagagaaacactcccagccccagccccatccaagacacctgatgggaccaagatgccaacaggaggatccctgcttcctcctggaggcaggaggtggccccagaaacagcctccacgcttncttgtggcccttccaccatgacaggtgctgtctctttacccaccatccacagacagccccgatgacatctttatacacccgcatcccttcncttctggctactccaccttcatgcttgggcagggaaggggtcaatcaaaagccaccaaagctcagacaggggaacagcccagcactggaaccaggcaggagtcatttgaatccagattgagtgtgttaagactcaggcctacaatctgtggatgcatcccagggacccaggctttggggtgttccacagggcgtatgacctcccttacccctcgctacagcccgaggagggaggcccggagaaacacgcccggcagggttatgcaac

SEQ ID NO: 315961 - DNA, 609 bp, Homo Sapiens
ggtgctaccatgccaaaattgtgcacatatatatttcttatctcccatttctatttgagagtagctgtgtggatacatcccatgtggctcctttacattgatggtttataatctctaaggagtttctttgtaagagggcatcaaattaatgatatgtaaattatgagacccactgtgttaaagccatataaagtcttaatttagaacacaaaaaatacccttgaccttttaatattaatttaggttagaagagaacctcccctgccttttatataggcctctgattccttaagacacttcttctacacattcgttaagtacctgtgacccacagccacgttctatttaataccaaaaaaacccacttcatttccgagaagaccctccccccaggcttttcttcatccttccttgtaagatttcatatggcagcaccgaaggccaaaggggaccttgagaaccacctttcatatttaaggttcacacaaagcatggtttggtttctgcactctatatggaagacaaccgtgtgtatattctctagctatatcacaggtttcctccacctcgtgtgattgatgttcacagtatttgactctcctctcgtgc

SEQ ID NO: 315962 - DNA, 746 bp, Homo Sapiens
  misc_feature (562)..(584): n is a, c, g, or t
ttttaaagtttataaagctttattaaacatttcaaacagctgtcaacgaacacaccaaataaaagctctagaatagcagtccagacgtttcacaagtatggcctcacagtcccattccctagatggactgcctccagttctgttctctgcctggcccatctctctttcccctcaggcaagagagagatggatggatcagactgaaaggacaggcatgctgatctccagcaggcaggggcaggagaaagtctcgtttgccaacacttgttactgaagcgcagaaaaagcagcaagtgacagtcacaaagtcttcctgggtattcttcataacgtacagtctatatgcgcaggaacgaagaagctcctggcgggaggatgatggccactgctcccctctgtcttgtctgaaccacctcggagtccagtgtgctggtcactctgcaatccccatgctaaataaaaactgtaggcggcacctaccatatatagctagctattgctaaacctcaaaatcagaccacgttcgataaagcttcaaaaggaatatacacatgtatttgtnnnnnnnnnnnnnnnnnnnnnnncaaaaaatatccaaacatctatcaaggggatcaaggccgttacgaaacacacaggtactctcccactcactcagctggggactgctagaactacgtgaacacaccatacttcaatgctgcagagcatgcacgggagacacaatgaggccccctccatgggac

SEQ ID NO: 315963 - DNA, 943 bp, Homo Sapiens
  misc_feature (747)..(747): n is a, c, g, or t
  misc_feature (796)..(831): n is a, c, g, or t
  misc_feature (848)..(848): n is a, c, g, or t
  misc_feature (889)..(889): n is a, c, g, or t
  misc_feature (902)..(902): n is a, c, g, or t
  misc_feature (930)..(930): n is a, c, g, or t
attttcagtggctgtgagtaagctaagaatggtaatgcagtttcaggggttagaaaatccaattcaaattagtcctcactgcagctgtacgccgtcaggatttttcatggaaatgatgagtatgaagcccgcgaaaggtgttttaacagaacaagtggcaggtcctctgggacagaacctggaagtggaaccatactcgcaatacagcaatgttcagtttccccaagttcaaccacagatttcctcgtcatcctattattccaacctgggtttctacccccagcagcctgaagagtggtactctcctggaatatatgaactcaggcgtatgccagctgagactctctaccagggagaaactgaggtagcagagatgcctgtaacaaagaagccccgcatgggcgcgtcagcagggaggatcaaaggggatgagctgtgtgttgtttgtggagacagagcctctggataccactataatgcactgacctgtgaggggtgtaaaggtaagcatctttgattggcagttttctccttcaggttttactatattggttgttgaaatcccttgaactaattgcttcccttttcccaggcaacttcccattttctcctcctgtgcgcctacctcctcctacatcctcacctttgttgtgtagtcaaagatctgtaggaaaagactgttagagtatttagcttaatgtttaagactgttagagtatctagcttagagtgtttagctttcttccntttcacaacctcacacgtagctaaagggaacttatggattaaattgaannnnnnnnnnnnnnnnnnnnnnnnnnnnnnnnnnnnaaaaaaggaaaggaagnaagtgatgaacacatctctttaaaattaaggtcccggaggntacaacttattcnataaatattaaaatatttttcctgtacnttaggtaatgggg

SEQ ID NO: 315964 - DNA, 765 bp, Homo Sapiens
accacaacctacggttttagatacattttatctcatatccctcgtacatacttatacacatgtaactgaaacaaaatttcatgaaataccacttgtctttactccttgagggacactaatatttctattctattatattctaatccagtttttaatgctggtcacgagacactaaataaattttgtgatcccctgggaactgagacttgccattttaggagcactgcattaaataatgtctgttaaaatgttttttcaagtgtccattgatattaatattagaattgtctaatgtttggtttggaagaatagtgataatttgacataagagtctatgaagaatattaggggaaacatccttggatttcatccccataagatattcgtctgtttagaaccctataaaaatcaccccaacccaaactctcattccagtcttcgtgggtctgactgagccactatctttgacagacatctgttactgtcatctccaaccaaagtccccagatttcctcagtccagttgcaagagctcgacctgaaagcacctgtgaacagtgtcctacctttcgcgggcttcatactcatcatttccatgaaaaatcctgacggcgtacagctgcagtgaggactaatttgaattggattttctaacccctgaaactgcattaccattcttagcttattcacagccactgaaaatgagactaggtaaggagtgagagaggacagaggttgtgtggtttactgattaacttcattacgg

SEQ ID NO: 315965 - DNA, 289 bp, Homo Sapiens
  misc_feature (40)..(40): n is a, c, g, or t
  misc_feature (55)..(55): n is a, c, g, or t
  misc_feature (77)..(77): n is a, c, g, or t
  misc_feature (113)..(113): n is a, c, g, or t
  misc_feature (118)..(118): n is a, c, g, or t
gtttaagactgttagagtatctagcttagagtgtttagcnttcttccttttcacnacctcacacgtagctaaagggnacttatgattaaattggattttttgtaggttttgtntgttnttgttgtttttttaaaaaagaaagaagaaagtgatgaacacatctcttttaaaattaagatctagaagaatacaactttattcaataaatatttaaaaatatttttcatgtactttagttaattgagaaagagagaaagaaagagccaagtaataatagcttatattacaa

SEQ ID NO: 315966 - DNA, 882 bp, Homo Sapiens
cacataatgttttaaattattcagccactaaaaataaatttacatatgatttcattaatatattcactatctaaaccatattttttacactacgtaaaatacattgtatatgtacagtgagtgatgctttttgctttagttctcatttttcacattaaggggaggaacgctacccatagatagtattcttactccttttcacatgcttcaaggacagtttgcaagtggatataaatacatacacatcactagtgattatgcttttatttatttccaacttcttataggtaacataattttcagacaatgttagctgtttttaatccatcagtaaactgcattaagattcttaataaacaaacactgaaggcctctttcatatttgtatcatctgcatttttatttatatgcttgtcatgtggctttactttcagcctcactcttttcttcttccaaatggattatccttaaaccttttacctttaaagagcctgagatttatatttaactcgaacaacagtttgcctctgttgcccctgtgttcatgttttcctaagccagagtttcccacgcctcctgttcctggcagcccaagtgccttcgctgggctactcccacctggcccttgcttttcattccttagggcagtcacttagcaccttccaaagtgcctgcacatgtttcttatttcatttcttaaacattcatattaccactatttagattgaaggaacagaattggtttgggcttgaagagaatacaaagagatctgtcttcaattatctgatagtagtaaagtttcacgggagaaagaaagatttcggttccacataaggaaaaacttggaaagttttgaatggaaagttcatagagagattcag

SEQ ID NO: 315967 - DNA, 960 bp, Homo Sapiens
ggggagggcagcggaggaggcgaggagcgccgggtaccgggccgggggagccgcgggctctcggggaagagacggatgatgaacaagctttacatcgggaacctgagccccgctgtcaccgccgacgacctccggcagctctttggggacaggaagctgcccctggcgggacaggtcctgctgaagtccggctacgccttcgtggactaccccgaccagaactgggccatccgcgccatcgagaccctctcgggtaaagtggaattgcatgggaaaatcatggaagttgattactcagtctctaaaaagctaaggagcaggaaaattcagattcgaaacatccctcctcacctgcagtgggaggtgttggatggacttttggctcaatatgggacagtggagaatgtggaacaagtcaacacagacacagaaaccgccgttgtcaacgtcacatatgcaacaagagaagaagcaaaaatagccatggagaagctaagcgggcatcagtttgagaactactccttcaagatttcctacatcccggatgaagaggtgagctccccttcgccccctcagcgagcccagcgtggggaccactcttcccgggagcaaggccacgccccctgggggcacttctcaggccagacagattgatttcccgctgcggatcctggtccccacccagtttgttggtgccatcatcggaaaggagggcttgaccataaagaacatcactaagcagacccagtcccgggtagatatccatagaaaagagaactctggagctgcagagaagcctgtcaccatccatgccaccccagaggggacttctgaagcatgccgcatgattcttgaaatcatgcagaaagaggcagatgagaccaaactagccgaagagattcctctgaaaatcttggcacacaatggcttggttggaagactgattgggaaggcgtttgg

SEQ ID NO: 315968 - DNA, 1071 bp, Homo Sapiens
  misc_feature (27)..(27): n is a, c, g, or t
  misc_feature (34)..(34): n is a, c, g, or t
  misc_feature (39)..(39): n is a, c, g, or t
  misc_feature (57)..(57): n is a, c, g, or t
  misc_feature (106)..(106): n is a, c, g, or t
  misc_feature (132)..(132): n is a, c, g, or t
  misc_feature (856)..(856): n is a, c, g, or t
  misc_feature (936)..(936): n is a, c, g, or t
  misc_feature (1037)..(1037): n is a, c, g, or t
ggaaccaagttgctcttcttcgcaaancctcccngctgnaactcgtgctggcagagncctctggacttcaaggaaagcaagggatttgtctgctcctagggcaggnccatacccaagtaataggggcacttnagcttccacttggtgggtaaggcctgatcatagtattctgtcagataatgcctaaggaatgaccgctgaagaacgtggaccccatttggagtaccccggtctccagtcgtcatttttaaagtcccagtgagcattgtggtaagttgttcttagattgcagtttcttatgttttgaagtttgaagttgattttcagaatgttccttagaaaagaactgcatttttttcctttgtggatctgctttgtttggctgctgggatagataagcatgggcttaaaaaatgtgttcctcccagttttcttgcctttcctgttgtactctgaatttctctccctacctccctcactttcttcctctctccttcctttccttcctttttctctaccaggccatttttcaaatttacatcaaagatacctgaagtgttggtatctgagaatatctgtcactcctcttatctgagaagtgaccttttatttttaagatgactacagacctatttttagatatgttttcagtacaattttgaacagcaactttttaattaaacatcttccagtgttaggaagttgagaaacgttcataggcaagtctgctgttctatgtcaccatcttttgtctcccctagtcccccaggagctctttcctttcccctctagttttgggtgtgcatgtttggagtttgtagtgggtggtttgtctggaccattctgccttgctatngggttgttcaagaaagcctcattcttttctgtgaccctttcgcttttgcattcaccctccttcccacctacctgtcctgnggctgttgagcagcataataatcccgggagaatgattcccctcatagaaagacggttggatttggtgccctgaacttttttattaagaaatcagacccagngtgagagtacaggccatttggccggcctgtttgt

SEQ ID NO: 315969 - DNA, 1246 bp, Homo Sapiens
agaaatgtgtttgcggccgccccgtttgttccgcccccggtggccggaatttatgttggcccaaaggggggcgcaaagaggagggggaaaatgcccggaggggggatttcgaggtgtcacttccaataccccttgtggtggggggggatgtcccatgtccggggccagaaaggggttgtaaatggggaggttcccacccagttttttgtcaaacggaattgggccaacgggccggggggcgggaacatttggaataattggaagctgccccgctggaggcctcccccttgtggaagagggacgacgcgggaaaaggggcgttcccggaaaccgcccattgcggggaatattggttgcaaggaccgcctgcgggtttgccccgccgggggggttgtttttattggggggaagaatggcgaagccgcttgtcgatggccccggggttttccttgggaaaccaggctattagccagttgccctttgccttctggggccccgggccccaaacggaatggtttagaaaacttttgtgagggcgagggcggccaacagcgaatattgggtacagggaggagcgtgggcggcggaagagatgggaagggtggtagggagtgcgtggggggattatcaattttttttgagactcaaagcatccccaaaacattggagatccagcttattcctgagacatcaaccatcacaaaaggttttcactctgaactattcacatttttgtggcagaaaacagaacaaagttctgcagacatccttcctctctttctaaaatatattcacaaacagggtcttttcatagttcaaaagaaaaacaaacaggtttctttcttggccaaatggcctgttactctcaccctgggatctgatttcttaataaaaaagttcagggcaccaaatccaaccagaaattcccaggacaccagtggctacttaactatgaggggatggatgcttttgtctttctatgaggggaatcattctcccgggattattatgctgctcaacagccccaggacaggtaggtgggaaggagggtgaatgcaaaagcgaaagggtcacagaaaagaatgaggctttcttgaacaacccatagcaaggcagaatggtccagttttacaaaccacccactacaaactccaaacatgcacacccaaaactagaggggaaaggaaagagctcctgggggactaggggagacaaaagatggtgacatagaacagcagacttgcct

SEQ ID NO: 315970 - DNA, 735 bp, Homo Sapiens
ctaaaagaaaccattttctggaaaaattccaactttccaaaccttccaaaaaccataaaggaaacctggcaatctaaagaaacaaactaccaccaatggctcacttggacttaaaaaatggacgactggagacccgggtactcaaaatgggtcaacgttcttcagcggtcattcttaggcattatctgacagaatactatgatcaggccttacccaccaagtggaagctagagtgcctctattacttggtatggacctgctctaggagcagacaaaatcactttgctttcttgaagtacaagaggactctgccagcaacgagatgcaagcagggaggagtggcagaagaagagcaaaactggttaccaagggctctcttctgatgtacagagttaaaaatatctgcacaaatgcactaagtaaaagaatgggaagatgaactataataccaaagacagaagacattcctcccagaggaaagaaaggaagtggacctcaaaacagtgtcacagggtaacgctaccagagttgcacaagctgtgctctgtcccgagggacgaatacctcaaggtaaaagggaaagcagctctctttttatcatttccccctgctggttttaaagaccccaagcccagactcttgcaacactgaaccataggtgggatacagggaggagagacagagggtaaggaatatgaatggtgttaggcccaccaagctctgtatcccttcccc

SEQ ID NO: 315971 - DNA, 459 bp, Homo Sapiens
  misc_feature (383)..(392): n is a, c, g, or t
ttttctctccaatctggaatcctgacattgaacccagtttctcagggtcagcccattcttacttccctgggatcaaatcaagaagaagcatatgtcaccatgtccagcttctaccaaaaccagtgaagtgtaagaaacccagactgaacttaccgtgagcgacaaagatgatttaaaagggaagtctagagttcctagtctccctcacagcacagagaagacaaaattagcaaaaccccactacacagtctgcaagattctgaaacattgctttgaccactcttcctgagttcagtggcactcaacatgagtcaagagcatcctgcttctaccatgtggatttggtcacaaggtttaaggtgacccaatgattcagctatttnnnnnnnnnngaggaaagaatgaaagagtaaaggaaatgattgaggagtgaggaaggcaggaagagagcatgagagg

SEQ ID NO: 315972 - DNA, 862 bp, Homo Sapiens
  misc_feature (98)..(107): n is a, c, g, or t
  misc_feature (792)..(801): n is a, c, g, or t
cggacgcgtgggtttttttggtaaatttttgaaaaatattgctaaaagtgcatttaaggagattgggagacaattagcagaatggagaaagtaagtcnnnnnnnnnnccaaattattaattggtcctgtgtctatgtacctctagctgttcttttttgtacttttctggttccaaaccagtttattctgtggttctataataagttttgatataatcttggcttcttaaaaactgtgtatcattaaaatatatgttctgcaagaattaaaactgagtccatgaaaataccataggaagacataaaactttaaaaggcaactcaaagatgatggaaacgcacttacaagtggtgaccaaaatttttaggtgaagtcgagcactctaattagagaactggaggaaccacatataacacttaacttcccctaccctgcccctccccaaaagaaaccatgacaaacctagcttttaaaaaatattttaagaaagagaatgaactgtggaatttattggcagccaaggaatgtgtccaagacacatgctgaggttttgaataaaaagtgaacttttgtaatttgaattgggtcccgcttagttcttgaattgttatgaaaatcctatatctgtttgtatatttgcaaaccctttgtattataattgttgatattttccctttttaaaaaataccattgaaatcagcatgacaaaaataacactgttggcacttataggtaacgtgattgattcagtatcttagagtttacagtttgtgttttaaaaaaactgaaggnnnnnnnnnnaagtgcaacatttctgtatactgtaaaagttataataactgaactgtttggtcgagtcttt

SEQ ID NO: 315973 - DNA, 727 bp, Homo Sapiens
  misc_feature (186)..(186): n is a, c, g, or t
ctgcatatcatagcacacaaacagagccagctccaaaacacactgtaatacccacgatcactggatcattgagcatcgaactgtgacatcacttgggtgaaaggggaaacgcctatattaagcctaggaaatttgtatttacattaaaaagaaaggtcactgaaaagatttttttaaatctgtaanaatcaagaagtggtagttttcttactggtgggattagacctgctgatttcttctagtgctgccctctagagatacaaaaaattagaaagatttgacccttttaaaactcaaatatcaaccaagaaagacattgcttttggcagagaagcagaattttagaaatttgggacatgtttccaacaaatcacactttgtatcctatcgtgaatatgagtcaccatcaaactagaattcttcttttcacatcccatcttttgtccccttaatttttcactttccctttcattctttttcatttggctaccttatgagacttttctttactcattagcaatactaagagaaaaatacagtttaagattcaaatatgaatctagatgtacctttacatgctctaatcctgttttaacaccaagtccctggattctggagttatatttaagtatactcagtaccaagcagccttaagtatgctctactgtgaaaagattggctaatatgcttaggacacttttatactgaacggtatacaaacatcaac

SEQ ID NO: 315974 - DNA, 683 bp, Homo Sapiens
ttaataacaaaaaaaccatcagggggtggtaagttatgaccaccggcccaaatcaattggctcaaaatttagaatgattttgcctttataaacggttgtttaaaaaccaaatatgtaccagaaaccataggcccacagtataaagtatttatgatttaccccctacagaaaactgtggacccttgattccataatgtttcacattcacactgcactttcaaatgttactgcatgattgccaatacactaattggtttttctcttatgttttacagtgctttcatacacattatcagtcatttaaatcaacttcccacataaacaggaagaaaaaaatcaaggaaagtattaaacatgctcaacagtcccaggttctctcatctttaagcctagagatgggtattaaacccaggagtagcgttggcacagtccaccaaattatttggccactactatgagcagggagttcaggctgtccccttgggacctcgctttgtcccaggcacagtcaccctttccataaccatcactagaaatcccaaaccccagaatcctgctcacctaagctcaaagaaggaagctgttgctggcaggtgcttctcagaagtctggcacatctgtgtatttcttgtctaattcttctcattggcctggagcatctcttcacatttttctctagagag

SEQ ID NO: 315975 - DNA, 753 bp, Homo Sapiens
tcaaagttttcaaaacagtatattttattttacaatagcaaccaactccccagtttgtttcaattgtgacatctagatggcttaagattactttctggtggtcacccatgctgaacaatatttttcaatcttccaaacagcaaagactcaaaagagattctgcatttcacatcagttcacaagttcaagagtcttccatttatcttagcttttggaataaattatctttgaggtagaaggacaatgacgaagccacttaattccttgtgtctgcataaaagcagatttattcatcacaacttcatttatgtgaataaagcagatgatgataaaatgttctcttattcttgtttaatcagtagtggtagtgatgccagaaacttgtaaatgcacttcaaaaccaattgtggctcaagtgtaggtggttccccaaggctggtaccaatgagactggggtttggggaattagttggtcatcatccctcctgctgcccagcagtggtcagtcatttttcatgagggatggactaagctcaaagaaggaagcttgtgctggcaggtgcttctcaaaagtctggcacatctggggatttcttggctaaatcttctcattggcccggagcatctcttcacatttttctctagagaggctggcacttttttttccccaacaacctgaccattttatcttctagtctagggcttttggggcaaaaagaaggactggaatacagggtcacctatttgaatgtt

SEQ ID NO: 315976 - DNA, 372 bp, Homo Sapiens
gttctgaattggtcttaagaacattaccagctccaggtttaaattgttcagtttcatgcagttccaatagctgatcattgttgagatgaggacaaaatcctttgtcctcactagtttgctttacatttttgaaaagtattatttttgtccaagtgcttatcaactaaaccttgtgttaggtaagaatggaatttattaagtgaatcagtgtgacccttcttgtcataagattatcttaaagctgaagccaaaatatgcttctgtagtttctatagcaagccaattacatccataagtggagaaggaaatagataaatgtcaaagtatgattggtggagggagcaaggttgaagataatctggggttgaaatt

SEQ ID NO: 315977 - DNA, 926 bp, Homo Sapiens
tcatgacgaaaagacacttgcttattaattggcttggaaagtagaatataggagaaaggttactgtttattttttttcatgtattcattcattctacaaatatattcgggtgccaataggtacttggtataaggtttttggccccagagacatgggaaaaaaatgcatgccttcccagagaatgcctaatactttccttttggcttgttttcttgttaggggcatggcttagtccctaaataacattgtgtggtttaattcctactccgtatctcttctaccactctggccactacgataagcaggtagctgggttttgtagtgagcttgctccttaagttacaggaactctccttataatagacacttcattttcctagtccatccctcatgaaaaatgactgaccactgctgggcagcaggagggatgatgaccaactaattcccaaaccccagtctcattggtaccagccttggggaaccacctacacttgagccacaattggttttgaagtgcatttacaaggtttgtctattttcagttctttactttttacatgctgacacatacatacactgcctaaatagatctctttcagaaacaatcctcagataacgcatagcaaaatggagatggagacatgatttctcatgcaacagcttctctaattataccttagaaatgttctcctttttatcatcaaatctgctcaagaagggctttttatagtagaataatatcagtggatgaaaacagcttaacattttaccatgcttaagttttaagaataaaataaaaattggaaataattggccaaaattgaaaggaaaaatttttttaaaatttctctaaatgtaggcctggctgggctttgaccttttccgtttttaaatcactcacagagggtgggacaggaggaagagtg

SEQ ID NO: 315978 - DNA, 502 bp, Homo Sapiens
  misc_feature (311)..(311): n is a, c, g, or t
  misc_feature (348)..(348): n is a, c, g, or t
  misc_feature (385)..(385): n is a, c, g, or t
  misc_feature (390)..(390): n is a, c, g, or t
  misc_feature (423)..(423): n is a, c, g, or t
  misc_feature (446)..(446): n is a, c, g, or t
  misc_feature (451)..(451): n is a, c, g, or t
  misc_feature (491)..(491): n is a, c, g, or t
tcattcattctacaaatatattcgggtgccaataggtacttggtataaggtttttggccccagagacatgggaaaaaaatgcatgccttcccagagaatgcctaatactttccttttggcttgttttcttgttaggggcatggcttagtccctaaataacattgtgtggtttaattcctactccgtatctcttctaccactctgggccactacggataaggcaggtaggctggggttttgtaggtgaggcttgctccctttaagttacagggaactctccttattaataggacactttcattttccctagntcccatcccctcatggaaaaatggacttgaccactgntgggggcagcagggagggggatggatggaccccactnatttnccccaaacccccagtttttcattggggtacccnggccttggggggggaacccaccntacantttgagggccacaattggggtttttgaaggtggcattttncaggggttttt

SEQ ID NO: 315979 - DNA, 1176 bp, Homo Sapiens
  misc_feature (461)..(552): n is a, c, g, or t
gccggagtagggccccgttttacctggggcctcaaaggtgtcgtttattcatttggcaaatctccactgagtgaggaaatggatgggtgagaggatgggattagagaatgaacaaatgtcacctgcatattttcccaattccagcctgagcaggaacccggcaggagccaagagtcctttcaaggtgggagaacaccaggtattgctgatggggaaagtgaggtctgggaggctgggttgggcctaggacacgaggggcaagaacggagcttggggatgtggcagttcgtgtgtaaacaagtgacatcttcttggcgctcctcggcagacagcagggccttaggaaaatgtgctcaatggatagagtcccttagcagtggtgacagttgaggtggggaggactatttgaaatctcagcaaggaaactcctccacgagaatggaatgcttcggggccctcgnnnnnnnnnnnnnnnnnnnnnnnnnnnnnnnnnnnnnnnnnnnnnnnnnnnnnnnnnnnnnnnnnnnnnnnnnnnnnnnnnnnnnnnnnnnncaggctagactcaggcccagtggggacatgcagatggtggtgggaacggtcagagccaggtaggtgggcaggttgtcagacagccatgagggaggtgctgctgagaatgtgcacgggccacacgtgccttggcaggttgctgggcttgccggctatttcggtcccggaggtggagggtatgcagggcctggaggttgtccgggtcagcctttaggtgcacctggcccagaaattcatccttcagcactcggtggttccagacctgtacagtgatgggctggctcagcttcttgcggtagaagatgcctttcacattgtactctggtgtggaggtgcccttctgcacagccgagcggactttgtctccctcacacttgatgatcacataagagttagcccctgttggggagtccttgaggccagcagctcccaggacatgtacctgggtcaccagctgggggtagccacagagggagctccagcaggtgtgtgggggctcatccaggcgcagctcccggcagttggagggcacatcagtgaagactcggagcaggaactcgccagtgtggcctggctcgaaggttgtggggatgatgacatagcggccctcgggctggtcggtgc

SEQ ID NO: 315980 - DNA, 672 bp, Homo Sapiens
  misc_feature (60)..(60): n is a, c, g, or t
  misc_feature (130)..(130): n is a, c, g, or t
  misc_feature (139)..(139): n is a, c, g, or t
aagcctagggcctgacaaagtgaccctggataaatgtcatctccagcccatctgttttcnttagttctcataccatccaaatcctgcgtgaaagcattttgttctcctctgtaccagcacagggcatganattgtttgngagtctttgtaaccagtctgttcagtcctggtccctttccagtcccggtccctttccagcctctggagtcctgacagaagagaagcttgtaaggtagcagcaaaatgctgcatctgttagaatctcacaaactcacttggtctttgaatgtccattcttggataacgtccttatccatcctcttctcttcagtgaactttgatggaatatttccgcagtttcagaaactggaaaagcttgtcttttgtcctcttcttcaaggccatcagggcacgcgttttctcctccacatcttgatctatggcaaaaatgatcttggctctctcctctgctttcttgtctccagagtttctgaagagcctttctagtgattcttggtctgtgttttcaaagatgttgcccacggctttcttacgagaggctgtgtcgaagtggtagccatggatggatgggctgactcgtagcgacgtggacatgatgatggcttggtggcttcgctttgctttcatcgatgtggggatcttccggaattc

SEQ ID NO: 315981 - DNA, 420 bp, Homo Sapiens
cctgacagaagagaagcttgtaaggtagcagcaaaatgctgcatctgttagaatctcacaaactcacttggtctttgaatgtccattcttggataacgtccttatccatcctcttctcttcaggtcctcttcttcaaggccatcagggcacgcgttttctcctccacatcttgatctatggcaaaaatgatcttggctctctcctctgctttcttgtctccagagtttctgaagagcctttctagtgattcttggtctgtgttttcaaagatgttgcccacggctttcttacgagaggctgtgtcgaagtggtagccatggatggatgggctgactcgtagcgacgtggacatgatgatggcttggtggcttcgctttgctttcatcgatgtggggatcttccggaattcagctcgtgcc

SEQ ID NO: 315982 - DNA, 939 bp, Homo Sapiens
  misc_feature (175)..(176): n is a, c, g, or t
  misc_feature (184)..(198): n is a, c, g, or t
tatattatgagtgctgaacatctaccttctgaatttcaattaacaccatgtggcactttttcaggcatgtaatagggcaaataaataaccattattgattctaaaaatcaatccaatagcaatctccaggctggaaatatttttgtccccctttcccctcctcccttcccctatnntttggttnnnnnnnnnnnnnnngttcaacttcgatttaagtcctagggcctgacaaagtgaccctggataaatgtcatctccagccatctgttttctttagttctcattacatctgtccaggctcttctatcagcatcaatcctttcctgcagggacggaagagttttcaaatccttgctgaaagcattttgttctcctctgtaacagcacagggcatgaaattgtttggagtctttgtaaccagtctgttcagtcctggtccctttccagtcccggtccctttccagcctctggagtcctgacagaagagaagcttgtaaggtagcagcaaaatgctgcatctgttagaatctcacaaactcacttggtctttgaatgtccattcttggataacgtccttatccatcctcttctcttcagtgaactttgatggaatatttccgcagtttcagaaactggaaaagcttgtcttttgtcctcttcttcaaggccatcagggcacgcgttttctcctccacatcttgatctatggcaaaaatgatcttggctctctcctctgctttcttgtctccagagtttctgaagagcctttctagtgattcttggtctgtgttttcaaagatgttgcccacggctttcttacgagaggctgtgtcgaagtggtagccatggatggatgggctgactcgtagcgacgtggacatgatgatggcttggtggcttcgctttgctttcatcgatgtggggatcttccggaattca

SEQ ID NO: 315983 - DNA, 572 bp, Homo Sapiens
  misc_feature (170)..(170): n is a, c, g, or t
cagggatctgccccctgggcccaaaagtgctggatcacaggcgtgagcaccaaccctagcctcttctcatggagttttctaacttctccctctctcctttcccacttcaattggggcgcctgagctgataaagagaagggaagaggaaagccacagggtttccccccacntatacccaagggctggccttgggaattcatttcaatggactgtgctggccccttcaccctggggagcttggggcccagcccacagcagccatttacactgacatctcagttcctttatccagagcctcatggacatttgctccattggaaaagtcgcttcttgaacaaggctatccaggctctaaggtgttctctctgtaagagtgcagactctgctagtgcccccagaggcacagtcaaaagggcataaacaggctaactggaaactggatattctggagggatcggcttaatttgcagcttcaatttattatagaacacatggggagagagaaagcctagaacaaaaatcttacaaactactagaggatattataaagcagtattaatttggcatctttg

SEQ ID NO: 315984 - DNA, 458 bp, Homo Sapiens
  misc_feature (411)..(411): n is a, c, g, or t
  misc_feature (423)..(423): n is a, c, g, or t
  misc_feature (444)..(444): n is a, c, g, or t
tataaaccattaaatgcttttatttttcagattataattggagcataagcattaacttgtcttagaaaacatcattttaaatgacaacatagtattccattatcttggtgaacctaaatttacttaaatgctctttttagtagacgtttataatgtatcaatactttattatcccagtgctaccatgaccattgttgtatattacatatgtttttgcatgtttcctcaggcctcttatgattaattgctggagggtaggctgaggacggcaagaagggcatatggaattaacaaataaatgactcatagggacaaaggtaattaggccttgagggctttttaaaggggcaacattgggcagaatgtgacatgttagtgtcttaactcatccttgtagggtccatgctgccntagccatagggngggcactcccggaggagggtngggagtgaggcctt

SEQ ID NO: 315985 - DNA, 1545 bp, Homo Sapiens
ttaacaaaatgtattcatctttcttggaactgaaaaataaatctatgtacaaaacaggaagagatcaggctcttgtcacccactcctaaccctctgcagatttcctccgggatgctccgagatgggctggacctctgggaggttcccagagggtcggaagggaggtcctgctctgatccggggccagtttcgtcaggaagagggcggggctcaggatgctcataggctgggggcggagttttgtgtcccagactcgggatacgaaggagaggaaactaggatttccaaattctggagcaggactgaagttatttggggcagggagcttggattcgcaagatatggaattctgaagtgcggaaatatactcctaggggctgagtggtcctaggctcccgggctggaggtgggacctgtgctccttgggttaagggtgaaacctcagctcctacaagctgggaggagccctgagtaacgttggtctggctctaggtgagcggttccgaggaggagcttgggtttctaggggctgggcctttaaagactggtaattaggacccagcgtgaggtttccattggccggctgggattctgggagaagagacctatattctaacgactggggcagagccctgggttctgagctggagaaaatcgtgggtttgatacagactgtactcggggccgggaacttagggtttgggtagaggtgaggcctgtcccctttgggctgggggcagaacatgggctcagagttgggggactaagggcggagcctgggtccccacaagcggtccgaagtccccagtagttcagaggcctttgcgctgccgcttgaggaaagacagagtgtagtcactaggggtggacactttctgcttcttcatctgcacttgcgactgtgccgtgagttgcagcttgatggcgctcgagttgatcttggtggccaccagcagctccttcatgcccttcatcttctcactctggaaagtgagcactggaccctccggcggtggtgatgctgcgggtgctggcacctgagccgtgctgccaccttcagggcctcgggctgtgccagcgacagtcccaggaggcttccgggggggtcctgacactgcaccctggccggtgcccaggcccttgtccagtgctggcttcttgggcggcgggggctcctctggcttggactcccgccgtgggccccgccgccggccttcccgggcttcctcgccccacggctcctcggcctcggccgcctcggcctctcggctcactatgcgcaccttctgccgcacctgtccctcaaaacggcctagggactgcacaagaaaggtggcccagcccacgtgcagcacaggcgtgggactgccctcctcccatttgcagatgccatcgtagaatcgcagcaggtgggcgaagcactcagggtcctggagggcggaaccttggctctgggtgccctggctttgctcccccggccgctcctcgcccgcctccagcaagctggctcctcgtgccgaattcgccacccaggcctcgctactt

SEQ ID NO: 315986 - DNA, 548 bp, Homo Sapiens
ctggcctctcacaggacattttcttcccatagatagaaacagagggagctactctcaggctgcaggtaagatgaaggaggctgatccctgagattgttgggatattgtggtcaggagcctatgagggagctcacccaccccacagttcctctagccacatctgtgggctctgaccaggtcctgtttttgttctaccccaatcactgacagtgcccagggctctggggtgtctctcacagctaataaaggtgacactccagggcaggggccctgatgtgagtggggtgttgggggggaacagaggggacttagctgtgctattgggtttctttgacttggatgtcttgagcatgaaatgggctatttagagtgttacctctcactgtgactgatacgaatttgttcatgaatattttctctatagtgtgagacagcttccttgtgtgggactgagaagcaagatatcaatgtagcagaattgcacttgtgcctcacgaacatacataaattttaaaaataaagaataaaaatatatctttttatagata

SEQ ID NO: 315987 - DNA, 590 bp, Homo Sapiens
  misc_feature (68)..(142): n is a, c, g, or t
  misc_feature (343)..(367): n is a, c, g, or t
ggcggcgggacccccaggcctcctccggggtatgaaaatcggcagtgggttcctgagtggcggcggannnnnnnnnnnnnnnnnnnnnnnnnnnnnnnnnnnnnnnnnnnnnnnnnnnnnnnnnnnnnnnnnnnnnnnnnnnaggagggcagagatggaacccacctttccccaggccccggccgctgagccccccccttcgccagccccggacatgactttcaagaaggagccggcggcgtcagccgcgggcttcccctcgcagaggacctcctgggggttcttgcagtctttggttagcatcaaacaggagaaacccgcggatcctgaggagcagcagtcnnnnnnnnnnnnnnnnnnnnnnnnntatggggggctgttcgctggagctgaagagaggtctccaggcctaggaggcggtgaaggggggagtcacggcgtcatccaggacctcagtattctccaccagcatgtccagcagcaaccagcccagcaccaccgtgacgtattactcagcagcagtagcaggactgatgaccaccatggcactgaggagccaaagcaggacacttgtcaggctcttccccttc

SEQ ID NO: 315988 - DNA, 578 bp, Homo Sapiens
tttcactctttaaagttttatttcactaacttcagaccaaattcccacaactgtgttctggtcaatttactatccttgcttggcttccccaaatggtagtaccaaaagatttgtggggtagggagaagagaccactttaagaagcactgcatttactcatcttccacaaggcaacagagttgggcatctgattgttcaacaaaacaaagctttaatagcatccaggagggcagacaggcaaaccacgctgtagacactcttctatttgtcaaaatcagaccagagaaaacctactccacacagatataataggtattgatattcatcttttctttttctgttgccgcaacatttttcttcttttaatgatcatatcatgtagtttctcaagtccttcctttaggccatctcctatgattgcacaggtaggctgcaaatgccaaggagttgatgagctcagttcacccattgctaacaatttctcaatttctgacagtgacaatgagttcctcaaatcttgtttggttagcaactataagtacagggactccccgatttgctgatatcctagttaattt

SEQ ID NO: 315989 - DNA, 763 bp, Homo Sapiens
  misc_feature (704)..(704): n is a, c, g, or t
cttttaatgagtggagctggaattttatcagggagctatgcatgcatgtcaggggagatcaagtttatggtttccagaatctacactttctttttgagaatgggaacttttgccagtacattgttttcctatcctcatttccataatttctcaacaacagtaagtagttggaaggtcacatttgcaagttttttgaggagcctgggatgtaacttttctggagacttcaacctgctttaaatggtcacatgccccctgtgtccctcactgcctcccttctgctgagctctccccagtcctgggaaggctgattctttagctagagaacccagaccagccctgtggcctcatatttccacatcagccttcttgaatctgtgttcctcccccctcacttatctttttacatcaaacacatggctcaaagcttttgatatttgacttgactcttcaggaccccaagctcctctgactcagccctccaccccccacccctaacccacgggccactctgcttgagggctccccaaaacctcaaactccactcgtaagctccctggagcagccacaaggattttcggggtttggtttggttttgcctcttactcccttttcattttccctggcatcattcacattcaccaatcagattcattgttatcatctcctattcctcatgaagacctgaggtgagggggtatctnctcttgtccttctatccatgcctgtatgggttgtctgtggcctaccctctatcttgatc

SEQ ID NO: 315990 - DNA, 1973 bp, Homo Sapiens
  misc_feature (65)..(103): n is a, c, g, or t
  misc_feature (162)..(163): n is a, c, g, or t
  misc_feature (197)..(300): n is a, c, g, or t
ggggggataacccaaccccttgttcttgtgccccggtgttttctttgggaaaacaacttttttgnnnnnnnnnnnnnnnnnnnnnnnnnnnnnnnnnnnnnnnaaaagaatggttttaaaaaatttttttgggggccggagggggcccccacaaaaaaaatnngtttggtcctttttaggggtgtttctatggaaannnnnnnnnnnnnnnnnnnnnnnnnnnnnnnnnnnnnnnnnnnnnnnnnnnnnnnnnnnnnnnnnnnnnnnnnnnnnnnnnnnnnnnnnnnnnnnnnnnnnnnngaagggagacatgactttattagaaaaataaaaaacaactgaggtgatgggttggtcttcagcggatgccttggtggatgaggctgcttttggctgcactggccttctcccgctcccgccgccgcgcagggtccaactcaaaacagcgccatagcctcagggtctcatctgctgctgcggatgccactgtggccccatctgggctcatggtcagactcaggacccgggatgtgtgacctttgagttcagccaccttggccatggttgggtacttccaaataactagctggttctgtgcaaagccatggcctgagatgagctccttgtaatggggagaccagaggatggagcacacctgggaatgggcatccacggcactcagacaggccccagagcacacattccagatgcgaatgtgtcgatcactggtgccccctcctgttgccaggacattggactgccagggacaccatgctacggccttgacagccccttgatgctgggtgaatgtctgcagaggaacccagccaccctctccaggagcactaggccacacattgaccaagttatcattaccaccactggccaaatgtcgtccatctggggcccagcgcagcccacacacttcctggctgtggccactcagtgtggccacatggtgttctgctacccgaacatcatggtggtggatgtggccagaacgtgaaccactggacaggatatagctgttccagcttagggagcccactcgggcagagtgactggtcatatttcgaagccgtttctgctgctgcacatcccatagctgcacctcagcactgctggtgcccacagccaagtagttgccctctttgatccaggccacagaggatatatattccccaggctgctccatttgcaaaagctgcaggatgtcaccagagcttgcactccacaggtacacactgttgtccagtgccacggccagtacattcccagaactccaatccacaaggttcaggtaatagtcatttcggatttcaggcgcatccaggatacggtctggcagggaaggaatgtaacggcaggtcttccggctggagccaggagtggccttttggctgtagagtactttcagtctgttctgataaccctctggcgcattttgtggttttccactgagccgaaggatcttggcttcctctacatcaaaaccgttcaggttcaaagcccaggctttctgatgttccttcttggtgggcgtctggctgttttcaggctggttctccttgctcaggaggaagctggccacctccatctgggcagcactgcgatgggggatatagcggtcaccgccaggtttgctaggagtggtctgaaccttggaactggatttgccaggagttcggcccggagtcctgccggcgctgtgggatcggttggcggcccgcatgggtgagggggccgggcctgcggcttccttggctttgcgctgccagcgcgcagggggtgcattggggatgggtgcatccagctgaagcagcgagtgcaggtcactctcgaacgcgaactgtgccatgggagcgcccgcagggggaggggtccttgcagttggtgcctacggagcccgtgccctccggagcagttccgaccggctttaacacgcctggcttacgcctcttaaactctccccc

SEQ ID NO: 315991 - DNA, 902 bp, Homo Sapiens
  misc_feature (113)..(114): n is a, c, g, or t
  misc_feature (116)..(119): n is a, c, g, or t
  misc_feature (121)..(122): n is a, c, g, or t
  misc_feature (130)..(130): n is a, c, g, or t
  misc_feature (132)..(139): n is a, c, g, or t
  misc_feature (144)..(198): n is a, c, g, or t
  misc_feature (207)..(326): n is a, c, g, or t
ttgggaaaccagctttagccccattttccatttaccctaatgggggcccgcggccccaaaaagaaatggtttttgaaaagatttttgaggggcagagggcggccccacagggnntnnnntnntttttttntnnnnnnnntttcnnnnnnnnnnnnnnnnnnnnnnnnnnnnnnnnnnnnnnnnnnnnnnnnnnnnnnnttttggagnnnnnnnnnnnnnnnnnnnnnnnnnnnnnnnnnnnnnnnnnnnnnnnnnnnnnnnnnnnnnnnnnnnnnnnnnnnnnnnnnnnnnnnnnnnnnnnnnnnnnnnnnnnnnnnnnnnnnnnntacagccataattttacaattgtaataaaaactctggaaaatgcatggtgctaactgatttatcagaaagtcttgacccaccaagaaatcagaaaagacctccctgaggaaggaacatttaggatcagctaggtggaaagtgaaaggaagagtgttgcaggcagagaggacagtgtgtgagggtctgaggcaagacatgtaatgaactgaaaggccagtgtgtctaggccatagagaacaaagaggggtgttgcgagatgagcctgatttatacaagatctttgaatttaggactttattccaaaagcagttggaagccactgaagaagctaaggaaagttcgatgtttaggtttgtttttcatagctgactctcattgcagcatggaagtcagaagtggaaatgggagaacaggttaggaagtttccgtagcagtttagacaagaggtgatggtaacttggagaaaagaagataggttccagagatatttaggagacagattacacttgatgagtgactggatgtgtgaggaaagggatgtgtttctagcaagagacattgaagtaggagtctct

SEQ ID NO: 315992 - DNA, 481 bp, Homo Sapiens
ggagttcattcaaaatttattgagctgcaactgtgtgctcagcaatgagaatatagcagtgagcaagatgtgaaaaagatctctgccctcgtgagcttacaatctagcagcgcagccagcctattacagccataattttacaattgtaataaaaactctggaaaatgcatggtgctaactgatttatcagaaagtcttgacccaccaagaaatcagaaaagacctccctgaggaaggaacatttaggatcagctaggtggaaagtgaaaggaagagtgttgcaggcagagaggacagtgtgtgagggtctgaggcaagacatgtaatgaactgaaagccagtgtgtctaggccatagagaacaaagaggggtgttgcgagatgagcctgatttatacaagatctttgaatttaggactttattccaaaagcagttggaagccactgaagaagctaaggaaagttcgatgtttaggtttgtt

SEQ ID NO: 315993 - DNA, 612 bp, Homo Sapiens
  misc_feature (65)..(65): n is a, c, g, or t
  misc_feature (103)..(104): n is a, c, g, or t
  misc_feature (113)..(113): n is a, c, g, or t
  misc_feature (129)..(129): n is a, c, g, or t
  misc_feature (180)..(180): n is a, c, g, or t
  misc_feature (183)..(183): n is a, c, g, or t
  misc_feature (189)..(189): n is a, c, g, or t
  misc_feature (230)..(230): n is a, c, g, or t
  misc_feature (233)..(233): n is a, c, g, or t
ccaacccccaagggcatgttgtccagtgcttgaagaaaatttctggatccctccttctgtaatcntgtgaatgattgaaagcccaccacgctgtcatcatcannagtcttganaaatgagaggactcgnagacaatgaagctgctgacactgctgaatgatcagtttggccactcgatanatnccatcnccagtaggaaggatcaattcttccaggttactaagagaacntanaatgtaggcaaatctgatgtttcctcatcaggaaattgctggccttcaagatttaatatcttcagagaaataaaatttggcaaactggcaacaaatgggacggcttgaaaaaatgaatccgaaaacttaatttctgtgagtttcttacaggaaacaagcatagtcatgagagacccaaaatccgaaaagaagttacacttcagatggaaaacatgaaggtttggagaattttgaattaattttactagtttggaaggatcatactcagctgaaatttggatcaataatttctccatatggtggaagtttggaaattcttcaggaatgactgaaaaaacatttatattgccctccagatccacagacagttctttcaggc

SEQ ID NO: 315994 - DNA, 1236 bp, Homo Sapiens
tttttttaatgactcataaattctttattttggctaatactgattgcattcattactaccattttatttattacagctcagaggagagtcatttactagacattcggttgttattaaacactaaaaattaggcagagactggaggggataaggataagagaacaggataaggagagcagaaagacgctcaggagagtagaaagacactcaggagagaacaagagatcctgcccattcttattatgaggatgaactggctacaggacatgagtagcccaatcagatctaacttaaataccagcctctccaaaaaagttttccaataaagatcccctaacaattatttactggacaaaaaaggttgatatttctagaagagatgatctcgttgacacaaaagacccaacttaggacccaacttaatacatagatagcaccatgacagagctgggatccattaagacatgactgtagacaataccatctctaggaacacactgtcactcacacatggatgtgttgttttatggcctaaagatgttgtagacggttctcacataaatttcatcagggggaggcttcttcttgctgccaggttcaaggaatctcttaattgtagggatattacttagtttcactgtgtattcctggaggaaaggaaatgcagacaggatattaggaattttctcttctagagctaaaatggtttggagtaaaatcacatctgcaaggctcagctgattaccaacaagaaagctttgtccgtgaccccttaaaatcttttcaaacacaggaaagtatctaattatagccttctgggccatgttaaccacttccttttgctgatcatctggttttaagaaaggatgcatgataagcagttccagcagatccagtgtcccctccacgtacatgtcaatcagggttctctccttgaggttcttgccaaagagattgtgcttgtctgctatgtagtggagaatgcttcgggtctgtaccaacttcatcccgtcaatttcaaccatgggcacttgttggaacagcaggtggttaccatcctgcaacttgtacaactgttcttttgtttccagaaattcttcatcaaactcgactccggcggcagctaaaacccatctcacggactccatccggcctcttccgttgggatagtggagcttgggccttgctgccatgatagcttttcaggctttctggagtccactcgccggcctggag

SEQ ID NO: 315995 - DNA, 1588 bp, Homo Sapiens
gaaataattgaagaattcagttaaatatttattgaacaaatgcagagtaaatgaactaagggctgttataaccttaagttacaacaaacaacttcaaatattcagagggctgtcacacagagaatgaaagacttgctcagtatttctccaaagggcagaacttgagccaagggataaatataagcaaccaatgggctgcaggatagttgtacaaagtgtatcatgtatcttcatagcttctttgcccatataatgcattccacacttaagtttctccttctaaacatggcgagccctccactgccagcaatggatatactcacactattggaaaaaatctaaagtgaacaaactggtttagtatggaaatggtctatttgttcctcagctatgtttctgtatcttacattagtggctctcaggaggtggggggtgaaaagagagcatgttctccaaagagggtgaatcataatccccagtgattcagatactgtgcctggggacaatctttcttcaagtccaaatgaatcattataattatcaaccaatggtacatataagagtacggcatgtgctgggacagagaaaagacagttgacaaacactattctacatgaaacaggaaatcttattttatgagtcactagaaaactaactgtaatactgacaggctccatccagattattaaatactacaaaatgagaactgtttcaacaactattcagcataacgtttatggacaaaatgtatatagtatatcttatattctatatgtattttatcacatagtaaggaatgctgaggtgcttaagccatccaataaattgaaaatacaaactttacatttctacgtttgtcagtatacaggattctgaagatgaatcttgaactcagagtgataaatcagttttcaaggaaagccacataatccgtcagtctggctaactgctgttcattgggtattgggggaactggagcaggctctgataagggaataaacttgttaaaggaaacatccagggcccctgcaactggctttctgggcagaaccattcttgtggtggaatcagcttgccatccttgttctaatatgcctttcacagcctcttctacaggaagtccaacaaaggctgcaaaatcatcggcgatgattgaagtatacgcttgagagaccagggcaaaggcgcgtctccttgttgcatctctaagtgcttccataattggctggaccgtctcagaccactggtgagcgttgatggttgtatagatcccagggaaatctctctgccagattctttgtcctactgaccaaattcccccaagttcagaatttgcagattttatagcaggtggtattcttttccaaagatatcttgcattattcatgtcattatggagcaaatataaagctagaagctgaccatacactgggggtgtagcaattcctccaggggcctcgagctcctggttctcgcactgatccagcaactttttgaaactaaaggcgctttccgccatcaccgccactggcatcttcgcggccggcctcgccgctgcaccgtccggacagccaaaccccagactccc

SEQ ID NO: 315996 - DNA, 811 bp, Homo Sapiens
ttgtggttccaaatgtcgcctttactgctgagacaatggtggtgcaggaaggggagcctgcagtctgggcggggggcaaggaaggggagcgtgtgcttggcccagtgccgccaccactggggagtgggaggctcaggcagacctagggccctgggaccgtggcccttggctttgttctagggagggcacaagacagcctgcaggtctttgggcagggagccgatgaccgtctcgatgtacagctgtgcccgctgcagcgtagcctccttcacagggagctggtggccctgagcccgtaccagcttctcacgaagtttcaggaccaggtccacgacctccacctcggacttgttctttcatccaggtctcgatgttcgcctcacagatagcctccaggtgcagggcctccagcttcagggccatctccttgtgccgctgccggtaccagccatcaaaatggggggacttgaaaaaccgcctgtagagacccagccagtcgcccttgaggatgcaggtgagctggggcccagcatgctccaggctacgcaggaagtcatcctggctgaagggctggatctgggggggagtcttccagggcgtgatgctcttctgcaggggcatgaggctggccatgtagtgctccagggggatgatgaagctctgggtgagctccaggaggtgccgccgcagcagggcgctctgcacatctgacggccgcttcttctgcacgcccttgagcagccgtttgagcagcgccttgtcgcggtggaggtgggccgtgttcagcttgacttgcttaggcaggtctcct

SEQ ID NO: 315997 - DNA, 636 bp, Homo Sapiens
caatgagtctgaagagaaaatcatagactacagctgcactaacagctgtgatgccaaaaggcaggatgccaatccatggaaaggcattatacaagaagactgaggcactggcagctagttccacattttcactaaataactcaatcatgtgctgacaatcggtgtcttcataagtgaatcgttctccaaaaatggatcagattggttatgtttgaaacagcattcgttattaactgtttaaagtcaaaaggtctacctttgtatgtttcaatagcatcattgaaaaatttggtttcttccaagattttagattcaaaagacttttggccatatccaaaatatcgaaaactgtttacagctaatcgtctgtgatcaacccatcctcggccatatctggaattgagtaagcctcccatttttgtcatcttcatgaataaaggaaggcatggtctgtctgcaaaaatttcgctttgatgaacaaggcattcctttactacatcatagccatttagaaccacagttgatatgcctccaagatctaaactgaagatctttattatctcgtccagcttccctttaacaacgtaaactattcgtgaaccatgaaaggaacgtaaaccattagtgactttctat

SEQ ID NO: 315998 - DNA, 1256 bp, Homo Sapiens
  misc_feature (38)..(38): n is a, c, g, or t
  misc_feature (88)..(88): n is a, c, g, or t
  misc_feature (133)..(133): n is a, c, g, or t
  misc_feature (760)..(760): n is a, c, g, or t
  misc_feature (898)..(898): n is a, c, g, or t
cttttcaaaaatccaccccctccacagttactttgggnccgggaacttgttcctttgggaccctttgggattagtgaaaagagtactnaattcagggagacaaagtctgttttgctcctttgaccgttacccncctgctcccctgtctggtatggacaagatacatagccataatgattgcttaaagttcaatttcaaacgtcttctgtaagtcactggagaaagggttggtaggggagggattagtacgctgcttggacttattttctaatgcagcccactgggcttcaaaaggatccactgggcaggtgcctgtaggaacctctgtatgcctgtctgctgaggccaacctgccatcatctacaccattgaaagctgcagaaccgttgaggtgctgagcaggaggcttaaagaagggactggtggtagcactgcttgcctcgtagtgagggaatgtctgctgcctgaccaggctgggtgactgatggggatgggcagcctgagggtggcctgcagtgccaaatacgttggccaccatctgggagggagtgatgcccaccacaggcacattaggggctggatagggcattccattggccacaggataggactgggcagggacaaaggctggttgcagggctgggaccacacccactggcacaggctgagaggtgaggaatgcattcccttggaaaggtgatgctggctgggagatggcagtgggtggaggaggctggagaactggctgcagaggagcagnctgaggcctggggctgctgagcccggacgctcttagacacctcttctaaccatcggtcggcctcagagggagtacgtctatgaccggcctggaagagacctggagaggcagcaccagaagattgaccccactcggtcnccgaacatgtggctgcaaccttgttagcagcatcaggggcatgggcccaagggttggtttcacgcacaggcattgctacgggtgctagagcagtatgggctggcttagcaagcacatggaaggctgagtcagtgccattagcttggaaggtaggagattgtggtgccaccactgtcactggtttggtcatcggagcagatgagaaggggtcctcaggtgtgctgaaggcattggtgatctgtgtaatggggaaatcagtcttcctctgcatagtggaaggcaactcattgatgcgtagggatagttggcgtttaaagggtgacatcttctggctaagagcaggaaaacctcggaaaga

SEQ ID NO: 315999 - DNA, 476 bp, Homo Sapiens
  misc_feature (48)..(56): n is a, c, g, or t
caagctttggaaaattgtaaaatataatgaccaataatgtcctggttnnnnnnnnntctctcaaaatttgatttggaaatttctatagtgagtgaccacatatccctggtctgcccaggacaaactcagattacacctgtttttactgcataagtgtagatagcaaataataggcttgccctacctatagtgtttttaccaccctctctctttgagactggaggaaaaagaaatggtaggaattttaatatttagtattctactgatatcctcagaaaaaaacatgaaatgatcaaagttattctaagttctccattataactctcccaacctactcactgccaaccaacagataccaagtgccttccccttccaccatcccatacactccatgcttaaaactttggtacaatcacactttttccccctaaaggatatatttagtcttctagaatatccaaggtgacaatttaacc

SEQ ID NO: 316000 - DNA, 235 bp, Homo Sapiens
aagcactgcctcatagagattattcagataatgtatgaacttaattatttcatatatgattaacaagcagaccataggccagtgtctgactttcactgggaggtcttggcacccttcctcaccttgatggtaaggccccaggacatggtggagaggtaatcaagggcatcttagttaggatcagttggcaatgtgaaccggtcattctacactattcagtgatgtgcgggtttac

SEQ ID NO: 316001 - DNA, 664 bp, Homo Sapiens
  misc_feature (292)..(309): n is a, c, g, or t
taagagagcgcaaagcagtttattctagcgagcaagggagtgagcgtccaggaaggagcaggtgtaacccggcggtcagtggagcctcagtgaggtgtgtcctgttttttcctgcaatcgccgcagaagacaccaatggtcgcgttcaccagctggatcccacacagtactatctccaggcaggaggcggccaccagcagcgagaagagcgtcacattccaggggaccacgcgagggggcgcctcgcaccgatcccatagagtgcggttgagcaagtaagcttctccggccnnnnnnnnnnnnnnnnnntttcttcgaagtggtagccccactcgccgttcattaagcatctgggtccatttcggagcccagctccagacaccgagaggcagtagatggcaccaagcaccccgaacgccgaggagaagaccgagcgcagcatcgtgcagcggtttcccgagcacccagcaccacagcagcccttgccccctgcccgaacggctgcaatccctggacacagtacctttaggcccgtgccaatgaggtccgcccatgagccagacttgcaagctgagatggttggtgttggtccaggaggtcttcccattaggtaccagcaggagggcgttggccacacccgtacacatggtgaggtgtcagaaag

SEQ ID NO: 316002 - DNA, 703 bp, Homo Sapiens
ttttagagagcgcaaagcagttttattctagcgagcaagggagtgagcgtccaggaaggagcaggtgtaacccggcggtcagtggagcctcagtgaggtgtgtcctgttttttcctgcaatcgccgcagaagacaccaatggtcgcgttcaccagctggatcccacacagtactatctccaggcaggaggcggccaccagcagcgagaagagcgtcacattccaggggaccacgcgagggggcgcctcgcaccgatcccatagagtgcggttgagcaagtaagctcccgcggtgtcttcgaagtggtagccccactcgccgttcattaagcatctgggtccatttcggagcccagctccagacaccgagaggcagtagatggcaccaagcaccccgaacgccgaggagaagaccgagcgcagcatcctgcagcggtttccacagcacccagcaccacagcagcccttgccccctgcccgaacggctgcaatccctggacacagtaccattaggcccccgccaatgaagccgcccatgagccagacttgcaagctgagatggttggtgttggtccaggaggtctccccattaggtaccagcaggagggcgttggccacaatgcagacgaggcagagggtaatgagggagagccccacacagcgggcacattttcccgtacacatggtgaggtgtccaggaagga

SEQ ID NO: 316003 - DNA, 1221 bp, Homo Sapiens
  misc_feature (732)..(732): n is a, c, g, or t
  misc_feature (784)..(784): n is a, c, g, or t
  misc_feature (841)..(841): n is a, c, g, or t
ggagtactggggacctggaacctgggcgtactacagcgccatttgcatgcccttggtcgctggcttctgcgctttcttcctctccgaagttgagtatctcctatctgtgtcctcatacatactgccgcctgatgtgccatggcccccaagccgggggccgagtggagcacagccctgtcccatctggtgctgggagtggtgtctctgcacgcagccgtgagcacagccgaggcaagtcgcaggggctgctgctggcttcctgctcccggtcttggctgctaccaccacgctggcccctgggctgagcacccatgaaataccgcccttgctggactcttggtgtggccacccgtcatccggcccttccccttcctggcccttcgactttcccactgggggcgaatggggggaccgcctccctcctgctcagaccctgcctcctcggggagcgcaaggttatcggcggcctgggcacatggcccgcggcgggtccacccgttctggcctcctctcgaagaaagcgcttcccctaggaaccccatttctcctctcggccgtcccccgggggccccctctttacacgcttataagtcggaaacgcatcgggactccacgcaacgcgttgtgcctcttcccctcacggcgcacaaaatatccgcctgcgcggttcacctcgccacctttacaggtgtcgcctcgttcggcatgggactgttctttagccccaccgtncgacgttttattgtacgcctccagcatttgtctctcggtttcagcgccggtntcccacaacccctgagcaacgtaccactcttcttcgcgctaaacacaccataatttncgccccctcacataggacgcacgtgcttcccacacacccgagatgcgaccccctctctcattatgcgggcgtacagtgctcttaatccgcgacgacaccccgcgcgtacactcttttaacacacgccccacgcctttccctccactttatcccataccgcgtcttatagataagcccctcgcggtcagctcctcgccacccgctcatatgtggttacacgctacgctcgtgactgtgcgggttatcttaccactgctcgaggacacttcagtttccactcgtattctttttttctcgcgttgcgccccgcgccctacactattgtggatgtccacgggtgaacagattatttttttcccccgcctcgtgtgagacatcga

SEQ ID NO: 316004 - DNA, 476 bp, Homo Sapiens
  misc_feature (78)..(78): n is a, c, g, or t
  misc_feature (166)..(230): n is a, c, g, or t
atagcaagacccattctcttggcatttaatatgtactagctcatttaactcattcagcatttaaactactgaagtgcnctactatgttaagcagtagggaccaatgaataaaaagagagaaagctagcatttattgtacccctacgtgccaggcattgggtactcnnnnnnnnnnnnnnnnnnnnnnnnnnnnnnnnnnnnnnnnnnnnnnnnnnnnnnnnnnnnnnnnntagcaacaaggacttaaataaataagcagataattccagaacctgataaatgcaataaagataataaaacagtgatatgagagtgattagggagaggcactaatttagacagagggacaggaaaagcatctttgggatggtgacatttcagctgaggtttgaagagagcattgtagacagatggaagagtaagtgcaaagttcctgttagaaacaagttttagggggcgggtgtggtggctcacac

SEQ ID NO: 316005 - DNA, 618 bp, Homo Sapiens
  misc_feature (148)..(242): n is a, c, g, or t
ccctttcctttttcccctgaagaggggagccccagcccctactctccctcttcccctccccaataagaatgggagaagaaaggacctagaaaagatcagaggataaatcctaaaaacaatgaggtgagatgtgtgctgccacctgccnnnnnnnnnnnnnnnnnnnnnnnnnnnnnnnnnnnnnnnnnnnnnnnnnnnnnnnnnnnnnnnnnnnnnnnnnnnnnnnnnnnnnnnnnnnnnnnttggcatttaatatgtactagctcatttaactcattcagcaattaaactactgagtgcctactatgttaagcagtagggaacaatgaaaaaatattgtctttgccttcaaacagttcaaagaagcatcataacaggaatttttaaaaagagagaaagctagcatttattgtacccctacgtgccaggcattgggtactcagaagagaacacatatagaaagtcatgtccacatggagcttacattctagtggaaggaaacagactagcaacaaggacttaaataaataagcagataattccagaacctgataaatgcaataaagataataaaacagtgatatgagagtgattagggagaggcactaatttagacag

SEQ ID NO: 316006 - DNA, 746 bp, Homo Sapiens
  misc_feature (653)..(653): n is a, c, g, or t
  misc_feature (668)..(668): n is a, c, g, or t
  misc_feature (678)..(678): n is a, c, g, or t
  misc_feature (684)..(684): n is a, c, g, or t
  misc_feature (704)..(704): n is a, c, g, or t
  misc_feature (721)..(721): n is a, c, g, or t
caagaacgtctaagaaaacggaaaatgacatagaggatttgcactgtagctaagacttcacgcaaggctgtggcagctgaaagcatgttctggtgctggggctgcgtggcagagccaggagcccaggatccagcgcactgggcaccgacctgggacctggtcatctttgcgtgtggaaaagatggcatttccagttattgacaggtgaatgctggccttttagggaaaaaaaatattagaattccatacagaataaagaatgaagatgagaggttaaaggtttttctaaggcatgaagagctgtgggggcagcctgcctttgttctttttgttgtgtgtccttcacatgcagtaactctgttcacgcctcacaaaaaccctatgaggtggagacctgccatcaacccttcctgcacgggtgccactgaggccccaaggttaaatcatttcccaaagtgtatcagcagaggcacagcacagagacacgtccgcacagagagctttccagatcaccagtaacagcgtgagatcatggtgcagaaggtcatgaggaggatggcaacgagcgagacacagccggttggtgctcacaaggacattgggtaagatcttgactgagggccaggtcggctagggccttcccagggtgacanggagcccagtgccgnccttggtgcnaacagngcgtccttgtgctttctcanggagagcttcactgggngacactctgtgatggtttttggagg

SEQ ID NO: 316007 - DNA, 1851 bp, Homo Sapiens
  misc_feature (34)..(34): n is a, c, g, or t
  misc_feature (509)..(521): n is a, c, g, or t
  misc_feature (527)..(529): n is a, c, g, or t
  misc_feature (535)..(535): n is a, c, g, or t
  misc_feature (547)..(547): n is a, c, g, or t
  misc_feature (550)..(550): n is a, c, g, or t
  misc_feature (577)..(577): n is a, c, g, or t
  misc_feature (1247)..(1247): n is a, c, g, or t
  misc_feature (1297)..(1297): n is a, c, g, or t
  misc_feature (1303)..(1303): n is a, c, g, or t
  misc_feature (1342)..(1342): n is a, c, g, or t
  misc_feature (1356)..(1356): n is a, c, g, or t
  misc_feature (1360)..(1361): n is a, c, g, or t
  misc_feature (1406)..(1406): n is a, c, g, or t
  misc_feature (1459)..(1460): n is a, c, g, or t
  misc_feature (1464)..(1464): n is a, c, g, or t
  misc_feature (1591)..(1591): n is a, c, g, or t
  misc_feature (1611)..(1611): n is a, c, g, or t
  misc_feature (1736)..(1736): n is a, c, g, or t
  misc_feature (1760)..(1760): n is a, c, g, or t
taaagtccttttaatggaaaatgtaaaacccctnttcaactttaatgtacaaagccatatgtaacacttgcactttaacaaaagcaagccaatgttttaaaaaaatacatcattaaatgtatatatgtatatatttacatagcatattaagtttaatatttagctttaaaagttcacataaattttaccaaaatgagacaattttaaataaattacaccttttgaaaatgtttaattgtacagtcaatagcttcaacaaaatattgaagtgtctgtatttagtatctactttatatactttatactttacaaattttacaattatttggcagtcattttctgattatgacatgactgctgtgcgattcagcaatttcccagatgcaggcaatagctggtgtttgtgtcctattctcacagtaactgtctcaatgtagtgaaaaatatcagtaattttagtaaactgtacaaggtcacatttacacttgatcaacaatatagcatagaannnnnnnnnnnnnaccaannntcaatncctccttttccntcnggccttttcaccaacctcatatacacnatcataccccaccgccatatagtgctgcttttaaaattctgcttgttttataacattgaatcacaggagctgtgacatgtgctatactgctgtggtgtcagtaacaagtaattactacaaagagaatttcttggcactgatggttttatgaagcttaaagtcagtgtgcatacatatcatcattcaaggttaagtaatcccagttcaacaacctaaaaatatcaaactggatcacacttaattttcttccatatcctctacttcatcctcgtgtatcttcaaggctctcaccatttctttgactgcatgatacaaaatatttttaacctgtagtttatcatcataattgatttcttccttcaaaagtctcagttcctgtgttaaatgaaatgactctacaagatgttctggagacacaaaatcttcagttacctgaatacagctgtgaaaattctgaacctgatgaaagtgctcccgctggcaaaacaatagcatcaccaaggaactgaataagagtacaggttctgactccatattcttcaagcagcctttgacggagctttttgttcacataccaactttggtcacgtattggatcatgttctggtagaacttcaaggccttgttcttttgaaatcttttgaagaaattcccttatcttgtcaacatntttcccagcataaatatgccacagagcaccaggtatgtcacttgagtccntcaatnttttcctgaaaatgtcatccaaatcttcttcctcaaatntcttgagaattccngctnntgagagaatgccatttccttttgctatgccaacataaactagtanatttacaacatcagaaacttcaatatggagatttgttgttcctatatcatganntttngcagcaactacaccataggcactgcacaacctgggtcctagatcaggacgtacaaaaaatcctggcaaatgagaggccaaattgaattttccttctggattacaatattctggcaatggcagacttnttaaaagatcttcgtatctngctggcatcatagtcttgaagtcttctcctgaaggccagtctttcaattttaaaacaactgtttctccactcttgtttttctgccgttttgaaacttcttcaaaaccatcccagaattccttaanattggcatttgaaatgatgctatntttgcagttcaggagatcagcttggtggtctccaaaatcaagactaattgattccgccttccataggctaatgttcattttcttatgcaca

SEQ ID NO: 316008 - DNA, 1310 bp, Homo Sapiens
aagagggcccacttggaacaatggttctcaaccaaggggcaggcctgtgcaagaaggactctcaagaggtggtatccaatatacataagcccctaattccctcccacttgaaaatcagtgcgtgtaaggagagaaattcctgacgggagtgtgtcatatgtgtgaaccatggctgaagcagaccaaaaagcagatattttctgattaagttacaaacattctccctatagctaaactccgtgactaggctcccagcctcatggccaagaacaataagttcacccacttatctggagtaaccatactagattaaagaaatacaattctttcttctaaagacaatttccagaaagacctgcctttccctatgggtacttgacactaggtcccagcacaggctaatcgctgtatggtttcttcgaagattggcttttctcagtttctttctctttgatactgtacaaggggtccaccaacttgttatgaccaagcattaaacctttgaaatacttgacagtcttcactttcagctccaaggtggcatcctcgtcacacacaaacacggtgcggggatgctgctggaaggcagacacggtccacatgtggttcactccctcctcgatggccttgtacagagcaaatgccttgtgagcacctgtgataaggatcatcacctctctagcatccatgacagtgcccacccccaccgtcaaggccatggtgggcaccttggtgagttctccatcgaagaacctagcattggccaggatggtatccatggccagcgtcttcacacgggtcctggacaccagactggagcctggctcgttgaaggcaatgtgtccatcagggccgatgcctccaacaaatagctcgatcccacctgcagccttgatcttctcttcaaaggcatcacattctgcctgtaggtcgactgcattcccatccagaatgtgggtgttttctgggtggatgtcaatgtgcttgaagaagttgttccacatgaaggagtggtaactctccgggtggtctcgaggaaggcccacgtactcatccatgttgaaggtcttcacatatttaaaggacaggtccccattcttatagtattcaatcagcttcttgtagcagccaagtggggtactcccagtggggagccccagggtgaagtacttctctggccctgggttaaactggatgatacggttcctgatgtatttagccgcccactcgctcgcctgagaatagtgctccaggatgatgagcttcatcttgtcacggacgcctcccgcggcggctgcagcgactgcccc

SEQ ID NO: 316009 - DNA, 1432 bp, Homo Sapiens
  misc_feature (1141)..(1150): n is a, c, g, or t
  misc_feature (1361)..(1361): n is a, c, g, or t
tgtactccatcattttgatgtctgccaaacccaggttgggagttttaaactttttgttctgcttcagccatggttcacacatatgacacactcccgtcaggaatttctctccttacacgcactgattttcaagtgggagggaattaggggcttatgtatattggataccacctcttgagagtccttcttgcacaggcctgccccttggttgagaaccattgttccaagtgaaggcacaaactctcaatatctaaaataagtgcaaggaagcagtctctttggtcagtaacaagtgcaatggaaagaaaacgatcccttccttcttccactttcacagcttttctctgaactaggagaacctgggggtggatttgggtgggtggggcccaaagaggaggcttctattgataaatccagagcctcaaggggcccagccacgtcaaacttctctccctcagggactctccagcaccaaaaggcagaaggtggaagccgtttttcccccagagccctgtgtttttgtgaaaggcctcactgtggctcctctgttttacatactcattagtaagtgggaggtccactggggcaacagacactgccacaatttcagtgttgtgttcagccaaggggacggtctggacaggcagcttaagtgtgagtttagtcacaactcctgagtgtcccgctctcctgcttacctaggaggtgagtgccaggaaaatacaccaaatgcttctagtattgtttccccacttaaaatagtcctgcttaaattcacatggtgtggtctgatgttctgagagcatcaggaaatacaacccttttgcccatttacccttctccccggatcccaaggtggtctgttgctctggcttcctttcattgtcttaggccttcatggagtggatgctgcctcctcctggctgtttttgtgcctgtttgaagctactgctgcctccatttctgggaaagacctttgagagcctagcccaggcctaagggctatgtttggtaccagtgttttgtctttagcttttctatgtgattgtgccgtcattctgttttaagctcatggatcaatggatttgtttaccatgtgatattttctattaaatccagtattttctaaccccacccattnnnnnnnnnnttattaatatggccgggcccctccgcccctccaaaaaacttttccaaaacattttgctttggcgccccgggccccagaagggaaaatggaaccttgggccaataccttgtcttccctaaggaaaatcctggctcagtgaacacacgggctttggaattcttccccacgataaaagaacgcgcccgcgggcggttaatcccaaaccgttttnggaaaacacaatacgccaaaaagggagagttcctggaaggggcttatacaccgggtggaacttacttccac

SEQ ID NO: 316010 - DNA, 1810 bp, Homo Sapiens
tgttgttttgccttaaaacatcaatatgctggattgtggcgtgaggtatttttattccctttgttagtactggaaaccgtctggtacatcttgtaaggcaaatgattaacacacggcaggctcttcgtccgtttgcaagttgctgtttgtttccagctacaccagtcagagctccacagagagggtgcgttcctggttctcaggtgggcaggtgctatggtgcggggcgctggaaagaatggggttgaattggccctcgcctccgcttgtttgagactctcgttagaaagggcttaggaaaaccaagggaatggcagccaccccatcaccatcgagaacaggcagacgtttcccgagtaggggccaaagccactggaaaccgtgttccctgtgcagtccgactgacactaccccatgcctggggggaatgagtataaaaagggaaatgtttttgaagacaggcacgatatatactactagagaatgcgcagtttcaaaccacagttgcaggaggatataggaataacgacaggtgccggggactacgtaccatgatttcatagtgctctgcagccagcaggctcactaaacgctcatcacggaacataccacaaatggtgctgatcaatgacacacgggttttcatgcttgtgacacagacagacagcaaaacaccacggcttattatcttcccattgtgtacaccactcacaggacggtgacagtccaggtattgcactggatctcggctttgcttaacagaaaacaaccctgctacggttggaaagagttaccacttaaaacgatttggtcaacttgcaccaagaagtaggttgggaacaggtgttttcaggtgagcgtgaaaccccgcagtggaacgctgtgtgctgcaaattgcttattaatcagagaagtgagtcctactaacttcctattattacaaaagtagaaagactgaaaaacaaataaaatgaaatctgaaaatgatctcatttgcttaaggctgcactgagtgtattgcaaacaaacaaacaaacaccgggaagtccacttcgtaaaatgcagcagccaataggtgaaaataataaaagaaagaactttttttaggaagaaaaacacttgccctgtcttgtgttgaacggatgtgtgtgtactgtttttcaggggcagggtggagggaagatgtcatttggcactctcgtaatgacaatgttttaatactggcactagctaaagaacagcgcccccagcggatgccaggactggaggtgggagcgctgttcattcagacgctgagaggtcggggttaaaaaacgcggctgtggagacaggagagctgctgggaagccatgtttttgattttcagacaggtgttaattttaccaggcttcattaatacagaagaaaggaaacgtcttccaggaaagcagccactgcggaaacgagtgtgtccggccatcaatacacaagagactctttgtggctcaacacgtggggtcgcgaggcagagctggtggcactgcggatcacttccatccacctttcgaacgtgtactcgctttccgccctgaagtagtagacgtgggacttgaagtgcagcttgaacacgtagtctttctggatgttctcggactcagaggggatggtgagcgagtagccgagcagaggcaggctggcaaggggatgattgtcctggtgtgatttgtagaagaacaggcagaagtttgtgaacaccacccacagcttctgccacccgttgctgtttttgaatttcctcagcaggtttccagacaactgattcttccactgc

SEQ ID NO: 316011 - DNA, 1014 bp, Homo Sapiens
aggacagcaataagggtcttacaaggccagaaggcagccctgtttgttcctgcctgcaggaagggcagaggaatgtgatgttcccaggaactgtgtcctagacccatagggtcagattgctcagcctagttcaagcagtgagactacctctgtgccagtatcctgggctgtctctttccctttcactcttggcagctccccaattgtcaaagattgggacagggtcctggtttggctagttctaacttgctgaagccagtcagcaccctcacagagccagctaggtactgggcccaggggcttccagagagttcttcagagcttctcagaggcctaaggacctcctaaccctagcaggcctcctggctcaagcacaacttgggaaggctccatcagcatctatgtggccctgttttacctgttgtctctggaggtgtgtgcagaggcaagtccagggtaggggcaggcaggatcccttaggcttgcccacagcccagatagcaaaactgcagccagatcagtgtctatgagtttcaggctgaaccttagaccacataggccagcctgctggtctggctgcccaaccagaccaggtagacagagtctaggcctcagggctctcaagcacctaagagcgcagctgcatttggaagtgctcacagcaggcatgcttcatggttagcccatagatgggggtcatgtccaccttcacgcccagtggcacgctgaattccaccggttgcagcaggatagccaggaagagaaagacctcccagcgggcaacggtctcaccgatacacttccgcttgcccatgccaaagataatcaccttctcacttaacaccttgtcgatagcaccatcaggggtgagaaaccgttcaggtaggaactcagatgggttgacccatagcttctggtcatggttgatctgccactggtttacaaagacacaacgccccttggggatgtaaaagcctttcaaacttgtgtctcttgttgtgctgtgggggatgg

SEQ ID NO: 316012 - DNA, 591 bp, Homo Sapiens
  misc_feature (515)..(515): n is a, c, g, or t
  misc_feature (541)..(541): n is a, c, g, or t
  misc_feature (559)..(559): n is a, c, g, or t
  misc_feature (579)..(579): n is a, c, g, or t
ggttaaggttcttgcctttttatactatatacagtagaaatgggaaagtgtaaattaaggtcatcctcatattatctcttttcataacttgaagaaaatgaagccacctctcagtcttccaaatgttaattaactgtgttactttgaccttttgtaagtgatcccattcagctagtaccaagctgaagattgatattcgttaatggttaatataaatttactgctctaggttaagcctaacatatgtaattgctactcagcctattactttttagtccattgggaatcactaaaaaaagtagaggctttagcttcattcctcggctgcttaaatcatattgtaatgttttaaattgttatgtcgtcctgtataaccttaggccccagtaactgattaatatgagtcagctttaagttaattacaggatataaaagggtaataggacacatagggcatccaatcttgggtcggtttaattttttaggggttggaatttacagaagtgaggtagggnaatttaaattggctttatttcttctnaaaaccctgacaccaaantcctaagggttaggaccccnttcggttggaat

SEQ ID NO: 316013 - DNA, 904 bp, Homo Sapiens
  misc_feature (783)..(783): n is a, c, g, or t
  misc_feature (812)..(812): n is a, c, g, or t
  misc_feature (822)..(823): n is a, c, g, or t
  misc_feature (838)..(838): n is a, c, g, or t
gtgcgcgggctgacactcattcagccggggaaggtgaggcgagtagaggctggtgcggaacttgccgcccccagcagcgccggcgggctaagcccagggccgggcagacaaaagaggccgcccgcgtaggaaggcacggccggcggcggcggagcgcagcgatggccgggcgagggggcagcgcgctgctggctctgtgcggggcactggctgcctgcgggtggctcctgggcgccgaagcccaggagcccggggcgcccgcggcgggcatgaggcggcgccggcggctgcagcaagaggacggcatctccttcgagtaccaccgctaccccgagctgcgcgaggcgctcgtgtccgtgtggctgcagtgcaccgccatcagcaggatttacacggtggggcgcagcttcgagggccgggagctcctggtcatcgagctgtccgacaaccctggcgtccatgagcctggtgagcctgaatttaaatacattgggaatatgcatgggaatgaggctgttggacgagaactgctcattttcttggcccagtacctatgcaacgaataccagaaggggaacgagacaattgtcaacctgatccacagtacccgcattcacatcatgccttccctgaacccagatggctttgagaaggcagcgtctcagcctggtgaactcaaggactggtttgtgggtcgaagcaatgcccagggaatagatctgaaccggaactttccagacctggataggatagtgtacgtgaatgagaaagaaggtggtccanataatcatctgttgatatgaagtgggatnatggatattnnctttgtgctttctgnctctcatggaggagaccttgtggcctatccatatgatgagacgcggagtggtagtgctcattgatc

SEQ ID NO: 316014 - DNA, 1205 bp, Homo Sapiens
  misc_feature (134)..(134): n is a, c, g, or t
cttggaaatcattggtttaatggttctgaataaatggttaagattgatgtttccagccaagtgagatttgggtttagatatagtttgggcttaagtatcctttatctcagattaaatgagacagtgcatgtaanccacttagaagaatgcctggaacacattaactttcattactaatgtttttggtcaattaaacattttcacttctgccaccaccctttatgcagtctggcacatagctgtcactcagcaaatgtgagcaaacaaacactagagactttagtctgccaggtctctaacatgcaaagccatggggccaggtccatacactccctccactgagaaagagacaaatggcttaggctacaaggtttgggtcaccaaggaaagctgtcaaataatgaagtgggtaagcagattcctaaaaattggaaccatttcagcagcagtttcatccacagggagacagagtaaatgctctctcaaatctgtctcacatctatagaaaccttactctatttatggtcttttggcatcttgctctgctatctcacttgagatcactcctatagaactaatagaggaataaatcaaaagcaaaccagtataagtagagacgcaataaaatttggatgtcttgagttctgaggggcttgcacacacttgttaaggcatgcagtgtgtgctaggggcttcagcagggaactccactcaaggacgtggtgtaggaagcaaagacaaaccaacccaagtggtactgaagaggacaagatgggaaggacatttttattttccctaatcttcaggcaacctcaccaagctggaggtcacatgtagctgagtgtgaaaccaagaaaaatacgaagcttcaaaagtactgtgcgttgtatttcttcattctctggcaggctgggagtccaaggtcagtctaggcaggagggctgcttggcctaagcagtcacacaattttcaccgtcttgagcatatctgacaagacatacgtgtcatcccaacccctcccaggcttcctcagggtccgctccaaagcctgggctgtttctaggagctctggtgtggcaagtttttgctcagggtgcagctgacagaacaggatctcattcacttcaccctcaattcgccggacatataggagggggaacactgccttgagcccagccagcactgagtcttttagccccagtctc

SEQ ID NO: 316015 - DNA, 802 bp, Homo Sapiens
  misc_feature (724)..(732): n is a, c, g, or t
gtaaatttatttaaattactaaaatagcttttaaagtcatttacagatcagctgctataattatttttcctgaaagacataggtaacatattacttttaaattacttgggtcaatgaaacatttaataaaaacatttgtttctctatataatacgtatgtataaaataagccttttcaaaaactctggttttcataatcctctataaatcagatgatctgacttctaagaggaacaaattacagtaaggggtatacatttatgaatactggtagtcctagaggaaaggcgttaaccctctctactaccacttgtggaactctcagagggtaaatgacagagccaatgactgactctaaacccaataacatttaaaagaaacccatagcatttgacagatgagaaagctcaattatacatgcaaagttatatctaaactactatagtagtaaagaaatacatttcacacccttcatataaattcactatcttggcttgaggctctccataaaatgtatcacgtgcatagtaaatctttatatttgctatggcgttgcactagaggacttggattgcaacaagtgaatgcgcggaaaatgaaatcttcttcaatagcccaggacagctggttaacaaatggtttgtcaattcctgaaactcatttcttaattcaaaccaaaagcttcagggtgtgtccaaaataacctgttacgaattgacatacnnnnnnnnngacacggagtctcatttttgttgcacagtctggagggctatgcgcatggtctcggcttactgcaacctcc

SEQ ID NO: 316016 - DNA, 569 bp, Homo Sapiens
  misc_feature (308)..(503): n is a, c, g, or t
  misc_feature (549)..(549): n is a, c, g, or t
  misc_feature (552)..(552): n is a, c, g, or t
ttctgcattgggctttgtttctctgtttatcaggaaagtccttttcctttactaactgaagctataactgagctggtattttaccctggtgtgtccccacactctcatcctttactcgggactcctcagccccagcacggttcaataactagcaacaaacaggcctgtgacatcataggaaccaacttcactgcatgtttccatggtattaaagagttaccttaaataaacgtagtcaagaatgtaaatgaaccccatttttattccaaaaatagcaggctggccaggcacagtggctcatgccgatnnnnnnnnnnnnnnnnnnnnnnnnnnnnnnnnnnnnnnnnnnnnnnnnnnnnnnnnnnnnnnnnnnnnnnnnnnnnnnnnnnnnnnnnnnnnnnnnnnnnnnnnnnnnnnnnnnnnnnnnnnnnnnnnnnnnnnnnnnnnnnnnnnnnnnnnnnnnnnnnnnnnnnnnnnnnnnnnnnnnnnnnnnnnnnnnnnnngtcaaggttacagtgaacagtgtttgtgccattgcactaacagggnggnttttagagtcaaacaaa

SEQ ID NO: 316017 - DNA, 462 bp, Homo Sapiens
  misc_feature (431)..(431): n is a, c, g, or t
aattttctcttattgtttgataaaaacctatttggccgcttaagacttatttgacatgagatcttaagtcttacctggttcaaaaactgaatgcttgcatgaatgaagaagggctgcctgttcactcatcgagtttggcaggtctttctggaatgccacacaaattagttttctctggtgaagccaaacttggaactcaccttagcttttccaattgtaattagtgtgtgacccgccccatcatttttctagacttttccctcaaaccctcaatgtcctgagcaatggtgatgtccaaattaaaactgaggggccggcgctgggatgaccctcccaagcaggaaactggtctggctttaagcaaggcactcttctccccaatagactaaggccttttgcttcttaagcctggggctctctggtttttaatngaagggctttgtgcctttcaaacaagaaggg

SEQ ID NO: 316018 - DNA, 680 bp, Homo Sapiens
  misc_feature (146)..(278): n is a, c, g, or t
acaggctctggctgtttcccaggctagagtgagtggcacgatctcagctcactggacttgcacctcctgggcgcaaatgatcctctggtttcagccttgtgagtagctaagaccataagcatgcactcccatccatgcctggctannnnnnnnnnnnnnnnnnnnnnnnnnnnnnnnnnnnnnnnnnnnnnnnnnnnnnnnnnnnnnnnnnnnnnnnnnnnnnnnnnnnnnnnnnnnnnnnnnnnnnnnnnnnnnnnnnnnnnnnnnnnnnnnnnnnntttttctattaatgtggcttatgacgttaagtgcttcgtagatgtttaagcaacctcactttgctgtgatacacccacgtggtcttggtgtatgatgttgccgagtttgggttgctaatattttgttaaggatctttatgtctgtattcatgatggacattgttctgtggggtgggggcacggattatgatgcctttcgctgcctttagcctcttagactcagatgggcgtgtctcatcctccacattctgaagattgtgaatggttggtgttattgacagtatacagtggcagccacgtgggcacaagctttctgtaggaagactcaggacttttcattactataatttcttgttataggtctatttagattttttattaaatttctcagatttctgagcc

SEQ ID NO: 316019 - DNA, 1007 bp, Homo Sapiens
  misc_feature (218)..(218): n is a, c, g, or t
  misc_feature (891)..(904): n is a, c, g, or t
agaggcggagatgattctgaagaatatggaaatgctcctccaagagaaagtggataagctgaaggagcagtttgaaaagaacacgaagtccgacctgctgctgaaggagctgtacgtggagaacgcccacctggtgagagcacttcaggccaccgaggagaagcagcgaggcgccgagaaacaaagccgcctcttggaagaaaaagttcgcgctctcnaacaaactcgtcagtagggattgcccccgcagccctctctgtgtaaagacagattattttctaggattcattcaaaagcacatcttttaaattaagccactgtgctgccttagattccgtgggtcatgagccatgagtcctgggacatctgaggattgggatttctttgttcaccccgcagatagttaatgaatggtctgccctggccaagatgaaggtgggggctgggggaatatgcatgttgcagaagccggcgtttttattagcggtcctgagtaatttcccttggcaaaattcccagttttgccactctctggagccagatcctgggagctgtcagcaaggagcaggtaagtgagcagttatggacagcactttccatgtggtgcttccgaccctggctgtcagagtgaaatgtaaagtcagggctctgtacagttttgccatttcactgttctgctttaagcttagcttattagaactcttggtggagggtgcgtacacacattccagaaaaggcttcactcgctgggaacgtcaacccagcgagaaaggaggggaagccccttctccggggaccttatctgtggactcaggaatgatggtgtttattgcaaatgcacaatctttttcccattgaaatgtcatcacactggaaattgtactatatgtnnnnnnnnnnnnnngtatagttttatatttgaaatgtatgcaaattatggccatatggctgattggaatgtactactgtaatataaaaagtcactgtatttgcaataaattcttttc

SEQ ID NO: 316020 - DNA, 735 bp, Homo Sapiens
  misc_feature (671)..(671): n is a, c, g, or t
ttgaaggtttttcctctttctcagcaggtcagtgaactgagacctgtgggctcctgactgtggatgaggagtctgcctgaagggaaggccaaggctgctgggaagcctcctcactggggcgcagttcccagaaaccctttggaaatagccaaaggcctgtatgttattttaggcgtgggaggagacggtgaaatcaaaggaaaagtgtggatcaaagttcagcctgtggggagaaggggtgagggtgggggtgccacaaccacaggcatcagtcccagaagtctgtgcccacagggtcatgatggcctcactaggcaattgtgcagatgctaaggggagcagctggaaacagaggccggggccaaggggcagggaccatcctggtaaccatctcaccgtctcgtctctgggaactgggctgagctctgaagggcagccgtcctgggtcccactcacccatggagtcattcaggatggaatggaagggggtcttctttccaccttggcttccactgacttagtgcctgactcctgcaggcagctccagggcacccgcggcccttgcagcctttcttggagagccctggggtgaccgaagcttacaatcccgccaggtcgatgacagttcattaccagaagctccttcttttaaacaccgttcactaacaatnttctgctggttatctgcccattctcaaaggcttggtcaatttaacagaatgcggcagtttgaaa

SEQ ID NO: 316021 - DNA, 194 bp, Homo Sapiens
  misc_feature (46)..(62): n is a, c, g, or t
tttttttttgttggtggtggtgttggttttgatggagtctcaacgnnnnnnnnnnnnnnnnngtatgtatggcacaaaattgttaaatatgattacctcagaatcatgggtttcagataacgatcaaagaagaaaaaattattctccagaaataattcatagaatccaaaatatgcttgccacattatctgtaa

SEQ ID NO: 316022 - DNA, 648 bp, Homo Sapiens
tgaaatatgcaactttctctaaggcagacaattcaagctaaaagaacattgttagaaagccaaaggctgaggaaaacaatatcttttaaaaaccgcccatcagataactttaaatggcaggtgcaatcttcttgtgaaatagaaagcatagtactttcttcccctacattataaaatgctactatcgagtatgactaacagagaataaaggtaccatgtgacccaagaagggtgtgtatgagaagtaggggcagaaagacggggctgagaaaagctgcaaaaagctttcaatttcctaactctgactcttagagaccagagcttacctgaatacattctgctggggattggaaatcatgcagaaaggtctgtgattccaaaacgttaatacatttattataaagtaatcttgggtaaagatattgtggcttaagcaaagagttaacttgtcataatacccaattggaaaatctctcattttggttgggagaaataattgataagttcatcaaagtaggttaagtagcacaaatggagaactatgttgaaagaggaaccattatgaaatgtattgaccgagtgtgttttgtgtagaactaatgaaggtttaaaagtttttcggttcttgctttttccaaaaataaaata

SEQ ID NO: 316023 - DNA, 530 bp, Homo Sapiens
aagggaaaaagggaggctctttatgttgcccagagtggggtgcagtgactagtcacaggtgcaattataggggactacagtttcaaactgctggggtaaagggatccttctgcctaaggctccccagaagctgggattacagggacatgccagggcggctggctccaatcctttaatttcaaatgggaaggattacatataattctttcaaagggtatactgcttttatcttaaataaacataaaaagagcgcaaagccaccgctttttttacaaatatccattatgaactcaaatggggactttgcaaacttcaaaaatgtatcaaaccctaacctgggatctttagggccattgatcaattttgggcatacaggaagcactcaataaaagttgttgaatgcatgaaggaatgcataaatgttctttttggatatttagccttactttcccgtcattcagcttaaatgacctgagaagcacttccttaaaataaccctttggctcaccatgagaagaatgcctggccct

SEQ ID NO: 316024 - DNA, 557 bp, Homo Sapiens
  misc_feature (396)..(423): n is a, c, g, or t
attgagttcagtcacttagatctgagaagcagatattcagggcgaaacagtgaaagggaggcagtgcgtcacaggcgtaatctacagcaatagcggtttcaatgaatctcctttgtgctcaaacagcgtatctttaacttatcggacaggagctggtgggagcgggcttaaccaggagctcgtgtgtctgtccacagtccagtgcttcgaaggaatgtctttctccttgaacacggtgtttacagataagacagcaggtctcgccctgagcatgcgaacatgatggcaattaggaggctttcctcctcagaggcctcttgtggctttccacaacttattgtcccatattttcatggccagtttatacaggcattccacaagcccttttcccaacannnnnnnnnnnnnnnnnnnnnnnnnnnngggtgccatcgggaaggactgcagccaggcggctccaattctcctactgtcctgggcacgggggtccaaggtccaggtgtcaccagggctggttcctgaggcctctgccctgggcttgcagacggcattgcctt

SEQ ID NO: 316025 - DNA, 710 bp, Homo Sapiens
tccattcatgttccaccagctttattgagccttagtgctacagcacttgagccagcacccaaagggcaagaaacctgggattggttttcatggttgtttctaccatcagagtcaaagaatcattttcacacaccaacacaaatggctggtaatgagttattattatctcatagcgtatgttttcttgacagccttgaataattttgattgacctctgggatgttattaaagcctaacgttccttctattctcacaaattttcgttatgacttcagaaggatcattaactctggtatctgtttgtttgcttgtatggcaccaataagcagatttcttctttctaatctatggattagtatagaccaggagaaggctaatacagagactatgaaacgggaataagtttttttaacgatatggcaaaattgtgactctgaaagatcattcatgtatattctaaaattaccacagtcataaaaagtcttggactttcatgaggaaatagcatagctagatatgaaaaaatatagaaaatcttcatcaatggaactattcttggggtagacactaatcatatgaaaagacaaatgctcattccctaagatagcctgaatctcatttaaaatgtagaaaacccctttttagtaaagagacatcttctacagtaaccactgagaagaagtggaagtttttcatctcctttttttatt

SEQ ID NO: 316026 - DNA, 593 bp, Homo Sapiens
gagtgtgccaccacacctagccaacctgggtttgttttaatgctctgctgtggctatcttgaaattcttcctaatttttgaacaaggagccctacatctacattctgcaccaagtcccagtagttacctagccagtcctgccgaacactaactccattcagtcacttcaaggacatcttgtaagtctggggaaggctgtgccaaaagaaatggggtgtggtcaggcaaggggtgaggctttgggctgaggtgtgggggctgctcagcacaggggagcccagggttcctggaacggggcaagacaccagcatggaccaaggaaacaggaagggcctctcaatgcacacaaaaaatattgcccactttggaccactagtttttggaagtttcggaaactttccaaatctatttcaagttttttattatgggccctatttctatctctctgatttatataaaacctgactttccccccatgtttcgaagaaagttgttttaaaaaggtggcattctgttttttctttttcagctcaaaaagaatttgcatgatgttaagggcttgttgagatttggaaactcactttccaggctgg

SEQ ID NO: 316027 - DNA, 713 bp, Homo Sapiens
tttcactatttaataaaagctttattaaaatgaagccaaaacattaacaccatttatatgtacaagaccattaaacattttttctatctttaataaatgttcttccatttttgtcatttattactttcctaatttgaaaaattgattaatgtgaagaaacattactaaattaaacaaatgtaaagtttaaatttaattattaaatggttgagtttaaagttgacagctagtttaaggtagaagaccttcataatccaattacttttacttggtttcagaactacccctaggcaaattctcctaaaatagaaactacatgcaagaaaaacacaagcgatgttcatcatttaagataaactttaaaagttaaatttttaaaattaattttaataaaaattggtttgttaccagttagctatataacctagagccaatcaatctctgtgtgttttctcttttgttaaatgtagaacttaattcttgctctatatacctctcaggattgtgagaataaagatgatacatgtcaaatcaacttggaaattatggcactattgtagaggtggcaagaaatgggaaatactttagcagacatattggactaagttcccagccaagaaccaaataatttaaaaaatatttaagtgccaagaaaccacttaggccacatgtaaccttcttttactaacaaatagatggtagtataagaccag

SEQ ID NO: 316028 - DNA, 1003 bp, Homo Sapiens
aatcataaggtatgctctttaaatccatcgtccatctgcacacatactatgttgaagcctgttaacattgacaactactacagtgtaacatttactaatatgaagaaaagggcaagtagtcataactgaatgaatataaatgtcaaattatgcaaatgtcaatttgagtgagatcactattgttgaattccaagatgtttaatgtaaactgtttttataaaaactaattatgaaacacaaagacaatagaaatataagttatttattaatcaatccacttacaaagcaggtggcttaatgcaagcttattgacatcttcacatatgatccatgggaacatgtcctccacatacagacagtgatattactgactggatgcatttgcaatctggggcatattaagcatatttaaacaaataaaattaggctatcctgtatatgaaagtatcttgataataatatgcatcctgaagtagattaaaacttcctccaaaggagaaatgttagtatgttaacttaactttatattctatattatgcagtaaatcttaactatagaaattaaaaattttaaatcagtgatcgactcttggtaatgtatgaagtgggagtatataaccatagcaacagtaggttgacagtataatttgtgcctcacagtatctgcagatttactgttttcaagtttagagagaaataaaacaagagacatgtagattcagctgactttatttacctttaaactaataaaaatcccttaaaagtgatcctgggacctttataagttctatgaatgcacagatacctgccagtgacttaaattccaaatcttgacttaatgtgtctacaaaatcaatgtgagcagatatcttaacttttcgtgcttagcagaagacaacaaattttacatggtttttttcacttccctaaaattttgtgtaaatttgcaagtatgtacacatctagctagttgagaatcacaattaatggtcatcagagctgc

SEQ ID NO: 316029 - DNA, 712 bp, Homo Sapiens
ggcccttttatttgctaaattggggggctttttagagggagaagcaaattcccatttgggggtttggacctcccagtaacatgctaggggattcctatgtcctctccttgatgccaaaagatgggtgttttaaaaccgttttggcccctcaccagttggatgttccctgtccctttgagcctgggtttcctcattttttagggggacatgggaattcctatttcacaggattgtcacaagggtgaaatggggtaaatgtaacggcttattgtacggggtttgagacaaagcagacccccaacacatgtttgctggtgagtgaaattcctcacccttagaatgacgctttgttttttcactgaacctgtcaggacccgtccaggctgagaccaggggagcgtgtcattcccacagtggcaggcaacattatggtgtctttaggggctttagggggagcgagcggggaacacaggagctgtgctcctggtgaaccatccaaataacagttcagaggagaatgaggggcctgggtttttgttttttggggttggaagccccgagctcaagagacttctttttcatttggggtttggcaccatttttaaaaaaaaggcaactggtggcaagaacaaagggagggttttatagcaccacaaaggttttttgggggtttaaaaaaaccgggacaatttaagcacttttccccttgggg

SEQ ID NO: 316030 - DNA, 540 bp, Homo Sapiens
ccacagttctgttattctaccctctgtgtcagtatacccaacacacaggatttcctcctggcttctcagtatgccatcgtaaacaaaattgtcactcaatttaaccagtaaggcctttgttagaaaaaggccagggtcaaaagggaatggttgctttttctaatcacagctctgatcaaatcccttcttaacaagagccttccaggctcccctccataaggctcaaggtgtttacttaccttgcctgtcaggggcttctgcagcttgcttcctacctgctatctccactcctctccaaaccaccatatcctgaggcttctagaaagcaaactctggcggcatggggttaatgggtctgtgtacccaagacactgtacctgggtgctgtcatctgcctgactgaccttcctgtgtcctggtccgatggtgtctttgatcctatagctaagatcaagacactgaaaatctctagactcaagtctgtgcttttgctgggataaagtttgtgttgagtacatctaggctgggtgtggtagctca

SEQ ID NO: 316031 - DNA, 735 bp, Homo Sapiens
  misc_feature (633)..(641): n is a, c, g, or t
ccaggaaaaaaattaaatttttatttttaaaaatcccacaaatccataatgaaatcatcatctgaaaaaaaagatggtggggaacaaaacgtgggatacatttaaaaggccctagattcattaatcccagagccattctggagatgccatgtaagaaatctggagttactctaaattttcttcttaggggtatcagaactggggagaagggtccaagcaaagggttgcctttgccagtgtattcggatcgaggttatgaggaagagcccttttcctttgtcagggagtttcatgttggtccaccactccagcgctgagcagttccccgatggccctgtcatcgtatctcaggacctccttcaggatgtgcgttgtgtgctgcccgagcagggggggcggcctggcctctgacattttgaacttactgtatctcacagctgggcctgggacggaaattttccccacagttggatgctccatctccataacggggccattgtgtaatacctggggttctgcaaatacattcttcatgttgttgattgggccatacgggacttcattgctttaaaaagaattaaccacttggtgggcagttctttttcaaaccgttcagatatattttaaaaaggnnnnnnnnnattgggtaccccaaaggtggtaggtgttatccttggaattaatcaatcaacctcaggcaaatttccaaaatttgccgacggtggcgaaattggg

SEQ ID NO: 316032 - DNA, 802 bp, Homo Sapiens
ttttgcaaaggaagccaattttattgaaatgcaatttcattgaaatcaaattcttaaacatttaaatctgtcacataatagatgtgcttctttattaacatattaaagattacaagacctagggggtggatctaattattaccataatttcagagtggtgctgtacataaatattttaagatatctgtaacgtggatatctgtgattcctagtgatgacagagacacaggtactaatactgctgtggtttgttgcctattttcctgatggaaataaataaaaacttttttccatcgaagttttcagatttcctgatttctatcctctggcccctttagattcacagattccaatttaagaactcccagtctataataatgcaagttttcgtaagttgtacatagatggaatcagagaaatggaagtaaggtgaagagcctcactgactggctggctgctcaggcagggcctcacgggatggttacaccctgtggatcctgagcctgctcctcattttcaaatgttcaagaaactcagtttgtctcagttctttttgggggcaccctggtttttgagagacagaattcataaaaatcagagtcaccagggacttacttgatttttttagggccacttcagaaatcttggattttttctctttcagatttaaacactgtcaaagacattattcttgtcctttgaaatatgaccttatgggggcaacattttaacatcgttctatggtcactacaagacagcatcttgaggccacttttaagagttaccttcattttgtgaagaa

SEQ ID NO: 316033 - DNA, 407 bp, Homo Sapiens
agagcctcactgactggctggctgcttcaggcagggctcacgggatggttacaccctgtggatcctgagcctgctcctcattttcaaatgttcagaaactcagtttgtctcagttcttctgggggcaccctggcttttgagagacagattcataaaaatcagagtcacaagggacttactgatttttttaaggcccacttcagattcttgatttttttctcctttcagatttcaaacaatgtcaaaggacattattcttgtcctttgaaaatatgatcttatggcaggccaacattttagcatcgtttctatggctcactacaatgacagccatcttgcaggcacacgtctaaagaggttatcttccatttctgtgaagtcaaaaatctccataagtgcttttgcac

SEQ ID NO: 316034 - DNA, 545 bp, Homo Sapiens
  misc_feature (333)..(388): n is a, c, g, or t
  misc_feature (489)..(489): n is a, c, g, or t
cgggagccttgctttattctgcctcgggtcggaggcttgggggagcgagacctccagtgcccgtgcggctcgggggagagggtggaggggccacttagatgtaggagtcatcaccaccgggcgcatcgtagggacccccacccctccccgcgccctcgccctcatcgccgctgccggagtcactggcgccatccacgtccagggtgggcgcgttgagaacgaccacgtctgcctccgtcccgatgtcctcgccaaaccagacagccttgtacccgccctctggccgccgctccttggtcaggatggacctcaccgccgtggggcttccgccannnnnnnnnnnnnnnnnnnnnnnnnnnnnnnnnnnnnnnnnnnnnnnnnnnnnnnntgcgggctctgcgggcatcggtgccttcgcgggcttggggtcctgcgtggggcctgggacgggcgcccaattggccctgtgggtaaggaggaacgcctggntgtcaaagccttgggcttgggctccgagctttgccagacagacttgagcccgggcg

SEQ ID NO: 316035 - DNA, 681 bp, Homo Sapiens
  misc_feature (656)..(656): n is a, c, g, or t
tcttaccatcttgcttaaggggtctgtacattggcctggcctgcaatacggctcgctatatttatatttcctacctggagaatgcctggactgttctccccatggaagttcttcaaggtaagttaacagctgggattgaaattatttctctgccttccctgagctgtggctaaaagcccagtggccttcagcatctgattctataaaggaagggcaggcctactgtttcatgtgattttgaagtggttgttaaggaagagatgacatcaggagggatggttccttggttacctgagtgctgctttgtgttgagccaaacaaagctggacttgatccacacccttgtgattaaacaaaggaagaggaactctagaataaactcctgtgcacaactattagacatggacatccaagggtggttttaagatataaaaatatttatcttttaaagtttttggtggttttagttttgtagggtaactataggtacctgaaaaaaagattgttgccataaatattttatctctttaagtatttttatcacatctggtgacttattacttaagttttatacgccccaccgtttgtttttccatgaacttttaaaaaatttctgtttaaaatgtcctcgcccctgagttcttttttgcttcaanggaacctggttctcaatcaagaaat

SEQ ID NO: 316036 - DNA, 707 bp, Homo Sapiens
aaaaagctgtaggctttattaagcagagtgacagtacaaagctttcacagcgtggaaggggtcccgagcggggtagccagtgttagatttttttatcaccttttaaactctctaaggcaggaaatatgtgtggtgggaagatgttaccagagggagaaacaaagacaattaacatgtctcagatcttgaggaaaactggaattgtaacttaagttttctctacttataaccttgcagcgggatggcaaaggagacaggatctcacgggattttacaaattgtgtttacaaggaattggaattgggaccatagataaggtctgctggtcacagaaaagtgggcttttaacattccttttagtttcaggggagggggaagggagagagggagagaggacacagggaagcttacaacaaaattttcgctgtttatagctttcttggggaagaaaacacaggcgcaaattctggtgttaggaatgttttaagcacatatccttaatattattcatccaggaccaaaagtagtccgcatgcaggaaatgagggagtttcacaggtttcttgagcccctacttggacccagggaaagcccacttggaaccctcctcttcacttttctacttttcttcttggaattccccttgaaaaaaccttttccctttcataaggggcgaataagtaggtttttaaacaagcgttggtttt

SEQ ID NO: 316037 - DNA, 801 bp, Homo Sapiens
  misc_feature (660)..(660): n is a, c, g, or t
agtaatcaatttattgcaaggaagtgacttactcagttttgaaacgtggctggacaagtccaaaatctgtacagcaggcagttaggaggggcaggctggaattctggggcataagctgaagctgctgtccttaaacaaaatttattttcatctcacggaagactcaactctgcttttatggcctttccactgattgaaatagacccacccagattatctaggagagtctccctattttaagtttagctgattggcaaccttaattctgtttgaaccttaatttctttgcaatataacatattcataggttctggggattagggcaggaacatcttggcggtcattattttgcatgcaataccattctagagtatctgcaaagttgagaagctcctggagacagaaaagtcctgacaagagagcagatgttttttcctcaaataattcaactccttcaccaacatatcctttaataaattttggttggttaactaatattaattctacaatgtattttcctttaaattccttatgaatcagaacaatgttgccaatccaaaacaagtagatgtttgcatactgtaccatcagaaagctctctaagccacgattttggactcggtaagattttcctgctgtgaaaagagaaaatgcaggagngcactacctggccctaaggctatatggcctatacgaacaccctaaacacagaaaaactgggattatgaagccggtcaggccccccaaagggacataacacttgatgagataaggggaacccctttgtctttttatgttaaa

SEQ ID NO: 316038 - DNA, 1123 bp, Homo Sapiens
  misc_feature (54)..(54): n is a, c, g, or t
  misc_feature (88)..(419): n is a, c, g, or t
ccccccaaaacttattagggatgttcagtagtggccttcgccctatagcggttntccgcctttccgttgaagccccgttctttaagannnnnnnnnnnnnnnnnnnnnnnnnnnnnnnnnnnnnnnnnnnnnnnnnnnnnnnnnnnnnnnnnnnnnnnnnnnnnnnnnnnnnnnnnnnnnnnnnnnnnnnnnnnnnnnnnnnnnnnnnnnnnnnnnnnnnnnnnnnnnnnnnnnnnnnnnnnnnnnnnnnnnnnnnnnnnnnnnnnnnnnnnnnnnnnnnnnnnnnnnnnnnnnnnnnnnnnnnnnnnnnnnnnnnnnnnnnnnnnnnnnnnnnnnnnnnnnnnnnnnnnnnnnnnnnnnnnnnnnnnnnnnnnnnnnnnnnnnnnnnnnnnnnnnnnnnnnnnnnnnnnnnnnnnnnngaagatcaaaaacaggcttgttttatttatacacagaacaacttatgtacagcactcaggtatggactatgtacatgacaatacaagaggcgtttgtttccacggtggtcactatataaattaagattataaatacgggggggtaagccccacctgagggcacagaaccttttctccaagacttttcagggatccttcctgcctttctctgcacaggagaccatgaggcccgtttggcaacaccacaaggggacctgggccggggcagcagagcagcccccagacagcgaggacaccccagtgcgggacgccagcccagcaccaaagggcaggttcctaaacactcaagttcattccttcctcacattctaacttgttagaattagaaaaatggtttttatgtaaacaggggtgttctaatcactgccaacatattaattttaaacacttttggtccaaacccaactccttgccaggagtaggacacttgggacttgggggggccctggtgtccttgaagccccagcgagctggttatcctcctataggcccttcccacccaaggtcaacttggcttgggctttgttttggcccctaagaccccaggaggccaaacccgccggcccgagggcccatggtaatgcaggacttggggaacaggttccaatatatcctggggagagccattcacctgggaaaccaag

SEQ ID NO: 316039 - DNA, 1221 bp, Homo Sapiens
  misc_feature (347)..(347): n is a, c, g, or t
  misc_feature (1001)..(1019): n is a, c, g, or t
tctgttcataattggtaggtgccttttgtgagcagggagcataattattggtttattatggtaattatggtgattttttaaatatcatgtaatgttaaaacgttttctaacagtttactgttgcttatctccaagatattatggaattaagaatttttccagatgagtgttacatagattctttgaatttagtataaaagtactgagaattaagtttgtacttccataagcttggattttaaacactgatagtatctcatgagtaatgtgtgttttgggagagggagggatgctgattggatatttcacattgtatgaaataccatgtttgaaactcataggcaatnaatgctatgctgtttgtgatccctctcaagttctgcatttaaaatatattttttctttataggaattgatgtataccatgaagtcattgtcagttgtagtagctctgatgttgaatgagatatcatgttttagcattccattttactgactagggtagaagaacacttttcttggctacatttggaggatacccagggagtcttgggtgttccttatctggggaagcaaacatttcactagtctctttttttcatcctttaaattgtaaattaaggattactcaagctcaccattattcaagattgggactcgcttcccagtcgacactctgccctgcctgtcattgctgcaaagagctgctgctttgccaacctaagcaaagaaaatacggcttctcttgcattattttcccttttggttggtttgttttctagaagtacgttcagatgctttggggaatgcaatgtatgatttgctagctctctcaccacttaactcactgtgaggataaatatgcatgctttttgtaattaactggtgctttgaaaatcttttttaagggagaaaaatctcaaccaaagttatgctcatccagacaagctgacctttgagttaatttcagcacaactcattcttcagtgcctcatgactgnnnnnnnnnnnnnnnnnnncgaaagcatcttcacaatgaagcttccagatagcaccgttttgctaaaagatacattctcattgttttccaacagtgatggcttccacataaggttaaacaaactaggtgcttgtaaataatttattacagtttactctatcgcatttctgtaacatgaaatgcatgcccttcttcaggggaagactgtggtcaagttaaaa

SEQ ID NO: 316040 - DNA, 603 bp, Homo Sapiens
  misc_feature (304)..(441): n is a, c, g, or t
  misc_feature (471)..(527): n is a, c, g, or t
ctacagtgatgttttatttaaacttatgctccttcttgtttctccatgcttcatgggtgactttgttccttttgcctgtcgtctcactgttttgggatggcaactccagtatcatttctttattataggtaggacaaagaggaatgtcaaaaggcatgtaaccacctgaatttgcccctatcaaagagctctccaggaagcaccaccaaggaattttcactgacatttcccaggccagaccatgctgctgctaagcaaaatgaggattctgctagtgaggatgaaaggaagaatgtgtaatcannnnnnnnnnnnnnnnnnnnnnnnnnnnnnnnnnnnnnnnnnnnnnnnnnnnnnnnnnnnnnnnnnnnnnnnnnnnnnnnnnnnnnnnnnnnnnnnnnnnnnnnnnnnnnnnnnnnnnnnnnnnnnnnnnnnnnnnnngtggtcaatccctcctacacgaggcccctnnnnnnnnnnnnnnnnnnnnnnnnnnnnnnnnnnnnnnnnnnnnnnnnnnnnnnnnnttaataaatgcagtcatacagtatgtatggagcatgggggtaggcctaggtcacaagactgaaagacacgacttag

SEQ ID NO: 316041 - DNA, 687 bp, Homo Sapiens
  misc_feature (658)..(658): n is a, c, g, or t
acttcaagttttattttgcctgttgcatggtcttttacagttcgttttctacaggaactgagctctgatccaaacaatcaataaaaatgtaattccaaccttaatattcataaccaggaaatagcatagcacttcatgatcctagagtgatgaaagcaagaccagggcatctgtttcacagtcacctgtgaccagaccagccaacatgattactaaaagccaagataaaaccaaaagcaaacttgctaaaaaatcctgaattccatgaggttaactctgaaatcctccaaacaaaatgctaagaattgtccactagtgttaagacgagaaaactgaggaaaactcagctgtcttactatctggtaagagtcttcccttcatctcaagccctcaaaaatgcaaacttggttccagctttacaacataccatatccttctatcggttaaaggtttctaacctaaaaaccttctctcctttcttctcacctatttagtgcatactcaaaggctttggttggaagtcactaggtaccactaggtaccatggtttagggctctcttaaagcccacaattgtggagttctgtggaagaaaacttaagtttctttctctttacccctctcccctcactcagctcaaagttaaacagctgatgcanaactacagagaagcaagataactcgtgcc

SEQ ID NO: 316042 - DNA, 565 bp, Homo Sapiens
gacaaatacattttattgagtacttactatgggctaagcaatgttctcagtgctttacataatttagtccattcaaatctcataaatagtattatttcctctgtttcatgaggaagctgaagattcaggagctattccaggtaacagtgctggtaaggggtagagaggactcaaatacttacctgcttaaaatattaaacatcaaactattccacataagtggaaggtagaagaagcactacagacctgagttctggtgttagctctgtgagattatctatgcaaactctgttagccttgcttacctgtgactcagcttacttgcctgtgaagtgggaatggtaataatggtgtagtgagaagccaatagatggaaatccttgtgaaaattgtaaagtactgtataaacatcagttatcattatactcctacaatcatggctcttgcaggctggatccaaaccttcccacaggaagctgggaaatggaaatgaagtcattgtgttactactcaatcacccataggcataatcacagaaaggctgtttctaataccaggaggtggt

SEQ ID NO: 316043 - DNA, 363 bp, Homo Sapiens
gaacttaatttttcaagggtacaaacaggaaagcttgaagcttccatgtcctgcacccagttcccctttgaccccccaagtcccctcaagggtgaacacaggttgaacatggtttggctgtgtcccccaccccaaatctcatcttgaattgtagttccccacaatcccccatgtgtcatggaagggacccagtgggaggtaatttaatcatgggggcagttattcatgctgttcttatgatagtgaatgagttctcacaaaatctgatggttttataaggggctttttcttcttttgctcattcttccctcttttgccgccatgtgaagaaggacatgtttgctttccctctgtgcccgaaat

SEQ ID NO: 316044 - DNA, 1046 bp, Homo Sapiens
ccatccttggctagaaccatggctgccaacaagcttctctgtttcataatgggagaccttctcatgtggttatgatgtgaaaaagatcccagggaaggactctgattggttcagctcgggtcacatagccacccacgtgggcaggtcaggggctggggtgcttaggtggggcagggggttctgggtagataaaaataattaatgccttctgccttatctaaatgttctttgtactatgcctggcacttggtagaaattaaacaaattcccctttttccctttctgtttgaccctcatgtctactttttattacataaaagagtaatccagaaaagaaagtcagctcattggagacactgggtagggagaaaaagctttttatagaatattaggtaggagtagtggcttaggatggtaagagctctgcacgaaaggaagacattacggtctaaggccacctgggagatctgagtcaagcagctctatcccttcctgaggacaaaagagatttcaggcaatgactcatatttgtttggagagctaattgacaagacatattaagagttttagcaattgttcatgctttttgatccaacaaattcacttctagagtgtcaagaactgtgctggtctaagatattatcctacatggaggctagcgagttttatggatgtgggcagaagacatgagactctggattgagagataaaggactttaatttttcatggtaacaacaggaagcttgagcttcatgtctgcaccagttccctttgacccccaagtccctcaagggtgacacaggttgacatggtttggctgtgtccccacccaaatctcatcttgaattgtagttcccataatccccatgtgtcatgggagggacccagtgggaggtaatttaatcatgggggcagttattcatgctgttcttatgatagtgaatgagttctcacaaaatctgatggttttataaggggctttttcttcttttgctcattcttccccttgttgccgccatgtgaagaaggacatgtttgctttccc

SEQ ID NO: 316045 - DNA, 699 bp, Homo Sapiens
  misc_feature (21)..(22): n is a, c, g, or t
  misc_feature (80)..(80): n is a, c, g, or t
  misc_feature (109)..(109): n is a, c, g, or t
  misc_feature (151)..(151): n is a, c, g, or t
  misc_feature (188)..(188): n is a, c, g, or t
  misc_feature (269)..(269): n is a, c, g, or t
ccatctgagggcctgagaagnngccagttggaagagcccagtaggctcagcccagagatgcccttgtcctcaggggctcnatgtagtttgaccctgacattaacccttntatgtccttcccagtcaggaaggtggctgggtacaggggtgngggtgagaagcagagagaggtacagggcaggaagganaaagtagaagggtcctgaagggcaaattagggtgggtaactagggagttaaccaggagcaagaagcttctatttgtaatcncaaaatctggcatgagtagagaaggaagaggaaatggggaaggggtgatgggatagttccactcttttatgttaatcccaatctgagacaggcccagggaggttccagtgacaaattagtggttgtgtcccagtgggacagatgctctaggaagtgaactgctgagctggcaagaaaagctggggtcctcctcagtatgacacagctcctggctcccggggagcaatgaaaaggacatcagctttggcattgatgcagtaggtgacgatgagggagaagatgaggatgccgaagcccactgtcagggtgatcaactcaagctctttgctggcgatgagaaatatccgggcacggatatctttccagcggctctcagtccatgtagagtattcagtagagctccactgacctcgtgccgaatcctgcagcc

SEQ ID NO: 316046 - DNA, 1390 bp, Homo Sapiens
  misc_feature (43)..(78): n is a, c, g, or t
tgtgggataatctattttaatgaaactcattatatatatattnnnnnnnnnnnnnnnnnnnnnnnnnnnnnnnnnnnntagatattacagcttaataaaaagtacaactgagcactgtgggctggaggtgggatacccacccgcagcacgcccaccctaatgtgccatctgagggcctggagaaaggacagtgggaaggagacagtaggctcagcccagagatgcccctgtcctcaggggctcaatgtagtttgaccctgacattaaaccttttatgtccttcccagtcaggaaggtggctgggtacaggggtgggggtgaggagcagagagaggtacagggcaggaaggaaaaagtagaagggtcctgaagggcaaattagggtgggtaactagggagttaaacaggagcaagaagcttctatttgtaatcccaaaatctggcatgagtagagaaggaagaggaaatggggaaggggtgatgggaaaggggagcggaggaagggaggcaatttatttatttctccctgtctcttttggatagttccactcttttatgttaatcccaatctgagacaggcccagggaggttccagtgacaaattagtggttgtgtcccagtgggacagatgctctaggaagtgaactgctgagctggcaagaaaagctggggtcctcctcagtatgacacagctcctggctcccggggagcaatgaaaaggacatcagctttggcattgatgcagtaggtgacgatgagggagaagatgaggatgccgaagcccactgtcagggtgatcaactcaagctctttgctggcgatgagaaatatccgggcacggatatctttccagcggctctcagtccatgtagagtattcagtagagctccactgactcagttcaaaggcaggagacaaggccctggctaatcgtgcagtagaacgcacacaccgggggagtcggtccgtctcattagaatgcaaagggccctggacccatgagtactcatacagatccttgttttcacttgggactttacttggatcctggcactgctctcgggtgaggttgaccactgtgccagtcaaatttgccaaggcatactgtacaacataagtggtgttggtggggctggagacagcgatgtaatgttgaagaggcccgtcacccaagtaggaccttaggtcctgcctgaggatagactggaaccatgagttgttggctttaatcaggaacccatagagcaggcgggtaaccgtttggggatcagcctgaactgtgtcgctgaagttggttcctcctgcaagctcatacagagcacgtcccagcaccgtggccacatctgccagggccttggcagtgtctgttacaaagttccggacgcgtggg

SEQ ID NO: 316047 - DNA, 703 bp, Homo Sapiens
gggtaaataagtaaatttattgcctgtttccttattgaagcgccactcagcaatgtattacatgacaaatgaattcagtcagctttacagagtttgcagaaattcttgccattgggccttttctcgtgctgacccttgctaacaccaagtgtttaacaataaaatggaaaacatctttagggggtttagtttacgaaacccaagtaaacacctttttagtgattaaccttaatacaagaaaatcttaactactcatgaagtgtaccgaaaacatgtaccattgaatgtctttctcaaatattaagtttttcacaggagctggacaatggtccatttaaggctggaggatttatgctcctgaagaatacttgtgctgtggctatcacatgcacaggtgacaacactgacattgtgtttgaaggttaagaaattgaaagcaatttcttgtggtggcaaaaaagaatttcgttacgataccagggttatgctcgtccaagacataaaataacccgcactgggtttttaaaggagtattggaaatctttacaccattaagacgggcacctggttattaacaaggttgaccctgaccatggaaagacttaaaagcacttagttgatttttaatggcaatggcagaaggggaggttggagatttagaagataaactggggaccgacctacaatggtggggatcccattt

SEQ ID NO: 316048 - DNA, 708 bp, Homo Sapiens
ccttctttctttgttggccatttttgggatgtggtaaaactgccagtttatcttattatctggtttttcagaactttgggcgatgttttttgagtgtcatcagttgctctttaggtttgacatagataattaagcacctccaaagcgtgataaagcttttgagagggaggaaaatgtattttggaaggagggagagacgcaaaagaggcgagcctgtgtgttgagtcccagacttggtgtgtgcctacaggcaaagtacttcacctttctagatgtcagccccgcccccctcacctcccaagtttaaataagaacttattttagactacatgatcctgttttcaatttttaagagttctgtgattttgagatgatctctctttagtccagaaaaatagagaaacgtaggtctatgtttgtttctcaaaaaaatatttgaggaggacagctgttacaaaacagctggagaactccaaatttttatggtggttagctaggtgcaaatgggtacaattttaggtttgttcaaataaacataggggaaaagtaaaagtacaggaaaattacgttatacatataagtgtgtccatcatttctgatttttctaaaaatttacttttttatttgacaagtactttttggctccttccgtgtatgcattaatatgtatataaggtgttatgggaaatactaataaaaggaaaatat

SEQ ID NO: 316049 - DNA, 493 bp, Homo Sapiens
  misc_feature (427)..(427): n is a, c, g, or t
aatgctgtcttttaactgaaccagactggtctgtagttacattgccagcttccaggcttatctctaacactgtaacacagctctcttgcagctctgggagaatccacccacctgagattgtcatcagctcccccaaccaccaccaagctgttctcagctcgaatcttctcccggaagtcctccatggcttcagggtgacattgaagggaattctgaccaatgacaaagaggactggagtcttcatatccaagaggggatcatctacatcccctctggggccatccacagtaagcagaggaaacccaaggcagacaactgcagtgacatactccattactgacacatgacaggccacccaagcttcttgtgttcagccaatcaagattatgggtttgtgtgggaattgcttgtgaatctcagcacttngcttctcactgccccaacatatgctcgagacactgtagaactcctaccccactggcatggtcaacg

SEQ ID NO: 316050 - DNA, 771 bp, Homo Sapiens
ttttttttaaaaatgtatactttaataagtataaagtatataaacaattaggtaagcttgtggagaagctgaccaagatacataaattaggaaatacaagtgtccatctaaattttctatatttcatttttttcataatatttattaaaggtgtttaatatacagtttctcatctgtcattttggaagtcctttattgtaaagacaattctattgtctgatgacaaacagcagccaccatggttattcaggacctccacgttggataaattccatttcttcttgagacacaagtttccttctgtatttctgaggtaatgtttttattatttctgcagtgtctggtggaccctgatacatcagcaaatctggtgatttacttcctttataatgttgtgaaattacagaagagtgagatggtagccctgctgatctcaaagcttctgatacattgggtttaggattgtctcttctgtcaggaaaccttattaatggagtgtgtggtttgactacctaaatgaaaagtaatatgcatgaaaaacaatctcattaactaaaagaaatgatctactaaacctcataagtagatacgttttgttaaaattactattttacaggcactttaaattatacttttcccaacccggaaagctggtctatgaatattaaatttggttacccgggaaacacaaattttgtactttatatatacaagacttcatggccttattgagggtggccttaacttaaagcaacccatggaggggagggg

SEQ ID NO: 316051 - DNA, 619 bp, Homo Sapiens
gaaaatgtatactttaataagtataaagtatataaacaattaggtaagcttgtggagaagctgaccaagatacataaattaggaaatacaagtgtccatctaaattttctatatttcatttttttcataatatttattaaaggtgtttaatatacagtttctcatctgtcattttggaagtcctttattgtaaagacaattctattgtctgatgacaaacagcagccaccatggttattcaggacctccacgttggataaattccatttcttcttgagacacaagtttccttctgtatttctgaggtaatgtttttattatttctgcagtgtctggtggaccctgatacatcagcaaatctggtgatttacttcctttagaatgttgtgaaattacagaagagtgagatggtagccctgctgatctcaaagcttctgatacattgggtttaggattgtctcttctgtcaggaaaccttattaatggagtgtgtggtttgactacctgaacgaccctactagcagacgccatcttgctgcccatcatgacccccgagaaggggcagtttccggggcgcgagcgagccgcggcgatcactggagtaccgggcagctgtccc

SEQ ID NO: 316052 - DNA, 781 bp, Homo Sapiens
cggcgattcttttttttcggctttttgatgctgtgacttttattctaatacacacattgatttgattaaaccaagttcagggataaggcaaatatacattcttgttcccgaaaacatcccaggcagtttcagcgtctttcagcacagatgaggtagggttggggctgcaatgtcatgcctaacctgggcttcagatctggaactagttcatgtggaaaatgcaaatgaaacctctgaagcaatgctgtaaaaaacaagaacatttccatccgagccaagtgttctccaagacaatgtcttcttcctagggaaaaaggaaccaaagctttcttcttggcaaaatatccactgctgtccagaaatcgctcaggatggaacacttctgggtctctccagtacttttcatcaaagtgtacagaataaagatttgtaattactgttgtgcctttaggaatggaataaccacgtacaactgcatcttcagaggttgcatggaaaatccctaatggaactatattacagaatcttaaaacttcatgcaaaactgcctcagtataaggcattttgcatttgtcggtcccaggagggtttccattagggcccataattaaatcaatctttttctggaacttgcctctgaaattaagataaaggggccccgaaaagaaatcgcccccgcgaccacattgggttgaggtttagttcccgccatggtgagttccccacttgggagaaatatggtttctttggggaaaggacagaagggccaattttaccctgg

SEQ ID NO: 316053 - DNA, 1258 bp, Homo Sapiens
aaagttggtaaaagaattttattattatgtggcttaggtaggtttttgcattctactaacagaaaagcattttccacaccttattcaacctaacacattatacatttgtgattttatctacatcgctgcagtattacactattgaaaaccttcctttcaaatgtactttggtgcaattatacagtagatatctctgccttcagaaaataaaaatattctcaatctaaactcaaaatggaataaagacatcaataccaagtttgtgcaccacttgggtaaaaggattgcaataaaaatcagaagagtatggctgcttaacatataaagaagatgagacatctgccacagtttcagtcaaacctttgtaggaatgatttagcatctgggtttatttttactgcagttttcacatatgataggtggaattgtaccacaaagaatagtctcatttgcacgagagactcaaatattggactctagcacaggaaatgtctcttggggcttagttatatacaaactgatagaaaagaaaattgccttaagaaaaatttcacaattgactaaacatctgaaacatttttatcacagctttcatatattaaaaaaagttcctccagagatgaagcttattgatgaaataaaacctagtcactatcatctgacccatgttctgagcctctatctgaggcctcattgttggatccctctggttccgattcatttccagagccttggccagaaccctcattatcagatcctctctccgattcgtgatctgattcggcacttggagaagctgggcgagagtcgttctcagaaactcctgagtggcttctccctgactgcacagattcattgtcagactgctcagaaccggagggccttctctttctggatggctggtcactgtctgagtcctgatctgaccgctgtcttcgtggcctccggggactgccggcctcgctgccagacttgttctggttctcatcggaatcactctctgatgaggcacatttctttcgttgttcgtcctcgtctgagtcactgttgctgttgctgttcctgggatgtccttcatcagcaattttaagtttatcctcatccgaagagtcatcacttgatgaaattatggctttggattttatttttcccttcattgatggaggcagacgttctggcttgggagcctttttcttctctgcttttggtggacgtcgtttttttggtttggggccattttctgtttcatcatcatcct

SEQ ID NO: 316054 - DNA, 751 bp, Homo Sapiens
  misc_feature (561)..(692): n is a, c, g, or t
  misc_feature (711)..(711): n is a, c, g, or t
aagtaattttttattgataaacatttacactagaattagaaatgtcagtagaaaaataaaatttaaataattttctattgtacaaagatttgatcattttgactgtagcagttagtgaaataacataatataaaaagttaagctgatctgagtcacaaccagccttatagagtgcacaaaaaagaaatgcaagtacacgacatttctgcatatggtctgctaatggcaccgatgcttcacattccaggaaatggttacttagggaaggttgatatgtgctgcagcataataggaacttaattcaaaccagagcaaccagaaaggatactggaggcaaaagccaaaatacaatttaaaatctgtaaaaaagatagggagcggtttaaaggtaattaatgaacttttcctcacctagtgtaaacattccataagaagtaatattttgtgcgcacaaaaaaagcacagatacctttcttagaagattcatgatgctcttgtgtatgaacctaagttgtcatgaaatgctttcacctcaaaaccccgtattaagaatcaagaatnnnnnnnnnnnnnnnnnnnnnnnnnnnnnnnnnnnnnnnnnnnnnnnnnnnnnnnnnnnnnnnnnnnnnnnnnnnnnnnnnnnnnnnnnnnnnnnnnnnnnnnnnnnnnnnnnnnnnnnnnnnnnnnnnnnnagctcgtcctagtggcggntgcaagaatctaagtactgagtgtccagggaagacaatga

SEQ ID NO: 316055 - DNA, 552 bp, Homo Sapiens
gaccaaatcatttgttctcacttgaaaatttctaatgtcattttctggcttacaagttagcttgtaaaataggtctacgtgaaaaatgaacatatctgttgattaaagcccttttgctctgcattaaatctgtgttcctgttttgggtacagaatgaaaatctgccttattgtgtaggtcggttctaaatgttttcacatcatcactggccgggagacattggagctccttgcacagaagggctcatgcccggcacggggacatcagtgacaccagcgcatctggggctccggtcctgattctgacccttgcaaggactgtcagcaacagaataagctttctgagcttctgacaaattggaaataacaacatttgccctgcctttctgaggggacgactgtgagtttcaagtcggctgattataaagttcttggaaaaatgaaagtgttacacaacatgagatagtgttcatgacagcagcatgtgtgaacatcacttactaaatgctattactagtgatatctgctatacacagagcatgcttacttacag

SEQ ID NO: 316056 - DNA, 604 bp, Homo Sapiens
  misc_feature (215)..(252): n is a, c, g, or t
  misc_feature (356)..(398): n is a, c, g, or t
agaatactttattagtttctgtaatcaaacccatgtagataagaccttacatatttaatacagtgcgttacccctgtacaaatggaaaaaaattaagtttaacgtttctagaccaatatggctgttaatttctgtacaatgccaactcaacacagtaaaccgggatactttttccaaagttgacagcacagctaaagtttccaaaaattcaaatnnnnnnnnnnnnnnnnnnnnnnnnnnnnnnnnnnnnnnaaaagaccaatagcagtatgttatgcatcaatagcagcaacagcttttccaggttctgcagtcatctgaataaaattatagagacatccagcacactccatttnnnnnnnnnnnnnnnnnnnnnnnnnnnnnnnnnnnnnnnnnnnttgcaaagttctgttactgttgtggtacctggcaccgttttttaaaattagcttctgaatcatcatctggaaagaaaacattctagaataacatcattaaaaacagctctgataaagcacggtcactactacgtatcataaagcaggtacaagatattttacattcacagaggtatgatacagtactgtcctatatctataatact

SEQ ID NO: 316057 - DNA, 516 bp, Homo Sapiens
ctaatgaggttacataactattccaggtcgcacagtgaggaaatggcaacttcaacctaaatctggggggccaaagtccatgcttcttccacctcacctctacttcactatttgcttgtaaaaatccacatgtccaacccataaatgtacaggtagacagctattaaatgaggtatttgctgccatttgtgaattatcttagatagataattatcataaaccattcacctaaacaactaaagaaaagacaggtcaatccatattcctgcacacaaagagaaggaacttagcagtgaattcccgtaaaacgaaaaaaccctttccaataccacttaatccagatgtattatttatcaagttttggatttgcacaaggattcttaaagcagaaggaccctgcattatcaaatctcaagtccctttaaaatttcattttagcccaaaggaatttcacgggattgaacaacctattaaattttccaagggacctactgtttcaagaacacaaacttggtt

SEQ ID NO: 316058 - DNA, 720 bp, Homo Sapiens
aggaaggaaaatattttattaaaagttttttaaagtttatgaattgaagtctatgaaaacaaactgcttgcttcagaagcattcagatattagatgtcaaaatagatcagcacatttgaaaatactataaattatatttcaaacagatatatacacattatgttaacctttaacaggatccattatcactacttagaacactgatatgtttatcttttaagtatgtcaaaattacatagcttttagctttgtgtgggaattcacctataacacatttaagaaagcattacaaaattgattatataataattctacaaaagttttctcacatttaccaaagcctactaatgtccagagggcacaaatattggccaaatagttgttttatcttagacataaagatgtttttgctgttttttagaaccatttagatggctaagagaaccaactttacggagcttaagtgttataggcatgagaatgggggtgtggtaaaggtctcatggtaaagggatgaatgtacttattttggatgaaaaaataaaacattgcatttgatgacattacagcaaaatgagctctgatcaaatgcttgtgagagagttcagagaataaagggataccccagggagggactggtgttgaccctcaagatcactaaaaggagggatgggcctggttctataagcttcttattaatgttgggccaaaagaaatccg

SEQ ID NO: 316059 - DNA, 434 bp, Homo Sapiens
ccagtaaaaagattcggtcgtctcaaactgggccttaaacctttgccttgtaaagatggaaggactcccccccaggcacctcccttagacccattggacctgtggacttggagcaaagttttcaagtctctgtgcctagtttcctcacctgtaagttgggggaatgatagtaactgctcttaagagctgctgtaggaattgagatcttgcatgaaaaaggataaaaccaattgatatggtttagttcttagtccccacccaaatctcatgtccagttatgatcctcagtgtaggaggagggacctcgtgggaggtgattggatcgtgggggcagtttctaatgttttagcaccatcctcctagtgctgcttgtttaaaagtgtgtagcaccccaccttcctctcctgccggccatgtgaagacgtgcttgcttc

SEQ ID NO: 316060 - DNA, 566 bp, Homo Sapiens
aaagaggtttaatcagctcatgattctgtgggctatacaggcttctgcttctggggagacctcaggaaacttacaatcatggcagatggtgaaagggaagcaagcacgtcttcacatggccggcaggagaggaaggtggggtgctacacacttttaaacaagcagcactaggaggatggtgctaaaacattagaaactgcccccacgatccaatcacctcccacgaggtccctcctcctacactgaggatcataactggacatgagatttgggtggggactaagaactaaaccatatcaattggttttatcctttttcatgcaagatctcaattcctacagcagctcttaagagcagttactatcattcccccaacttacaggtgaggaaactaaggcacagagacttgaaaactttgctccaagtcccacagttcccatgtgtcctaggtggaggtgctggtgggggagtcctctccattcttcagcagggcagagggtttcagggcacagctctgaggacagacagaattctttttagctgtgggaacttgggtacattgcttg

SEQ ID NO: 316061 - DNA, 542 bp, Homo Sapiens
ttggggggagggctgtttattggcgagggtccctgcggtgtggccgcgggtggcggtcacagtgccgcgacgcagtcggtggcccgtgtatcccggcagcgcagagcgaacttgcggcgcacgtcatcgggcacgaacctgccggccacgaaggtgggcgcccggagaagcggccagcgcagcgcttgggcgccgcgagagacaccagcacgtcaggccgcagcccgtcctccgaatcgctgccggtctctgcgtcccagcctgaggggatgtccaggctcacgagggggatggacagcagcttgagcgtggccagcgcgcgggtgcaggggcccccgaccttcgccggatacacgccgggggccagtacggcattcaacaccaggccataagctttgttaatgagcctcgtgcgaattcggcacgaggccagacccgatgggctcttgtcagtccaagaggacataaattccttggcctgacggtggggcaccgctgatgggacgcatccagtttccatggactttttggcgaggctgaag

SEQ ID NO: 316062 - DNA, 805 bp, Homo Sapiens
ccaagagcagccgaaaccagctcactcatttatttgactgagaacattaagaaggacaacaaaattaaacattctttaataaaattcctatagaaagctcagtcatagggcaaatactcagttctctttcccatatcaccgaggattgagagctcccaatattctttggagaataagcagtagttttgctggatgttgccaggactcagagagatcacccatttacacattcaaaccagtagttcctattgcacatattaacattacttgcccctagcaccctaaatatatggtacctcaacaaataacttaaagatttccgtgtggcgtgaaaccatttcaatttgaactaatatccttgaaaaaaatcacattattacaagttttaataaatacagtaagaagagctggcatttttctaaaatactgaatttcagatctggagtttattccataaataggtttcttttcatttgcttgctttcttggatacatttgctcaagtattattctctatgaagtgaactctttcatagataccatataaaaactgtattaatatgtgcctcattatagaagcacgctggaagaacttgatcacacacgtacctaactgaaaagtaacttatgaaaaagctctgctttttgtaaaactttaaatcaccgcttgaagattcccaaggaaccttttattgaactcccctagaaatttataaatatattggggcatattatattattatatttgctcacagagatattagcaggctggtggaatgagcttcatggaataatatacccaaga

SEQ ID NO: 316063 - DNA, 832 bp, Homo Sapiens
cttgtttaatcctgcccgtgtttcccaagccacccttttctaggaagagtggccttctggttcaggtcatagatgccatccggtgaccctagactcctttttaattctttgccaccaagtaattgaaatgttgtggatttaggacatgtcgtgtgctttgcattttcatgtggccattggtgaaattatgcacacattctatccattgtatttcaaccaagtatttttttgaatgctgctgtgcatgaggcatggtgttagatggcaagattgacagaaatgactaatacaggtatttggcctcaaggagtttacagtttcataggagaaagaaaaacaaaactagcaattctggtaagcagtatgtgttttggagagcacttaacttcatcagagagcatggttgaaggtgtatctgtgtgtatgagaaggtgttggtgataattagaaggcttccctaaagaggtcactcctggggttgagccataaagatcaagtagatacaagtgggcatgaagctagtattttgctgccagtcatttctgtagttaggttgccctatgtggttggagcatgtatgtattgttacaggtgtagtctgcttggcttccctaagagaatgccccagtccctggccagaatatacatgtcttttttagggtttgcaccaaggggaatagagagtgtctggctcagtacaaatctgtttccgttactccattatccagaaagccactgaaatggcattagcctacacttaatgggtggtagtgttttcacacattgcttctcaaaggaggagtatgtgaatgtttagtttgggcctggtaaa

SEQ ID NO: 316064 - DNA, 747 bp, Homo Sapiens
aagggcctcggttgacatctatacattttgaagatgaaatttttagcctaaagtttatattctcaggtccttttacaatcagtgtgtctcctgaactagcacacaggctgtagaaacagtcttagaaatcattgaaagatttgattatgaaagaatagcaaaattatatttcttgacatataaaaagttggtttaatgcctttatttctctttaaggaccagaaccaggaatactatatcgaaaaattagtctgtggatttaacactgacttagcatatagcttaaagttgctcttttggtttttaacttcctccatacataagcttcaaggacaataagatgttaaaaaggaggaaataattatttttattttgacactgtgacagttttggtaactaggatcctagggagggaaatgtttgcctgttgaacttctttctgttatgagaggatttagttaggtcattaagatgttgatcacacagcttcaatcacaatatgccaagtataacctggtttcgttagaggtgtctacagtccagatgttcttcgtaataaaagcaaagtttttgaacctctgagtccaaagcaggctggttggcataatatgtaatttgaaaaataaaatcttatcttgcagcactatcagtatgttgaatttattatgtatattatttctaatatccgaaactaaatacttgattttttaatatgtgtgtttattttatgatattgctattaaattt

SEQ ID NO: 316065 - DNA, 744 bp, Homo Sapiens
ctcgtgttacatctatccatttgaagataaatttttaacctaaaggttatatctcaagtcctttacatcaagtgttctcctgaactagccccagcttgtagaaccagttttagaaatcattgaaagatttgatttatgaaggaatagcaactttagtatttcttgacatatcatacgttggtttaatgcctttatttctctttaaggtccagagccagtaatactatctcgacaaattagtctgtggatttaccgctttcttagcatatagcttagagttgctcttttggtttttaacttcctccatacgtaagcttcaaggccactagtctgttaaaaaggaggccatacttttttttattttgacaactgtgacagttttggtagctaggatcctagggagggaaatgtttgcctgttgaacttctttctgttatgagaggatttagttaggtcattcaagatgttgatctcacagcttcaatcaccatatgccaagtataagctggtttcgttagaggtgtctacagtcccgatgttcttcgtaatgtaagctaagtttttgatcctctgagtccaaagcaggctggttggcataatatgtaatttgaaaaataaaatcttatcttgcagcactatcagtatgttgaatttattgtgtatattatttctaatatccgttactaaatgcttgcttttttaatatgtgtgttttttttgtgatattgctattaaatttttatt

SEQ ID NO: 316066 - DNA, 704 bp, Homo Sapiens
taatggttaaccctaatggggttccagggagcctacctccgggatccaatacctttttaaatgtccatacaattcctatgagccatttgaatttgagcattttccagaggttttgttaatgaatgcacctacatgtccctagacatcataatatatccttatatccaagaaaacagaacatatcactttttcagttaatgatactgtctagaggccgtgacaggcatccccataagagtatctttctattgttgacttgaattttgataactgtgtatgaacataaggattttctttcttttctagccatggaatgtcttacccaatttcaggtttagtgaagatgtataaagcaaaggattacaatgtggatcacccactggtggtaaaatcataagaataaattatttaattaaatattataatcatcccaatttctataaatatatttgccaattctcgcctgcttagagtatggggtaaagtaacttaacatctagaatatgcagggaagaacagctttgtcatctgccggtcaccgcatttcgtttctccccagccccatggcctttctgtggtgctcacgtccccagcggtgttcactttcacggcccagatgtttccagagcgacacctggagatggcagaaatactgggtatgaaccattactcaaaattctgtgaccggccaggcacggtggctc

SEQ ID NO: 316067 - DNA, 373 bp, Homo Sapiens
gctgctaggccatcatcaacatccagatcgaataagaatttccggagcgtgtctgccaacaccagccctgcatcttggatcctggcagtgcgggtgtcggctcccagtatttctgccatctccaggtgtcgctctggaaacatctgggccgtgaaagtgaacaccgctggggacgtgagcaccacagaaaggccatggggctggggagaaacgaaatgcggtgaccggcagatgacaaagctgttcttccctgcatattctagatgttaagttactttaccccatactctaagcaggcgagaattggcaaatatatttaccaccagtgggtgatccacattgtaatcctttgctttatacatcttcactaaac

SEQ ID NO: 316068 - DNA, 1434 bp, Homo Sapiens
  misc_feature (63)..(63): n is a, c, g, or t
  misc_feature (1154)..(1162): n is a, c, g, or t
agatttacttcatctttattaacagtaccatagtattccactgtctagtatactataagtganctatataccaataatgaatacttaaggttgtttcaaatcttttattattagaaaagtgctgccagaaacatccttgccatgcttctgtatgtactggtgctagtgtttctatcagataaatttttagacatgaagtgaattactaggcataggaaatataatttacacttttgatagatactgagtttttgctcatttgctacatgaagcagaggcagagtattctgtgtggggtttgggacaggaacactgacccctgaagtcgagcctgggggtctaacatagtggtcatttgtccagcctgttttatggaaggaactgggactctgagctttggggaatttcctgcaagataaatgtatatcccacctatactggtaacaggtaagttatgcacaaagatgaaaagacaaagccctagctagatcagctcttgctctcagcactacaatggccagcggtaattctttcagttaaaatgacaattaatacagtttcattgaagcttcaaacagagcagccagatcctcttctgactggggacggggtgcaagcttggtgaccctttcctggggcagcgttcctttcactagtgcggggatatcagctttggagtaaccaacagctgctaggccatcatcaacatccagatcgaataagaatttccggagcgtgtctgccaacaccagccctgcatcttggatcctggcagtgcgggtgtcggctcccagtatttctgccatctccaggtgtcgctctggaaacatctgggccgtgaaagtgaacaccgctggggacgtgagcaccacagaaaggccatggggcaccagtgggtgatccacattgtaatcctttgctttatacatcttcactaaacctgaaattgggtaagacattcccatggcacagatgaacaccagcatttccaaagccgatgccagcaaaagcacttgccaagtgcatatgagaccttgcttcaagatcatcgggatttctgacagccctgtgaatgatataaatacctaacaataacacatcaacattggcaattcctacagaataaggagctgccttagggaaagatatggtgnnnnnnnnngaaatgctactcggtaggaagaaaaatcaggcaagttattcaaacgacgccttgtcttctaaatgaaaactgaagggaaacatatttctcatcaactgtttcagcaaaggcataataaatacgctgtcagctgctcatgtgatgtaaaagcgccgggggaggcaacgcgctggtccctggatggcgagggccactccaggaaggtgccctgagactcattcttcttcttcatgtgtcagtgctgttgacgctcgtgccgtattcggcacgag

SEQ ID NO: 316069 - DNA, 695 bp, Homo Sapiens
  misc_feature (642)..(642): n is a, c, g, or t
ttttttcactgacaaagaacttttatttctttttaatgacattaaacacaactgctacaagggaaaaaacatgataaagaggaggcaccaaacttcagtttcataattgaaactgacaacgccagtaaatcagggcctgcattcgaaactacaggttatttcaggctccttacttgtaagtaaacaatgtaaacagcatatttttactctgctttgtcaagacccccatggtgggaatgtcgtcatggatgaagaaagcagttaaatgcacctaacacttgcttaaaaaataatacagcaagaattccaactgcaatattagacttagaggccaataccaaatatgagagatatgcagctttgaaaagagatgaaaactccagattctacccagtaccatctttaaggcgaacatgccagataatgagttttctttggctttgttttttcttcttaaagaataccatgttaaccactagagaacagctctctcctcccccagtccaacagatttaattaagctgctaaagctttggaaaaaacagaattatttgagctaagaggaaatgtgattgtcacattttctagttaaccctgtcactcatttgatttggcaaaaggcaagtgctcctattacacatncagtcttaaaaccccatgtaccacggagggcacgagttttagatttttgccta

SEQ ID NO: 316070 - DNA, 810 bp, Homo Sapiens
  misc_feature (261)..(261): n is a, c, g, or t
  misc_feature (276)..(276): n is a, c, g, or t
agccccaaccccgggcccagaccaaccgggcgagagagcaacgggcaaaccgcccttggtccgattcggcccgagctcgggccgattcggcgccaaggtttttgattaatatgtaagacagtcgggccatcccaaaagtcagaaaatccagcaggaagaggctgcttttagaggggcagagaattagaggatggtggtagtaatgaaaatgatgcattcagtttccaagttttaatttgagccagctatggtatagctaanaacaaaagcccatanagttggagatagggaccagagtttaacatagcgatctaggccagaattgacaatgtttaagtaatggtggaatctgtcaataagacttcccagagtgttaatatatatcagaaatgcacacagcagacccataggcaacatccaacacaggaagaaatagaagtcacctattgaaaactggaatggcccattcagaaagacaggagaattaggagagagtgagtgaaagaagccaagggtcaagaatgcagaagcaaaggaaggactaaaaagcctccacggacatcgataatcaagagattattaagatctttgctagaagagttcctttacctgtacttaactcccttaaaaagagaaaagtgatggaatgacttctgcaactgtagtcccagcaggaactgtgaagaccagctgccctgcaggatccagtttttcttgggaggttgtatctggtcataaggtaaacattctatatattctatgcctgctctagaattgaaagacttcagcagtattaaagcattttttaat

SEQ ID NO: 316071 - DNA, 758 bp, Homo Sapiens
taattcacaattgaggaaaccaacaggttgagctgctgcctcaagtaaaaaattcaagtcagccctgatgctgtccatgttttttgtaaaacttgctcacttgtaaacaacgtcgggcagcaactgcaggcctcacccctcactcttcaaaagcgactgcgacagctgacatcccccgtgctcaactgcagggcgcggcactcgtctatgctctcatgaagccccgtgccaagggcttctccgggaccccagatacccaccagaccctacaggcctgccccgtggccctgggaatgcttggcaccaaggtcccacttcccacctcagtcaagcacctgcctcccaggcctcaccagtcttcatctcagcccgccaggtcctctcgagcccctggagtgccctgtgagccacagcttataaagcagataggaccagctctgcatcagacccctgtgtgcaggcccagctccaccacccgtaaagcagtgacctcagaccaagctgcttaacctctcttgagtcagctttcttacctataaatgaggataaaagcacgatattcaccaagcccacagcttgaatgcctcaagcgtgtgagcttcgggaagaagtccaccagacacaaacccagagctgggaaggcctaagcagttgagcttcggggaggagtcccacagaacagacctgttgcaaattttattacatgccggagaataaagagaaagcccggtaacccccgccctagaaagatgaaaggt

SEQ ID NO: 316072 - DNA, 707 bp, Homo Sapiens
cttcccttttccttctaaaggaaatgatgaggggaaagaaaggaaggaaaacaacaatacaagcctcaaagcagatttcattctggtgtaatgacattagtgggtgatgatgtaatgggaataggtttggagccaatttcttgtggtggaggcctataaacagctgaacagaaattctagtacctgggatacaatatgatcttggagtttctgaagggagttaaagggaagtgttcaatcacagttgaaaatgactagataaaatcttaagtcctaaataaccaagtaagacccctgcattttcatttatcaccacatacacatggcctatatgctactctcttagatgtactgagaacaacaacaaaaaaattaaggtaatctagagaagtttagttatttatcattattaatagttttctacaaggtactcatgaaaatgaagacagtgactcaatttaaccttttttaaatggggcaaacaaaaatatctttctggaaataataataattatcaaaaagctttaaaagaatctaaccttttattgcatgggtccctggacaggcctcatcttggcacaatctgccatgcacactgctaggtcaaaggagaaagatgcacaatttgccaggacgatatctctgtacacttgctaatggatgggtaggtttagttggagtacaaagacctgtacgatttaaaagtt

SEQ ID NO: 316073 - DNA, 704 bp, Homo Sapiens
  misc_feature (443)..(623): n is a, c, g, or t
aagctgtaaatatcccataatggccattggtaatttagttaataatagctctagttttggatgtttcattttttcaggttttttgctctttcacgttttgtctagtacagattttaagtctttttttcctggctaccctttgcaagttttactgtctttgctagataatggcttttgtatttattttgacgtgtcttatgttttcagtgtggccaacccagtataccaaaattgccttgaatatggtttctgtgatgagagagactatgttccaaaaatcctgttggtagagacatttcttttattcttatggagggttaaagataaatttcattccaaatctctaaatttagaaaaacagtaatgtcctctgttggttaaaaatcctcacctttcttctggcattaagactcaataatgggggctgggcacggtggctcatnnnnnnnnnnnnnnnnnnnnnnnnnnnnnnnnnnnnnnnnnnnnnnnnnnnnnnnnnnnnnnnnnnnnnnnnnnnnnnnnnnnnnnnnnnnnnnnnnnnnnnnnnnnnnnnnnnnnnnnnnnnnnnnnnnnnnnnnnnnnnnnnnnnnnnnnnnnnnnnnnnnnnnnnnnnnnnnnnnnnnaacctggcaggcaacggttgaagtaagcaaagatcgcaccctgcactccagcttgggccccgagagcgaaactccctctca

SEQ ID NO: 316074 - DNA, 808 bp, Homo Sapiens
gaattacatctctatctttttcctaattacactttctgtctcttgtgttttagattccatgctacctttcatcttcttgagttcttccttataagttttcctctctgaccaaagtcagtttcagaagtatgatgacatgcacattcagtttaattcttattcttaaggtgtcatacttgcttcatttaactttgatttcactatgtgttgtttgtttattcatctttgaattgtaagcatgacaagactcaagctgtaacattctctcctgtgtcatatatgaggatagagcaatgctatttccccctatgtgaatttggagctccgaatatttaactttctatagtgatgggctattcttctgatgtcgagcccttttttctcactggaggctttcttgactaataccttgaatttcacatacgtcttttgcgcctggccattttgaccctctccttgtgctagaactaatctgtatgtatttcttctgcatatggaaaaagattaatttccacaagaaagtaaatgtcttatgagagactcctttatattgtaggttccaagttataggcgatccagaatgagattactttatgggagagacagatgtaaattgagctttgtgtgacttgaaagaattttctttcaatttcatgggtattactctattttttcggcaatacttccaagaagtctagaatttaagggataggttatgtggggttaaattatagtagcctttactttaaaaaatgtggttttttattaaagttcattgaaggtgctttagtgccgagttcattaccaa

SEQ ID NO: 316075 - DNA, 661 bp, Homo Sapiens
  misc_feature (391)..(497): n is a, c, g, or t
taacctttacatagttcactatggcatgcatattcccattgcaatgatacatacccagatgaatattatttttttagagtgcctctctatttgatatttaggtcaactagtgttaattttctggtataacaggaaactgttcttattcttaaaagatacatgctgaaaatatttggggataaagtgtcatgattgctgtaactttcaaagggtcaccaccaacgaaacgatgatattggtaaagtattatatatagagaaaatattaacatttttaaaaatttaaatgaaagatgtacaggagtgtgctgtactggtcttccgtttctctgaatgtatgaaacatttccataatagaaagttgtggggagccaggcatgctggttcacacnnnnnnnnnnnnnnnnnnnnnnnnnnnnnnnnnnnnnnnnnnnnnnnnnnnnnnnnnnnnnnnnnnnnnnnnnnnnnnnnnnnnnnnnnnnnnnnnnnnnnnnnnnnaaaaattagccgggcgtggtggcaggtacctgtactcccacctactcaggaggctgagtcaagaaaattgcttgtctcctgtggaaaggaaatgtccagtgacccgatcttgtggcattgtagtccagctctgtctccttttgagacagcaagactccgtctcc

SEQ ID NO: 316076 - DNA, 555 bp, Homo Sapiens
gagtgttggaaaaatgttttaatattttggtttgggtgattttaatatttgcttttatgcatttttgaagagaattttttaggaagacatcaagccccataatggaacaacttattgactaattgtttttaacaattacttttgttgataatctgtgacattgccaaaattaaaacagatgccattcgtgcagcacatataatattaatatgcaagttaaaatgttaggacattttaactacatcatgtaccaagttccagatccatatatttaattgactattagacccttctacttggaagtccggaacagcatttaacatttaggatgtcccaaaaataaactcactttgcctatgcacgcctttctgacttaggtgcttgcttacggtctttttgtgtatgcgcaggatctcactctgtcccacaggctataaagagagcaggggggtgattacaggtgagatgatacttaacatgccatgcccatgcaattcatccacctgaggaacctggtgggcgggaccacaagaacttgtgccgaaatcctgcaat

SEQ ID NO: 316077 - DNA, 1281 bp, Homo Sapiens
  misc_feature (204)..(204): n is a, c, g, or t
  misc_feature (221)..(221): n is a, c, g, or t
  misc_feature (921)..(929): n is a, c, g, or t
tttaatggccttgggaaagtttcctttcaagagaatttgaattttcttccaagcaagcaagtcatttaccaagtgttgtatatgtcatatcagctcccatgtcccgggtgtttgggctcctggtgaataaacaaggaaaaccatcatctgggtccttggccaagtagcagccactcttgtgtcccacatgatgctggccttacngatgtggaacccttgantgctatgtgtctctgggactctcctactcattgcttgcctgtgcattgtggccaatggtggcatttgtagttcctgaacatcagctgggaactgcatatggcttcatgcagtccattcagaatcttgggttggccatcatttccatcattgctggtatgatactggattctcgggggtatttgtttttggaagtgttcttcattgcctgtgtttctttgtcacttttatctgtggtcttactctatttggtgaatcgtgcccagggtgggaacctaaattattctgcaagacaaagggaagaaataaaattttcccatactgaatgagaagttaaaatgaatgtgtcatgagaatgggcttaacacatcgttggtttgaaaacttccatttttaaaaatttagagtttagtcattagaaaaaataatggactggaaagttatatttatatccaaatatacctatttcaaagtgtatttgtgaggcctgttttagcctgtgtcttttgtattgtgtgttgctaaagaattctacttttagtaggctaatcaacaatgaaagggttagaaaattgctgtggaacatccaggtgaacttcaggaaagacagtgaaaaatggaaaacgttggagcttctgttgagataatcttcattaggtatatatcttagggatacagccttttctttatcttatagcaggnnnnnnnnncttttgagggaaatagaagggctgcgttacacaaaataaacaatggcattgtcataggccttccttttactagtagggcataatgctagggaatatgtgaagatgtttttatgaagtctctttctgatcacgaacaatagcttgcgctctactctgtagttatgtggattgccgagcaatgacccttttcaatttcttatttctgtgttactgaggaccctaatcacttagggatgtaattttatagtataaactttctgtacagtttttcttatagtctaataagtaaaaagtgtccttcaaattatgataattgcctatgtacatggataaattaaaacactgcacacgg

SEQ ID NO: 316078 - DNA, 694 bp, Homo Sapiens
  misc_feature (607)..(607): n is a, c, g, or t
  misc_feature (611)..(611): n is a, c, g, or t
  misc_feature (614)..(614): n is a, c, g, or t
  misc_feature (617)..(617): n is a, c, g, or t
  misc_feature (620)..(620): n is a, c, g, or t
  misc_feature (670)..(671): n is a, c, g, or t
ttttatttaaatcttaagttaaaaggatgagttttaaaaattaaatccagattagtaggtattatggcaaactattttggaagtgctatataaagttaaatttttataggttaaaacttgcaaggtaatcctgagtagctgttgtacagtttaattatgtgggcagttttcaacttccagagtctagtaacccttcccagttgaacccatcaagtgcaatgatgggaaatgtcttcagaaagaattattcttttctttttaacatctcctcttggcttccaagcgtagtgcaaacggggaatttctcaagttgtacagtgttttgactcatacttctagcactattgtcactgagtcaccccttcactgttgggggagccaccaacagagtaacattctgatctcagttcagtgaggggaaagcaaattgccatggatacaaagaagtgccagcctgagatgcctgagagcttgccagggaatatcttccctgtcccaggtgtgccagaggcccactttctctcagggctgagccccctgcctgaatacacacataggaaagctacacagcttgccttgaagccatagataagatgggaaccatttncatnctnctnctntccaagcacaaagtgtacttaaggggtagaagtgcatattaaatacaccnngtctggtaaataagactttatag

SEQ ID NO: 316079 - DNA, 672 bp, Homo Sapiens
  misc_feature (398)..(406): n is a, c, g, or t
ctaagataattggttttactaatgtggaacaattaatgccagccataaaatgtataattaaacattttattattacaaattcaaatttgttctcttttccctatatcaccatttaattgaacaacaatacaacgaaaactggtcgccttaaaaccaatttgaaacaggttgttcaggagcaacaatacaaaaacaaagtgtagactggaatgtattacattttggccaaacaaaaagatttgattcattctggttcatgaagttagataatggtgtttatggttttgaaagttcactgaaacttcttcactgaactggtttctttctgatgcattttcttgagttctagccatgactgccacagtagcagtcctgggatcagaacccacacaccgttnnnnnnnnncaggtaaagccaacagtacagccagttgctggtgttgaggttggggcttctggtgagccactctgggaggaaggtcatccagcagccatacagctcgcacacgcacagggtgatctgcaggaaatgccggtaatatttttctttgactatggcataaatgaggaacaatgccagagacccatccagggcgacggtcagaatttccacagacacaatggttggatcaaaataaacccatcttgcatcagctttgccatattcttcca

SEQ ID NO: 316080 - DNA, 735 bp, Homo Sapiens
  misc_feature (86)..(86): n is a, c, g, or t
  misc_feature (338)..(350): n is a, c, g, or t
aacttctgtttataatatgtattttcaggaaaaaaagggccagaaaaatgagaatggatttgggttggttttaaatccggtaagtnttagattctagggttcaagatttttaaaatttgatttaaatgaagaaatggatttttctctctgcccctccctgccattcatattttctgcataaccctattaataatatcaacctccccagccccttattttattatttccaataattccaagttcatatagaactgataatgtagcaagccccaagtatgataataggcagactattcccaactttctgtctagtttccagccattgaagtgaactgctnnnnnnnnnnnnntaattgaaatgttgagagagatggttatgtaagttagtcctctgctgtttacttctgcaggagctgatccatttataaatgcagttttaataaaccatggaataccaaggcacaacatatcaaacacattggatcccacgatgttagacatagccatatctcctttccctacaaaagaaaagcatactgttaaaatgtgcttaccaatactgtgttttattaataatcttcataagaaaagaaaccctggatacttttttgttgttgattcgttttgaaaaattgttgttagagcaaaagtcttactgaatttgtatttttaaatttttcttgggttagtatttaaagtcttaacatttatttaataattatatttattaaacca

SEQ ID NO: 316081 - DNA, 1154 bp, Homo Sapiens
ttggagtgaggttagggcagtgtgtgtcttacatacatctttgggagacattttaggttaatgaggtgaatgttgaatggttccacattgaattgaatcctactgaatggtgcgtgggattccaacagtcagaggggcaaacgaaggcagatatcatgggtcactgtccaaaagcagtgctacatgaagaactgttggaggggctagaagagacactgggcaatgtctgttcactaacatgttaaagatctgcacaaagccaaaaagcagatgtggggcagaagtcaagatggccagaaagaaggtaactgtccaaaagctaactctggaagcacaggtattccagaggcggctctgattccaaagctggcatccacagaatgcaagttgtctgaaagagttaaagtgtactatcttgctcccattagttgcagacacgttcattcctcttatcatgatgggatcattattgttttttcctccttgacatttttcaccaacaatggaaaacactgtgctttctgttgtttggggctttcttttgaggacagctcagaggattcatgttctgtatgttgggcgcaacttccttgtgattcttagttctcggtcccaaggtctggctttctcttttgctttggaaagaaattgttcccagcccctgatgcttttactaggataacagtggaagagtggagaacacagaaatctcaacacacctatgcttttagtagcttgcagttaaataactagcgtgttttcttcccctgtaaaatttccaggcatggtaaaatctttagcgttacatagtcagggtctagctaatggcttatcagtcaagcaggcatgaaagagaaatgtctgtgagggaaaacaatgatgaactaagcaccaggatctagcacatctctcggtttgctcagaggtgggtgaatgtctgctctttagcccagtcctgcacatctgctcggccaaagatgaggtagaaaaccaggcccgatatgttaacagcagctgaaagcaagaagacatttctccaaccaaactctgaatcctggaggcagaaaattacaagttattaacggtcacccaattcctgtccctcttggttcagaaaggctttggctctgtgtcctcctgctccctccccgacc

SEQ ID NO: 316082 - DNA, 704 bp, Homo Sapiens
  misc_feature (506)..(506): n is a, c, g, or t
  misc_feature (509)..(509): n is a, c, g, or t
tgggtgtttgtcaggtttggtatcagggtgatgcacagaatgagtttgggaggagttgctcctcttcaattttttggaatagttcagtagaattgtaccagctcttctttgtacatcaggtagaattttgctatgacactgctacattttaattagtgattagtccactgacatttagtctgattactgatatgattgcatttagagctgcaagtttattatatgttttctgtttgctcctccacttcttgtttttctttttcttccctctgcaacttttggatcatttttttcttaatttaggattctattttatctttggattttcggtggtttttctaggaattaaaacgtatattcttgatctttcacagtctacttagatttaattttatactatctcatataaaattggaaaaccttgcacctgtataaatccatttgccactgcctccattctttatgctataaagtcatatggattacatctgtacatattacattantanacaccacaggacaatgttataatttttgctttaacaggtctctgtgtagttaaagatcttatcatgaaaaactagtctttttatatttaccaaattccaaaaatttttttatttccttccttggagaacttaagattccattctgggtgtaatctcacttttataggcccggaacaatcttttcttttaggcatt

SEQ ID NO: 316083 - DNA, 687 bp, Homo Sapiens
  misc_feature (202)..(202): n is a, c, g, or t
aatctgggcagccaacctgaagagaatgattctgagtttaaaattttttaagtttcatcttgattggatttgagagcactttaaaatattggtagtgatttcgtagtatagagattcgggagaaaagtaaccagaaaagaaatggcatttcaggcagaaataacatcagaaaaatttttaaaaactaagaaaatagtaatanccgatttacctaagaaccagtaccttttgtatgtagccactagcttcatgctttgctacatcctttctttgcagaatctgatatttagagtttctgtaatgaatttaaggtcacagaactattgaaaaagttatcagttgcacaaataaaattactgtatttttaacattaaaagtcagcaaaagaaattatatcgtggttgttgttttcctgatattattttaataacaattactacaatttacctgaatcaataactacagtagtatttattaccaaaacgaagattaagaactaggattgtttagtcagccacaatttattacccctagaaaaatacgtatatacttataatttgtgaattttattaaaagatttcacaaaatacccaatgatatcctagctctcaaaggccttgattaggtaaggcccaatgttagtccatttgtgctaatggccaagagggcgtgttaggttttacagac

SEQ ID NO: 316084 - DNA, 734 bp, Homo Sapiens
  misc_feature (104)..(112): n is a, c, g, or t
agaatttattgcatatacagagactttttatattacaggtgtacattccaatcagccatatggacggagtctgcgtacattttaaatgtaaaagtatactttcnnnnnnnnnacatataggccaatttccagtgggatgacattgcaatgggaaaaggaccgtgcatttgcaatgaacaccattattcctgagtaatcacatcacaagccgcaaggggatggggcttccctttcttttttgctgggtatgacgatcttagcgagtgaagccttttatgggatgagtagatcgcaccctccatcaagagctttaatttgcttaggttaaggctgatcagtgaaatggcaaaactggccacggccctggctttgacatttgactatgacagacagggcctgtagcgccataagggaagggctgggcctaactggtcacttacctggttcatgctggcaataaccattatcttgctccagagagtgggtctactggtgaatttgcgactggaaaatctacagagcgcttatgcacaacgcggcttcagctaattgcataatccccagccccacacctcaattttgacagtggagaccattcaatgactatctgcggggtagaacaatgaatggcaatcctcagatgtcccaagcctttatggcttatgaaccaacgaattttatgcacgtcctggggcccaattttaaagatggcatttaagaacgcatcctataaa

SEQ ID NO: 316085 - DNA, 719 bp, Homo Sapiens
  misc_feature (674)..(674): n is a, c, g, or t
ttaatttttctgtacaaaatccacaaaatattttattcctatatttcagcaactaaaatattaattcacactgacttgttaacaaagggtcatttctacaagcattgcctttaacatgtatttacattttacatacagagaggcaactcttgagaacaaacctttaatgatgaacattagacattgtaaggatctttcagaggaactcacacactgtttttcaaatcaattctgtattgggtctagctctgcaaaaagaatgaaaaggaaaaaggctgcaatttaagagagatttcagcatattttaccttgtacaaaaggaacagccacaggaaaacagacacatgcatacctacaaatcattagtatggagaaatctgaaaaaattaagtaatccacaaagtccttactgaattcaattttctacagataaatggctttaatgcttgagataccattaagtcaaggagcaaagtgaggattatgatttaggtctgggactatcagcaagagattttcagattaccaatattacagttttctaaagacacagaataaggcgtttttcccccaatacctgagccaatttggaacaatcctgtggaaatttgaaaaataaataaaaagccattcattttaatccactattaacgtgagcttaattaacaaatggngaatttaaagggaaaagacatgttcacgacttttaagtcttgggg

SEQ ID NO: 316086 - DNA, 539 bp, Homo Sapiens
cttgcggcggtcctgggtatcatttaaaagggtttattttctaaatgggagtaacacagagggaacttttggcaccttctttccagtccatcacccccatcatgtcctcccaaacacaaagcaatggcaggagaaaccacaggacagtcacaaagtcagtcacagagagatctgtacaatcccggatagctggaattcaagagtctgtcccagctatcttgtcctggagtggggttacagctcaggggcatagggctcctcagtaggtgaaggtacccgcagcttaacattatgccttaccacggggaagagttccaccactggcaggagagccattaccatgacagcagagcaaatgctgaacatattccgagggcctgtttttcgatcactgtcatggaggacaaggagccctaggcaagccagtgagtgcagaggtacccggaaccagttgagtacaccagcctgctttgtgttagggatcacctttcttcgtaggaagcttatggtgtggaaggtttattcacaagcccactcaa

SEQ ID NO: 316087 - DNA, 749 bp, Homo Sapiens
  misc_feature (627)..(627): n is a, c, g, or t
tccctactccagatgcatcataaaaactaagaaacatatggatagccaactgtattcataaagcccccagtttggtttattttgcttctctctgtcagggggagcgaaaggcctggctttggcctacttggtgaacaggttaggctgtggctctaaactggcctattgagttaggtaatgtatccaagtgccaggcaggaatcctagggccgaaggtgtttttacatgaaagcaatgggtttttcatgaataacattcttttacacatacagtttccatcaccgggtaaagccctgcacaccaatgggctcatcccatgagtttgggtgtagtctggagcacccaggctgaagcacactcatgcagaagggtgtgccctggcaaatttttaataaatggacagttagatacataaaaagttctctttcttgattcttggtgctcaccgatcactgaggaatcccttctttgagcagcacaaaacaagaagagctggttgacaaaacattttcttacaaaggtgtgtcaaccctgagcttggaattaagaaagtaaaatctgtgatttatatatacatagatataaaaatagatgatcatactaagactaaaaagttgaagaaatctncatgtcaatactatatatataatatttttggcttggacttttttttctggtgggaagtgttttgtaagagaaatgccctgtgatgcagaaacccactgacacaaaggtaatagttaaaaatg

SEQ ID NO: 316088 - DNA, 747 bp, Homo Sapiens
  misc_feature (177)..(177): n is a, c, g, or t
  misc_feature (190)..(191): n is a, c, g, or t
  misc_feature (194)..(194): n is a, c, g, or t
attgtggtgagggaaatcccaaagccccgttgtttcatggaccacgggattttccgtaggggagacaggtttatggcccatgtttccctttaccttacgggggccccgcgccgccaaaacgaatggttctagaaaggcttctggaggggccgaggcggccgacatgaaaggaagggntgagtgtaatttnngangtggtagcagggttttaaactttattttgcgctccgtgacccttcagatagtgatttgaatgattaagtgaaactcttcttaggttaagtgtcctagtccacgctaaaatcatcttgttggtctctttggcgctgtcagcgaccagtatcagcgcccggcttgtccccgctgcccgccgcgtccctggcccggatgtgggaggcgaaggcggtgagcatttccagagcggtgagatgagcgccgcgcataatcaggcgatgcccgtctccgaacagcacgtccacgcagggctcggagccgtcatgcctcacgtccgcaatcactgagcagttgagattagtggagcggaccttctcactgctcaccgtctgcaggaaggtcctcgtcgattccacgtttttctcgaagggacagaactgaacccgaacctgtttgacaggccgcagaccaagccgagccaaggaagctgccatggtgacctccgccccggaagaacttgtgcaggcggaagtgtcgcattggtgaggccgtgaatggctgcgcttctgcggg

SEQ ID NO: 316089 - DNA, 695 bp, Homo Sapiens
  misc_feature (38)..(38): n is a, c, g, or t
tcgaggcttccagttcttatgtaagctcatgctacganactgtagggtggataagacaggctctggatttccctgtcataccagcagctctgccatttacacgctgtgagacgtcaattgagcgagtttcttaacctgtgtgggcttcagtaaaaggagcgataatccttcacatcagcacttaagagaatgcccggcatagtataaggtcatcatgtttgctttacaggtagccctttgcaaggatctcttaagggtcgcttgaatattcagtaatcttaaggtagctcaggactgagccttagctaccctcaagaccgtgacagttaagacacagaatggtcagcacatgtggatgacagtaacagtggctgctagagacctctcggctggagccaaatgtgagactggacagcatgaatgaatgacgagtagtaagatgaggcattgcagtgagagcacctgtcacagcactgattgacgagcacctgccttgctggtgtcagtgtgatcttcacagcttatgccagctctggaagagcttatccaatagaggggcctccccaaaccaggttgtacacggccaacgaaacccccttctgacaggatatacatccggggtgtagggggctggtcatctgaatcccagcgacggtatggcccttgccctcacgagttactttacactaacccgt

SEQ ID NO: 316090 - DNA, 696 bp, Homo Sapiens
  misc_feature (85)..(85): n is a, c, g, or t
  misc_feature (429)..(429): n is a, c, g, or t
  misc_feature (497)..(497): n is a, c, g, or t
  misc_feature (622)..(622): n is a, c, g, or t
tagcagagaaggggtttcaccatctttggccaggatggtctcgaactcccgacctcgtgttccacccgccttggctcccaaagtnttgggattacaggcatgagcatcacacccagcccagacttagttattcttgtcaaagcttttggctattccttcccaggacacatacgtgaagaattcatagaatttgtcctggtaggtcaagaacgtagcatgtgaaaattatttccaaggaggaagttaaaggtgaggaagacactagtgaccatctctgggactgtgtggatacatggttaaaagactgaagtagaacagccttgtcatggacagaaacccttacacctatttgaaaagcagggattttcaaattgcttttgcattgacttcgtgggatccatgcatactcacctttgctaaggctgcagnctaagtaccttttcttgccataccaatccaaggtgagcagctactccctttgactcaccccttgaaanatgccatgtgtggaaggcacttggtcacggggaggacagatttgaatccttatttattaactggaggccttctcttgggctattttcccggtttttttgctggttcaaccattttagacctgttngggccgggtggcttccttgttaacccactttacctgaaggtaaatgagatcccctttagccaaagtaagcccaa

SEQ ID NO: 316091 - DNA, 639 bp, Homo Sapiens
  misc_feature (373)..(373): n is a, c, g, or t
tcaggcatcaatatttattaacacaagacaaaggaaacacattcaatgagttaatagaacactgtccagccagatgttaaatttaaaaacgtatatctagtctaacttcaaataaataaaaaaactttatacataattacacagtactgtagtttgaatttgacacgggtaaatatcttgacagaaagtaaacaaaacagcatttaggactaaaaaattattcttatatctttagtctcttcctctggacaagtaacatggcccaactacatacacctaaaccagaaatgtcgtatgaatgataaagaaaaggcctattgtgtatttggcgcattgcagcttcttgctccaaattactcttgctttttacatncaaagcagacaacataaacaacactaagggcatagatcttgttggagtttgaggatgaggtgataactcctcattgctttagactaaaagattcctggatattcaaggaaagtaatttatttggccaagatatagagcaccatgcctggggcagagaccttaatagaaaacctaaggcctcgggcccttgttgagtcaacaaagcattaagcaaggattgcccagggactaaagtaaggagacagactcatgtgaccagacaggca

SEQ ID NO: 316092 - DNA, 549 bp, Homo Sapiens
attatgcacattgtttttcctgcctttttatggctgtctaaagtctagggaaaagggaagactggttaatgatgagtagaaaaaaacttgtaagctaatcattcactgacttattttccttccattttctggtttttaaaattagccacaccacaggaaacccacatttttagatggaaagagcaagaaaattgtgttagtgctcttagttattttcatcttaatggtatagtgaaaagacattgacttgagatgatactaaggaagctttggctcactctcacttgaagaggggatcttggtgttgtagtacttggactgtacaaatgttttactgacttttcttactgctgtaaaggaatcaggcagttgggtattgatatgttatttggtgctctcattcatggcaaaggatttgataaataaaagttctttaaacactaaagcaaaatccaaatgagcaaaactaatggatgaaatgtaatattcatcagaacaaggatcactgagaaaaaatattcagaaacaactttaataaaacctgaattg

SEQ ID NO: 316093 - DNA, 705 bp, Homo Sapiens
ctgcatgttttcaaaatattttttaatgtgatttttggtctgggaaatcctcgcctaacaaagtggcttttgattcaaggcctgaagaaggggagggcccactccaggtagatgacatggccagggcaaaacctgaggccagagtgtgcctggggatatgagggacgtggagggcacccatgtccagcccacctcagtgcttctgcctcagtgagaaggggagggagttggccacaagggggcctgggtgcatcaaataggaagccggtgagtcaagcagctcggggccagtggggctggagagatgccagagccaggggctatgtgtggacttagggtttggaaccattaaagggctctgcgacgggagtggcaggatatgacctatttttgagacattgtgctgagaacaggccttaaaggcagaagcacagagcctggctcggggcgctgcagtactgaagccccatagttgaaaattatctttcttccaggtcctatccaggccctcttcctcttcagatgcctacaagacaccagacagtatgcttctttgttgcacgaaccacagccttcagctcatggctctaaatgcagggcaggtatgcatgggtcttttcttggcattctgggcagggtgccctgcaagagccacaagtaactgcagggcactaatgaaccctgcccattaaggcccatttgcct

SEQ ID NO: 316094 - DNA, 790 bp, Homo Sapiens
  misc_feature (143)..(143): n is a, c, g, or t
cactagaacatgattgcgcaagtacccttggagccctcgaaaagggttttcccctgtgaagggcacctcctctctccggtaccatcattttccacgtagttcacctcttgaaggggagtaaaaaatatttggtgcggtgcggngggacttggaaccattgatcaaaaggtccaaagttgcagtaaggaccgtgtccaagagttccattgaacagcatgctgtcacaagttcatgccagtgcatagtcttcttgatggatgcccaaagagtagattctaaatgttctcgctccaaatgaatatgtcaggtaatgcacatgaattagtgtgattagccacttccacgatgaagacatgtttcagagcctcatgttgtatgccctatatatatgcagtttttgtcaatttaaacagtaaatacaagttttgtatttatcaatatgcacttatatttataacccaagaggaagcgttttatgagattacttatgttatttcagccatttaatagcaacttcaggctggacatggtggctctcacttgtaatcctagcgcttttggaggtagggtggcaggtagcagattgcatcgcattaggccagcctggggaacatgcagaaactctgtctctacttaaaattagcggggcgtggtggcgtgtgcctactgtagtcctagctctctgggaaactgaggtgggaggatcacttgaccccaggaggtctaggatgcagcgagccgtgaccatgctcgtgtcaatgcattccagcttgggtgagagagtcatgcc

SEQ ID NO: 316095 - DNA, 1266 bp, Homo Sapiens
  misc_feature (372)..(407): n is a, c, g, or t
  misc_feature (803)..(803): n is a, c, g, or t
aagaaacaatcttatttattaatggcctgcatatttagaaagggtttaaaaacacatacatttcctgggacacaaacttacttaccaaatgtatgtccttacaaaataacttcacagatcaatagtcttgaacttacacaaagacatatatatgacatacattaggttaatatacatttcaaatgtttttgcagcaactttctaccagaaagtacactaatgtgagaatgtatgttctctttaaccccttaaaaatagtaataaaaaattacaaaataatgtaaatgtaaaattaaggctgagactacatattctagtattaataaagtcaaacaaacaatagttataaaacttggtgctgctgaatatttnnnnnnnnnnnnnnnnnnnnnnnnnnnnnnnnnnnncacacacacacacacacacaggataagtcttttgaaatttgaaatgctaccactgtcacaagttcactcattgatttaatgttgttctgggtatcttaacatttcaattcccaaatacctgtgcttttaaaatttttatcctgaattctgcattgagtttcctcacatatttacaattaaacatctagcctctagaaccttccttacacaaaagacaaaacatctttgttaaataaattcacgcaaaagtaataaaaaggtttttaagaaatagttctgacatgttcattatatttatattgaaaaatagtacatgtacttttcttcaggattaataaatgccatgttgcagttttacagtcactggcacattagcacatttttctcttacacatntgcaaggtagtgacaaccaaagggcataatgtctggaataattccagtaaatccataatgtccagtaagattcataaaattgaatggttgtttccagtcccatctgaatcgaaatggaaattcatgcccaggtacttgtattgtccccagaaatactcagtctggtaagtcaccctcttggtcttctgaaacagagatgcagaaagcagggcattcttactgagaccaatggcctcttctctctgtcacctctcatacatctgttttggttataatcctattttgtcttgtagcttctcgtctcattcttttaggaggaactggacaatctgtcgtctcaacctttggtgaatgacgcaatgagtcattacacttacgtatgggagtcatacctagtttttcctctattagtttgagatttttctcatgttcatcaagttcttgctttttcttcctcctcgtg

SEQ ID NO: 316096 - DNA, 907 bp, Homo Sapiens
ttctattttaacagtcgctgtggaattttattaagccatcaaaatttccttcacactcaatactgttgaacaacaagataacacatcttcttgctcatcccacttgaactcaagtcatcaattttaggcacaaaggttttagttttctcgggaaatcaagttttaaccacttgaggttactactgcagcaagcagattttgttgacaaatgtgaacagctttcaccctctgttagtacaaattaatatcctttccttaaataaagttagttagctatttttggtttcaaaatcagtttccatcataaaataacagcaagacactgtacacctttacgttcaatactagaaatttcacccagtgcatcagcatctgtgcggcattccctcagcacgggctctgctggcgggcagcaggggtgctgagctctctctagtgcgccctgtgcagccacaccactgctgtcaccacatgtccctctgacggcagaggtggtataagcagcttcaccctggcccgactgaaggctgtcatagttgtttttcatattatgccacaataaactgtagcacaataatcatgatataacaactgtccagcaaaaataaaagtattttacatttgattatcatacaaaaatatgcctttttctatttttaaccattattaatagtacctaatatttttaaacttgtaaattaacaacaataaaatactacaagagttaaaataaacgtgaaggaagaaaattacagagggaaaaatgctcaatccaaaacatttagtaataataaaaaagcagctaaatgaaaaagggagaattgtgattacactgtcaatggcaggatacgctgtggtgttataaggagattgggtctggtttctaatcaaggactgtaaaatgttt

SEQ ID NO: 316097 - DNA, 431 bp, Homo Sapiens
tgtggaattttattaagccatcaaaatttccttcacactcaatactgttgaacaacaagataacacatcttcttgctcatcccacttgaactcaagtcatcaattttaggcacaaaggttttagttttctcgggaaatcaagttttaaccacttgaggttactactgcagcaagcagaattttgttgacaaatgtgaacagctttcaccctctgttagtacaaattaatatcctttccttaaataaagttaggttaggctatttttgggtttcaaaatcaggtttcccatccataaaataacaggcaagggcactggtacacctttacggttccaatactagggaaatttcaccccggtggccatcaggcatctgtgcggggcattcccctcaggcacggggctctgctgggccggggcaccaggggggtg

SEQ ID NO: 316098 - DNA, 1330 bp, Homo Sapiens
  misc_feature (55)..(55): n is a, c, g, or t
  misc_feature (59)..(59): n is a, c, g, or t
  misc_feature (279)..(287): n is a, c, g, or t
  misc_feature (390)..(412): n is a, c, g, or t
  misc_feature (432)..(495): n is a, c, g, or t
  misc_feature (1069)..(1077): n is a, c, g, or t
ggcgccgctggtgggatgtcacgagtcggcagcacgaataatatccgcagacaanacanggcgcggcgatatgaagagagtgcgggcgcggggcgggagagaaatagggtggggagaatatggggaggcgtagcgtcacacagggaggtgttagcgggcggcgaacataggggagtaataggaatcacgggaaaaggcgaatgcgagagagaggggcggggggaacagggggaaatactagtaacgggggacggcgaaaaaaaggcggcgaatgagagnnnnnnnnnggcgcggcggggttaatatgcgcagtggttgggtctaggaagccgccgcgttcgtaggggcgggcgtctatcgtccgctgcggaacaggtttagggtaatacnnnnnnnnnnnnnnnnnnnnnnntagctagggagtaggaacgnnnnnnnnnnnnnnnnnnnnnnnnnnnnnnnnnnnnnnnnnnnnnnnnnnnnnnnnnnnnnnnntgggcggcgcgaaggcggggagatagaggcggggacgcgacagaggtggggggaggaagccaagaggaagagtgtcgacagcttctggaggggcaatgcggcacgccagggccattttacgtcgttttattgggtttttgagagttcatcttgacttttattacacactagacatatatgaactaatcagagatgtgcatgattctctgtactcttaaaatcacaggaaatataattccacctccccctttttttctgatattggagtagcatttcagattttggagattagcttagggcaaagtaaaagtcatggaaggcagtgtataaataacattaattatgaagctacttttcagaagctagtagtaacttgcttagtaataaccacaaggttgtacagcgttcacaatgctggtattaatcagctacatattttgaacatctactgttactggataccaaagaaagtgagttatttaagaatcttccattcttgttataagcttcctatgatcccggtaacttctcaaaggctttggcaaaaagcgttaagtccttgctttttggaaannnnnnnnngggacccaggaaatggtaatgccaccatcactggtttttgtgcaagtgtgtgctttaacaaatcaaggctggttttgggattcagaggatgagcctttaagaatttctaaagataccggcctaactaggcaggtggcttcacttatattctctttaagcagggcttggaaaaggtaccaccgggtttcttggtcaaaagaaggacgcctggaatatttcaacccttcttggcataccccagggagaattaaat

SEQ ID NO: 316099 - DNA, 932 bp, Homo Sapiens
gtagttgagactataggtacatgccactgggcccagctatctctagcatttcttttagaaagcaaaaatatacaaacaacaggtctctgcatgcagctaaactgggagtctctggatattgtcctctggtctcctctgccgtccactccccatccggccatgttttcatgtaagcccaccctccagggctgtgtctcagtggtgagaccctgctcaggtcaagaacccgagaatcagtgcagggagagggagagcagatgccagcaatccaaactcagaatccgcctgcaaggtccacacaatgatgttctgcatatggagtgtcgcctgcacacatttgtcactctgctctttaccagacaagcctggggcccagaatagatatgaaaacaaagcccaagagagtccacagactctttacagttttatttgtatgaccccggagtatttcagagagcagagctaaagacctctcctggacattccacatggcttaatgctttgcaatattatcctgagaatcatgttctgctctgtgtgcacctgccacactgctctcccagaggacccctgggtctgcatcaggcctgctccagccagaaggactattcagggcccagtggagggctcacgatgaagggtcatgggatgtggtcccaaagcacccactatatttagaaatcagggcaagtcagttagcctctctggggatccgtttattagataatgacaaattagctttgcagagttgttgtgacacttactgggataagggacttgattattcattcaccacctactatctaggtctgtgtccagtggtgagtaagcgcagacaggacacctaccatcagactgttgttaggacgggggttactgtaatttctgctatgcctaccctcacaacttccctccatgactctgcatctttt

SEQ ID NO: 316100 - DNA, 561 bp, Homo Sapiens
ttcaatacaacattttattcaaaaacaaattttgaaaaactttgttgaaaaactcagaattatcacaataaggaatcaatgtctgaaggtcttaaacacaaggtagtaggcaattttgccaaggctacatacaattcaaaaagtacagatgaataatttcacaaatttttctctagaaaaatacttttaattcatcagaattaaaaaatagctagttgtttacttttaccatttgaagacaaaggtggcacttgctaaccaataaaaacacaagttttgatggaagtagcatttctctcttcaaaataaaaacctaaagtgaatataataaagttatattgtgctgtgggaattgtctttttatgaattaatactgactttttaaagacagtgttctgggtcatggagaaacaatgagagagcaatatgggagaaatgagagggaatgtgacttttcctttttccaataattcttctttctcccacaatggcaggcaattcatatttctagaggaaaatgcctatatatattaaaaatatattccaggtataattctgctt

SEQ ID NO: 316101 - DNA, 810 bp, Homo Sapiens
  misc_feature (20)..(20): n is a, c, g, or t
  misc_feature (29)..(29): n is a, c, g, or t
  misc_feature (55)..(55): n is a, c, g, or t
  misc_feature (203)..(223): n is a, c, g, or t
cacgctcgctctgcctcctntcaagcccncatgggatagcgttgtaggctccgtngcagcacccccctcgagttttcttttttcttttgtaattgaggcaggttctcactccatcactcatgctggtgcgcagtaacatgaccatagctcactgcagccgtaaactccctaagcagttcaattctatgcactagggaagcagnnnnnnnnnnnnnnnnnnnnncatttattcaacatagtacaacaccacaggtccctcacataatcaagtagtactataaatggcactggtgagactttaaaacttttcatataaaccttcaaaagatttcatcacttacgctgttgatttctcttatcaccagcatttttgagggggagacacacaggacaatcatgtcttgtacaattcttccagtgtgaaatgatttgtcgagaagatgcacagtgtgccactaaagagaagaaaacatattttttcaagagcaggttaatgtttttacattaataatagctaacttgttgaccacttaataagtaacataaatgcattaacttatttcatcttcctaacagccctataaggtagctcctattaatactcagaattcacagtcaagaaaggcaaaaagaatgggtaagcaatttgcacaaagtcacagagtactcaaagtgagattcaacctcaagcagtctggcttaagagccctcatttttcaccatgctatacacaacctactttattctaagcaaatgtcctcttaaccaatgttatgacaccacatgcctataagaacactttttaatgac

SEQ ID NO: 316102 - DNA, 1735 bp, Homo Sapiens
  misc_feature (532)..(542): n is a, c, g, or t
  misc_feature (547)..(619): n is a, c, g, or t
  misc_feature (621)..(624): n is a, c, g, or t
ccgctttttcccccatgggggagaaaattttatatccaagaggggaccacaggtgtgtaagatcccccgggggggatttcagggtttcaccaacccgcgttggggaaggggtcttccccgtgcgggcgagaaatgtttaaaggaattttccacccggttttttggaaaaaagtggccccgggggcgggggcgtataatttgatatattggaggcccccgcttggaacccccccgggggagaaagatccccgctaaaaggaccctcaaggaaactcccctttggggatttggtttccaaaaagcccttgcggttgttccccccccgggcgcttgttttttatttgggggtggggaaatcccacaacccccctatgtgtccttgggccccggggggttttcccttagggaaacccagcctttaggggccacgaggtctccacttttccccaaatgggggccccgcgcgccccaaaaaggaaatggttttggaaaaaacttttttcgaagggcccgaggggggccccaccaaaannnnnnnnnnngtttnnnnnnnnnnnnnnnnnnnnnnnnnnnnnnnnnnnnnnnnnnnnnnnnnnnnnnnnnnnnnnnnnnnnnnnnntnnnntttaaaaagaaaaagtgtttattataggcaacaacaccaatgggaactggtatttgtctacaccaagggagtgcaatttttcatcttccaatggcggcctcaaccttgaggcgaatccactggcgaaagatgcctttctaggaagcagagctccctgactgggctaagatagttcagattgatcttaggtcaatggtaagacctatgtagttcatgaagtcttggcttttcggcgctgggtcgcccaaagcagaatggagacggatagagtggtggctcccagaatcccgaagaacataagcagtgagaacgagccctggcgcatacacttgtatccatggaaaccatcagcacaaacacactgcaaaagacctggaccatcaggtacacaagatccattctcaggacacatttctgggtccccagtgttattgcaaaggttcttttgcccttgacagatttggttgtctatataagaggtgatagtattccaggcattaattcctccaggacagttgacatgttgtggcagtatcagagtctggagctgagtaaagccacggaaggtgttggccaagtcacctttgagggggtttgcttgcaggtctatgatgacagtggtatgtgcctgatgaaagtttggaccagggtcctccagagaacagttctggagatccagccccaagatggtgcccttctgattcaggcagcaacgggcatgcagcattagctctcgtgtcgttttacaataaaaggccacttttgacaaattttgcacgctccctggacattgggtgcatatctcgggtagcgccagagccctttccacgcccagagcgaggagcagggcggcagcccagggcaccagggtcgtaagactacccgggccgtgaggcgccattttccgttcccttggtgctccgctgctcgcgcgacccggccccgcggccccgccccgcagcgcgtcaggccctcttccccgggcgtggcctaagcggcccggtccagtcgccctggggctgcttgggggcttttcctgctcgtggagctctgcgctggtcttcatgcgccctagccctctttcggggatactggccgaccccctcttcct

SEQ ID NO: 316103 - DNA, 616 bp, Homo Sapiens
ccgccgctccaccattttttttcaaaattaacttgtggggacatgtaatctcttgagcaatctgatatttttgggaagtcctttaaaaagttacaaatttatcaataaattactagtagataagatgattcagaaacaaaagaaaatcacagaattaggatgtggctggctggtgtatgaagcaccatgtgatgaattcataaagttgcaaaagtcaaaacaatactgtacatgcaaccagaaatcaaaataaatccagaaatagagacctatataaatgcatttaatacatgatacttttgacataataagccattggaaaacggaaagattagatactaaataacattgactatctctttgtaaatacagtcactaaatgatgttagttacttttccatggtggaattttaattactttttctttgtaatttttctctctgtatattttaaacaaatagctggtatagtttacaatattataaagatattgttcaaattgaagggcaaaggccaggttcagcaattttcaaactgtatgtacatttaataaaataactataaattaaaaaattatatttcaaatgatgtggctaataaatgaaaggtacatata

SEQ ID NO: 316104 - DNA, 661 bp, Homo Sapiens
  misc_feature (439)..(480): n is a, c, g, or t
cttttgttttgtatccccaagttacaaaagccctttgccccccacccagtagatgatcaataaatgttgaccagaaccgttctgctgggtgagtgggggtgggggttttgtgccatcagttcagttatgaactgaaggggagccaggaggagctgagctttgagcatcgttttaaagagggaagcatctatggaaaagcacaagacagagcagtgtggtgtttggggacagtgcaggaaagccagcccatgtctagtgtggtggagacagagctggtgtacattgagggcgaggggctgcgggtccctacccagctgcccacacctggctctccctggcccaggtgcccttctggaacggctgcaatgaggatgagcactgtgtccctgaccttgtgttggatgcccggagtgacctgcccacggccatgtgagttggnnnnnnnnnnnnnnnnnnnnnnnnnnnnnnnnnnnnnnnnnnaggctctggggctcctggggccctggattatttcctggacatcctcctcacaggcagcatggatcaaacattgcacttggagcctgcgttctagcccaggctctgccaccaactcctgcataacctcaggaaagtctcttctgtaatatgaaactactagtctaatctaatttcaaatttt

SEQ ID NO: 316105 - DNA, 681 bp, Homo Sapiens
  misc_feature (477)..(477): n is a, c, g, or t
  misc_feature (530)..(530): n is a, c, g, or t
gtcttggggtatcaatgtctcccactccatttcctgctcatcttccaggactgggtctagtttcccattcacacacctctgtggctcctccctggttacctaattcttgactctgtcaatttaaggagcagcagataaggcttagtaacttactattgatgttttggatccatgagcatcagctaaggcctgctggaaagcttcaggcaacgcacagagcacagcagctcaccaggactgaccctcacactgggcccggtggtgtgcactccaccagcactaactcgtcatgtctctcatcaaaaaatttggcatgtccactgtgccaacaaagtcctggagaccaggagggctcaagcactggccagagttctgtgggtaggaagcggtggggcaggaactcaaaccaaggcagtgactgcagagctcacactttacaccacctgactctgcctctgctgcctttgaatccctaantactttgattcctctgaagtggactttaaaaaaattaaccctagaatacattnatatacttcctttctaaaatgaaaacctctggagggaaggggctaagtttaataatctggaaactttcccaaatacccaccttgtacccagcttgaaataaatgacgaacaaaagggtagttccttcttccagaagatattggaggatgga

SEQ ID NO: 316106 - DNA, 775 bp, Homo Sapiens
tctgtctccaaacacaaaacttcctctgcgggcctcttcgctacacaattgaagatggagcccgtggtgagatggtgctagagcaatagggggcatgtgtcctcatggtacaggatgtggtcaggtgacctagaggctcctaatcctagtatctcccacagtggggttccaggtagagtttttggagttgctctttcacttccatggaacactacgctctcctggtgagcacctcccaaagcccagagccttttgctgcaccacctctgcccaaatactcagctccttgagtccatccacccaggccttctagcctagctatcaaacctgcagactaggtctatcccagcctcagtccccggggcaccacgcaggcccacccctgccacccaacttgtccttcccagctccctatcttacagaccgacctggagttacccagagagatgagattgatcagctgcaagaggagatggcactgactctgcaaagctacatcaagggccagcagcgaaggccccgggatcggtttctgtatgcgaagttgctaggcctgctggctgagctccggagcattaatgaggcctacgggtaccaaatccagcacatccagggcctgtctgccatgatgccgctgctccaggagatctgcagctgaggccatgctcacttccttccccagctcacctggaacaccctggatacactggagtgggaaaatgctgggaccaaagattgggccgggttcaaagggagcccagtggttgcaatgaaa

SEQ ID NO: 316107 - DNA, 1584 bp, Homo Sapiens
  misc_feature (25)..(25): n is a, c, g, or t
  misc_feature (1505)..(1505): n is a, c, g, or t
cgagcacagtactcccacggcgtanggtagcgaggcctgggtggcgaattcggcacgaggctttcacaggctaacctcggctcttcccagtcctctggactaaaatggggaacacattgggcctggcaccaatggggactttgccccgccggagcccccgccgagaggaacccctgcccaaccctgggagcttcgatgagctgcaccgtctatgcaaagatgtattcccagcacagatggagggagtgaagctcgttgtcaacaaggttctgagcagccatttccaggtggcgcacactatacacatgagtgccctgggcttgccgggatatcacctccatgcggcctatgcaggggattggcagctcagtcccactgaggtgttccccactgtggtaggggatatggacagcagtggcagcctgaacgcccaggtcttgctcctcttggcagagcggctccgagctaaggctgtcttccagacgcagcaggccaagttcctgacatggcagtttgatggcgagtatcggggagatgactacacagccactctgaccctaggaaatcctgacctgattggggagtcggtgatcatggttgctcacttcctgcagagcctcactcatcggctggtgctgggaggagagctagtttatcaccggcggccaggcgaagagggggccatcttgacactggctgggaagtactcggctgtacactgggtagctacattgaatgtgggatcaggcggggccatgcaagttactaccacagggcaaatgaacaggttcaggttggagtggagtttgaggcaaacacaaggctacaagacacaacattctcctttggttaccacctgactctgccccaggccaacatggtatttagaggcttggtggatagtaactggtgtgtaggtgctgtgctggagaagaagatgccccctctgcctgtcaccctagcccttggagccttcctcaatcactggcgcaacagattccattgtggcttcagcatcactgtgggctgaggttgtccagagccagcccccacagcagctggaacctctgagtcaggtgccctagggccaaagactaggcccctcttcagagcccaccttgctgggtgatctctaggacccaggagcagagtggtggacaggaccatgccctcctcagaactggagctgccacaggggcagttgatgaggcagaggtttgaggatcccccctctgctaccagccccagtatcaccttccccatgctcttgtggctgtggactaagggagaaggattaaggggtatggctgaattccccggcaccccttgccctcaggcttccttcttccttttcctttgttaatcctgcatgggattagctgaccatcctgttttccatcccagagcctcccaagcttggaaagtagggctgaaggctagatgtttgtctcaggaagtgggcccaccattccagagggcttttttacctttaccctgaggttctncttacattttctgtgcttcagaaacaactttttcttaggtgacccccatattccatgacgcatgagaagcgtttttgtt

SEQ ID NO: 316108 - DNA, 1752 bp, Homo Sapiens
  misc_feature (101)..(110): n is a, c, g, or t
tctgtgggtctatcctggcgtatgccatccctgtctcacatcgtttcagcatccaaattgctgtatttggatactgctgtttcatctcactttttccagannnnnnnnnnattcagtacagatgcaaagtagtagctcagaggctctgggtaatagcattcctgagattgatgacatccattacctcactagtccaacttctccagactaacgcagacttttctcttcccttggcctttcctctcctcgccattgggccaattccttcgatttctcatttcccttgaagttagggccattcacagtttcatggtcaaagccagttccaggttcaatagtctgtgatttatccaggctctgaggtatgcaccgcttctgttttgctcgttcctccaagagctagtttggccagaaaggggatgctttataccatagaacacatccaccttctagaacctgctctagaaggccaggccctcagattccacatggttggagttctggccaagtctggagctttcttcacactcggctctcagagctctgggttcagaaaaaactgagcatggtgagagaagacagtgtcagaccgaggccccctggaggacctttggaacctctgatagtctgtcataccagagcatgattttctctaatgttcagacctggcttcactgaggaatagttcaggggatcagggcctagagacaagactcccaactgccttatttccctcctgttttcctggcaaccccactacttcctccaaaggtttctgtatgcgaagttgctaggcctgctggctgagctccggagcattaatgaggcctacgggtaccaaatccagcacatccagggcctgtctgccatgatgccgctgctccaggagatctgcagctgaggccatgctcacttccttccccagctcacctggaaccaccctggatacactggagtgggaaaatgctgggaccaaagattgggccgggttcaaagggagcccagtggttgcaatgaaagactaaagcaataactgcctcttcatgcggtcatggggatagtgggggtgaccataggaacaaagttgttctctggaagcacagaagatgggaaggaggaaacctcagggctaagaggtaaagaagctccttctgggaatgggtgggccccacttcctgagaccaaacatctagcccttcagccctactttcccagccttgggaggctctgggatggaaaacaggatggtcagctaatcccatgcaggattaaccaaagggaaaggaagaaggaagcctgagggcaaggggtgccgggggaattcagccataccccttaatccttctcccttagtccacagccacaagagcatggggaaggtgatactggggctggtagcagaggggggatcctcaaacctctgcctcatcaactgcccctgtggcagctccagttctgaggagggcatggtcctgtccaccactctgctcctgggtcctagagatcacccagcaaggtgggctctgaagaggggcctagtctttggccctagggcacctgactcagaggttccagctgctgtgggggctggctctggacaacctcagcccacagtgatgctgaagccacaatggaatctgttgcgccagtgattgaggaaggctccaagggctaggcctcgtgccgaattcgccacccaaccttggggtcggcgtgggcgggggcgggtcgtcggtgagaggtgtgtgcttg

SEQ ID NO: 316109 - DNA, 473 bp, Homo Sapiens
gctttagtctttcattgcaaccactgggctccctttgaacccggcccaatctttggtcccagcattttcccactccagtgtatccagggtgttccaggtgagctggggaaggaagtgagcatggcctcagctgcagatctcctggagcagcggcatcatggcagacaggccctggatgtgctggatttggtacccgtaggcctcattaatgctccggagctcagccagcaggcttagcaacttcgcatacagaaaccgatcccggggccttcgctgctggcccttgatgtagctttgcagagtcagtgccatctcctcttgcagctgatcaatctcatctctctgggtaactccaggtcggtctgtaagatggggagcaggagagaagaggggcatggcagccaagagcacatactcaggctcttggagctgcagttttcgtagtgttccatggaaggtgaagagcaactcca

SEQ ID NO: 316110 - DNA, 537 bp, Homo Sapiens
ccgctcaaatttcaaactcatttttcaccaattccttttaatttgatctttatttttttattaatgtgatttttctcctagtacatattactttcaacatccaatatagtttatgcatttataatggttattgtgaactgtatgaccattttattagattataagccataagaagtcagggattctttcacattttgtttggtaatgtatctggagtacaaaaagcaaaatatggacttaaatatttgtagaatgaatgaatcatgctgtcataaaacttgtggcaaataaatgctagggaaaaaatttggaattaagctcatcctgtagaggtaacctatattaaaaatttgaaaattctaacacatagcaacagttatcacgaatgttattggtggagggatagaaaaatagatcaatgaaacagaataaagaaaccaaaaatagatttttgcttaaccgatttttgaaaacaggtgcaaaggtaatgaaatggtagcagcatagccattctataaatggtgctagaagaaatgt

SEQ ID NO: 316111 - DNA, 726 bp, Homo Sapiens
  misc_feature (122)..(122): n is a, c, g, or t
tcacactgtacaaatttagatagaacattatcaatgctcagatttataaaaatgggaacagaaagactaaagctagcgaaggaacgtacatttctgttttgtctttttaaattaggaaggtnaaaagtgattttttccttcaggtgcagtgaatagtaaatgtcctagaagacatccgaagagcccagaaataaaaagcacaggagccgcctgcagactctcagagttctgtcttcacccactgaatccgaagtggatgcgtgtggcgctcccgcagggtggcctggccccgtggatccacgccgaacgctcaacgagattcccaaggctggctgtgtacagcctaaaactttgtgctcagagaaaaaccagcatgatgggttcatcaactcctgtttctcaaacaaaatgagttttctgtacacttgttacaaaggtctgtacaaaagcacgaagctgctgtgaggtgttatttccgaaagagttaaaaatggatggaagggagctgttcgtacagttccgcctgtacattcacagagggaggacaccataaaaaaaggactcactcagaaattccagaccggagaatcctggcttcttaaaagattattttgaaagcttggaataagtttcactctgccatttccagaccgcttcgcccagcatcgtcatagttcagcttcctctaaaactatattctccctttcttacacgcaaactaccagg

SEQ ID NO: 316112 - DNA, 873 bp, Homo Sapiens
  misc_feature (852)..(852): n is a, c, g, or t
cgtgacagctcagtgtacttcacaattcttaacactattctatgtggaatacaaaatgcctttttatctgaattaacatgcatttaaaaagttttagtatatgtgaaaataaaggaattataaatcagtaggaaagatattaaggtagaagcatcaccaatcaactagctcagtagatgttgtctgtatttattttctacctttatgaaacaagaacctgctaacaggtaaatcgtaaagtaacatatttttgccctgatgccattagtcacaatgccatggggtaactgctatgtgatttcccatttgcaaggaagcatattaattcagtttctgctcaatatacaattaggttgtagggatatagatatctcatttgagttatctgagtttttcatctttatatctaaaaatctaatctgaaaatagtaaaacacatttaaaaccttagatgctactgtagtaaaagttatgtttataaacatttcagtatattccttcaacttcaagaatcttgaatttccttgctagaaggcttttttcctcaaagattccttttaggcttactttggtgttcaggatctccaattataaatgtagtctctcagcaccacattccgtaaagatgatttcccaagtaacggtatttgactaagttgctccagagtgttagggtgcaaaccacagttagtaagcttcttatgaacaacctccatatcaagtactttgtccatttgcaggcagatgttaaatacagcagttggctcgtgtggatacagtactgcagagaaagatccactctgtgaagattgagcagcatggtcagtggatgcagagaatgaggcatgatangacctgtaatctcaaactaat

SEQ ID NO: 316113 - DNA, 652 bp, Homo Sapiens
  misc_feature (52)..(52): n is a, c, g, or t
  misc_feature (137)..(137): n is a, c, g, or t
gcagtgagggccagaactacattttcttgggttcctgtgggtagttgtcgcnccatgactttctctcatttccttattatatccaaaataatgcccttgttttatttccccactggcactgagccctaggaagcagnacctgtgtatatcccacagctttgcatggcacttggcacgtaggaatgtattaaatgcagctgctttcgtgcaggaagcgcggacttcagatttggtcaaagatccatgatttcagagcaggcagcccttttaaacctgtatctgagtcacttcaatgccttgtgtttctgctctgggctgcaaactcaagagcagcaaccacttatcttggtacctgtagtcccgagccctgtgtctggctcagagtaggccctacataaatgtttgctcctcctcactgagtggctgcatgaattgcatccagcatgtctactctgggaaagaacctgtggagcctctttaggagtgtgtttttgccctccctcggaatctggtgatctcactaccaatggcaaagacaaactgtgaggtgtttttttgtttgtgtgcacgcgcacgtatgtgtgtgtgtaaaaaggccatggaaatataaaattgtaacctaaatgccttcacggccagttatggtggctca

SEQ ID NO: 316114 - DNA, 735 bp, Homo Sapiens
  misc_feature (700)..(700): n is a, c, g, or t
ggggtagctgtcctctttatcctggtgtttgccacttcgaacagtcactttcccacttggaacttacttgtggctttgctgacaaaacaaaaaccaaatatggcatcttccatgaggagcttgttttctgaccacgggaaatatgttgaatctttccggaggtttctcaaccattccacggaacaccagtgcatgcaggaattcatggacaagaagctgccaggcataataggaaggattggagacacaaaatcagaaattaagattctaagcataggcggaggtgcaggtgaaattgatcttcaaattctctccaaagttcaggctcaatacccaggagtttgtatcaacaatgaagttgttgagccaagtgctgaacaaattgccaaatacaaagagcttgtagccaagacatcgaacctcgagaacgtaaagtttgcttggcataaggagacatcatctgaataccaaagtagaatgttggagaaaaaggagcttcaaaagtgggactttattcatatgattcaaatgctgtattatgtaaaagacatcccagctaccctgaaaatcttccatagtctcttaggtaccaatgctaagatgctcattatggtgtgtcaggaagcagtggctgggacaagctgtggaatgacctcactcagatgctggacaacctagggcttaagtatgagtgctatgnacctttgtccaccatggatatatctgactgcttta

SEQ ID NO: 316115 - DNA, 1561 bp, Homo Sapiens
  misc_feature (43)..(51): n is a, c, g, or t
ggttttagaaggtcttttaaaatgtatcagaagccgagacttnnnnnnnnntctggctgaatataatagaaaacttcagtatatcaaaaagacaaacaaaaagctattaattcacagataaaattacaagagaaaacacaatgggaagaaatgacaacatgtgataaagaattaatttttaatattctaaaggtgcttactcttacaaattaataaaaattagatagaaagcacaatagaagaacgtacaaagataaatgtttcttcacaaaacggccaaatcagtaacacaggctttgtgttcaaagtattgattagtgcatacttcactaataaagaatctatagtatgtattttattagtattctagaaaatttcagacaatcagcaaatggaatgaattttattatcaatatgccatagaaattcagtcatctaatttttctagcttatgttatgttgagcctgcttgtggtctctctacctggaggagggacaggataagaccagcagtatcccatatgattccaaatggaagtccaataatgtattggaatttgctacatctcatatccaaacagtgctttatctacattaatggatgagtttgtgattttaatatggaaataaatgagtgattcgagttgttcaaaatataatttttgaatatacttttgtgattgatagttatgccctcaatcactatgaaactcagagtattattaaaaagaaccttcccctctttcttagcactaaattcaggctcttgtagatctttcccaagctctgctctgagatcaggtggtgctgtggcattaaagttgcaggtttcagtcaaaaaatcccaaagcaggtctccattttcattaccatcaataaagcagtcagatatatccatggtggacaaaaggtcatagcactcatacttaagccctaggttgtccagcatctgagtgaggtcatctgatgtgatatactggcagaggtcatcctggggaaagcgtgatccgtactttttccacagcttgtcccagccactgcttcctgacacaacaataatgagcatcttagcattggtacctaagagactatggaagaatttcagggtagctgggatgtcttttacataatacagcatttgaatcatatgaataaagtcccacttttgaagctcctttttctccaacattctactttggtattcagatgatgtctccttatgccaagcaaactttacgttctcgaggttcgatgtcttggctacaagctctttgtatttggcaatttgttcagcacttggctcaacaacttcattgttgatacaaactcctgggtattgagcctgaactttggagagaatttgaagatcaatttcacctgcacctccgcctatgcttagaatcttaatttctgattttgtgtctccaatccttcctattatgcctggcagcttcttgtccatgaattcctgcatgcactggtgttccgtggaatggttgagaaacctccggaaagattcaacatatttcccgggtcagaaaacctcgtgccgaaaactggg

SEQ ID NO: 316116 - DNA, 441 bp, Homo Sapiens
  misc_feature (388)..(388): n is a, c, g, or t
  misc_feature (425)..(425): n is a, c, g, or t
taaagaattaatttttaatattctaaaggtgcttactcttacaaattaataaaaattagatagaaagcacaatagaagaacgtacaaagataaatgtttcttcacaaaacggccaaatcagtaacacaggctttgtgttcaaagtattgattagtgcatacttcactaataaagaatctatagtatgtattttattagtattctagaaaatttcagacaatcagcaaatggaatgaattttattatcaatatgccatagaatttcagtcatctaatttttctaggcttatgttatgttgagcctgcttgtgggtctctctaccgggggggaggggacagggataaggacccggcagtatcccatatggattccaaatgggaaggtccnattaatggtattgggatttggctacatctcatatccnaacagtgcctttatcc

SEQ ID NO: 316117 - DNA, 486 bp, Homo Sapiens
  misc_feature (73)..(73): n is a, c, g, or t
  misc_feature (81)..(81): n is a, c, g, or t
  misc_feature (107)..(107): n is a, c, g, or t
  misc_feature (298)..(420): n is a, c, g, or t
ccaagaaaattagttggttatcactgatgttattgcagattgcctagatattccatagggaggaaaataagtnccaattanccattatgtgaaaagaaatcaattantatattaatatgcgggctttttctaaagtaccagaaatagctctagcaagcttatgggtcatcaaataagaatgattatcataaaagtaaatttaaaagtctttttaatccattgtgtttaatctggacctggtcctctaaattgaaaatgaactcatgaagtataaatgggcccaggcactgtggctcannnnnnnnnnnnnnnnnnnnnnnnnnnnnnnnnnnnnnnnnnnnnnnnnnnnnnnnnnnnnnnnnnnnnnnnnnnnnnnnnnnnnnnnnnnnnnnnnnnnnnnnnnnnnnnnnnnnnnnnnnncatgatggcgcatgcctgtagtcccgcctcctcaaaagactgaggtaggataattgctttaaccca

SEQ ID NO: 316118 - DNA, 582 bp, Homo Sapiens
  misc_feature (535)..(535): n is a, c, g, or t
gagcaaccacgcccagtccgacataaaggtttttaaaccaaacaaaagcattaatcctggacttttttgaaactcactgtattatgtcaataaacatgactttcctgtctccatctcttttctacctagcattccactatatgaatgtaccataagcagtcccatggtggcatatatttaggttgctatcagtttttcacttacataaataatactgtaatgattattcttatctttaaggacctgtccaataggaaatccttaaggtgtgttccttgaagtacatagtgttgtcctctagaaaagtctacagcaatttatactgctaccagcagtgtttgagaatttccccaaaccttcaccaacaataatcatcatatttttttgtcacggtggaaatctcaggaagaaaatggtatctcaatttcatctgtatctctctgggtttcatatgagacttgtcagtattaataatctaattttcaaaatggtcaaccaatttttctagaaccatttactgaataattacaccatncttcactatcttaaaatattgctttttggtatcctttggtcttttcc

SEQ ID NO: 316119 - DNA, 585 bp, Homo Sapiens
aggggacttaaggaaaaatagaaaactttattttacaattctccagaaaaaaatcacttatattttgccaaaattactttatacagtaaattatatattaagtagacattattaagttaaatagtggtttcaaatgttggtaaatatgtctttagttgcaaaatttcagagacaggctgcactttatcctgatagaagtcaagcccagtgagaagttctacatcacggacccgggcaatgtgagctgtaaatctttcttcaacccaaagagcttctggtttaccttcaggacagctctccacgttggtaggtcggtgagggatgataaagggtaggacatccagccacccagggcagttttccggtgtgtggctcttgtttttacaactggtcagcaccacaaagtagtgtgttgggatgggaacatcagtgttggctaaatgtttggtaatttcatctggagcatcaaaatggccatcataattataatcaaatattggtccactaaccacatttactccatttctttctgtggcatgttttataagaagaacactgtggaagtagtcccacatttttctgaaa

SEQ ID NO: 316120 - DNA, 2632 bp, Homo Sapiens
  misc_feature (1318)..(1327): n is a, c, g, or t
tgtgtatgctgtctgcaattgccttttcaaatgtttttgagcactatttgggggatgacatgaaatagggaaaatccacctgtggaggacagcagtgatgaggatgacaaaagaaaccaaggaaatttgtatgataaggcaggtaaagtgaggaaacatgcaactgaacaggaaaaaactgaagagggattaggccctaatataaaaagcattgtcaccatgttgatgctgatgctattgatgatgtttgctgtccactgtacctgggtcacaagcaatgcctactctagtccaagtgtagtcctggcctcatacaatcatgatggcaccaggaatatcttagatgattttagagaagcttacttttggctaaggcaaaatacagatgaacatgcacgagtaatgtcttggtgggattatggctatcagatagctggaatggctaatagaactacgttggtggataataacacctggaataacagccacatagcactggtgggaaaagctatgtcttctaatgaaacagcagcctataaaatcatgaggactctagatgtagattatgttttggttatttttggaggggttattggctattctggtgatgatatcaacaaatttctctggatggttaggatagctgaaggagaacatcccaaagacattcgggaaagtgactattttaccccacagggagaattccgtgtagacaaagcaggatcccctactttgttgaattgccttatgtataaaatgtcatactacagatttggagaaatgcagctggattttcgtacacccccaggttttgaccgaacacgtaatgctgagattggaaataaggacattaaattcaaacatttggaagaagcctttacatcagaacactggcttgttaggatatataaagtaaaagcacctgataacagggagacattagatcacaaacctcgagtcaccaacattttcccaaaacagaagtatttgtcaaagaagactaccaaaaggaagcgtggctacattaaaaataagctggtttttaagaaaggcaagaaaatatctaagaagactgtttaaatgcactgttctggttcctaacttgaagcagttgtccttgtgagaaccggtctttgcctttagctcatgtcgtgtttcacagcaaagagggtacagaaccatcactggtccaggttaatgtacaaaattttctggcaatgcctgattaaaaaaataaaattggcttgttgagaacagctgttttcgatttctaatgtgaagcaagacagagcactgctgtaaatgtctagcagcagannnnnnnnnnattggtacatattatccttcaaatctgagaatttggactaactgcaccaaagaaccctctaatttggtccctggcacatgcatacttgtcaatgtttttattcttttacaagacctgcattttatttgaattacccgaatagcaatatgtaaaatacaagtgacaaaatgtgatgagagcttcttgaaccggtaaactagtacaggtctgagaaagacatattagaagaatcattatacttccttgaattatatttattttcatgtttctctaatgcaaagaatgtttcatcaaatgtatattttctgttgcttactgtttgctctgagaagaagctgctgtttcaaagatggacctctgagtagctaattgattcaagtagtttttttatgttgacacattattactgctgttagcagtcgttttcaccaggtacttacagagcagatttcatacatcattcattcaagggctaaatttatattttttggaaatcatggcaactacacaggatgttgcttaccaggacggagttttggtatcttagtactgaagttagcactatgtttacatgcaaaagattaaggaaaaaacccttaaagtggacaggtatccaaagttcattttctgtgactcatcaaagtgacaaaagacttgtaacaactttgcctggacttttttcattttacaacagttcatccattcacaatgattttgttctctgctccatattttttaatcccttaagcatttgatgaaacactctttagtgctatatgcattttcttacttttgttaaaaatgtgacaattgtcaaaaaatgcactaaaatgtaaatggagattgaacaagttcactttccagcttataggcaactttatacagacttgaacattttctccagttgtttagtaaaagtgaaagagaaagggtttttcctgccacaggatataacttttttttatataacaagcataacacaccactgcttttggtggaaaagtgcagaatagtatgtaccttttatgaagaaaaatgtaatttacaatattcagtgagaatgttactgctgattttcttttccaaggtgtagaatattctttgatttatagaattcatttttgacccagatgatggttcctttacagaacaataaaatggctgaacattttcacaaatagagtgtaacgaagtctggatttctgataccttgtcatttgggggattttattttactttgttgctttaaaattcaatgcagagaagttgttgactgtaggggaaataaagttaattcaaattttg

SEQ ID NO: 316121 - DNA, 799 bp, Homo Sapiens
  misc_feature (655)..(655): n is a, c, g, or t
agcaagccatatctgagaagccatctctgcccttcccctgcctgcatcccccagaccatgagccgggcaccggccaatgcattcagggtggggacgcagttcctgccgtggctgtcctttgagagacccacatgtttatttcatggaagacggagttggtgacttcaggaagctccttgtggagaacatggtaggcaccttcataaatctgcaatgaggagagacacggaatcagagctgcaccatcagaggcaggtgcagggagcggagaccgtgggcagtgggcaggggtctgcagcattctccggaccctctccctatgcccgaggacctggccctgacctcccattattaggaggccaacacctttctatcagaagatggctcaaatgtgttacaatgtcccagtgtgttctcgaacttcctttctcaaatgcaaaccttccttcactgcacatctcttcccatgcctggacctgtatctgtgtctctgagtcaggcaacccttctcaaagagggggttgcaattcccgccttacatcctgaccttcacggggtccataagttattccaagccgactttcactcccgccaacccactgtggctaacctgccgagggtctcaaggaccttcattgttgtgcaagggaactgngcctgtaattataagctgtcaatgcaccttctagaaacactttctcttggggtccatggcttaacttttgatttggtttaaccaccccggagaactttttaatccaagctctggcccaattcgcccgagattgacccggggtga

SEQ ID NO: 316122 - DNA, 795 bp, Homo Sapiens
  misc_feature (135)..(143): n is a, c, g, or t
aatctgtttattgtatgagcaacccaaacttcagtttaagtgctgttgaaattttattactagattccataaccctacaattgataaatcttataccattttaggtatttaatgagatacttagaaatactaagnnnnnnnnntcagttttcaaagggttaattttgtttataataacaataaataattttataatcttcttcagttcaaaatccagctttgaacccgaggaaggctttcgaatcatgttaattaaatggtggtcctttaaccagtagcagtttgattaccaattactcggaggatctctttgtgaatgcctccttcttgtgtattaatatttgcatctcccacttggccgtcttcatagacgaaaaagaatcgtgtgcagacatggtcagtattggggacaacccatatctctccatgtttgtgcaggtcagatgaggtgatcacttcacataaggctatgcattttaagttacggctttgcaggaattgggattgctgtccttttttctgtgactgggatgtattgctgtttttactgcttgaagctggttcgtccttggctgacaaccttttgtttcttgttcattcctgggtaacccaatgatatgcttggcaattggcttaagaaagattccactttcatacattgcaccatggagctgcaatcgtgtattagaagcaacaaccagaccattccttaggatgggatgccaggttttcatgggtgagcccatgaaagcaaagtgctttccagaggtttttagcactctaaaatggatcttt

SEQ ID NO: 316123 - DNA, 1199 bp, Homo Sapiens
tttctcctctccaggatcccactgccagagaccaactgggatccaagcagttaaacagcttaatcctaggactgtatgaaataaaggcttatggacccggattttacatttcattattcacgtaattaagcaaattatatgtttcaattaagaatcatatttctgcagaacctaaattataacagaaatagatctttaaaaaattgcaaaactgcttttacaaagcagacatttattaacaacatttttttgtagaatttctaaggaaacaaattcaagacaaaaatccctccagtaggtaacaaaatgatctattgtttcaattccttctgatcaagtgactttattccataaaacagtacatcagctgggcaggttcggtctcctctggatgtatgacagtcattatttatttgtgctgtaaacataactaggatacagtgacactgtcataactaaatttgaagtaaattagtactgtgacctccaagggcaggtgtgaagcatgttatcagcgcctgaaacaccttgtagtggtttcactaacataagttaaaacataagcacttaggaagaaagtcttccctcattaatttctggcatagtgcagctacatgttcaatcctggaacttaaagtaccttcctcttagaaaatcaaagtgttttcacagcaagtttaataaattaaaaatgtagagaaaaaaggaactagtgaacaaaagaattctccaaggttccctttttaaattaatgtttaaatgttacatgtgaatcatagcatttcacaagcacgtggcacatactcaaggccctagaaccaaatgtcaacgtttacaaatacagcagaatcgtcttttcattgtgaatttttaaaagcaataattaagtcctgcatgaaacagccaaagaagcatttgggacaaagttactggttcttcacaatcaactctttaaggcataatcggaggtaagtgtgctgagacttttggtccctactgctatgttctcacatgctcccaaggaaatagacatgtcagttacttgcctgtttccatctctaggtgtggaaatgagaagtctgggtttctggaaattacagaaatcaagtcagaaaatcctggcaacagtaataatacgctgtgctctataatttgccacagtcacctcattttgcacataaatgactacacaactttca

SEQ ID NO: 316124 - DNA, 415 bp, Homo Sapiens
aattctgatggttttattaacaagtatataatatatattgcatactgtatatagtatatgaggactgtacagtacaaatttatgttcacagtttgacatgacaaaatgtcattactgaattcccattggactacagagtagaaacagagaaggtacattaaacattcacatctttagtaagaaagattaccaaaatgtttcagtatctgcaagtatactaacgcatgctaaaaacctttacccattcagtcttattagcttataaaatatattacactttattaaaaatttctgcatagtttatacaagtattaaagtactgtaaatgtaataatcctgctatatttgcaggtatggtttaagagatgctaagcagaaagattattttgaccctctaacactaagtacataacag

SEQ ID NO: 316125 - DNA, 625 bp, Homo Sapiens
  misc_feature (303)..(323): n is a, c, g, or t
agaaataaactgtgggttaaagtaccattgtaacttgctcccaacatgactgcataggtgtctaaggttaagtgtgaagattactgtgaggtctacacacacctgaaggaaatatcttcagtgtgttcatgtgtgtgtctatgtgcatgtatgtgtaggggataggtgtaattagggaagggctgaccgaacaacattgataagtacatgctagaagtctgctgttgttggtaacacagaaacatacacagtcttcatattcaaagtcttcacggggatgtcttctgtaatttctagaatggnnnnnnnnnnnnnnnnnnnnntcagtattttacctattgggggtgaatatttaaaaaaatgttaactgcttgtgtagtaaggaatttggccttatcctaagagttctgccttttgtcccagctcctgaggtgaacctctaaatccttggaatttcctggtaggaatctttgtttctcatggtgggtatgttcaccaaacctgacagttgttgctaatgagacaattcagggtagtgctggccaggacagaaagaccaagtatatgatttaggatggggactttgggtcacatggtatatcagttgagaaagacagcaatcatg

SEQ ID NO: 316126 - DNA, 2845 bp, Homo Sapiens
  misc_feature (228)..(321): n is a, c, g, or t
  misc_feature (2789)..(2789): n is a, c, g, or t
taaagtgttagcacccggggagtgttttttatttgggggagaaaattccccacccgcttaatttgcttgaccgcggggtgtctccctgggggaaacaagcggaatggggacagggtgtcccaataaccgcgggaaggggccccgcgcgacggccaaaagaaaaagttttgagaaaaagttttttcgggggggcgaaaggcgcccccacccaaagggcctacaggatannnnnnnnnnnnnnnnnnnnnnnnnnnnnnnnnnnnnnnnnnnnnnnnnnnnnnnnnnnnnnnnnnnnnnnnnnnnnnnnnnnnnnnnnnnnnntggttctttatatctgagtttgtttattgttctgatttactgaaacttaaaatattccatcaaattatccaggaaaatccaggtggcagaaatatataatatgtccatttcatcaagaggtctcaaataaattttaaaaggccagaaaatgatatatatactatgccatttaaatcacttctatcttctgtacttaagaactcaagtatagaaataaactgtgggctgaagtaacattgtaacctgctcccaacatgactgcataggtgtctaaggttaagtgtgaagattactgtgaggtctcaagttacttgactaatcaatcccatttgaatttcaatccaagcagcatattttacacacacctgaaggaaatatcttcagtgtgttcatgtgtgtgtctatgtgcatgtatgtgtaggggataggtgtaattagggaagggctgaccgaacaacattgataagtacatgctagaagtctgctgttgttggtaacacagaaacatacacagtcttcatattcaaagtcttcacggggatgtcttctgtaatttcctgcgtttgggtctcattcagaaacagctttagcttcctgctccgaaggccaaacaccttggctgcttcatacagaagaccttggtgggtgagtccattctgcccaagtgggttttcaagcaggagagtgcccactgtccccattaaacactcttgtggctttgcattcaggagctgtaggttgatatactgacaaagaagagtactagaactgttgatcagagagggagccgatcctgcagtcacacaaagtgtttttccactaagactcagtaagtcagtttggttttgtatttctgtttcatcatggaagacagccagctctgtatttttcacaccaaaaatgctagtgacaacactcttcagctttaaaaggtccaacctattgtcaccttttggattttccaggagcaatactccaccttgttcactgccatttgcacaaatgttaagattgacatatgcacaagcaggaccaggaagggaagatcctctggtgagtgtaatttccagttcagatcccttcaactgtgttttttcttgaataaggactttatccgatggagaaactggatatggtttcaagggagcctttatggtggtaaatatgaactctgtgtggctttcaataacactattcagatatgttccttcagactttgctttatagtacactgtgatttcatcagttggaaccagattgcactttttgcgaagtttctgtatgcgattgatgacttcccgagccattccttcatctaccattgactggtcaggagtgacatctaagaggaccaaagcctgagcatctgagtgtgcttcaaattgcgcagtcccacctgtggcctgatcaaaggtgtacatgaggcggatgtcttcatcgtgcaattcatggccttccacaacaatggtcccagtcttctggaactgctccagctcctcactgctcaactgcttgatggacgtcatcactgccttaaaggctcccttcagacgcttccccaggaccatgtgatctggttctgcccttagccgaatgccatacttgtttttatctgtagacagtgtaacttttcgaacattgagttcctcaatgatatacttctccaaagacttgatatctttaagagcttctggatcttgatggataaccacaatttcctttcaaaggatactttatgggaatagtttttcggtctctgatcactcttccaagttcaatcacagactgcatctgagatactgcactctctgttttcttgtcaatcaattcttctcgaacacggggcagcatgaggtagtgaatgctgagtgtgtccttgtcctgaacagaaacagggtcaatcagcacctttagattctggtacatcaattcagtgagaaaaggtgtgtagggagccataagtctgcaaagagaaagcagaacactaaacaaggtttctagggccatgacacaatcctccatcccattttcaccctttaatcttctgcggttcattctaacataccaattggtcagaatatctacaaacttgaccaggcgaggcaccacagtataaagcctataagctaaaagtaagacaagtcaatcaggcagcaagtgggttaccaggcatctggggtggggagaggcttggatacacaaagaaggggcagctccttccatccaagtgcctccacttactaaggagaaaagaacccaaatgaatcaatcacataatgactgtttgttgaggatgtgctacatggcagtcagagtgtttaggggtgcacacaaaaaaatcaccatgtgagccacatgcgaattcccattggtcagtgagaaaagccaaaactccagtatgtgtggatcaaagtccaagactgcccactacacaactgtaggaagtgccatttacacggagctgtgcnattcggacgcgtgggtcgacgatatcccgagcattgcgaccggaccagccctgcct

SEQ ID NO: 316127 - DNA, 610 bp, Homo Sapiens
  misc_feature (476)..(476): n is a, c, g, or t
  misc_feature (589)..(589): n is a, c, g, or t
catatattcaagagagattaccaaggtaaaataagacccggcaaactgagcagatttggctgggggaacattaaagagtcaaagatgatgatgtccatgctaaggtgtctctgagaggtggttggtacgatgaacagaaatatgaaaactagataagaagtgatgtgagagtagttctattttagtgatactaagtttgaagtaaactgatttttattaggcaattagaaacaaaggtcaagaacttaaaagagattcagccttgagagataactgagatcatctacgtacagatactagatggaatcatgaaaagtattagaggagatgaaaccacttagtgtgcagagaaggaagagaagagacagaacagaaccatgaagaaaatttaaggtttaaaagaaaaaagccagtgaagcagaatttgttaaagatgcaaaaacacttctatgagaaaacattttagagaaactcanagggaaaaaatacttaaatataaaaatgcacagttctgacagtgaatacatggagattaacaattgtaataaaggaaaacaaattttaaggctacactcagaagtgacctggnataaattcccggcttgggttg

SEQ ID NO: 316128 - DNA, 1319 bp, Homo Sapiens
  misc_feature (334)..(334): n is a, c, g, or t
  misc_feature (847)..(860): n is a, c, g, or t
aaaatttcatggtgatggtgcaagggagagatgattaggaagaaaatgtcttaaacggctgtaatagaaatactgatctagagtcatttcctgcttcttaaattgttcgttttctcttccctgggtattttctcatttccaaagacccagagtctcagagccaggttaagtggaagaaactttgagaggtttcttaatcaattccttctatctctcaaaccatgccagtaacttccttggtgaaaaaatctatactcctctcacagttcttggggcatggaaattctatagcattttttggtataaccaacccactgaaccctccacaacatcnttgaattccattcaactcgagctgaagtattctttttgagtttcagtatatcttttctagtgtcccacttttagaaaggtccaaagatgatatataataagtgaaaatacaattaatcagagctttatttgcatatccattaaatatctgaaggctattaccagttgtgcttcagcctcctttcccttgcaattctcccagggtggcatcctctacggagtcttgttgctccattgttgaccactgatgtaactcaacgtgaaaccttcccaaagctctccacatcactctctgttatggctgtgaccagcagtgaacatgaaaagaacttatttcatgccttctccaaactatattgtttctttgctaagtccagacctgctttttctacatttataggttttctattttaatcgccatgcaaaattctttatcatactcaatcattttggtttatcttcctgacttcttacctttaacatccctgttaaagattacactgttgttgtttcnnnnnnnnnnnnnnccttaattggcaaaacattaagggacttgaatagaattacacttatctttttgtgctgatttatgtcaatccatcattctggttattgatggaagcaaattgcttcctatgttctctaaaccttatgtcccttccatactccatgagtaccacactgggagaaaacaaaagcaaaaagattgtgggaaaagtatagccattatctttgaggaaatgtgtaccaaggcacaatcattaaaaggagttggaggcatcatttggttgacactgttgtcattcttgttctgatcattttggaccttgaagaaattggtgattctctcctagaattagacaaacaaagtgtgtttggaaataatgattgttttcctgccttaaaaaatatattaacagaaagcttttataacaggctgtttccctctggacaggtattaattctgagtaagaattttcagtgac

SEQ ID NO: 316129 - DNA, 472 bp, Homo Sapiens
tgagccaccgcacccggccttgaaactttattgtaatcatctgttgacatatctgtcttctccactggtctgtcagttgcttgtggggagagcctgtttaaagtttactagtgtttacttgtttccttgttttctggtgtaggccctggtatgttccaggaggcagatgataaatgtctcatgaatgagtgactgaatggacaaatgaatgggtgagcagcatagaacttacagccatgaatatagtgtatcgagacttatttctgtgaaatcacatgttgctcctttgagagttttacagagaatactcagtgtcaacttgggccttacccttgaccaaaaaaccggaaccaaaacccaacggaattaaccgggtgaaaatttcttggtggttttagaaacctgtggttttggaaaccggagatggaaaggaagaattattggtacccgaactagggcttggcttttaagg

SEQ ID NO: 316130 - DNA, 339 bp, Homo Sapiens
cgcaaacgattgtttctccaaatccttaaactcccgagtctatgttgtgatttatgaagcaagcattaaggcccggtaccccaatgcctcttaccttaaacgtggacagagagtgcccttgtaaatccaacccttaatcagttaggtaccagcatagccaggcatggtgctttaaagataaagatgacagatggcctccctattcaggaaggggcctgcatcctttatatggctctacatacatcccctcccgtgtgcagatgcttcttgacttaccatggggttacctcccaataaatgcatcatacagtcaaaaagttgtaatcgtgtctgaatata

SEQ ID NO: 316131 - DNA, 678 bp, Homo Sapiens
  misc_feature (163)..(163): n is a, c, g, or t
  misc_feature (240)..(240): n is a, c, g, or t
ttaaataatgaaaatcttaacattttccccaaaataggtaatttttaatactcatgtaaactaaaaataatacacactctttcccaaataaaattaaatatgtattttctggaggtacttgtagtaatagtttatgatatgaataatctcccctccaattaanactttttttataatatgagttagtttcttacatggttttccatagtcacatttgttaaagagtccagttgatgggcnaattagcaatcttatcctgggatgcatgaagactttccaaggaaaacgcagacaaggaacattctatccacaaatagcagaatacagtgttttcaaatgttcatggaaaatacaccaagacagaccatagtctgaaccactaagaaatctgaaaattttttttaaatttgaaacatatagagtatgttctctcaccaccatggaatcaaactagatatccataatggaaagaaaataggaaaatctctggacacttgaaaagtgaacagtatgtttctaaatagtggttcaaagaaataaaaatacattgaatggaagtacaacatatcaaaattctgagattcagctaaagtattactcagatggaaacttacagtactacatgcttatactggagaagaggaaaagtctaaaattgatcatctaaaatcctgtctc

SEQ ID NO: 316132 - DNA, 822 bp, Homo Sapiens
ttttttaactttagaaagcgaattttattagcttcatgagaaacagctgccatgagtcaagacctggatggggatagagctctggtagcttccaaccaatggcgtgaatacagcccacctgttctctctacatcctcagaccagggtcttagtgggggtcccaagaagaacaccccacttccttgccctctcagtgcaggcacagattcagggaatgcattcttgttggaccttaggatctccgtctctatgatatctcactgaacaggaaaatgaatcaaatccacattctagacagccagatgctgacagatttgggatacgagccactgttctggatcatcagccaggaacacaacactttgaatcaccaatcagaaagtcaagattctggaatgcaaaataagaaccccctaactttctagcagatttcatcagtagctccacatcctagaatgactgtgttacaaatcaaccagaaatctgacattctaggttgtcaactaagaacccagtattctggcagaccaaatgagaatcactcctaacaatctgaagggctaaccaggagttcagcattcttgaagaataaaccgaatcacaatattccagataatgggtgagacttaaaggtctaaatgtcaaccccaacactcaccatgccaaaccagaaaatgaggcttttagaccattaggccttgccttaacactctggaatgaccaggacaaagctttcccttcagaatgctggttccttgccctcagagctcttgggatgggcgcttccacagaagggcccatattccggctgggatccggaca

SEQ ID NO: 316133 - DNA, 571 bp, Homo Sapiens
ttttcactcttgtcaccagcacttttattaagacgtgaaaagacaaagacaacagaggagagcagagaataatatctctgtttcagctattccaggatgttatgccaattatccagagtccttgatctgatgtagtaaagagctagggacattttccctgaaggctttgattgctggcaaaatctcattaaacgtgtatacattcataggttggccataggatggataaaagaagagcctctggcctacatctgccacgatacatgtgcaaaaatgctctctgcagcattatttttcattgtaaaatagcagaacgaatttattattcaataattataaaatggtcaaatgtatgtgactatatttgggacaatgaaaaatgcagctgttaaaagcagacaatactgatgattcagatgatgttactgttggaaatattaacagatgacatatttggagcatttatggcatctttacaggcatacccttttttaaagtttcgaccttcccagggaaagaagtaccttgtggcaaggcggggaaagttcccagggccacaaaggaaaaatgg

SEQ ID NO: 316134 - DNA, 540 bp, Homo Sapiens
tgtttatttgtttcagttaaataaactgttagacaaaggtgatttaaaatgacaaaatatagtctctgagctcagtcataaaaaggaataagggattatgtaattgtattatgtatttatttggtctaaacaaaaaagagctttattctctcatgtaagtgagtagtccggaggtcacgtgggcttcagataaggcctcatgaacagctggacgagacaatgaagacccagtgtctttctgtctcttcttagtctccatggtgacggctttattcttgggctgtcttgccagatgatcacaagatggctgccagacacaacctgagttatggatgtcctcattcacatttcctcagagaaaggaaacttctttcccagaagccccttgcaaagtcaccttgcatttgcctgcattgggtgactattcctaagccaatctctggagctaggatgataggggtcactggtttgttttaacctctcaaggtctacccagagaattgcaatgatgttaatccctgccaacagcatgggtaggaa

SEQ ID NO: 316135 - DNA, 967 bp, Homo Sapiens
tttacattgaagggttttactgctaatcactctggggaaaacagaggcaggttgggggagggataacaagtaacaaacatgggggagtgtgaaggtccctgggtcatggctccctgagggtttccctttcatttctaaggtgggacctcagatctcttctccagaccaaggaggccccttccattgagaaggtcactcctcccaccccagagatctagaagcaaagttggggcacaacaggtgggaactagcaggaaactgcagtgcactcctacctaagcagttcacagacaatttggagaaccttcagacagtgacacccatctcataagtacttcctcaaaggccagggggactgctgccttaataacatgagcatgttctgagcctaccctatttctctttcaccccaagaaagtaaagccaagactgggtcttctgactttccaacacgagaaattggcctggaaagaggcaagggtttttattccagagtccctcctcaggacttcctgagatcctgacttcagaggctatacaaaaccattctccaaagtgggatgaagggcttgaggtcaaggtagcagcaaaagatgctgaagatcttcctccaataggttagggtctctcactctctctccctcactctaaatggggctctccttcagctggaatctttcccagcctgttcgcccaagtgagttttctggtggcggatgagattcgagctccgggagaagtgtttcccacacacagtgcaccggtagggcttctcccctctgtgggtccgctggtgtgctccaaagttggagatatcgctgaaggtccgcccacactcagtgcactcataaggtctctcacctgtgtgggtgcggtgatgcacgccaaagctggagctgttgctgaagctcttcccacactcaccggacgcgtggtcgacgatatcccgtaattccagaccggtccc

SEQ ID NO: 316136 - DNA, 719 bp, Homo Sapiens
  misc_feature (693)..(693): n is a, c, g, or t
ttgatgcaccaattaatgttgttttataagtaatagaagtgtgcaattgttcaacatattatgtacattataaaacacacaaaaatcgcaattaaataggatgagattaaatacaaagaaatcatctttctacttgctccgtggagtgctcatctccactcccgtgggatgtatacacccctacctgaaacaagcgccctaaagtgtgtccatgatagttatctggagaatgaagctacgttccagaactatgtacaagagcgcatctttttaagctatgtgaaaaaaccgtgcatcaagctaaaatggatgagagtgcttggagcatacattttgagacatattgcgactaatcactacacagctggtctaaagacggtatggtttaacaaaaattatttgactataggcgggtctaatatatgatttattgagtaaaatagacccgtttggggaaaatatgtgtttatgaaacaaaatttttccaggaaagggggagaattggcggttgggcttccaggccaaaaaaacccaaagggatggccgccaggtcccaatgcctgtaattccgggacaataggaagggttccaagcgcttttactttggagtcgttgttttggaacaaacttgacacccggccaatattcctctcttttcaaattaaaaaacaccttgtcttggggtatttcccnccacccccaaatgcttagaaggttag

SEQ ID NO: 316137 - DNA, 749 bp, Homo Sapiens
aaccttctccttcggttaatctgttttgaagccagaataatgcttaagtgcacggtgttaagagttttgatagggtgtttccattttccttttagatgtgaactgtccagattattctaatctaaacttttgggaaaagtatattgatatacatgttagaaggggtgtgggaagggtgtgtgttgtgttatgtagtagatgataaccttaggcttgggttttcaataagaattttaaaatttattacaattagaaattttttcctccagtttttattcagttgtccctttttccctttggaaatagtggacctgaccccattcttttttgagaattcatttcatagagcagcgtgttagaatatttttgttcttctaatcaagtgcagtgtaagaactgtagacatccataatttcttttctatcccttggttaagatattagctttattactatatttactggtcctggaatagcaaggcataatctgaggagcatagctacttcatctgtgtaataaattgctctttcactacaaacattttaatactgattttgttggtcatttaactttctaatagtggtccttaaattatgctctaaaagaagaataccatatatattggaaattaaatttgttgttgaataaaattagaattattataaaattcaacacgaccttattgctacctcaggataatttcttggcaaaaagttgatccaaactgggtgtggtggctcatgcatgtc

SEQ ID NO: 316138 - DNA, 1249 bp, Homo Sapiens
  misc_feature (455)..(455): n is a, c, g, or t
  misc_feature (467)..(468): n is a, c, g, or t
  misc_feature (473)..(477): n is a, c, g, or t
  misc_feature (480)..(480): n is a, c, g, or t
  misc_feature (482)..(485): n is a, c, g, or t
aggtcgaaggtgtgcgcccaaagccgccagtatatggtcgccccggcgcattcatccagcccgcgcggcccgcccccggggcctcctatggtagagcagcaccgccgcggccatcaccatggcctctcgcggcacagcggccggcgccggcgctccctctccccggggaggggggcgaccccctcccagcgccccacccgcggctccctgtcaccggcgagcggcggcgcggaggccggcatacctcacgcgccgccacagacgggggaggggcataccggcactggcggctttacccggccccaccggagagggcgggggcggcgagccttctccagcggcgaagccgcgcgcccgggcgaggctcccgtcgcgttttccccgcggcgccgggggcgagcgatgccgcctgggcccgggggaccctcgcggcgtgcccgcttttggggtttttnttgtggggtgtnnggggnnnnngtntnnnntagaagtcattatgaatttattatttacacgattgttaaagtacacaaatacagtggcgatacaaacgcacagctcggagactggccgtcagtgcacagctgacacgacgtcctacctacgtctcctgcacggggcgacggggactagatactgggcaaggactgtcacaagcactccgaagacgcgacccggcgaggctcgggctggaacccgggcgcagagctgcctcgcacaaacgttctgggcactacatcgggaccacagatatttacaaagcaagcttgcgccacttcaggccacagcgcgacgtctctccgggtgggggacgtctacctttaagaaggggtccagcaacaaagaaaatctcttaactcggctctgacccaccccaacctccctctgtacttcaacacacagctcccacccgctcaaggccccgtactccaaaacgcttacacagtaaccagcctaggattgagaaagcatccatgggctcaggcagacggccagccagctggtgggggggtgaacaactgtgttctgggacgccagccagttattgcatccggggaactctggggaggagaagggagaaccaaggtgcacaccctttgaggccctagggtccaaagggaacatcggtccatcgtgatggggtccagccgaagtgcccacgaacacagactgccctgcgcattggggttgggagcacatggccactggctaccgcccaagtgctgcggagtgagaggcgagaaggccc

SEQ ID NO: 316139 - DNA, 1318 bp, Homo Sapiens
  misc_feature (1104)..(1119): n is a, c, g, or t
  misc_feature (1147)..(1155): n is a, c, g, or t
gggaagacgatgtaccctccgttggaccccaaactcctggacgcacggacgactgccctgctcctgtctgtcattcacctggtgctggtgacaaggaatgcctgccatctgacgggaggcctggactggattgaccaatctctgtcggctgctgaggagcatttggaagtccttcgagaagcagccctagcttctgagccagataaaggcctcccaagccctgaaggcttcctgcaggagcagtctgcaatttagtgcctacaggccagcagctagccatgaaagcccctgccgccatccctggatggctcaacttagccttctactttttcctatagagttagttgttctccatggctggagagttcagctgtgtgtgcatagtaaagcaggagatccccgtcagtttatgcctcttttgcagttgcaaactgtgctggtgagtgcagttctaatactacagttaggggagatgccattcactctctgcaagaggagtattgaaaactggtggactgtcagctttatttagctcacctagtgttttcaagaaaattgagccaccgtctaagaaatcaagaggtttcacattaaaattagaatttctggcctctctcgattggtcaaaatgtgtggcaattctgatctgcattttcagaagaggacaatcaattgaaactaagtaggggtttcttcttttggcaagacttgtactctctcacctggcctgtttcatttatttgtattatctgcctggtccctgaggcgtctgggtctctcctctcccttgcaggtttgggtttgaagctgaggaactacaaagttgatgatttcttttttatctttatgcctgcaattttacctagctaccactaggtggatagtaaatttatacttatgtttccaaaaaccaatcctttccccctcaacactaacctcccctcacaccccccccatctttcgtcccagatggtgcgttcccccaccctccggccctcctatatcccatcactttaccatccccccaccgccccccacacatcgcaaaaatcccatcctccccccacaaccacgtacgcccaccaaaacttccctccttgcggnnnnnnnnnnnnnnnnaacaacatctcttaaaccacctttcgtnnnnnnnnncccaccctaataaaacactcccagtacctccccctattttctcccaaataaatacccgcccggccaccaaactttgtgcctccctcccaacaacataccaacccgcccctctgaggcacccccgctcgtttcaataaacacagccctcgcggttgcgcccccc

SEQ ID NO: 316140 - DNA, 731 bp, Homo Sapiens
ttttgttattctaaagttgcctttaatattttctttgtgtcgatactaatggtacattcttgaaatctcatgcataagaaaaataaaatatacaacttcctcataaatgtgtagaaacagtaatgctcttctacaatactattacaataaccctggtcaaaaataacattgtactttcaagtttgtcagaatcttcaactcattattgttcttgttttagaatttacacaagaaatctatctttagatactaccggttaacttaaacaaatttattcttaaatcaatgagaactatttcaagacttggtcagtaagtgttttgtatattcctcttcttatatacaccatccagaaacaaaaatggaagcaaaagctaaatttattgtttgagattgtcactagaacatatttatagaaaaacaatactaccctgaaatatacattggctaggttatatattaactattgaattatttcaaaattaaatggttttgataagaaaattggcatttattcccaattaatctgattaaagaaataattgaactctcttaggttttaatggaacaaccttttgataacccatcttggttcattttactatattattaatattaaaaatcattctaccttcaattctgggtcttttttatggtaatccattaaattcaccatattaggtatttttatatatgacttaaaatattttggcatttaaataaccccatag

SEQ ID NO: 316141 - DNA, 718 bp, Homo Sapiens
caccgataagttgagccgtgtgttttttgtttgtttcacatattgataatggtctatcaccttctaacagttcaaatagatgttgttttaagccactaagttttggtagcaagttgttagccagcaaaagttaactgatatactggcaaatagcagatcctccagaagtcattctgtttttcatcctcaaaagaatggaagctcagctcatttggcatggaaattgggaaatatagattgtcagccattaatgggaataatggcttataaaagtgggtaagagttaaagttattattgtcctgaattcagattaatttgtgattcaagacattctgtcactccttttaaaacctaattatagatgtcttaagtgtttctggaaaaatctgttaaattccttcagtggacttgacttttcctcttaaaatactaaagatgttggtgctgacattgtgaaggcacatactctcacgtaactgcaaaataatttctgagaagctggtatctgtaaggtaacttttaaaggctctgatttatttctgtggttaagaaaagaggaattattaagaaattgttggaaatgtgccgtggctaggtttttcctcctcatatttgtaggctttcatgtgaagctcccttagctcagcattggtcaaaacatgtttgttccatagtatcttgtgctaattttctagaagaacagtacattaaaaaaaa

SEQ ID NO: 316142 - DNA, 640 bp, Homo Sapiens
aacaggagaaaaagcaaacaaatttatttgatcataattgtatgtgagccctcagaatgaagaccccaagatacaggggaattgtccatttttatgtttaggttcaacagattatggactgtgtagaaatatgattggacaagaagggtatgatctaatagtaatagactgagaggggaaacccagcaaggctgtctagattcttcttggcctctctgtgcaggattccttccttctgggcacggggtgggaccctctctggaatgggtatcttacgacagtcaaacacggtaggtcagatcatttctttccaaccagtttttacacagaaaggggaatggggagtgagaggactatttttaggttttatggctggctttggggtaaaaccggttctggtttctgatgacctgccttggggaagagggattctagtttctatgggtagccttgggggagaatgaaaagccagaaacaagagggcaggagaaggtcagagagaactttttgcttctggggctgcttctgaggccttccttttaaagttatcagagatgatcaggggcatcctggctccaggtaaggtctcctgacgtgagtgtgctggtcttccacactggatgccgagccttttaaaggg

SEQ ID NO: 316143 - DNA, 884 bp, Homo Sapiens
agtttgaaatatttacacatacacaatgagatagcttgaggataagatcccagtttaaacataaagttcatttatgtttcatatatactttatacacatagactgaaggtaatttgatacaatattttaaataatttttggcatgaaacaaagtgtgggatacactgaaccattagaaagcaaaaggtgttaacatctccgccacccatgtggacgatctgtgattgtttggcatcaccatcattcctgattctgaatttatatgttaccgataagcaatcatttttttacacttattcacacataagtacttaacagtaaaaaaaatgacataccagtaatacaacgaaaaaaatagtgtattcaggttaagtaagccagcacagtagtgtcaccagaatacctgtatcagctgttaagcaacaataacaaataacagtaggctttcagtttccaagtatgatgctgttttgactaaaaggttactgtacactgtattttattttatttttaggtgagaagaagcatcagaagcagttgagggaccaagaagtgggtcctgtagagaggaagaagcattcctctggatggcttttttaaatgtttctttcagagtcatctgcctcattaatgatgctttttgtcttagaagtctctctttgattttataaactgacatgatttcttgctctgttatgaatgcatgctgctctagtcctttaataagcccatcacacatttttaccatgtcgtctataggcactttttctgcagtgttaacatcatcttcattatcattatcatcatgatcatcttgattcagaaccatttttgttacttcaccattggacaatgaatgaacaactggagcctcattattaccc

SEQ ID NO: 316144 - DNA, 709 bp, Homo Sapiens
  misc_feature (117)..(117): n is a, c, g, or t
  misc_feature (575)..(591): n is a, c, g, or t
tacgaagaggccatccagactctgttttgccaggctcgactttcccaagtacaccatcatcaagtcttttcaggaccagcggtactatctcaagcaccacggcaaactgaaggacanttcggttttagaggtcgatgtggcagaatataaagaagaggagctgctgaaggatttggaagagagtgtccaagataaaaatactaacacccttttttcagtgaaactagaagaagagctgtcagtggaaggaaacacagacattaatactgatttgaaagactgagataaaagtatttgtttcgttcaacagtgccactggtatttactaacaaaatgaaaagtccaccttgtcttctctcagaaaacctttgttgttcattgtttggccaatgaatcttcaaaaacttgcacaaacagaaaagttggaaaaggataatacagactgcactaaatgttttcctctgttttacaaactgcttggcagccccaggtgaagcatcaaggattgtttggtattaaaatttgtgttcacgggatgcaccaaagtgtgtaccccgtaagcatgaaaccagtgnnnnnnnnnnnnnnnnnagttcttattccggagcctcaaacaagcattataccttctgtgattatgatttcctctcctataattatttctgtagcactccacactgatctttggaaacttgccccttatttaaaa

SEQ ID NO: 316145 - DNA, 770 bp, Homo Sapiens
attccctttttttatcctggacacattccctcaccgggcaataaaggttctttcgtgcctgatttacctgtgccaatgtgtaagttaaccccttgtattcctatgttctccctcaaaatcactttacattctaaaggccaggttttgccccctctccctagggccctgaagttttagctattccatttgtattaaaaactggttaagagctataatggagggtgattggctctgaatcttgccaaatttagatctttttcgggctattcaatcaggctttgccaaccttcatttcctttatttttcaaatgaagaaaatgaagcaggtaattaaggataaatttcttgtgtgagacaacatggggagcctgtggcccttccagaattaggccaggaatccctctgccagggaattcagtagaaatctctgccaagttatctctttgatgtatatctccgcaattcttatttgctttgaaaactactgcctcctaccttcgtttcagatgtggaaattgaagctgtaataaatgttaagtatcctaaaagcaggactcccatagcaaattcaaggcccaacaaggattctcaatcgttgtgtgtttgtgcttttttctaacaattcctgcctactgccttcctgtgttaagatagggagaagaggactgtggcagattctggtgttttagtgccatatgctctcttcatatgaatgctattaatcatctgattacagtaaattgatttaagtgctggtgtaaacatcacac

SEQ ID NO: 316146 - DNA, 670 bp, Homo Sapiens
  misc_feature (591)..(591): n is a, c, g, or t
  misc_feature (632)..(632): n is a, c, g, or t
  misc_feature (655)..(655): n is a, c, g, or t
tttattgaatgggtgggtaaaaagtgaacgacagctacaaattcaaaaataaaactcttggttattaaagtcattccaggcatggacagagggatgcgaggctggccttccctgtccacggtcctctgaggcagctgaagtctcccatgtctggaccccgaatcttgtgcagattgaacagtggatccggggtgctctgagcaggcagcagggagcagctctggtgacgcttcatgtggtagcctcactctccattctctgcccctctcgtgcccacaaacaccaccaagagattcacggtgagaaatatcagcaaacccagatcccagatcaccaactccatggtcttaggacttccttggactgtccttggatctaaggctgagacctaagagggtaagaaagcatacaagtatttagtctccagggccatctcctcctccccaagctgacaccactgagaggggtcccattcaagcagggcgaagctcctcattcacgcacaccaaataaaaaatccccacagaaaggacatgaaaggacaaacatcttagaagtttcgtttttctttcaagcagttcacaaatcggngcaaatgaccagctagagtaatccacaggaatacagctttnctagccccacctgcaactttctncatttgttcgacatt

SEQ ID NO: 316147 - DNA, 634 bp, Homo Sapiens
  misc_feature (375)..(375): n is a, c, g, or t
  misc_feature (571)..(571): n is a, c, g, or t
tgcaattctgtaaggtttattgaatgggtgggtaaaaagtgaacgacagctacaaattcaaaaataaaactcttggttattaaagtcattccaggcatggacagagggatgcgaggctggccttccctgtccacggtcctctgaggcagctgaagtctcccatgtctggaccccgaatcttgtgcagattgaacagtggatccggggtgctctgagcaggcagcagggagcagctctggtgacgcttcatgtggtagcctcactctccattctctgcccctctcgtgcccacaaacaccaccaagagattctgaaacaaaggacaagtgagaccagtgatttgaggttcccatctgcataaacacggaccatgcntgagcctctggttgttgggttctggctcttggcatcaactcaccactggtgagaaatatcagcaaacccagattccagatcaccaactccatggtcttaggactttccttggactgtccttggatctaaggctgagaccctaagagggtaagaaagcatacaagtatttagtctccagggccatctcctcctcccnaagctgacaccactgagaggggtcccattcaagcagggcgaagctcctcattcacgcacacca

SEQ ID NO: 316148 - DNA, 558 bp, Homo Sapiens
gttttatgattaagttttaactcgtttttagtaacagaaacaatgtagtgagttattcacaaaactatatagtatatttcttcaatttattctgagattgtattattttacttttctttgatgatccagtgttgataataaatgatagttttattttcagtgcccgtacttagctaaacaacacttgaaaccctgtattgtttcccaaattatgtttcaaaatcttacctaagtaaatccaaatgtccatgagcttatgctttagcagatactggtgttctttatgtgcctattactcactttcactttaagttatttgacagcatgtgtcactatttccagtcagtttttgatttaactaaaatctttttgtcttcaaatttatttcttttttaattttgagattttatagagattggtaaaaagtttaagaaatagggaaggagatcatttataaaactagaaagtaatcttaatgttagtgtcactgtataaacttaatataagtgataataccagtgcattagtcattattttttattacactttcaaatgaca

SEQ ID NO: 316149 - DNA, 536 bp, Homo Sapiens
cattaatataaacggtttattcatttaattataaaaggaaggcacatgtttcattgaagattaacaaatttacaaagaaaatattaaattaattcaaagtctaacactttgttattcaaaatatttattactttctaaatccatattatagaagggcattttacacaaaattaaatccactcaatttaaatgtccaatttccagtttcacaagttttgacaaatgtgtatgtctagttaatcaccatcccaaacaagatatacatttatattctacaaaaatgccagttggtgcacatccttgccaatacatgatatccacatttcaccaatgtcaaaaaatgttcagtatttgttgcgctatttgttcatatagaaaatatatcggtacatttatagatctttttgagatctgctcaatgtttttgcccttcttcattgggctggtggcttttttcaaacttaaataatgagactcagaaaatatgattaattatccagtctattcaggtacaaagcttgaggtggtcactgggg

SEQ ID NO: 316150 - DNA, 882 bp, Homo Sapiens
ttgatctttacaaagataatctttattcataatcacaggccacaggggtgagacctgaggtttgggttctgtggtgaaggagaacccctgtcctcctgtcccttgccctgggcctctgctggctgaggagggacaaggtgagggggcccccatggtgctcagacaaccagagcctccctggcagggcaggagtgtgggtgccacagagacaagccccttgcagagctgacctggagcccaccatccccatagcctgtgtgagcatgaagcgaggacccccgggtgggctgtgccctgggcttgtcactgatgccagtggaggctggcacctgcccctctcggcacctgagacagtgagggaaggtagctgctgccgtgaagaacaaagatgctctgagcacacacttgctggggctgagctgaggggcacacggaggcaggccctgcccgtggtctggtcagctgtccctgccgccgctacttttctggtctggggctgtagccttggtcaggttcccagcttccctcttgagaacgctgagcaaagtctgggagctctccaggatcttgaggtaggcggcctccgtctccgcgatggtccggtcgaactcgttgcgagaggcaatcttgcgtgccaggttctcgttgacgcgggccagcttctctgtcagctgcctcacctcattctgcagccgctgcttctcgtcctcctcctcctggatctgccggcacagctcctcccgcttctggcacagctcctctatgcacttgaccagctcgttgttgtagttctgcagcgccgcgccctgctgggtcatggtcaacgccgcccggggccccaccaccccaaccgccgcggaagcagcgctgtccgcgcctccc

SEQ ID NO: 316151 - DNA, 738 bp, Homo Sapiens
agacacagagaagttgaaattgagggaatggattacaggcgtgagccaccacacctggccggttgtttatatttaattgtctttttttcactaatgaggaccaccttgtaaattctgggcattttcagagttttctcttccatgtgaattgctccagctaacttaatattagtttctcaagggtttgtgtagacctggctttgtctctttccatctgtttctctctttccctttaacgtcacttgcctgaggtctatagggccctttaaggttgccagcccagagccagaagagattggtgtgcctgaagttaagaaagccacctttgcctacagatggtgttcacagtgtttgtgtggagtgacagcttgacttttgggggccccaggagatgttgacccagcagggcatggcgctgcagaactacgacaacaagctggtcaaatgcatagaggagctatgccagaagcaggaggagctgtgctggcagatccagcaggaggaggacaagaaacagcggctgcagaatgaggtgaggcagctgacacagaagctggcctgcgtcaacgagaagctggcccgcgtcaacgagaacctggcacgcaagattgcctcttgcagtaagttctaccagaccatcgcggagacggaggccacctacctcaagatgctggagagctcccagactttgctcagtgtcctgaagagggaagctgggaacctgaccaaggctacagc

SEQ ID NO: 316152 - DNA, 616 bp, Homo Sapiens
  misc_feature (606)..(606): n is a, c, g, or t
ttttgctggtgaattattgatttattgcacatcaggagaaacacaagattactgctataataaattcactcttacatgctttagcaaaaatcagtaaaaatagaaaacatggtaacaattaaagtgaaaaaattggggtcattaaagaatgtctgactgattagcttgcagtttttgagacggctgagaactaccatcaatgagatcaccttaaacaaacactcttaatgacttgaaaaagtccccatcccaaagtcaactataggtattcaatattgtatatttaactgaatttaaagttatgttaaaacccattttattgaagtaagagaagaattccttttacattatcattctcaagccatatatgaagaaagagatggcaattacattccgaaagtgtgcattaatatacacaaaatgtgactgtgttacccatgctgtcctcgagctcgtaggttcaagcgaccctcctgccttgaactgccaaagtgctgtgatatcaggcatgagcgcacactcccaggtgtgagtacattactgtgggtgtttaatgccactaacacaggaggttgccgaacacatactgattggcgtaagcacagngattcattct

SEQ ID NO: 316153 - DNA, 626 bp, Homo Sapiens
  misc_feature (360)..(371): n is a, c, g, or t
cccccagagcaaccgggagatttattgataaatacagagacatgggcggggagccacgctccgacaacccgcactgggcccccgtcccgagctcaggccacgtccccaccttctggaagcctccaagctgttgttaatgtcagtttttttcaccaggcaaacggaaggggcatttttgctgttgttaggaaacggttaccacttttccgtgtttgtttaaaataggatctttgcataaattgggataaatcacctggaggaattacacgtaaacaaggggtgtaaatcaccattgcatgcatggcctgcagagttgtaaagtgcaaattttcgttataaaaacacttttagtttgaatgnnnnnnnnnnnnccaccaacttttcataaacatgacttcctgcaaccgattttggccccacatgggggtggatcccaaaagcgggagacagccttccacgaaaactttgaaaactggcccaaaattttataattttgaaaatggctttgaatttttgggggggaaaaagaatcctgataaacacaataaaggggagaaatgctccctttgaaaaggtttgggttgggtttataaacaacctctttggggggaccttccctggaaaaa

SEQ ID NO: 316154 - DNA, 755 bp, Homo Sapiens
  misc_feature (450)..(450): n is a, c, g, or t
ccttttgctacaaaatgcatttatttccagtcagacaaaattcttgaactgtacattcgggtacatattataaggtcatctttgatatatgccctgtttacaagatccatttctaattattaaagtgaatatcaaacacacatctttgcatcttaaaacataaataaactgctaatgtttataagccacaaatctggtcactgacatgagtggcctgcaattcttcagtgatgagcacacggcgatacagacaagatcagattacccaggtaggcaggcagcaggcacctgtaattcacccgctgactgtgctgttgtggcagtgacccttcttgtgaaaaaagagttatgtgcagacaaaagtgtgacatatgcaacgtggagaggcatttcacagaatgcaaacaccattcaggtaaattagtagactccagaatgaatgaaagcttncatgaatgcaaacctgttgtttacaatactgggcattgtggcaccttttcactggacagtttaataaatatctattaaagaaagtaaggataagagaagaagctgaagcagttgtcttggtgcacaacatattttcaagatgggctttaggttgtgagtttcagagataccacttgttgtttctttaaagtaaaatattctatttggaaagcccttatattcttaaaaagaccttttaattcttcattaccattaagagacttctggagactggcaggaattgggttatttgtttaagaaaagct

SEQ ID NO: 316155 - DNA, 805 bp, Homo Sapiens
ttgtttttgtgtgtgggtgtgtgtcaagttttaatacacgctagaacaagccacaagagggtgctgctaggccagaactacactcaccccaagcccaccccaggaaccccaaagcagaggtcaggaactgagtccacagctcctggggaggcccaggcacccctgaacgcttctgtcacctctgacctcccatcttgccctcagcctagactcgtcccttccctaccagtcccttccctagacaaaggcccctcccctccctgggtcccaggacttcttcccctcaagggacagaggagcagccagagagcgacggttcagggccctgagggtccggctctccaggagaagctgggctctgaaccagggtgggtaaacgttgcagaagggctgtcaggacactcaggcgcccacacactccacgtagttggcagggtacaggccaatgcggccactctgcaactggccttggcaccagccctgctcgtcctcctcactcatcttcagcagctcctcccctgctcggaagctcagctcatcagcttcctggccagcgtagtcatagagtgccctcacccgaaccccggtggcagccttccggggactctcttcatctgaccactcctcatcctgccccgtgcctggggaccccggggactggggtgggggtgcggtgccatctcttgtaggcacaatgctggtcagggtaacctcatcagggctccggccacccttctctttccggctgattgtcctctgtgtgtccaaggaccactcctcgaactgtggccagttcatggccatg

SEQ ID NO: 316156 - DNA, 310 bp, Homo Sapiens
aacgaaactctgtagtcaaatttgttcagcagctcaagaagttgaatgaattgtttattagaataattaattcttagttattaacaattgcaaaaactataggttaaaaataatctgaattccaaccccaggaatggtagaatttgtaattttatctgcttgtgcacatacttgtaatggagtatcatatactatttattgaaaatcttatttttgattcattttatcaaattaactccctctacccccaaaaacagcgtagtaccacttttgaattagatttgtgatcttacctagcaccttgaatttg

SEQ ID NO: 316157 - DNA, 535 bp, Homo Sapiens; identical to SEQ ID NO: 217951

SEQ ID NO: 316158 - DNA, 419 bp, Homo Sapiens
  misc_feature (231)..(255): n is a, c, g, or t
  misc_feature (279)..(324): n is a, c, g, or t
  misc_feature (349)..(349): n is a, c, g, or t
tcagcccagttgtgttttcttccatactgggtttctcaccggcccctcacaccctcgatgacttgtttttctgttgttgaatgacatggatgtggtcacgtgccacctctcagcaattgctcccacctcagccttcggggatatgccactacttctgtagtgctttctgacgtgaaaagctctttctgatggctattcgctcttgctactaacggatggagtggatggcannnnnnnnnnnnnnnnnnnnnnnnnggagaccgaggctcgctctggccnnnnnnnnnnnnnnnnnnnnnnnnnnnnnnnnnnnnnnnnnnnnnngggttcttggtttacggcatatctnttggctgaagcttcggaggaactgggaacacaagcgcccgcccccacaccccagttaattttttattttt

SEQ ID NO: 316159 - DNA, 483 bp, Homo Sapiens
ggaaaaaaatcaataaggcaaaaaagctgaaaatatatatagttgtgttttgttttcatgtgactttattccacctgaaagattctaaacttcttccattagcgggaatctgattgggatcagccagaaatgtagtgcagatggtgaaggaagagaaggggataaagcagagaagtccaatttagttggggaattctcactctatccaaagccccggatgaggtcactgcttttatgagcctccttgaaagaagccttgacataatccctggcttattttgggaataaggttcttaggaggaaattccccagcagtcaaagtcactcctctcccatgtttatcacaactaggaaggaagggataggggaagaaataaaagtattaatttacccagtaaaaccaatttccccatagggatggcttcctttggaatggtatttcccccaggacccacgctggctgaggctcagcagttaaggaac

SEQ ID NO: 316160 - DNA, 745 bp, Homo Sapiens
ttacataaccttttcatggcaccattttgtagtaacagaaaacgttattcccagttcctaaaccacatcctgaaaaatatacatttgtatttatatatttatatcaatactccaccccatcccataattccaccacctattgtaggtcttttgcttaaagcaggaaactattctcttaggtaagaaaatatatatgggaagctaaatgaaataacggttagagtaactggggacagttggtcgtggggacagggaggaaggggttaagtccagcctaggcaggatgcatcactaggggtccatcaaggtgggaggaggccagtgtataaaagggcagcgtcacacaggtgggctctggggtccttggtccattaggagatggcctttgcctcaggaaggaaggcttcccagtactttgccagctgctgctgtgagtaaaggaagtgtttaaggtacttgatcacgtgggtcttgaagtccttggatttctctttctaaaaccgatcacttctttttggaccacttgtggaatccttttgaagtccctttcatattgaagtaacccgagaactccaatcgaagaacttggcccttggcctggtgcaattaataaggttggttggcccacagaagccaagcttgggccttccgttttttttgaaggggggtttgggaatctggcagcgcttgcactttttaattgcctggttgaaagccacgcggctctttgccaacgagggaaagg

SEQ ID NO: 316161 - DNA, 710 bp, Homo Sapiens
  misc_feature (592)..(592): n is a, c, g, or t
ataagtatgaatcaccgcgtctggcctccctgccatttttactatagcaggaaccagggctggaggcagtctcccagactcctgccctggtcacctcatcagcctccctgagactcagctccactcagggcagcgaggaagacaagcaaacccatggaaccagttagagagggccagaggaacagatcaccctagagatctaccagtcagattccagttactttcttgtcaaggttcccaggatcccagacttccaaccaaacctactgggaatccagccagtctaggagtttcccaggagccagagggacaggatgcacttcctttctaaagattccagcctccagagcagcctgtgccagtgtttattttgagcaccaccgagagtctggcttcaggaaggaaagtaaaagcagcttcaggagagaatgcagtaagccagggtcgggggtgccggccagtgttcttggtgcaggttacctgggctttggctggggctttctgaccttccccttttttgggcaccagctttgtcccaagttctgaaattgtcaccatttttcagggaagaaccgctataggatggctggtntcctttctttttctgagaaggaggccagcctactttctttttcttccaataggaagggagaagaaaggctttaaaagatccgaggttaatctaaaacaatgaggtgagatgtgtgctg

SEQ ID NO: 316162 - DNA, 1925 bp, Homo Sapiens
  misc_feature (1798)..(1850): n is a, c, g, or t
ttttaatattttttcatctttgaaatgatttattgttcacttttgcacacgcgtgctgaggacagggcaggtccagcctggggcctgctccccactgcagcatttccaggcccccagagtgggccgaagggggacatgggcgtgtctttccacattaagtagcaggagattccctgagtaaaaggcattttcttaagtaggacgtgtccaggctccagcagcagtcctgggggtgggggttgtgggccttcaggccagggcactgcccatgacttcggagaagccacctggtgttccaggtgctgctggctgaggctcctgcagctcaggctgggcctctttccaggccagagacttctccaatttggttttaaaaagcaatccgtgacctgggcagtctgcagtctctttggaggctcgcttcttgcagcagccgcggcacaggctgaacacacatctgttgccctttgggtttccacactggtcacactttgcatattttggcttcagagaggggtcgaaggtcttgtgggggttcctcagctgcttcttttgcttgttcttggacaggacctccgtgccaccctcctcttcctccagggcccgcttgctgcgcgcacctgccttctccttgctcccctccctgggccccggccggatgtagggctggcagatccagtggaagggcaagtcgccggtgggcttcgctccctcctgcctggatatctcctcctgacaccgcagcttcagctcctggctcacagcagcgatgccctccagggtcttcaccttggccagctcctctcgcagctcctggtgcacctgcagcgtgtggtgccacagcttgaagaggtgggcccggacgtaggacagggggcaggggtgctcccgcacgatgtccagatactcctcggccagctcccacacggcagggctccggccctcgaacagggcggggttgtgcaggttgccctctgcgctcatgacgccctgcacacccgtgtcccggaggcagcgctccacgtcctgcaggcactggatgttcccgttagcaaacacagggatggccacagccttccgcacagccttgatatgctcccaggacgctgcacccgacaggggccccttctgctccttggtgcgtccgtgcaccgtcagcaactggcagccggccttctccagcatctgggcgtacctcacggtcttgtcaatctccgggaagacacggattttgcacgtgacaggaacagagagtttctcgtggggccagcaaaatcattctttggagcaggtcccactcgtcctgcagaaagggcgccatagtgacctctcttggctatcatctgtgggcagcccaagttcaggtcaatggcgtcacagtaatcctgagccaggagagccgcctgaacaaacacctccgggtcattggcacagaactgcacgatgaggggccggtcctcggggcacacctcgcagtacaggttctccttccggtagttggcgtcgcggacaaagacctgggcatgcagcatgggcgtgtagcagagctgtgccccgtggcgccggctcagcagcctccaggccagctcgctctggtccaccatgggggccacgacgtggcgggcccctcgcagggtgcggctccagaactcgaagccctgcagctttggcatcgtctccaggcgcgcgagggccccgccgtgtccgccgcgcgcctttggctccgagggcgccgggtgccggtgtcccgggcccgcccctctccggcctcgccgccgcccggggcccctgcagctcnnnnnnnnnnnnnnnnnnnnnnnnnnnnnnnnnnnnnnnnnnnnnnnnnnnnncctcgtgcagaattcgccacccagcccgaggggtatgttaatcggccgccggaccggcccgttgctggcgcgcgt

SEQ ID NO: 316163 - DNA, 972 bp, Homo Sapiens
  misc_feature (37)..(37): n is a, c, g, or t
  misc_feature (147)..(208): n is a, c, g, or t
tcagcgcgctgggggaccgccaggagaacactattgntgcggttaagccccgaacctcttagcggggggattcggccccaaccaaaccctcgtccgggctaccaaagccgtgggaatctagcttgcctcatgggacaatctgccctnnnnnnnnnnnnnnnnnnnnnnnnnnnnnnnnnnnnnnnnnnnnnnnnnnnnnnnnnnnnnngtcaagccaaccgggccagggcggcccctttgttccagccattcagggggggtaccctcccgggtccgtgtccaatcttccggggaagaccccggatttttgcacctgccagggaacagaagagtttcttggtgggcccaggcaaaatcatttctttgggagcaggtccccactcgttcctgcagaaaggcgccatagtgacctctcttggctatcatctgtggggcagcccaagtttcaggtcaatggcgtcacagtaatcctgagccaggagagccgcctgaacaaacacctccgggtcattggcacagaactgcacgatgaggggccggtcctcggggcacacctcgcagtacaggttctccttccggtagttggcgtcgcggacaaagacctgggcatgcagcatgggcgtgtagcagagctgtgccccgtggcgccggctcagcagcctccaggccagctcgctctggtccaccatgggggccacgacgtggcgggcccctcgcagggtgcggctccagaactcgaagccctgcagctttggcatcgtctccaggcgcgcgagggccccgccgtgtccgccgcgcgcctttggctccgagggcgccgggtgccggtgtcccgggcccgcccctctccggcctcgccgccgcccggggcccctgcagctcccggggcgccgcgaacgcccgcaccgcgccggggccgccgccgggccgcagcccctcgtgccgaattcgccacccaggcctagaaatttt

SEQ ID NO: 316164 - DNA, 573 bp, Homo Sapiens
caaatttttgtgttaaatagaaggttaaagggttagatttaagtttctgctacatgatcctattacgtttacatgattctctgtggctgaaacaaagttctaatcaaaactacttttgctgaagaaaaaattcagcctccatttgggtgtatttttaagcagttattcacagttatcacaaattgtaagcacaaaaaaacctgactgaagaagtagggatgcaacaatataatatgaaaaaattagtttaaattaccaaaacagctataaaagttgtagtcgtagcatacgccccgctctgtcagaagtaaggtgtataaaaccattgagtactaatagactgcggtttccaaaaaacccccaacacttctaggttgaaattttgggttattacataattataatggcatattttataacacacaaatatattgtaacatccctatgaacattttataagcccccgagctgctgcaaagcctggtagcatttggtcaataactatttttatactgtattttttctcaaaatatttacatatcttgacaaagtaacagggttttgtatgtcttg

SEQ ID NO: 316165 - DNA, 381 bp, Homo Sapiens
  misc_feature (188)..(188): n is a, c, g, or t
  misc_feature (210)..(210): n is a, c, g, or t
  misc_feature (246)..(246): n is a, c, g, or t
caaatttttgtgttaaatagaaggctaaagggttagatttaagtttctgctacatgatcctattacgtttacatgattctctgtggctgaaacaaagttctaatcaaaactacttttgctgaagaaaaaattcagcctccatttgggtgtatttttaagcagttattcacagttatcacaaattgtanggcacaaaaaaacctgactganggaagtaggggatgcaacaatataatatggaaaaanttaggtttaaattaccaaaacagctattaaaggttgtagttcgtaggcatacgccccgctctgttcaggaggtagggtgttttaaaacccttggaggtactaattggactgcggtttcccaaaaaacccccaaca

SEQ ID NO: 316166 - DNA, 743 bp, Homo Sapiens
  misc_feature (47)..(47): n is a, c, g, or t
  misc_feature (78)..(78): n is a, c, g, or t
  misc_feature (142)..(142): n is a, c, g, or t
  misc_feature (157)..(157): n is a, c, g, or t
  misc_feature (163)..(163): n is a, c, g, or t
  misc_feature (435)..(435): n is a, c, g, or t
  misc_feature (486)..(486): n is a, c, g, or t
  misc_feature (593)..(629): n is a, c, g, or t
tcgaacttatccccagtctgaatgtgtttcttgaccattttataagnaagtttattttgattaaagttatgtttttgnatccatatattgtgtatggtgagagtgatgaattgtgggatcattggaataaatcttttcttanccccatgataaaagnagaagncaccagtgagcttagaatatctataaagcaaaaaatgtagtctcttgtttaaaaaatctggagcgggaatgcaaggatccaaaactttagcatgctttgagcaaaaatttaaacttactggaatcttttataataatgtaagtggaatggaggattctaggaactgagaactgtattggaataggttcaaaatatgtaaggaaatgctaatgtgggagataaaaattttatttagtacttattctgattattattaaaagtaataatgtgtntccttgaggataacttgtcaaatgccccccaaagccataaagaatataatntctgaatccccaaattcccaaagacaagaactctgtgtttgaattcattctgcatataattatttataagtatagattgtgaatttttccatgttcttaaaattatnnnnnnnnnnnnnnnnnnnnnnnnnnnnnnnnnnnnnttggccttggtaatatttagttgataattccattactgtgtatttttcacttgtttctaagatcaaacattttaatatgtgcatgttatatataaatatgtaaattctgtgata

SEQ ID NO: 316167 - DNA, 400 bp, Homo Sapiens
  misc_feature (19)..(19): n is a, c, g, or t
  misc_feature (61)..(61): n is a, c, g, or t
ccttaagggtaactaatcnaactgggcaaaatcccctggaaactgcggatatagcttgccnacagtatcttatccattaattgcattctttgatgtgctgggagtcagcttgcacaagttaagtccttgaggaaggggggtgggtaaggggctgcaagtgaaggagccaaaatggagtgtgtctggctctctcagctaagggacagtcaattcaggttaaaacaaggtagggtatcacacttacaagagggaggcagaaagagttgatgtgaaatgacctggagtgggagaggttagaaaaggctgtgctgccggctttgaagacaaaggaaagggccactagctagcagcctctaggagctggaaacgctgggaaacagctcccttgcctccagaaggc

SEQ ID NO: 316168 - DNA, 444 bp, Homo Sapiens
ttgaattcagaagtcctttattagccggcaaccgagagacggctagtgctcaaaattctctcggccctgaagaaagggctagattttcttttatactttggtttagaaaggggaggaggagcctagctgaagcactcttacagaagcaaaacaggcaaaaagttaaaagacaaatggttacaggaaaacaaacagttccaggtgcaggggttttaaatccatcacaaggtgatagatgctgggctttgggtgctatcaaccagacaaaaacacaggggcttagggtactatcaactgggcaaattcctgggaactgcggacatagcttgccacagcatgttatcagttaattgcattctttgatgtgctgggagtcagcttgcacaagttaattccttgaggaagggggtgggtaaggagcccttgatgtcttgcaaatgaatg

SEQ ID NO: 316169 - DNA, 509 bp, Homo Sapiens
tggcatgagccactatgcccagccaagaacctctacttgacattttattagcttaaactggaatgacagaaattctattgtctgattctggttggcaaatgtaaatattaaagaatggtaaaatctaaaaaaattatctaaaatagatactacctgtttcctgtttcttcgtcaaattaggaaatttttagaatcactagcagtgtttcaagttgtctctgccataactcacgcttagttataattgtggcttaataactgatatatccaggaactttatacctacatacttacatcacattaaaagatgttatacatactgctaaaactgagcttgagcatagccagaaagaaatcaagccactcacactttaatctcttgatgagtctgtctgtacaacgggcattgattgcataaaaatgtgcttacactagtgcattttcataaccgatttaaaacaaaagatttgagggtacgagctttggaagaatagttgattgtagaccct

SEQ ID NO: 316170 - DNA, 1027 bp, Homo Sapiens
tcttacatatgtatttcccatttttgcaacaggcttttattacttttttttaaaacccatataagaaagacatttaaaaagaaaatatcctggaaacaaacacttacacactgagcaacacaaccaaagaaggcactaccagcagttactcccacctctgggagggaacgggtactcgatactatacttttttcagaggtttagacctcagcataggccttgggtctaactgtgctttagtaaagtctgaattgtccaataattttctcatttcataaacacccttatctctttatatatagctatatgcctttatgtgtatatatacatgacattttttttccttctcaaaaataaaatagccatccccatagagggaggttctcagcagcattcacaggggttgcagcaggagccatgccttctattaatgttagagacatgcaggacgaaggaaaatgactctccacctgctccctttaatatacagcagggagagagtttctaaagggagggaagtgataaggctgagcatgagatggctaaccagggtttttgtggtttaaaaaaatcttagagttgcgagcttgtgttgcctttgaagctctggagactatgcacagttcatacgacgaggggtcagcattccttctgggatcaggggcagtatggactcagcctgggtcggagagggaacttctgaagctacacgaacaagcttgggcttgaaccgacccaagagggacttgggaaggcagaggatagcaaagaaatggtttctcagaggctgggttggaaaaccagccctgctttgaaaattacaagtccttctccctctgcactggagtgtctctgcagtcctggctacttgttggaattttttgactaatttattttaggattcagcctaaacaagaagccagtgcaaatgtaagtcaggaatttgatcctccctgtcaatgtggtctggtatcactgattggagtcaaaactcaggcacccagatgggagggaggtctgtgaccct

SEQ ID NO: 316171 - DNA, 601 bp, Homo Sapiens
gtaataaaaatatttagtgaaaagacacattttaactcccatttatgaattttaaaaatacaaataaaattttatctacctgatattcagcctataactggctcaatacatagccttatttcctaaaatcatattgcagcatcttctcgaaaaactaaatgcaattttataccttcattagttatgttaatagaggtaaatatttaaacagtacactcatccctgggtctttaaataaaactgaaaagtcttagtgtaagtttaaaattttaatatttataaatttaaaaaattttacacgtgctgagtggtagcagtgctaacatttttgtgaccattaaaccacaaactcactgcatagagcttctttctttgtacagataatcaaatcacaataccaacatttgcaatttgtaataattttatgtggtaaaagacaccacaccaggggagcctggggctcagaaaacacttgaggtcagatccctagtaggtacatagtgcagatgcagtatataatttcaggctagggaaaattagctactagtatgtatctgacagttcctaatagcctaagaggcctaagaatgcagacggggag

SEQ ID NO: 316172 - DNA, 741 bp, Homo Sapiens
  misc_feature (483)..(483): n is a, c, g, or t
  misc_feature (636)..(636): n is a, c, g, or t
  misc_feature (663)..(663): n is a, c, g, or t
  misc_feature (668)..(668): n is a, c, g, or t
  misc_feature (697)..(697): n is a, c, g, or t
aaatttctgttgtttatttttttaaaaaaattaggtaaggtagcaagatatattagcatacaaaatcagtagcttttatatagagagcaataaccagttagaagacataatggcagaggaaatctcatttactagcaaataaattaaatacttagggataagcttagcaagaaatgcacaaaacctacacaaggataattttaaaacactgctaaaaggcacaaaatagacttgaataaatggaaatacatctcctattcttggataggatgacaccacattttaaagatgttagttctctctaaatcagttaatatcatataatatcaataaaataccaatgtaccttaaaaaatgaatttagacaagttgatactaaagttcacatggaaaaacaaacatgtatgaatagccagaagcacaatagggaaaaattataagggggactagccttgccagttgttaaaacatactataaagtcntctataattaaaacagtgtggtaccatgcacaagtagaccagtggaacagaaaacccagaaagacccaagtacatatggatcctggattgaatacccgaccagaaaaacaacattactgggaaaacagctacaaatcaaataaaagatgtagntaatagggattgtgcaatggtaaattnctagnttcaataatttgaccattgggatggaggntaacattagaagaagctgagagaaagcacacacggaaatctatt

SEQ ID NO: 316173 - DNA, 1217 bp, Homo Sapiens
taattattttttttatataaacagtttatttactctaaacagcaacacagacaaaacgccatataaacacaaaggaagtggcgcagaaccgagatgctgccctggggtctgaggctcaaaagcagcacagcccaggttctagaaggttctagagaggagcggcaggagggagggtgcatttccatacagccagctgaggccaagtgcagctctgcacggtgagaagcatgcctgcatcccagagcgaggaactcgcccctgggggacttacccaagtataaaagtttataattttacagcagttgaaatactgacatcaatattaaaataaaagcgagttttacataacaatcaaaaatacaaaagaccgaaggaagagaccctgtatggaaacgggcaattcagcgaatcgagaccgcacacccgcggcggcaatggaagatggcgcccgcccaacccccccaggtgactagtcattgtatggagcaactttagatttgcaaaaatgttgtaaacaagttcttgccaaaccaatcccttccttctgacgatgccacaaggtcgctgcttatgagggcgcaaacttcttggcttgtgctcggacccttttctcgtactccactctgttttggcagtaaatcgtgtaggcctctgcttgagctgggtcttggatatttggttcatttagaagttcctgtattcctaataggatctgtttgattgtgatggctggcctccagtccttgtcctcctctaagatggacaggcacactgtccccgaagggtacacattcgggtgaaataatggtggttcgaatttacattttggtggcgaagatggataatcatctttgaaaagcatccgtagtttaaacaagcctccttcccacggagtccctttctttcctggaatggcgcactcccagttcatgaggttcatcgtgccatcgggattttttgttgggacagccacgaaaccaaatgggtggtctttcctccatgctttcctctcctgggcgagtctgctgagggcgatccccgacatgttcaaagtccacttgttttggttttaaggcaccgaaaacaagcccgctcgccggcccccacccccgcgagccagcgatgttgcaatccaagactctccccccgcggcccatcctatccgtccgcggcctcgtgccgaattcgccacccaggcctcgttacttaatcattat

SEQ ID NO: 316174 - DNA, 797 bp, Homo Sapiens
  misc_feature (52)..(52): n is a, c, g, or t
  misc_feature (68)..(68): n is a, c, g, or t
aattcgaagaccccgcaccaccccgccggccggccaatggaaagatgggcgncccgccccaacccccnccccagggtgactagtccattgtatggagccaacttttagatttgcaaaaatgttgtaaacaagttcttgccaaacccaatcccttcccttctgacgatgccacaaggtcgctgcttatgagggcgcaaacttcttggcttgtgctcggacccttttctcgtactccactctgttttggcagtaaatcgtgtaggcctctgcttgagctgggtcttggatatttggttcatttagaagttcctgtattcctaataggatctgtttgattgtgatggctggcctccagtccttgtcctcctctaagatggacaggcacactgtccccgaagggtacacattcgggtgaaataatggtggttcgaatttacattttggtggcgaagatggataatcatctttgaaaagcatccgtagtttaaacaagcctccttcccacggagtccctttctttcctggaatggcgcactcccagttcatgaggttcatcgtgccatcgggattttttgttgggacagccacgaaaccaaatgggtggtctttcctccatgctttcctctcctgggcgagtctgctgagggcgatccccgacatgttcaaagtccctcgggcggccgcagccccggcgagcgtagcggacaggtggaggaccgagcggggcggcggcggcggcgcttccctttgtctcgggacttccctccggagcccgctccgcgcgcagccagagcccc

SEQ ID NO: 316175 - DNA, 1364 bp, Homo Sapiens
  misc_feature (535)..(535): n is a, c, g, or t
  misc_feature (902)..(902): n is a, c, g, or t
gagactcgagcccagcccagcagccccctggaagggcaggccgaaggcgtagagaccactggttcgcaggaggccccaggaggtggacacagcccctcccctcctgaccagcagcccatctacttcagagagttccgcttcacgtctgaggtccccatctggctggattaccatggcaagcacgtcacgatggaccaggtgggcacttttgctggcctcctcatcggcctggcccaactcaactgctccgagctgaagctaaagcggctctgttgcaggcacgggctcctgggtgtggacaaggtgctgggctatgccctcaacgagtggctgcaggacatccgcaagaaccagctgcccggcctgctgggaggcgtgggccccatgcactcggttgtccagctcttccaagggttccgggacctgctgtggctgcccattgagcagtacaggaaggatggccgcctcatgcgggggctgcagcgaggggctgcctcctttggctcatccacagcctctgccgccctggaatcancaaccggttggtacaggctatccaggccacagctgagaccgtgtatgacatcctgtccccggcagcccccgtctcccgctccctgcaggataagcggctctgcgcggagggctgcgcaggggccagcagcctgccgacctgcgggggagggtgtggccagggcctacgacacagtgcgagagggcatcttggatacagctcagaccatctgtgacgtggcatcgcggggccatgagcagaaggggctgacgggcgcccgtgggggggccgtgatccgccagctgcccccgaactgtggtgaagccgctcatcctggccacggaggccacgtccagcctgctcgggggcatgcgcaaccagattgtcnccgacgcccacaaggaccacgccctcaagtggcgctcggacagtgcccaagactgagcctggggtgcccggcacccagagggtgctgcccaccatgctcctgagcctcccaagagctgcagcccacgggcccggcccggcctggcccttcaggggatggccactgtgaaggacgccttcccagcctgcccgttgccaatctgctgtgagaggggggcctccctgccttggggccttagccctggctctgcacttttcctccggggagaaaggacactgcccctcccccgacctgggcccacactgctgccttctcccaggacggaggcttttggaccctcggaccccatcccactcagccaagtgtctttctgtgtctggggggaggaggggatgatatccgtgtggttcgatgtattatttttaagctccgtgagtgcgtgggtcagtgtctgcatgaagt

SEQ ID NO: 316176 - DNA, 653 bp, Homo Sapiens
  misc_feature (182)..(182): n is a, c, g, or t
ggcgttgacttcagttcatctttattgatgctcactcgcttgttctgaaaacacacacacaagctggtgagcctgacagggcagatatccctgctgtcggggtgttctggtgtcggccacttcttgcaaagcactttccctatttctacttaagttgggagtcaattcagctgtcaaacttncacagtcacacagtgtacagaatctgaaaagcattgagactagtgtttgtccatgtcttacggaaatcagtttcatttctttagtcacatttcaatttacggtttgcagagcattggagccattacgcacattttctggagacgtttagtgctttctctacacagaaccacaagaaaccacatgcctgatactagggagggtcaagatttcttgcagccaaaattccaaaataatatcaaagcagaggaggatatttgtctcctaaaaaatccacaaattcccagaaccgatggtaccttcttccaggtctcaaccacgcttgctgcgtacgccaagatgtggatgtatttgtgcttgtggtcctggttgatccgagcccctggtttaaagagtgactgcatgcacaggtccaggaagtctggaacgcgtataagttcaaccggaggagggtccatgcttgtgaacatcct

SEQ ID NO: 316177 - DNA, 1249 bp, Homo Sapiens
cattaatccaacccagcagaaaggctttttaaaaatttacttattacttgttcttagcaaattaagacaattacaataaaacatcagctaactgggttcttgtgagaaaactgaggtcagcttggaaaggagttccccgagtggagttcccagcggcccgcggctgacggccagatctgtcctgaggggtcgtgggagcccagcgcctgccttgagggaaatgaacactgaaaacaggatttgggagcagtattggattgacagcagagaagggactgtttgtaagggcagtttctcactgaagctgctaccattttcctttgtaaagaagtcatccacctcctcccagcggtgcccattttcaagacgctgcccgagcctcttaaaacagcttcttgaaagggtttttccacaacgggttctggaatgttctgcttcagctctggaggatgctctaaattagttcaccatgatgaagttagatttgcagtgagctataaactccgtcacagggtcatgctcgccttccgttttgatggtacctgcgatgctgtcattctccaggatggggaggaaaagttgcacgaagtcagaggtataaggaggagcaatgacgtccagcacctcagtgacaaaatagcgaatgagtgaaatgtcagtgtccagcttctccagacactttcggatgtaactgacaacaggaagtacataacctcgactcagcaggtgaaccatcctgtccagcagtgtcttcttcaactcaagctgctccatcacgtccagctgggagtgctcagtctcaaaaagcttaacaagcagctgcaggacctgggggtgcaggagctggtggcaggtgctgatctcatccagcaacgccaggtggacaggggtatggtcagtctgcagctgaaagtaccttggttctgatacagtccaatccacccacttcagcacacccattgctaccactggaaacctaatacactgataaagtgtgctcaattctgccactagttcagaggcccctttgttctcgttgcaacacaaattgtgaacggtttcgacagcttttgacgttgacttcagctcatctttattgatgctcactcgcttgttcttcttccaggtctcaaaccacgcttgctgcgtacgccaagatgtggatgtatttgtgcttgtggtcctggttgatccgagcccctggtttaaagagcctcgtgccgattcgccacccggggtggtagggcgc

SEQ ID NO: 316178 - DNA, 488 bp, Homo Sapiens
  misc_feature (257)..(257): n is a, c, g, or t
  misc_feature (405)..(405): n is a, c, g, or t
  misc_feature (438)..(438): n is a, c, g, or t
tttttgggaatgagaaaataactttatttcattgtggggagcggtattggattgacagcagagaagggactgtttgtaagggcagtttctcactgaagctgctaccattttcctttgtaaagaagtcatccacctcctcccagcggtgcccattttcaagacgctgcccgagcctcttaaaacagcttcttgaaagggtttttccacaacgggttctggaatgttctgcttcagctctggaggatgctctaaattangttcaccatgatgaagttagatttgcagtgagctataaactccgtcacagggtcatgctcgccttcccgttttggatgggtacctgcgatgctggtcattctccaggattggggaaggaaaagtttgcacgaattccagaggtataanggaggagcaatgacgtccagcacctcagtgacnaaatagcgatgagtgaaatgtcagtgtccagcttctcccagaactttcgg

SEQ ID NO: 316179 - DNA, 1060 bp, Homo Sapiens
  misc_feature (37)..(37): n is a, c, g, or t
  misc_feature (45)..(56): n is a, c, g, or t
tgacctatctggtcgtgtctgttctttctgcacgtcnacaggcannnnnnnnnnnnccaaaagtgttcttttatttctagtaacatatattgtataaatactctattttatatgcacttccacaaaagcgatataatttaaaagtttttttcattagaaataaatgtataaaaataaatatgttattataggcatttattactaactatagtccttcttggaaggaacacccaaaccaatacttataaagtacatgtaatttatagtaacatattttactatatacatatggaaaaaatcatattctcacagaagagctgaacagacattcaccaggatacgactgttggaccagctgctggagatggacctgctacccctcagcagcctccccaccacaagacaagtgatctcaatgtccccaaacctgtgggaccctgttctacacacctcatttttgttccggcgtttcatcctccttgtgtgattgtactgattttcatgagacacaagttacttctttacatccatattcccaaagcagggttacatggtaggaaagaaaggaagttggaggtactaagctcattgtgtctcctctagcttttaccagcatctaatgcttcactgctttttttccattgtagactttaatgcacttgaataaatacatggagttgttttttcctcaaaatgaattacacaaataaagactgagatggtccaaaaaaggaaagaggaagccatttgcgttatttcacgttgctgagcctttctctcatgttgaacaatctgaagttttaattctcggtagaaataatgtataaacattctctgaaaccatagcagccataaacagtgctggtcaaagatcctatttgtactcctttctccccccattgttagtgaggtaaagtaaaacaggtcttagtaaaatctcacttttctcctacttttcatttcccaacccccatgatactaagtatttgataagtaccaggacacaggggttgtaatagttctaactttttttgacattgctttgttttttctaaacttg

SEQ ID NO: 316180 - DNA, 1318 bp, Homo Sapiens
  misc_feature (1307)..(1307): n is a, c, g, or t
ggaacagagggatccaagaacaatgacagcttcctgccatcaaaagctgctgatggcacatatattctttatggtgactacactttgtccaccttagagcaagacattatgtacaaaggtgttgtcttgaggtacagcggctcctctgcggcattggaaagaattcgcagctttagcctgctccaaagagcccttgaccatccaggttcttactgtggcaatgcccttcgacctaaaattaaatacacctacttcgtaaagaagaagaaggaatctttcaatgctatccccactttttcagcatgggtcattgaagagtggggcgaatgttctaagtcatgtgaattgggttggcagagaagactggtagaatgccgagacattaatggacagcctgcttccgagtgtgcaaaggaagtgaagccagccagcaccagaccttgtgcagaccatccctgcccccagtggcagctgggggagtggtcatcatgttctaagacctgtgggaagggttacaaaaaaagaagcttgaagtgtctgtcccatgatggaggggtgttatctcatgagagctgtgatcctttaaagaaacctaaacatttcatagacttttgcacaatggcagaatgcagttaagtggtttaagtggtgttagctttgagggcaaggcaaagtgaggaagggctggtgcagggaaagcaagaaggctggagggatccagcgtatcttgccagtaaccagtgaggtgtatcagtaaggtgggattatgggggtagatagaaaaggagttgaatcatcagagtaaactgccagttgcaaatttgataggatagttagtgaggattattaacctctgagcagtgatatagcataataaagccccgggcattattattattatttcttttgttacatctattacaagtttagaaaaaacaaagcaattgtcaaaaaaagttagaactattacaacccctgtttcctggtacttatcaaatacttagtatcatgggggttgggaaatgaaaagtaggagaaaagtgagattttactaagacctgttttactttacctcactaacaatgggggggagaaaggagtacaaataggatctttgaccagcactgtttatggctgctatggtttcagagaatgtttatacattatttctaccgaggaattaaaacttcagattgttcaacattgagaggaaagggcttcagcaacgtggaaattaacggcaaatgggcttccctcctttccctttttttgggaccatcttcagttcttttattttgtgttaattncttttgagggt

SEQ ID NO: 316181 - DNA, 808 bp, Homo Sapiens
  misc_feature (22)..(22): n is a, c, g, or t
  misc_feature (54)..(85): n is a, c, g, or t
  misc_feature (546)..(546): n is a, c, g, or t
  misc_feature (584)..(584): n is a, c, g, or t
ggaatgcagcagacagtttttncttttattggtcaagaattctttacaaaaccnnnnnnnnnnnnnnnnnnnnnnnnnnnnnnnntgatgcctgccctgctgtggtcactctggccctggtgtctcctgggatcaggccctcctggcctctcccaggggaaaccatcctgcagcccctctgggtcagcagtgaaggagcagagagagggaacctccttttctgcttctctgctcaggaacagaggtctgtgccccacctgtcggggagcaagtggaggtgacagagaaacagcatcctcctctttccaccgttgagcccccggagttgccagcctaggcccccaatttcacagctgccaaggcctgggggtcatctgctgattgaaccttccccatccccattttgcagattgaaacacagcggtccaaagacagcggacgagttacccaaggtcacggtgctggagcacagtggcagagcagggacggggactctgctcttcttgacctccaggaggtggcaagtgtgaaacctggaccctgctncaccccccaggggaggggcagagccaggccttgggcangaagggagtgcccagagatgatccctggagcccgtgcccaggaaagcaatccccagggcagctgagtgagcacaaggtctgccaggatataaaagtttccagggtgcccttttgactgccctgtggctgctcaggaatcggcccggttggcaaggtactgtagatgtccacatgcggaggaaggtaggcagttgcccgaaaacggcaaaaacaatctgtccacg

SEQ ID NO: 316182 - DNA, 907 bp, Homo Sapiens
  misc_feature (572)..(605): n is a, c, g, or t
atgcaaggatggcctaacacactgcctaaatcaaaattgctattcacttcaagggtattcattacctgactagcttttttgggtgcatatgaacataatgtaaattttatggctgatcaaatgtcattactatgaagatactccctatgagctcacagagtcaggacatcaacaatatttaaactctcacttgtaacatgacacaatggtaggcacttgggaaatatatttggtcctattttccctacctgagcattgtaaagagcagactattccaacagtgtgatgactctgcagtgaagaaaagaattcactcttccggcacactgattgagcatgtacctgggcattgtatttctctaaggagaattgtcattaaaatgatcctgcagaattcaaatagcattcaagaggtctccactaaattgggacatgttggctttctgaagttattatagatttccttatttcaggaatcttcaaggcaaaatatacaatgtgatacatgaaatcatgaaatagccagtaacatacatgatgaaattatcttactagaaagttacacatcaggnnnnnnnnnnnnnnnnnnnnnnnnnnnnnnnnnngcaatgggtacaaaactactctatctcaagttggagtgaaaaaatacagcgttagcatttatccatgatagaaaggcagcacagaaaagaactcaagacagaatgaacctgtaaccaggctccttaattagaacataattctaagactaaagtctgggtagaatctgtacacagaatagtttttatagccattgactgcatgtgttaaaaagtactttgtaacaagagtacaataaatgggaaaaatcttagaggtcatctgaaagcctgatcccaatgctgtcctttgtgggtgagtagtg

SEQ ID NO: 316183 - DNA, 884 bp, Homo Sapiens
  misc_feature (71)..(76): n is a, c, g, or t
  misc_feature (78)..(79): n is a, c, g, or t
  misc_feature (83)..(85): n is a, c, g, or t
  misc_feature (87)..(88): n is a, c, g, or t
  misc_feature (92)..(95): n is a, c, g, or t
  misc_feature (760)..(820): n is a, c, g, or t
gggccccgcggcgccaaaaagaattggtctaggaaagctttcttgaggggccgagggcggccggacagggnnnnnntnnttcnnncnntttnnnnccaaggtagaatattatttattattataaactcaggatgcaagatatattccaggatataggaagaatggcaaatatcggcttttctcagatatctttgaaattattttaatgcgtacaaaacatgtagaagatgcctcttgagatggctttaaaatgcccagtattaaagggggacaggtgcatggcagctaaatgcctcaacaagatcatgcagagaggggcatccattccctcccaagatcctaagaaaaggtaccttgctccagcctggctgaaagtggagcaaagatatgcattttctattggatttagggtcctagggtctgtcctggggcacagacacctaagaccatggcaccttctccccagaggacagcctgagggtaaagtataaattgctctgggaaggagagagggagagaacagctgtgtctgcagttcattgttgtgtgagtttaagcagctctcttcctctctctgtgcttcactagaggtataaatactggtacattgggtcctttccagagtttggtttcaatgagtagggacacaagagaaaaggaatagatgagtgcccaatttttgttcagggacatggttaggctccctcagtgatgggactttcccacctagctgttcctgggagctgtacctagaaaaacnnnnnnnnnnnnnnnnnnnnnnnnnnnnnnnnnnnnnnnnnnnnnnnnnnnnnnnnnnnnntatgtgagtctgtatgtgcccatgtgcccacaagctttggggcagcgggcttttatatggtccc

SEQ ID NO: 316184 - DNA, 790 bp, Homo Sapiens
  misc_feature (86)..(86): n is a, c, g, or t
  misc_feature (484)..(484): n is a, c, g, or t
  misc_feature (645)..(653): n is a, c, g, or t
aaaaattacttcattaccatttttactaaatttattccctctataaaaatgagaacttcttgtgattttattggcgctttacgcanaatttagtttagagattaagttaaatatggaatcatcatagcgtgcattttaaagccagtttaaaaattctcctttattgtgaccatcatgctgttcctcccctctgtcatcatggccaatgcagagatgattgtcaaagaaaagcaaatgggtttgtgaggaattctaatcttctagtctcctggggcccactgtggtggcttagatccaccccactgctgctgagatcagagtctattttggagctctaggcaggttctagagccttctctaattaccccaactgggaattaaacaaactttacagcgttaatggaactgtgtgggccacatctgcctctgccagacacgttacagccctgctgcatgctgttagggttaccacacactaattatncctttgaggttttctggcacattcttttttccaaacagggcagccctgccaacttgtcaacagggcatttactctaaaaatgaagttactttattttttgcctgagaatgcccacagtcactttctcacagacaggaatggaagcaggattgtatctttcnnnnnnnnnctgcctctttaaattaaggaagagggggaaaaaaacctctgtaagctaatatataccttctctggtggttgtagtgctgcaagtttttctgatttagaccagagaagaagaaatgtcaccattctcagctggtaggg

SEQ ID NO: 316185 - DNA, 548 bp, Homo Sapiens
  misc_feature (496)..(496): n is a, c, g, or t
gaggaatacagataaatttattagttaaatactgattttccagccatttcaccttaagacaatgttaacaggtttgtgggttagggagggtatacgagggggcctttggaagaaaacaatgtaaatgatgattaaaacagaatcttggttcaaaggtattctctgctacagccagtaggattttggagtgaggggtctgggcgtgtggggaggcgtagtaatgccacagtcagctacagctctgctgagaaagaggaaggagtctccttgagctccagcatcaggggcagaaacagcaatgtgcagaggagaacgcggcagatcccggagcagctcagagtcggaggctccctccaggcccccctgccgtgtcttagcagtcgtcttctttccaggaattctgttgtgttgtgtttgtttgcttcgaattcgtgttgcagaatctctgggtctttggctcctggacaaaagacctctttgccgggcgaggctgcangtccttgaggactctggctgccatctgaccaagggctaggaggagcagacaa

SEQ ID NO: 316186 - DNA, 545 bp, Homo Sapiens
  misc_feature (67)..(67): n is a, c, g, or t
aggatgtagggaaagggtggaattttagaggctgaagggtcttaacgtaataacttgaactttaagnaactgcttaaaatcttgaatgaacccaggtttctgggttaaaataaaaacacattatttcccctcccgtttgtcagtgactgagatttcatgaagatgatcgaatcagtttagccaaagtgaaaattctccctttttgtccttaaattgcagtgtagttgcaatccccatacactcaacttcacttaatcattagcttgagatgtctgctattacaatcaaaatcctaccaatcatccgagccccaactcgtatgctacattcttttgaaatgattccctctgtcaaaaacctttatgttgtatttctgtggggctttatagttctgttacagacatcatgttatgatttataagttattaatgtacatgaagaatcagaatcaaattttagggacttaaatatatgtaattcaatcccttatccaatgtccaagcccttgacaagaagttatttatctcctaataaatattaaatta

SEQ ID NO: 316187 - DNA, 672 bp, Homo Sapiens
  misc_feature (584)..(584): n is a, c, g, or t
gggttaaaggggccatcatacatttattaccaacaaccctctcaactccaaaattgggcacagggattaaaaataaaaattcattgcactacttagtaaagcattactagtaactttcataaaaaatgtacaaactttgttaaaaatttatcaagccttcaaatgatttggttacagatatttataatacatacatttaaaactatatgttaactgatacaatggaatatgatttgagaaaatgactcagcaaatgattccaaaaaacacccctgtgagctttcacaatctgaaacggcaaaatgaggtaaccaaatgtaccaacagggggacaaacaaacagctttctaatgaaaaggcccaaagataatctgtgaaaaatattctcacaagtgagtcggtagatctcatttcaaaattattctaagaggccccaatttaaaaattttaacccaaaacattttagaaaggttttaaaacttaattgccttcaccatttcaaaatttgttcaaaaatttaggcgcggaaatcctatttgggaacttggtccctggggggcctattttttttaggggtcggggtntaaaaaacacccaagatggcacttttgcgcaaaaaacaacccggaacccccacaaaaccccccgttgggtttaaatggtaaacccctt

SEQ ID NO: 316188 - DNA, 684 bp, Homo Sapiens
  misc_feature (113)..(113): n is a, c, g, or t
  misc_feature (121)..(121): n is a, c, g, or t
tagaaccatttcctttcattttaacaacaactcataatttatctttccaatagtctccaatgacataaacttcttcctagtagtaactcattacaattcttaaatagataatnaatgtacnttcagtaattaagtgctaggtacatgaagtcaaagtattgttcactatgaaatatccaatcactttggcaatatagtcaaatattaattgtccaggtgttaatccaccagttgatagatttttcatggggtgtgcttcctcccttccacttagtgaccactcttcagctatgagcacatctgccaaagcagggtaggcaggtacgtcaaaaatgctttccaactcaaatcaggcaatttctattagtcaagttgctgttagcaacatttgccaggatttcctgtgtagatcattgaaactggttggcttgcaaagctattaaatgtctctgtggattataggtacatggacttggtgtcatcctccataaccatgctgcctgccagatgcaaaggccttaacatataacagacggtttcacatacattatcacatttgagctttacagtaatttgttatatactcattcaatttccatattcaaaattgtttctctacaaccagagtgactcaatttctgctaacattaacatatcattttctttccgggcccaaacagaccg

SEQ ID NO: 316189 - DNA, 545 bp, Homo Sapiens
  misc_feature (128)..(128): n is a, c, g, or t
  misc_feature (146)..(146): n is a, c, g, or t
  misc_feature (210)..(210): n is a, c, g, or t
atgtccccttttggtaccctcaatgaaataatccagccaggtccaccggttaaggttttttgggaaacagaaaattccagggttgttaagagcatccttaaattatttctcattgtaaagaagacccnctttaacatgaagtgccntatagtctccacttattccaggtgggcaaagctagtttcactgaaaatggatcaagcgtgtatnacggtgctcatgtagtgcagtctgacattatcaccatcacttgtggtatattctagcaaaaaatgtctaacctgaatttagtccattggattccctatttacaaggaaatatgggggataaaagattaagttagacacaaaattgtggaatactttatgagaatactgacttcacatcttctacagtcattgggtagctgggagagaaaggtgggacagactgctctggattactgagattggccgtaaacaccatgcatggaacttggtttgatcttgggtaagaaggagaaaagctagaaaagatgttaggagccaggaacagtggcacacac

SEQ ID NO: 316190 - DNA, 682 bp, Homo Sapiens
  misc_feature (573)..(618): n is a, c, g, or t
tttccatgatttcaattgtcattgttttattttttccaaaataacataaaaatactttccagttgaattacataaaaaatttaatccataaaaccattatacagtcatgcattggataacaatgggaatgtgttctgatgaatgcatccttgggcgattttgtcactgggtgaacatcataagagtgtacttacacaaacctagatggtatagcctattgttcctaggctataagcttgtaaagggtgttactgtactgagtactataggcaactgtaacacaggggtacttgtgtatctaaacaaatctaaacatagaaaaggtgcaataaaaatatggtataatggattaaaaaaatggtacacctgtacagggcacttaccataaatggagcttgcgggactggaagctgctctgggtgagtgactgagtgagtgagtggtgagagaatgtgaaggcctaattgctgaacactacttgagacatgataaataatgtacacctaggctacagtaaattcataaaaataattttatttctccaatataaattgaccttagcttcctagagcnnnnnnnnnnnnnnnnnnnnnnnnnnnnnnnnnnnnnnnnnnnnnngtgatgacatttagcttaagcacttattggttaactgcccaaaaattttttttatttccttatt

SEQ ID NO: 316191 - DNA, 871 bp, Homo Sapiens
  misc_feature (14)..(14): n is a, c, g, or t
  misc_feature (721)..(721): n is a, c, g, or t
ttttaaattttttnttggtacagattttaaattacaagcttgatttgataccctcaaatacagttcttaaggaagattagttacaaatagttgtcagtactttcaaatgacagaaaaaattacattttagtaaaactggatgaatttttcatgtgtgaaataacaatcctttcaccaccaggtgggaattactccagttcatgcaatagataactatgacatttttaaaaactgccctaatttttctagttgcgatttcatgcctattgtaagtcaaaacatcgttatgttcccgagctcacctcaccctccctgggaagtggcgaggacacccatggtttctctgaagacaccactgggcccctgcttagcaagctattgtctcagtgctttcctcttgctgcgaaggtccccaggagatgttgggttcagaggaagtggctctggtttcctatgggcaaatactacaccagaggttacacaggatagagacccaagaggtgaacaggagggaagttttaacttattttgacataaaattggcaaaaataagcatcaccaaatttctgtaactagaaattgaggataaaacagaggaggtttgtctatgatgaggatgtccatcacagtagaacttgtgaatagcttttatagaaccacttaatatagtaccgtcaacattttacatattttacatacaatttgaatacaaattcttaanatttataatagaacattaaaataatcttctaataaaatcagccttaagtataaggaatctaaatttcattatcttgtacatttctaaataaatatctttgatctataacccttgaaaatattacagtttatggtgacatgatagagacaa

SEQ ID NO: 316192 - DNA, 1337 bp, Homo Sapiens
  misc_feature (1313)..(1313): n is a, c, g, or t
  misc_feature (1319)..(1319): n is a, c, g, or t
ttttttttctggagatcacaggctttattcctacaaccacagggcttgagcctgactggggcaagaaaacagagtttcatctgagaatgtctcttatgggctgggttctgttcaggggagggtgggaacagaggacaaggaagacaagctcctctggccctaggaacaaaacacatttactccttcaaagaagcagatgatctgaataccctctggagactgaatctgcccatacagcccctggagccaatgggcagacagtactggcatctggcacaaaagggaattcagacccagaacagaagcagcaaaatattttaaaaatagtaaattgttcctggactcacaaatcattgtttttaagggcaagtgcatgcccaatataagtactggggcttcctaagagagctgacataggattacacagctgcctccctgcttcagtggaggccctcacatcccctttgaacacttaacttgggtaggagaggtagccttttcgtctctgttctgggttctgagagctctgcagtctggaggcacagcagactgaggctgacctgggccctgtcctttctgcctggcagtcacaggatgttgtctctacctggagacaaagctggtttccggtcccagacagctggtcaagggagggtagtgtgggtcaacactggccctcagcactcctgagggggcaaagaggatgggcaaagtttggagcaggaggaatcctaggtaaaggtcaggatcatgttcactggatggtcaggcagcggtggctgaagaggtgactgatgacagatgggtcagccacagtagacatgtccccgaggtcatggtcattctgagcaatcttccgaagcactcgcctcatgattttccctgagcgggttttaggcaagccaggtgcattctggatgtagtctggtgtggcaatggggccaatcttttctctaatctgcttcttgagctcctcggtgagcttggggctgaaggtgtggccatcacacaaggtgacaaagcagtagaggcattcacccttcacaggatgagggtggcccaccacagctgcctctgcaacagcctcatgttccacaagtgctgactccacctctgctgtactcagcaggtgtccagatacattgagcatgtcatcaatcctgccagtgatccagtaatagccatcctggtcccgctggcagccatctcctgtaacatagtatccaggaaacttcttaaagtaggttgtctcaaagcgttcgtggttcccatagactgtgcgcatgatccctggccagggctgcttgaacacnagatanccttcagcttcaccttcc

SEQ ID NO: 316193 - DNA, 461 bp, Homo Sapiens
ttcttgagatcacaggctttattcctacaaccacagggcttgagcctgactggggcaagaaaacagagtttcatctgagaatgtctcttatgggctgggttctgttcaggggagggtgggaacagaggacaaggaagacaagctcctctggccctaggaacaaaacacatttactccttcaaagaagcagatgatctgaataccctctggagactgaatctggcacaaaagggaattcagacccagaacagaagcagcaaaatattttaaaaatagtaaattgttcctgggctcacaaatcattgtttttaagggcaagtgcatgcccaatataagtactggggcttcctaagagagctgacataggattacacagctgcctccctgcttcagtggaggccctcacatcccctttgaacacttaacttgggtaggagaggtagccttttcgtctctgttct

SEQ ID NO: 316194 - DNA, 695 bp, Homo Sapiens
  misc_feature (572)..(572): n is a, c, g, or t
  misc_feature (580)..(580): n is a, c, g, or t
atttttataacattttatataactcataaaacagtgtttgtataaaaattcacacaaagttgctagagagcatacaatttccaaaaatgtcctgggtttttgttacattcagtttcctaaggatgcactccaatctatggtaaaatgcagacatgatgcgagatttcattatctttggtaaaactattctcattattttgtctcctcacagtattaagtctgatatccactttgtgcagggtctgctattactaggatgtcagaaaaacattaaggctggatctacgagaggcaagtatttcccaacagcagtaatagccccttggccctcacccccacttcatgtatctatacagtcgatctacacagccaggcggggtgcaagctcacgacctccactcgggagtctcgagatcccctcttgactgggaaagaagcaagcatttgtggggaacgttggaaacggaggccatcttttaatgaacccagtgggcatgctgtggtgtggtcagaccagcaacttttaccaattaaatagcccatctattcaccactaagtagaacccattggntggttggntgaagaatgctgctgatggggtccccactcccacaaacataaagaaaggaggtttggagcccacacccaagggaggggcccgctacgcaaattgaaccgaccgaattttttcctg

SEQ ID NO: 316195 - DNA, 754 bp, Homo Sapiens
  misc_feature (28)..(28): n is a, c, g, or t
ctaccaagaagtttcttgggttattggnaacttgtttaaaatctgaattgagagagaagagcaagacagacccaacggtacaagctcctatcagaaaggcaagcgcccgtgaaattgtaggtagcctgttactggctcagagaacaagcaggcctacttatgttaaaccaaaacccagatgaaaaatgaaagcgccctctctgctgcataaacattttatgtagcttctatcatcattccttttgggaacattctttagtagcacaaactggtaatctcccacttgtcttctccaaatatgacagcaagatttgattgttttcagtattatgtagtaaacatgtttcagaagcatgattttaaaattggcctcctcaaagtttagcgtcttgcataatgatgatgtacgtctctggcatattacattttcctttgtatatcattattgaggttatttgtctgatatgacccaaagaggcaaaactcagcacagtcctttctgcagtattctaaaggtcatcaaacttcagcctagtgagtctgcttgtttgatttggccggacattttaagcatggcagaagtggtacaagaaatcatggtattaagttgaaaccacaccccttagaaaaatccttctattaattcaaataatttgacgatgcttatgcggtttctgaaaagaagcagtcgttgctgaaattgatgtgttgaaataggaagcacagatttgtattgtctttggcttccggcttt

SEQ ID NO: 316196 - DNA, 372 bp, Homo Sapiens
accatgttcatccggcttgaactcctcacctcgtgatccgtacgtatcatgctcttcttttcttttaattacaggcggctaagatttttcccattcctcacttgaaacctcagtccatttttaatcacttttgggctgaaacaaacgcatgtctttttgccttcaatctgtttgaatgatcccactgctggctgaacccaaaccttatgaagtgctgttcctgatgttcacccaagaaaggtaaaagacgtgggcaaatgctttagctgaagaacacagaggcaagtaaactgccacctgatttacataatgttttgctgtaatgtctgtgcaaaacctggcacagggcctgcagcttgggaggcctttaat

SEQ ID NO: 316197 - DNA, 810 bp, Homo Sapiens
  misc_feature (41)..(41): n is a, c, g, or t
  misc_feature (52)..(52): n is a, c, g, or t
aaggcctttgtcaactgggcaaaaatcccccctaaggcctnaattcgcctgncagtgggaaaagtcctaacaccctactgaaactttttttgaatggaaccctcgggaggccagaaaaatgcgaattccagatcctaagcccctggtttaaggagcatttgggaggcagtgggccctctgaggagaacttcttctatcctgaaagctgtcctctccccactcccgacacactgggagcatcttgtggaaaagtgggtggcagacttttcctaaggaaaattcaattctctggaaacatggaggaaagagaatgtatgggaggtatcctaagagaagtaagaatctgaagattaggatatggagcacgaggattcgagggaatctttgtactgtcaactttttggtacttcgagttttctgccgacatcggtcacacacctgaataaatggcaaacagtgttaggttaatatgctcctaacctcaattggcttttctgacaccccgatccacatacaaatttagtatgctcttcattacagctggatcctcttggcttctcccctttgctctaggagtactagaacagatctgagactccaacacaaacccagatacataaatattattccccatatgaagacatcatgcaatcccttttatccacatggagtccccccaggtctcccacccttactgtatcccttgtgaacctccacatactggggcattctccgactctagctcttcttccttagtgaaaaggttgaaacaatcccgcagagacacgtagcccccagcaaatcctttct

SEQ ID NO: 316198 - DNA, 1203 bp, Homo Sapiens
ttttcttaataaatttattcacaaaaagtgatattgcagagggtctgggggctgtacatgggcaggggcttggtgagctttgtacatggggctgggagacaagggagcctccaggtggaagggtattttttaataaacaaaataatggagttacaaccaccgcttcccccttccccgattaaaaagacacaaagatagacgtttttgaggtaaacggggagcctgggggcttaagggtgtttaaagggcttcacaggtgccaaagcttaaaggtgtcacaggcaccggggtggctcctgcatcagttggtaaaacagcacgtagccctcgctggatgccacctggttttcactgacaggggagacacgagagtcattgtagacatgccaaccagtctggcaccggcacagggctgtgtagtggccatagtggacgctgcctgagtggttgcaaagggcatacagctggtatacaggacttccggctttgtcactggcaaagtcccctaggctcagtcgctgcagtggaaagtctacacctactgaactttttttgatggagcctcgggaggcagaaaatcgagttcagatggagcacgaggattcgagggaatctttgtactgtcaactttttggtacttcgagttttctgccgacatcggtcacacactggggcattctccgactctagctcttcttccttagtgaaaaggttgaaacaatcccgcagagacaccttgcccccagcaaatcctttcttggggatgggcagggacaggtcacaaaaacctcgaaggtcgtggagcgatacccacaggcctggcacttgagacaacttttcaactggcccacaaacaggtccacaatcttgctgtcctctcgctccaggtaacgtttccacattaggttggctcggtcatcatcacttaactcaggttcttctagcagagcccctcctcggcggggtggagagggaactggaccattggcaagtatcggtggagcccggcggcctcggcggttgatttcaaggtgtagccgctccatgaggagcttcaggaactcttgggcatcctgctggctgtatccagagaaggagggaacatatttctggaagacagctcgcgacgcgtggtcgacgatatcccagattccgaccgtaccagcctgcttatagccgagtgttatatcccattttggcgct

SEQ ID NO: 316199 - DNA, 630 bp, Homo Sapiens
ttaaaaatccattacatttattaataatatatcttagattctcatcctgttcttttaaatggcgcccactggtctcatacagaggagctgtgtgactttctggaattatagaaatatccgcatccagccatgtgctgagcagaccaatgtaaaatgttcagcaggttttccaatgtctcttggatatatttaatcatctctgcagaagaactcaaaatctcagagcagctccactccagatccagggcaggaggcagcctccagggagggaggctgcgtttacgagaatctgccttttgtgtgtgcctggctgggaccagcctctgggaaagagaagcaccaagatgtgaacagggctgtgggccgatggctttagcagccacataatccctcctttgatgtccagggtcagttcgagcctggtcccccaggcttggaggagacgaatgaaagaatcttgctgtggtctttccttgttaaaataacatttcggccaccacctgggctgaggacctatccatttgctccttgggcccgttgaagcacctaccggccagcttgttctgtctggcgtcctcacttaccataagctccccggaaaggtacccacccatggccttgcaggcacaa

SEQ ID NO: 316200 - DNA, 1367 bp, Homo Sapiens
  misc_feature (686)..(686): n is a, c, g, or t
tccattacatttattaataatatatcttagattctcatcctgttcttttaaatggcgcccactggtctcatacagaggagctgtgtgactttctggaattatagaaatatccgcatccagccatgtgctgagcagaccaatgtaaaatgttcagcaggttttccaatgtctcttggatatatttaatcatctctgcagaagacctcaaattctcagagcagctccactccagatccagggcaggaggcagcctccagggagggagtctgcgtattacgagaatctgccttttgtgtgtgcctggctgggaccagctctctgggaaagagaagcaccaagatgtgacacagggctgtgggccgatggctttagcagccacataatccctcctttgatgtccagggtcagttcgagcctggtcccccaggctaggaggagacgaatgaaagaatcttgctgtggtctttcctgcaaaggaaacagcagtaacattgattacccagtcaccgggaggaattcttgtgagcgcgcacctctgtgtgcctttgctctccactttcaagagaggactttaatcacaggacaaggagaagacccaggcccatttcagtctccgggacgggtcacagcgagccgtgtgacgctggcctgctcacaacgtggccatgacaccagcaggctgtacntcaggctttgcgtacacaatagctgcttaggagtacccatttcagacacgcacccactctaactattctcagaaagtctcagctcacctcgccgtgggagagctgggccctgcctcccttacacatgggggcaaacggccccctgctggcactgtgtcctgccttcaggcctgggagctcttaactttctgccaacggggttttccaagtctacaaaccccccacgccgcaggagcacatgcagatgactggcaccgtgctgccgccgggccggggtggacgcagggtggacgcgggcctgtctgccgcgagtgggagccccagctctcctgagcctcgggcacttacagacacgaaggctttttgctcaagggctcgactcctgttcctgctgaactgagccagtgtgtaaaatgagaactgatatcagctcagtaggcaccggagggcgggtccaatcgacagcccggagaagcagcgcctcagctgggagctccgtgggcaccgtctgctggcgcaggagacgcgaaggcctggactgcaaatacaagagagagttcaccgcgcccagaacaacaggagctcctccgaaagccccgccccgccccgctcacagccatgagctaccacatgatttcacacgacttagatgatgcatttggttttagttttttgtaagaa

SEQ ID NO: 316201 - DNA, 464 bp, Homo Sapiens
  misc_feature (78)..(78): n is a, c, g, or t
  misc_feature (347)..(347): n is a, c, g, or t
attcaatctccgggaagggttccacaacgaacccttttgaacgctggccttgcttcacacgttgcccatgaacaccangcaggctgtaactcaggctttgcgtacacaatagctgctaggagtaccccatttcagacacgcacccactctaactattctcagaaagtctcagctcacctcgccgtgggagagctggccctgcctcccttacaacaatgggcaaacggccccctgctggcactgtgtcctgccttcaggcctgggagctcttaactttctgccaacagggttttccaagtctacaaacccccacgccgcaggagcacatgcagatgactggcaccgtntgccgccgggccggggtggacgcagggtggacgcgggcctgtctgccgcgagtgggagccccagctctcctgacctcgggcacttacagacacgaaggctttttgctcaagggctcg

SEQ ID NO: 316202 - DNA, 1122 bp, Homo Sapiens
  misc_feature (951)..(986): n is a, c, g, or t
gggaaggtttcaaattttgcccattcttttttgggctttaattttgggggggtgccatgtataatatagggaccagcttgagggggaagggtttatgtccatgcaatgaaagcaaaaacaagacgacctcctctgacagaggagccttagtgttgtagaagagaagcaaggctgaggtcactggaaaggcttagaatgaagctgctcttgcctgttcctcctgagaacccagagcagcagtggtccagggcacaaagcataatgatctctcatgaggattcctatctgaacacatcagaagtcctatgaacatagataggtctgttttagaatataaatggtagtgacttcctgcgctcctgaggcggggcaaaataatccataaacacataatccttctgggcaataatgtttctggactcgccagcagagggctctaggaacagaggtgggggtagagtcggggagaaaaaaggttctagagatggcatgtcttcaggggaactttgagaaatgtcctttgttccagcattcctaagtgacggcaccggtgagcctggtctgaattgtcatcagtgtcactgccgaggccaagggccaagggtcaagatgccactttaggttgagaagaaagtgcatctcaaggccagtgagggctgcaaaatggtttgcggctggcccagaaggagcaaatgtagaaaggctcccctttttagatgccgatggtctgtagaactcgcctctcattgtcattaaggtggcctgaaaacattatgtagcagggctgctgagcaaactggcagaggaaatctgtgagatatgcctgcagatcaatctgatagagaggatccttcagggcatcagggtcatcttcctcatcatcctcgtagtaatcctcctcatatttacttgtagcaagaatgtcagataaaagttggccagctaaaccannnnnnnnnnnnnnnnnnnnnnnnnnnnnnnnnnnncacatatcattggagtcatcttgactccactctgcaggagtggcctggcgagcggcattagcctccatgacgttggagagctcgttgatgatcagctttaggatcttgaccagcaaaggaatgtttgtccagcgcc

SEQ ID NO: 316203 - DNA, 681 bp, Homo Sapiens
  misc_feature (452)..(452): n is a, c, g, or t
cgttttataatgtttgttttatactgcggcatgttttcggttccagttgttcacatgcagtctgctgtgagactccaagatcaagggtgctgggaggccttaggcaagtcaccttacttatctaagactgtttccccacctggaagatgccctacaagcctcctgtggctgtgtttagaaagcatgcccggcctttcttgacagccagccaccccagatgatggcagggcaaggaagactgttaggagtcagagtgctcccctcaggtggaaggaaactgggccaactctactttgtaagccatagggtgccaggtagcccggccaccctgagcctgtgcctccactgcccccgcgtggccagtcaggtgcagctgctcccagagatggagggtgaaggacagacgttggagcaccagagggacagagctgatggcctgacgctctcttcangagggcacccccaaagggcctctgcttccttattgcccctgagctttataacagaagggcgttttccacacaaggagctgatcttaactaatggctttaaaactaaaactggctccacgaaaaaggagaccgcactatgttttggggccacgccacaattattttggacacccgtggtccccggtcaggttccacggtacaccacctgcttttgaggacaagaagacaa

SEQ ID NO: 316204 - DNA, 708 bp, Homo Sapiens
  misc_feature (533)..(533): n is a, c, g, or t
tatgattagatatttattgagcaccaggagagagtcagaacattagacttatagtggaggagcagaactgaaccctggcctgtgaaataacaatttcaattaaaagctgtctggccctgaagaaagagaaatgatcctggatatagctggtcctctgagctggcagagctgagcctccctcgggtcttctggtggcaagatgccagagttgaatagtgtctgtaggcatgatgaccaagtcctagtgctatgggcatcttccctctggtatttagagaggagtaccagaagcccccggcagagatactagaagggcccagatgcaaatccagcagctggcttacttgagatgcatctggcaaattccagggcaaagccagtttgactcccagcggctccagtgttggtaggcggacactttgggctatccaggaagagaggtagcagggaagaaggccatgcagaaggctaggactgactaggcaattatgtcagcagatcctggcctaatggggcatttttaacagacactnttgccctcagtggccagaaactcataatccagaggaactgtgtccagcaagcgggcgtagttgccattgatctgggcgatgatctggtactcctggtctatgcagggcttaataaagtagttgttgcccagaatcttggaaggtggcttatcactgtagccagccctttgcgaaa

SEQ ID NO: 316205 - DNA, 702 bp, Homo Sapiens
  misc_feature (548)..(548): n is a, c, g, or t
tattgttaaagctttattaaatccaagaaaatataccagtatagatcctcttgtagttcataagcatgatgattggcttctcccagtcacatgagatatgcctccttcaaacctgtttaccccatgagcacattatccatctaacatgaaatgaaaaaatttttacattacatataccagtctataccgggataacatcaaatctagcaggaggatcatttcatgtggatcctccctggggccggggggtggttctcagtaaaacctttttaaatatatggtaggcacatgcaattgggagatgtccttcaattctgtttaaaagttgaagtcattggtatgtggcatatgataaagttacaaatttcttttcagcctcgaaaatacaaaacatttgatactgaatacagatgctgattaaagtctgggtagtgttagacacattttatgtcatttttttaaacgcaagatatatatctctacacaatcgaacgttaaagactattttctgtgaaagttgatctaactaccaatttacagacactgantgtaatatacaccgcttactatgtgggagctaacagtgtacaggtgcaggatgccccggtgaagtaatggttcctaggtgctaaaggatccaacattggaggtttcccaaaatacaacaggcatttttgggctctggctttaaagacctgctaa

SEQ ID NO: 316206 - DNA, 1450 bp, Homo Sapiens
  misc_feature (61)..(82): n is a, c, g, or t
aagataaacatttgtgtatagctgttccctaaaattaacattaacatatttcataattttnnnnnnnnnnnnnnnnnnnnnnctcgagcttatgggctttctgtgtcatgtctttgtttagcatgcctgatgttccttctttattaaatgacggagtcaggatgttgtgattacagttgaaggcgacgtgttagaaaggacaggtgcatgaaggcagagagtgcccacagactcggctctcgaaccggggcaggagggaacaaggtgagctgtgcagcccacaggacgggcgggctgggtggacacagccccccaagttggccaagctgagtctctgggcgagtggctcccaggagaggcctggctgagcaggcagagcaccctgggaccccagggcagaaggacccctgccctccagtccccaagacccaggcccgtctccactcatacacgccacctacatgtgacgtcagccctgaaaaggtaacaggaaagttcagaacaaaaacaaaaccccaaaagtaaaaaggctacgtgtagcagagtaataccggaaacgttatatacacaggcggtgatggccccctcggaagtgtccgggtcacttagggggcactgcagaggtccctgtggccagagctgcggggcctcagtacacggagctgttccggatgccacagcacagcaccatgctcaggatcatctcgaagatcatgatcacagcgaccacgatggcagcaatgccgatgaggtacagcttcccggagaagaggtcatcgatcttctggtggcagtcctccttgaagaggttgctgatgatgttgctgcccgagggacacaaattgttcttgagcactgaggtggtcaaagcagtcagtgtgctggagccacagcagtcaagcgtctcgtggaaggtcttcaccacagccttggcgttgttggcgtcatcatccaccacggcctgctgtagggcctggtcatagaactgcttcacatccttggcgatctggtccttgttgacaaagccccagatgccggcggccacctcacaggcaaacaggatgaccaggcaggtgaagaacgtccccagcaggcactgggattcctggatggccccgtagcagcccaggaagccaacgaacatcatgacagcgcccacagcgatgaggatgtagatgcctacatagaaggtgttgggcgcgggcttgtctcccagctccagatacaggaggttggtggtctgcgggtcatggcggagccacagggccacacccaggatcacgcctccagccagctgggaaccacgtgggaccaggtccggagaaccatcctctagccagctcgtcttggcaagtgtcgtccaacccagtgctagctgatagaaccttctgcaacgatgggaatgttctgtacctggataaccccctggcacagatgactactgggtact

SEQ ID NO: 316207 - DNA, 431 bp, Homo Sapiens
cccaaaccatcattcattcatttatttgattagttgaaaacacttccgactaaggaagcagagagcccacaatcctgtgggaaaacaggcctgggaactaatatctcaggggtagtgagggtcgggcccaaatcctcaaaggttccctgcccctgaaattgcacctttgacagctgctgaattccaagcacagcggtaagtgctttacatggggtaaccctaaaaaacacactgggcctcagacactcccgtacacacacccaacctctaccctgtggatgtcctagataagggttttctcttcacaaaggtaaatcaactctttgcctccttagggagggaaggaataaaggcattatttttgagacttttctgcagtccattctgcaggtatcagtagtgggtaatccctccaacgtccaggactccaa

SEQ ID NO: 316208 - DNA, 1643 bp, Homo Sapiens
cagtccggttgattcccctctttaatatggtattttgcactatatacattaatgaaaatttgaaacaaacaaaaagaactttagtcaaactccccttcctcctccagctttattggaatagtttaaaattacatttctattttctaggacttcagttgctctttccatctgacttttaaaaactgattacagcaaatgaaacacagttgtctaagtgatatagtatacaaaaataacatcttgatttctgtgaaaatgcatttctctgcaattcctgaatagctccaaattatgctaactctgagcattgatgtttactctgggttttagatttagtctttgaaaataatgtgttctaaacctttgccatcaccatctatgtgtccaacatcaacactgtgatgaagttgttcctgtttaggcttttattccgatttctctcgaacagccattaacacgcatgtttatctttttgtttactcccactcaactgtatgttctatgtagggcctgatacagatgttacttgatgttatttaatagctactgaggtcagacaatccaagaccatcattatactaaaattaaagttatttatggaagttcatagacacttccagaattggttttacctcctacatgggaacatgttcaaggaacccaggacgggcttactggtctgactcaactcttcccattcatcaatccctattcaccagtggcacggaaagggggttctttaacaaagcattatacataacacctctaccaaactaaacataaactttttttgtagttaaatgcagaaagtcggtttttttccacccctttcctccttttacacggcaagtaaagctcactggcctgggagttgcctctatctgccaacctttggccagtgaagaggattcagagaaaataatacaaccatcaatcagaaaaaggaggggcgacaaaggaaaataattaggctgtagcctcaattgtgcattcccgtgcaaggtgccctgactcgccacagcggtaacagttgacttcacttgtcttgctgcagttgatggctacatgaccagtttcaccacacctatagcacttcactttggtgcagtctttttgaatgtgtccgaattctccacaagaatagcatttctgctcatctgcatggtcgcagtcacgagccagatggcctggtttgccacagttgtagcagcattgctctcgctctctcttgggctccttgcagtccttggcaatgtggccacctctaccgcagttatagcaggcttcatcctcctgaagatcacaatccttggcaagatgaccagactcaccacagcgataacaaatatctggaagagacgaggaaacaaactggaaacctctgccacggcttctcattccacgaccacggcctccaccagtaggacattcccgggcccagtggccagatcgtccacacttgaagcactcattgctgctcatggctgcagtcagatcttccgcgtcggagcgggcccgcagcggcggagactcggacgcaggcctggggaagacggctcgcaaggtagaggctgtttattttgagggtccttgcctgcgccacacgcgggtctgcacacggccccacatacgccgctgcgcac

SEQ ID NO: 316209 - DNA, 1333 bp, Homo Sapiens
  misc_feature (39)..(39): n is a, c, g, or t
cgataccagatgtttactggatgttatttaatagctaanggaggtcaagacaatcccaggcccatcattattctaaaattaaaagttattatgaagttcatagacacttccagaatggttttcctcctaccatgggaacatttcaaaggaccccaggacgggctactggtctgactcaactcttcccatcatccaatccctattcaccagtggcacggaaaggggttctttaacaaagcattatacataacacctctaccaaactaaacataaactttttttgtagttaaatgcagaaagtcggtttttttccacccctttcctccttttacacggcaagtaaagctcactggcctgggagttgcctctatctgccaacctttggccagtgaagaggattcagagaaaataatacaaccatcaatcagaaaaaggaggggcgacaaaggaaaataattaggctgtagcctcaattgtgcattcccgtgcaaggtgccctgactcgccacagcggtaacagttgacttcacttgtcttgctgcagttgatggctacatgaccagtttcaccacacctatagcacttcactttggtgcagtctttttgaatgtgtccgaattctccacaagaatagcatttctgctcatctgcatggtcgcagtcacgagccagatggcctggtttgccacagttgtagcagcattgctctcgctctctcttgggctccttgcagtccttggcaatgtggccacctctaccgcagttatagcaggcatcctcctgaagatcacaatccttggcaagatgaccagactcaccacagcgataacaaatgtctggaagagacgaggaaacaaactggaaacctctatccgaggtaaaaccacctctgccacggcttctcattccacgaccacggcctccaccagtaggacattcccgggcccagtggccagatcgtccacacttgaagcactcattgctgctcatggctgcagtcagatcttccgcgtcggagcgggcccgcagcggcggagactcggacgcaggcctggggaagacgtctatgcgaggtagaggctgtttcttttgcgggttctcattccacgaccacggcctccaccagtaggacattcccgggcccagtggccagatcgtccacacttgaagcactcattgctgctcatggctgcagtcagatcttccgcgtcggagcgggcccgcagcggcggagactcggacgcaggcctggggaagacggctcgcaaggtagaggctgtttattttgagggtccttgcctgcgccacacgcgggtctgcacacggccccccc

SEQ ID NO: 316210 - DNA, 854 bp, Homo Sapiens
  misc_feature (78)..(78): n is a, c, g, or t
  misc_feature (195)..(195): n is a, c, g, or t
ttttccaaccccttttcctccttttaccaggggccaagtaaagctcaactgggcctggggaatttgcctttattctgnccaaccctttggcccagtgaagaggatttcagagaaaattaattgcacccatcattcagaaaaagggaggggcggacaagggaaaataattagggctgtagcctcaattgtgcattnccgtgcaaggtgacctgactcgccacagcggtaacagttgacttcacttgtcttgctgccagttgatgggctacatgaccagtttcaccacacctatagcacttcactttggtgcagtctttttgaatgtgtccgaattctccacaagaatagcatttctgctcatctgcatggtcgcagtcacgagccagatggcctggtttgccacagttgtagcagcattgctctcgctctctcttgggctccttgcagtccttggcaatgtggccacctctaccgcagttatagcaggcatcctcctgaagatcacaatccttggcaagatgaccagactcaccacagcgataacaaatatctggaagagacgaggaaacaaactggaaacctctatccgaggtaaaaccacctctgccacggcttctcattccacgaccacggcctccaccagtaggacattcccgggcccagtggccagatcgtccacacttgaagcactcattgctgctcatggctgcagtcagatcttccgcgtcggagcgggcccgcagcggcggagactcggacgcaggcctggggaagacggctcgcaaggtagaggctgtttattttgagggtccttgcctgcgccacacgcgggtctgcacacggccccacatccc

SEQ ID NO: 316211 - DNA, 192 bp, Homo Sapiens
aataaaacacaatcttaaaaaagttaatgatgattggtcttggtggttcctagtggtaagtcctgtcttattttttcacatagtataaattatatttttatgcaggattgcattaaaatccagtagttcttaatgttaccaaataaccatataactcccaaatgcagcaaaggtgaacaatcttcatagtgc

SEQ ID NO: 316212 - DNA, 467 bp, Homo Sapiens
  misc_feature (378)..(378): n is a, c, g, or t
gcaatcataaaataactttattggtcaggttagccaccactcatgcttttcctgtaataaggatcctttataaaggcatgatggtgttcacatgcagatgctttctgaagagccctggggcagggggcagccttgcctctcacatcggagctcctttgttgaaatgagctggtttggcttttgtggattccaggtctggagccaagaacgtagtccaaagatcccctcttcccttctcagggaaggtgcttcaaagcatacacagtatcagggatgtgatggcatctgggcagagcctatacttgggctaactctcctccaacagtccttgcccctgactgcccagatggctttgtcccaaccttgcccaaagagggntgggttaagccccaggcaacattaccttttgaaatgggaagaattaagtgctccccagccaaactataaagcaaaagccaccttcacta

SEQ ID NO: 316213 - DNA, 518 bp, Homo Sapiens
ttttcggctattcaaaaagactttgattttattttgtgatctgtgtcaaactgcctcattctcagtgcaggtgatccctcctccccagaaacaagaactgacaggtagggtctttgtgaagtcatggcttccacaaggccccagggaaaccccacacagttctgagagttgatgggaatcccagcaaagatggggtgggtgggagacagtgacaagaaggggtggtggtcaccagtcaagaggctgggggttggaaaaccctgtctttggccttgctcagctttggggctgccatgttcatgatggagatgggggactgaaatttcccctgacctggaagtaccccttcggccaggcatggttttgattctctgctaagggctcagctgagagaggagcaggaaaatgtcatggggctggcttcttcacaaggacattgctgctgattgctccggattccaacaccaacgggcaaattgctccagcaggccccccattggaaccggaaggactggggg

SEQ ID NO: 316214 - DNA, 1593 bp, Homo Sapiens
ttttcattaaaataattcttttaattattgatgctttgaataagaagtccattttactaaatttagtataaattatttttcttaaacagaacctgtttgctggatctcagttaagttcactttgcagttttcagacacaatgactcatattcaacttttctctttaaggattcagtggcttgattcctgacatttcctctttaagaggaatcttatgtcatcttctgaaatcatgtatatgggtaataatattagtgtcttctcttctgaagatgtgattcttttaatgccatgttctcttccctctggtgacctgacttagattgtagcagcactagaagctattaagagatttggggcagttgaggaagccttaggtaattgttaagagtagaagtatttttaaaaagctgtggagagtggtttgggaggggattttgtccctggctgaagctggtccatgcctgggtaaactttacttataaaagaataccaggaacacacaaaatattcttctcctctttcttttgcaatccagttttggagccaaaaaataatctgtgtgcacatgtgttttgataatactgtctcgacttaggtggggaaattaaattcaggagttttatgactttcttttgttctgagtatcactttagagtataaaaagtttttcaaaagttctttatcagaaatagtttcaccctatgttgaattaacaatacccaggattgtgagacataaatcaacatgagtaggaagctccatctgagtttcatcattgtttgtctatcttggcaagatttattcagaagcaccataatgggggccaatccttttgcacccaggctcaggcagctcaggaggcagctgtggtgagtgatgcactctaccaagcacagtggcttctaggaataaagaacacatactcaactaccttcaaatgccaatgggcaatttaaaactggtactcattcctcttcaagagcaccactggaaacatctttggaattgatgggacaaaacttatttgattatagtgaaggatatttctctacgaaaatggcttcaaaataggaaaaaagtagctaccacatcttccaggaaatccaataacaggtcaactctattggtaaacaagcaagtaaacaagcaagcaaacaaaccagcatgtgacagaaaactggctaatattctgggacgctttccagagaaacattaagccttttaagtgtgtatgagccactttaagaaacttcataagtgttgctaaattcaccacagtctgcttcactgaactgtgacattataatattcttctggtgtcacgatttttggtccaccaaagtagtccaggacccagatattggttatattcaacttagcaaagaaccaattatggctggaaggccaggttttcatctcagggtgtcgaatgaataacgaatgctttgcaatatccatttctgtttcattcaccttggtcacagttcctgacagcattatgtgaacacaaaggggactttgtggatcaaatccatgtttcttgcagaagttggtctgtgccaaagtcatggtcagtgtagcatatggacc

SEQ ID NO: 316215 - DNA, 1236 bp, Homo Sapiens
  misc_feature (710)..(718): n is a, c, g, or t
aagatggataagcaaaagcatttattggtcaatgtgatatgttacggttgaggcatacccaggataagaactaagcaatactaaatcagttattacccgatatttactcttggctcaccatgtacatcaaacatttataaatctcaatgtgcttctggaatttgaataaggattttggagcacctcaaggccaatctgtgattaatgagaactgttgagttacttggcttggtgtcacagttgcccactggttgaaaaggctggctttagtatctctactatagccagggattcccactttatcatggctgtctctctctgaggcacttcttgccatttaattgtaggattttaatggggaagattttactcccgagtagcggaaagatctgctcgaggcctgggtgctttggtgtcggagatccgagagtcggagatcggagagtcggacacaggacagtcggacaccggacagtcaaacaccggagagttagactgggcttctcggaggattggccaccaaagcctgtttattagcagctgccatttgttgaaagaaatttggattattttagaaacaaatttggaaagaaaaagaatggcgtccgtttcagctctaactgaggaactggattctataaccagtgagctacatgcagtagaaattcaaattcaagaacttacggaaaggcaacaagagcttattcagnnnnnnnnngtcctgacaaagaaaataaagcagtgtttagaggattctgatgccggggcaagcaatgaatatgattcttcacctgccgcttggaataaagaagattttccatggtctggtaaagttaaagatattctgcaaaatgtctttaaactggaaaagttcagaccacttcagcttgaaactattaacgtaacaatggctggaaaggaggtatttcttgttatgcctacaggaggtggaaagagcttatgttaccagttaccagcattatgttcagatggttttacactcgtcatttgcccattgatctctcttatggaagaccaattaatggttttaaaaaccatttaggaatttcagcaaccatgttaaatgcttctagttcctaggagcatggttaaatgggttcatgctgaaatgggaaataaaaactccgagtttaagctgatttatgtgactccagagaaattggcaaaaagccaaatgtttatgttcagacttgaggaagcctatgaaagccagga

SEQ ID NO: 316216 - DNA, 1014 bp, Homo Sapiens
  misc_feature (285)..(285): n is a, c, g, or t
  misc_feature (291)..(291): n is a, c, g, or t
  misc_feature (496)..(504): n is a, c, g, or t
aaacccattttgctcttggccaatttttcttggagctcccataaaaccggctttaatcgcggggtttttattttcccatttccggctggaaccccatttaccatgctccctagaactaggagcatttaaccatgggtgcggaaattcctaattgttttaaaacccattaattggtcttccataagagagatcaatgggcaaatgacgagggtaaaaccatctgaaccataatgcgggtaactggtaacataagctctttccccctcctgtagggcataacaaganataccntcctttccagcccattgttacgttaatagtttcaagctgaagtggtctgaacttttccagtttaaagacattttgcagaatatctttaactttaccagaccatggaaaatcttctttattccaagcggcaggtgaagaatcatattcattgcttgccccggcatcagaatcctctaaacactgctttattttctttgtcaggacnnnnnnnnnctgaataagctcttgttgcctttccgtaagttcttgaatttgaatttctactgcatgtagctccactggttatagaatccagttcctcagttagaggtgaaacggacgccattctttttctttccaaatttgtttctaaaataatccaaatttctttcaacaaatggcagctgctaataaacaggctttggtggccaatcctcctgcatggaaaagaatggggagatcagaagaccggtcagcaggcgaacgtgcccctaaaggcccgagttctcagagcagggcagtgattaactttccggtttctcctccgccaatgtgtgggcgaaaggaagtgatccgctacagaccggcctcgcccgagaagcccagtctaactctccggtgtttgactgtccggtgtccgactgtcctgtgtccgactctccgatctccgactctcggatctccgacaccaaagcacccaggcctcgagcagatctttccctcgtgccgaattcgccacccagc

SEQ ID NO: 316217 - DNA, 931 bp, Homo Sapiens
ctagtcagcatgcatgactttaatcttattagcataatgtcaatagataaagctgttaccaagctccgtgaaatgcagcaaaaattagaaaagggggaatctgcttcccctgcaaacgaagaaataactgaagaacaaaatgggacagcaaatggatttagtgaaattaactcaaaagagaaagctttggaaacagatagtgtctcaggggtttcaaaacagagcaaaaaacaaagggaattcatcctctaagaattatgtttttgtttttaatcatatgttccaaacaggcactgttagatgaagtaaatgatttcaacaaggatatttgtatcagggttctacttcacttcattatgcagcattacatgtatatcacttttattgatgtcattaaaacattctgtactttaagcatgaaaagcaatatttcaaagtatttttaaactcaacaaatgtcatcaaatatgttgaattgatctagaaattatttcatatataaatcagaatttttttgcatttatgaacggctgtttttctactttgtaattgtgagacattttcttggggagggaaaattggaatggttcccttttttagaaattgaagtggtcttcatatgtcaactacagaaaaggaaaaaaatagaaattgaaggatttttatgaaattatattgcattactattgtgcagtcaaacttgtgatccgttgttttgaaatcattgtgtcaattcggaatgaacacaattataatgtaattttacattacataagttccttttacaattaaaaaatagcacttcttcatcttatgcctgtttgagaagatattaaattttcacattgttgacagtgaaatgctatgtggtttataagattacagaccattgttttcatgtggataattttagtgcattgttcaccggtat

SEQ ID NO: 316218 - DNA, 780 bp, Homo Sapiens
tataatctacctctgcctctctcttataaggacacttgtgacgggacttagggcccatccagattacccatgataattcccttattccaagattcttaattatatctgaaaggaccttttttccaaataaggtactatcacaggttccagggagtaggatattgaatatcttttttggggagggggcaccatgcagctcactacactattcattgcacacaaatgaatttttcactttttaagatgcattcttgttgctcccaccagatcgaagtttgtgtctaacagctattgtctgcacaggcgtgctgcatgctctgttgttaaatggatggacacggctattctaaattttgtttgatacttttgctactatgggcaattaacttgaaaaaaataatcgatcccaactctgtgctctgatgtacctcttctgccccttttatgacacctttgaccaaatgccttctatggttgacagtgcaggcacaaaactacctgtgatacataaagggtccttacaagcttattatacataccgagattcccttacctaaagggagaggtgaacgcaaagactgcttcgaatggctattgcaggcgattgagttcataccatgccaacctgaagaagtattacacttgcagtagaactgtggagtggtgctgtcattgcaccatgggataaacacctatctctatggacgaccttgaatgacttgcaatatatatgtaaagactactctcttatgctatataaggaagatatacctttaaaca

SEQ ID NO: 316219 - DNA, 692 bp, Homo Sapiens
  misc_feature (574)..(574): n is a, c, g, or t
  misc_feature (662)..(662): n is a, c, g, or t
atcttccactcatgcatttttatttccaattaaagcaaggactgtgctgtgctcagataataatagtttgtaagtaaaagtttttagttttcagtgttcaggttatagaatataactgaccataaaaattacctgcaggtattttctttttatgaacttgtttttaaattaccaagtaattactggtgtcattttgttttatgacagacacacgtatctaacaaacaaacaaacagtgaccttctccatgggtcaaggacttccttacaatttctcctgagttaacttttgtgaaaataatacctaaggttttctggcttattgaggaaatttcctaacaaacaaacaaacaaacaaacagaagagaagatcattaaccactgtatactttgtgtatataataggtcagtgtaaagaaatatgatttgaggtggtgcatgcaagtaactagggtttattctatataatgaatatttatagatctgtaacatttgtttcaaaatgctgtttcatttttataaagtaccagtgtttagctgctttttatacattaaattagcaatttgaaaaactnccaatatctggagggtattttattttgcgtggttccgcatggaactcactagagatttaaaagtaggacttcaaacaacttggaatanttggactctttttaggcttaaggattttaa

SEQ ID NO: 316220 - DNA, 587 bp, Homo Sapiens
tttatgtctctgttattgttagttttaagccttaaggtagaaggcacatagaaataacatctcatctttctgctgaccattttagtgaggttgttccaaagacattcaggtctctacctccagccctgcaaaaatattggacctagcacagaggaatcaggaaaattaatttcagaaactccatttgatttttcttttgctgtgtctttttgagactgtaatatggtacactgtcctctaagggacatcctcattttatctcacctttttgggggtgagagctctagttcatttaactgtactctgcacaatagctaggatgactaagagaacattgcttcaagaaactggtggatttggatttccaaaatatgaaataaggaaaaaaatgtttttatttgtatgaattaaaagatccatgttgaacatttgcaaatatttattaataaacagatgtggtgataaacccaaaacaaatgacaggtgcttattttccactaaacacagacacatgaaatgaaagtttagctagccactatttgttgtaaattgaaaacgaagtgtgataaaataaatatgtagaaatc

SEQ ID NO: 316221 - DNA, 420 bp, Homo Sapiens
  misc_feature (21)..(21): n is a, c, g, or t
cccccgggtaggcccactggnctgacgaccttgaagtgcctcaagtagtcaagactggataagcccgtctcctgccttatcccgttagccgtggtgatttaagcagggaagctgtgagagcagtttgggtttcctagcatgaagacagagcccccaccctcagatgcacatgagctggcggggatgaaggatgctgtcttcgtactgggaaagggattttcagccctcagaatcgctccaccttgcagctctccccttctctgtattcctagaaactgacacatgctgaacatcacagcttatttcctcatttttataatgtcccttcacaaacccagtgttttaggagcatgagtgccgtgtgtgtgcgtcctgtcggagccctgtctcctctctctgtaataaactcatttctagcag

SEQ ID NO: 316222 - DNA, 1232 bp, Homo Sapiens
ggtgaaaaaatgttcttcctgatagataaaattaatgcctttaatcaggacatcactgctctcatgcaaggagaggaaactgtaggggaggaagacattcggctgtttaccagactccgacacgagttccacaaatggagtacaataattgaaaacaattttcaagaaggccataaaattttgagtagaaaaatccagaaatttgaaaatcagtatcgtggtagagagctgccaggctttgtgaattacaggacatttgagacaatcgtgaaacagcaaatcaaggcactggaagagccggctgtggatatgctacacaccgtgacggatatggtccggcttgctttcacagatgtttcgataaaaaattttgaagagttttttaacctccacagaaccgccaagtccaaaattgaagacattagagcagaacaagagagagaaggtgagaagctgatccgcctccacttccagatggaacagattgtctactgccaggaccaggtatacaggggtgcgttgcagaaggtcagagagaaggagctggaagaagaaaagaagaagaaatcctgggattttggggctttccagtccagctcggcaacagactcttccatggaggagatctttcagcacctgatggcctatcaccaggaggccagcaagcgcatctccagccacatccctttgatcatccagttcttcatgctccagacgtacggccagcagcttcagaaggccatgctgcagctcctgcaggacaaggacacctacagctggctcctgaaggagcggagcgacaccaagcgacaagcggaagttcctgaatgagcggcttgcacggctgacgcaggctcggcgccggcttgcccagttccccggttaaccacgctctgtccagccccgtagacgtgcacgcacactgtctgcccccgttcccgtttagccactggactgacgacttgagtgctcagtagtcagactgtctagtccgtctctgtttatccgttagccgtggtgatttagcaggaagctgtgagagcagtttggtttctagcatgatgccggagccccaccctcggatgcacatgtgctggcgggattgtaggttgctgtcttggtactgggaaagggattttcagccctcagaatcgctccaccttgtaggtctccccttctctgtattccttgaaactgacacatgctgaactacacagcgtatttcctcattt

SEQ ID NO: 316223 - DNA, 881 bp, Homo Sapiens
  misc_feature (634)..(652): n is a, c, g, or t
tgtttccttgttctgtttttatttaactccaaatagctaataacataaaaacattttaaaaaaatctccaatacccaactattacttttggttgacaacatttgattatttagttcttgcttgtttcccacatgtagtacagaatctatcataatattttaaaagtttgcagcaggcttaaaacctgaatatttagatcctaatcaaaaaccatgatgtagttattagttttgattttaaataccttgctcccacagaacttactaaaacgaataaccataaataggctagctattaattagatctcaatgaaatgcccacatacagcacatacatataggtagtatatatgcttttatcctttactactcaaaggatgatgtacagtggagttatatcataaacacatttaacttacattaactcaacaaatgaggtcagtgaaaaggaagccgtaagggaaataacatgaaatcctgtggcgatcccacctaaaatgaatgcacacccttgagtaaacccaggtgggtgctgtccatccgctgggtgggcgcttcactccttgtcagttcacatctgccactagcggggcaagcatcttgcgggctgattctagtgttaaaagttatgtgcnnnnnnnnnnnnnnnnnnnaacaaaatggcccctaaacaaacaccaacaacttcacttggtcttcaaacaaagaaacagtctttttttccaacataggaggaaaagctacttgttgtggatgtacaggtttccaacatggcacccttctaaagggctttcaaggatcatcctaatagcccattttacctatgtactgaccttggaagctaacccctgagtatgatgcaactccactctaatgtaaatg

SEQ ID NO: 316224 - DNA, 1026 bp, Homo Sapiens
tgctaccctgtagacgtttttatcaacggttgttaaacgttcagtattgtcacctttagacctttagcaaacaatttgagtgcctatgcataaaagtaagaatgtcttctgccgatttcagataagtagttaatctatcatgtgtcttaactgtcatgtaaagcagtgttcatcacatcaacgtctggtctaaccactcggtggagatttaggatgtcatattggtgatgcaagaagcattcgtttctctcaggatcatgatacgagcagcagacagccatatcaccagagatttcactaagaggtgcaactgtgcattatgtgtattcaagacggtgtatgaagtgatttgtcacattgtacagtggatctcttcagcaacacatgtttttgcagattcagcttatacatttcttcttattttacattattttttttgaaattgcaaagtgtttatttgagtaagagcaattgataaattataaaatatcagacggaaagatattgagtgcttcattgacagtgtaagaagcaagtatttatttgaaaaatgtagaaacaaagaaatcatttgattggtggtagcacaacataaggttgttggctacttctgtctgtttaccttgttggacagtttctatttatataaggttgttggctacttctgactggttgagcttcatttctcttttttcaatatgcagctacaagaaataatttaagttttgtttgtatttgcaaatcaagcgaggttgagatcacttatgagacctaactaattttgtctgctcagagattattgagacatgatctccattttaatttcctttaacaaattttctgtacttttactttccatccaaactgtaacttataaattattattgttgtacatatgtaggcccatgttgtgtatgctttgaagacctgtcctgcattcaaactcatttgtattatgttattattgaatttgccccatttattggaattataaactgcaatcccccaactacaagaggtatgagc

SEQ ID NO: 316225 - DNA, 1026 bp, Homo Sapiens
  misc_feature (171)..(179): n is a, c, g, or t
  misc_feature (306)..(322): n is a, c, g, or t
  misc_feature (331)..(358): n is a, c, g, or t
  misc_feature (363)..(449): n is a, c, g, or t
tttcttccaataaaaaaggccccgggcggggggggtaaattttgtatatatggagggctccccttggggcctccctcttgagatgaagattccccaataaaaacccctccaggaaaacccccacccgggaaattgtttttaaaaaccctttggggttccccccccgcgggnnnnnnnnnattggtggggaattcccaacgccctatttcttgggccccggtttttcttggggaaaccactttgggcccgtttttctttccttttgggggcccccgccccacaaggaatggttttaaaaattttttnnnnnnnnnnnnnnnnncgccaaagnnnnnnnnnnnnnnnnnnnnnnnnnnnnggggnnnnnnnnnnnnnnnnnnnnnnnnnnnnnnnnnnnnnnnnnnnnnnnnnnnnnnnnnnnnnnnnnnnnnnnnnnnnnnnnnnnnnnngtgctatgcaaggttttatttacaacttagatgactctatgattgctcagaatctgacacagactaataagtttcattgtctgaaaatactcataaaatacctcatctccaaaataattcaaatacataattaaatgaacgtttttaaaatgagagttttcagaaaggaaaattaaacacattttagtaaatatatgttttatttgtcaagagtaaatgtcagttttatttagaatattcaagtacaaaaaatgaaaatgtatatatctatgactgttaagaaatgttagaaatcattaaaatgttctgagaataccagtaaggcactgaatgcaaataccacctgaaatatgaattatgtgcatttttatatctttaatattcagatgttcatagttattttcttaaaaagtatttttaataaaatgattcaaccttattatttttaccctggaagacagagtttaaacaagtatgtaatgaaaagttttcctaatgaaagctgtgatacactcatgctcaaaggtactttatccttaggaaaaaatagcttatatatctggatgttttaactttt

SEQ ID NO: 316226 - DNA, 916 bp, Homo Sapiens
  misc_feature (466)..(474): n is a, c, g, or t
  misc_feature (479)..(479): n is a, c, g, or t
  misc_feature (483)..(483): n is a, c, g, or t
  misc_feature (896)..(896): n is a, c, g, or t
atttgtgcaataggaactttttgtttttgcaatgttgtataacttttattctttattattggtaacacgccctaactatcctgtgtgagaatgggaatttcaagtcccatcttgtaaattgtatatgttgtcatgcagggtttgggccaagaaagcatgcagaaaaaaatgccatgtgattgtaattatcctggattcagaataatactgtgatggggagccagatcggcagtggtggagagttctaatgttgactgtttgcaggccaaaagatgattgctttataattttaacaaatcattgtcttttagtaacatccttgtttagtgtcttctcaagctttctttactgaggaattcagcttgtgacacagatacatcccactagcttgtgaggtggaactagtaataaagaccttgaatttggattgaaaagtttcctatctttacattgttgaggaagtccnnnnnnnnnttttntttnttaattgctcaagaaatgattctctcacaggcttgggaaatcctgttagcatgcagaataatgtggtaactttgtcaatttcccattttatttttttaaataaatatatgatctaaaagccaactttttctcagttttactcagtggaaagataaactaagttttaatgttatttttttaaatttaagcaaaatttatttctgttctttaataaataagaaaatgtggtccactgcattgttgtgatgtgtcttgtgacatttctattttgtagaaactttaaaaagggagaactatgttcatttttcctgtcaatgggtttttttgtgttgtaggttgtcacctgtgtggattatcaatcatttaggaaatctcatacccttcccctaaatttcaggcagtgcccggggccnctccaaggggggcactttgg

SEQ ID NO: 316227 - DNA, 1431 bp, Homo Sapiens
  misc_feature (1331)..(1366): n is a, c, g, or t
gtggatcccccgggctgcaggaatttttttcattaaagatcataatgctatcatttattgaagaaagaaagcaaaaaaaactaacaattgtgatgggggaggagagacagcttggcaacattccttttaaagttaagttagcataaagaaaacaatatttagtaaatgaaatagattttcaaggtaggaaaagtagtactcaagaatgtatttttggatacaaaaattcagttacacaatcagtagcattcaaaattagttatgagtatttatacaattacaaaaatggattcatgttttaacaacgtattttaaaagctcaaacattttaaaacaggcacaatattctaaaggcatatgcattcaccatgggcttttgaatgtcctcacttccaacttcacaatcaaaatctacagaagcggcaaaagatcagagtttagagggctattttttttttcccttttcctttacttaaggttgcaaacacattgacagaggcaaaataaacacgtttcatagcagaaagaccaaaaaattgaatgtaaaccatagctctcccttgggagattacacaaatacaaggttcatctgtacttagaacaaggctcataacttcttgtagcatggacattcaacaggcacagagcaacaacattcacccaaataccagctgcaatttgtcctttaaggatgcctcacaaggatattatgtccaggtagctagtccatttatatcggggaccagttgtccttttgttgtttgtggctgtttattaaatgtagtggcacaactttgttgtgaatatgtaccatcatttgctacaatctagacagatcatcctgtctacaaaaaatcattttctacatttctaagaccattatcagtttatctgctcctgctagaaaaggacatactttttgtcaatttacattaacaaaggctctgctactccccatttactcgctgcaatgaaaactggtaagccaagggtaaagcttaagtatcagggactatgaatttagggtagaagtgaaaataaccaaagtggaactaaatcccctattcttgagtgcaactgagatcaagtaaacttcgctggactttcttcttaactataaaactattaaccagaaggtaaagtcacacaattgttacctcccaacaaactttgttaaaataaaaatttcccaaaaatttagatgtctaggttttgttatatcttaccaagagttacacagacataaatttgtatttaacttcagttaaacatctattcactttttaaaaatgctgtctgcaaataaactactggacatcttaagcttactnnnnnnnnnnnnnnnnnnnnnnnnnnnnnnnnnnnnctaggacaaaaatctagcaaatggtttcacatacctttaaacactgattcttaaaaatttatatg

SEQ ID NO: 316228 - DNA, 310 bp, Homo Sapiens
cagacttccttctcatccaggaaattccaaaatgtctttacatacatattcttatattgtgtaataaaagattctgaagtccattactggctagaataataactagaaattgcttaatattactatacattgcatttgaacttaatctccacagtaacaattaggtagtattacttggatttcatggatgaagaaaaccaagatacaaaaagttcacacagccagtaagcagatgagcctgacttcatagtcatacatagcctgaattgagtcccagcaggagcacatgggcatggacatctaccagacc

SEQ ID NO: 316229 - DNA, 1512 bp, Homo Sapiens
  misc_feature (320)..(344): n is a, c, g, or t
  misc_feature (1102)..(1152): n is a, c, g, or t
  misc_feature (1257)..(1291): n is a, c, g, or t
ctcgtgccgaattcggcacgagcttctggtgaggagagtaatcgtcatagacttccacctaattcctctacaaagccaccaaatgctgctaaacctacatctaccagtgagcttcaggtaccaataaactctcccagaaggaatatttcaccggagtccagtgacaattcacattaaacagtgctgcctgtgtcctgtggtctcaagaaatggtgaaatgcctgagaaatagactcttatgaaagttctttgtccttgaagtcaacatttacatcagtatttatttggggaaaatcttctggtgtttaattgtgataatnnnnnnnnnnnnnnnnnnnnnnnnntggtagcattttttctaacaagataaattctaaaaatgttttccctgatttcacaaacaaggatagtcttggtgaccttttatagagatcttctagtaatgtattttgatctcagatttctttttcaaagccatggttttacaaaaacagcattccttaaatatatttaaaaaacaatacaaggaatgcctaacatttcagctcatactttttaaagaagatatagtatgttgtattctcttcttagagctttcttaaagaatccacaatccaattaccccactgtcaattcatatttgaacttaccaaaacaaaggaggattacgtatatgttttttaaattcaaaaaagaatatgaaattatacctttagtatccctttgagacatatagtttaaagaaaactttttttaaaacaaaagtaggaatatatagtaagattgtagttacaatgagtatatgcacttttgatgctaggttttgcttttctccccccagtcatatctcatgatttccacagttgttgtattggtgtggagttttctgaattggctataagctgattacatattagaggtttatttttatgattctatataaacgtgcacgagtaatttaaaacctgcattgggattgattggaatattgtcctaaattaattaaatcttgcactgttttgaatgcatctgctatttatacatctgcaagtgggtatgtcataaggagtcagattatctttaatttaaaatgaatacttannnnnnnnnnnnnnnnnnnnnnnnnnnnnnnnnnnnnnnnnnnnnnnnnnncaagagttatagcaaattgatttctaatttttattgctattacaactgatgtaaatggtagtttcagtttttgtgagatttaaaaaaataaagcacttattctgnnnnnnnnnnnnnnnnnnnnnnnnnnnnnnnnnnngaatatagttgaaaagctgtaatattcagttttgctagtaaaagaccatttttttgtgtgaatgaagtttcaattataaacttacatccactttattgagcactacataatttacagatattttgttgtattggcaaaagcaagtggtttccatatgctaaattaattgtattttctttttgagcagaatggatatcttgttcttataaataagttttcaa

SEQ ID NO: 316230 - DNA, 584 bp, Homo Sapiens
ggagatgcagaatttggtatatttcaccccaggtatatttgggatagttggctcctcgctgggtcaggatggctgggtgccttctcccctggcatggttctcttctctgcagggcgaggggcagggagctagtagaacctcgcaatgacagccgcaatggcagacccaatggagcccaggatgaacttggtcaatccggagagtccagttgctcccagtgactgcagagtagccacaaggctgcccgaggcaactccacccccattggcaatggccgccgcggacatcatcttggctgctatggaggacgaggcgattcccgccgcagtgaagcccatggcactgagcaccatgggcacagccgccatggccacaactcctccaatcacaactgtagcaatcctggccaggggcaaaactacggcagagccagaggccaccctgaccactttggccacactggtcactgctgatgaggtgagagcagaggcctccatgcctgctcgggttaattccgtggcccaaagaaggagagttcctgagaatgtgaagctgacctcaccgtcttaagcttggatgttttt

SEQ ID NO: 316231 - DNA, 454 bp, Homo Sapiens
tacatctgcatgtgacctttattcctcatgtttctctgacttgagtgggggttttggaggttcaccttggggtacattttctcttgcctcatcttctttagcctcgggttcagctgggagagaagaagaaggtgaattccccaagcaggcccccaacactgacccaacagaggccaggaggatgttggatgatgtggagagtccagctgcccccacggactgcagagtagccaccaggctccccgcagaaacaccacccccgttggcaatggctgctgcggacatcatcttggctgctatggaggacgcggcgattcctgccccagtgaagcccatggcactgagcaccacgggcacagcccccactgccagggctcctcccactgcagcagcagctgcccgtttcatcatggtgaggccgtccgggtcccaacttggcccaggaaatgacccc

SEQ ID NO: 316232 - DNA, 940 bp, Homo Sapiens
  misc_feature (102)..(102): n is a, c, g, or t
  misc_feature (213)..(280): n is a, c, g, or t
gatcccagtaaggccccccggtgctccctttgtgatgggtcccgcccccccggtatcctccgggaattttttttgggggggaatccgaagccatagtcatgnccaggtttttcttgggaaacaggtatgggcccttttcactttcttttttgggcccgggcgccaaaagaaatggttttgaaagtttttttgagggccgaggcttctttctannnnnnnnnnnnnnnnnnnnnnnnnnnnnnnnnnnnnnnnnnnnnnnnnnnnnnnnnnnnnnnnnnnnaagagttgcaacaattcatctttatttcttattttcctctggagatgcagaatttggtatatttcaccccaggtatatttgggatagttggctcctcgctgggtcaggatggctgggtgccttctcccctggcatggttctcttctctgcagggcgaggggcagggagctagtagaacctcgcaatgacagccgcaatggcagacccaatggagcccaggatgaacttggtcaatccggagagtccagttgctcccagtgactgcagagtagccacaaggctgcccgaggcaactccacccccattggcaatggccgccgcggacatcatcttggctgctatggaggacgaggcgattcccgccgcagtgaagcccatggcactgagcaccatgggcacagccgccatggccacaactcctccaatcacaactgtagcaatcctggccaggggcaaaactacggcagagccagaggccaccctgaccactttggccacactggtcactgctgatgaggtgagagcagaggcctccatgcctgctcgggttaattccgtggcctagagagtaagagatcctcaacttcagccagacccaaagaaggagagttcctgagaatgtgaagctgacctcaccgtcttaagcttggatgtgttccc

SEQ ID NO: 316233 - DNA, 1529 bp, Homo Sapiens
  misc_feature (180)..(191): n is a, c, g, or t
  misc_feature (385)..(394): n is a, c, g, or t
atgggccgagggggtctcacccgggggcggtggggtaaccccgtggggggcggatgcacaagtttgccgtcctgagcgacaattgtggggaggggggtttacgcgatgttcagcgcgggaagagtgtcattaaggggatgtcgccaagccgcggggggtgtccaaaggagcgttggcacnnnnnnnnnnnncggtgataaatattgtcatttatttggcaggcgtctcgcggtgggggacaccccacgcgggagataaaatccgccccggttaaagaagggcgtctaagagagaactccccgatttgtggggggtggtttggtttcaggaaaaacctactaccacgttctccgcggccccgcagggcggtttttttggggtattnnnnnnnnnnaggtgcccacagacccattatgtcccggtgaaccccggggtgttcctcgtggggaggcccaggttattgggcccgggtggcgcgattacccttggtgggggcccttcgcccccccaaagggaattggttttggaaaaggcttttctgaggggcccgagagcgggccgacaatacagagggggccgggagtcgctcggcacagggcaaacgggggactacgagtataaagggtgccggccggggagtatgggttagacattcaataagcccattctcccacaaactgtttgattacaaagaagcacaatgggttaactgtggcaaaacataagaaataaggcaggggaggcagatacagacttgagaacataaggatatccaaacaattttgtcaatatcaaaagacaaaatcaaaacatcttttataatataaaacaaatccatataattaaatactaattaggtgaaagattatagggtatataacatttattttctctacataaatttgcatatcttaaatttaatgcaaaacatcatgtttcaacttcaacttaacatcataacatgtagttcttggtgagtctagatgtaatggaatgaatatttaaatagacttcaaagatcctatcaagtttttatttggttattgttgctttaagtccttaatgcttttctttatttattggactaagccaattttagaaacaaaatccacaaccaacacacatataatgcagatgtttctgaaaaaactaaatagtgttatctttagtatatcattaaaatagtggttgtggttaaacaaacaagcaaacaaattactgcaactcatttatgataagcttacaaaaagtaacattttaaagtttcatctggtgtgtttgcactgtaggaaaataaatctggatgtgagtaagatgtgcttgactgaataaatgaaacccccagttagcactgggttatgttccagagcagtgcattcgtcctcacttattacttcgggaatgtgtgttcacaatccaccagctgcaggttttaatttactaagaaatgaaaggaattaatcctggtccatccactgcttcctcccttgttttactatcttcattttgacatcaggcactttgtgccc

SEQ ID NO: 316234 - DNA, 398 bp, Homo Sapiens
caatttcagctgcactagaactatgcaaaactaagttaaagtaaaccggacaacaattttaataacttttggttttgttttctttttactctatctttagaatgatataccttacattctaacagttcaacaaaggcttaaaattctagaggttgaaaaccaccaggctacctcctgcacaactgtcaataagacaacaacattttatttgcccccatacattcgttcaatgtctttgaggtaatggttcctcagctccttccttttcagtttgaaagcatcagttaccaaaccagtttcaggggtccatggctctgggcttaatcgaaccttgattggaatttcaaatcgctccaatttcatggcatttgcagcttctcgaatttctttcagtattt

SEQ ID NO: 316235 - DNA, 416 bp, Homo Sapiens
gtttattgactaaagtataaacactattattatttaatatagctgattgtagtaagcacttgcttaaattctgagatagtttatttgtacaattctattaccattcaaaatgtttttcaaaatagaatgaccttctgtaggggaaaaatttatgccaatagtttaacttgtcttgacctttttcagtaatgtcttctgttttaatattgagagaagttagtcagattgtgctaactgctattcatgctgaagtggaactttaaactttgcatttttatgtctcatgtattctagccaactaacaaatatttaaatatcaactctgtacaaaagattatgctcaattctaacatagtgtggcttctggtctcaaagactttataattcagttagggagacatttttcatttttatga

SEQ ID NO: 316236 - DNA, 681 bp, Homo Sapiens
attttatccagcatttctctgtgttctgttggaagggaagggcttaggtatctagtttgatacataggtagaagtggaacatttctctgtcccccagctgtcatcatataagataaacatcagataaaaagccacctgaaagtaaaactactgactcgtgtattagtgagtataatctcttctccatccttaggaaaatgttcatcccagctgcggagattaacaaatgggtgattgagctttctcctcgtatttggaccttgaaggttatataaatttttttcttatgaagagttggcatttctttttattgccaatggcaggcactcattcatatttgatctcctcaccttcccctcccctaaaaccaatctccagaactttttggactataaatttcttggtttgacttctggagaactgttcagaatattactttgcatttcaaattacaaacttaccttggtgtatctttttcttacaagcttgctaaatgaaatatttggtatatattggtagttttaatactattggaaatctaggaaatgcccgaaacttaaaatgtgtttaaaaaaggcctggaatccttaaggggggaatttggaatttttcacctggttattaggatagataagggaattggaacctaaatcttgctagttgttgcatccaaagggtttg

SEQ ID NO: 316237 - DNA, 1277 bp, Homo Sapiens
  misc_feature (542)..(571): n is a, c, g, or t
gttgtgcgtttttaagagctttttattggcaacagtgcagaaccaaggggagaggggacggcccatcgccaatctgtcccagccccccggggtcagatgcaaaatacaaaaagagaaccacaagtacagcatggggtaggggggtcggggattcattgaattgtggttggcaggagcaagccctgctcacactctcacactcgcacccagaattgtcaaagatacagattgtaaaaatctacgatccctcagtctcactcacaaaaaataaaatctcatgtccccaacgaacccagagtcagacgacagctggagcattggcagggacagtcagaaaggagacaagtgaaaacggtcagatggacacaggcggaggagaaaagacagagggagagagaccatcgggaacaatcagaggggccgagacgatcagaaaagggtcagcccgagacaggctgagccagagtttctagaagcagtttccaattcaacggctcgctttgagggccaacgtgacctaggccgaggctgcagaagcgctnnnnnnnnnnnnnnnnnnnnnnnnnnnnnntccatatataatatatttacttatacataatagatataattgcctttcggaaaccaggaaagggataaatagctaaggaatgggtctgggatcaggatgggagacgcgcgacaaggggcacgtggaatgtttttcatgcagcacggatggagggcggcgtggtccaccccccgatattaaaaaatataaatttgcctcataaagaaatcctcatgagatgaagcgcagggaacggcggggtgggagagccaaaaccatggtcagggatgggcggactcgggcatggaatcatgagattccagccccttgagtctgccagtccaaaaatattgggggtttgggggtaccaaagcctcagctctgaaatcttctccggaaaaatgtcacagcccctcactcccttcctggagaggatgtgaggggccaaggggtgggagaagttggcgtcctaggctggggattggtcgggggaccttaaagaaaaaggccagggctgagggtcctgaggagagagagagaggccacgtggatggaggactgtcacccccttctcggttctgtcacccccttgagtctaactcactgttgaggggaggaagaagggggatggacggaagggagaccgaggaaaggctttcgggagtggggacattatccccccagaggtgtgctgccccacccaggtgcaccccacaatctggccaac

SEQ ID NO: 316238 - DNA, 971 bp, Homo Sapiens
  misc_feature (422)..(422): n is a, c, g, or t
  misc_feature (466)..(466): n is a, c, g, or t
  misc_feature (469)..(469): n is a, c, g, or t
  misc_feature (510)..(510): n is a, c, g, or t
  misc_feature (525)..(525): n is a, c, g, or t
  misc_feature (721)..(721): n is a, c, g, or t
  misc_feature (754)..(754): n is a, c, g, or t
  misc_feature (788)..(788): n is a, c, g, or t
  misc_feature (804)..(804): n is a, c, g, or t
  misc_feature (830)..(830): n is a, c, g, or t
  misc_feature (844)..(844): n is a, c, g, or t
  misc_feature (854)..(854): n is a, c, g, or t
  misc_feature (858)..(858): n is a, c, g, or t
  misc_feature (879)..(879): n is a, c, g, or t
  misc_feature (895)..(895): n is a, c, g, or t
  misc_feature (899)..(899): n is a, c, g, or t
  misc_feature (911)..(911): n is a, c, g, or t
  misc_feature (922)..(922): n is a, c, g, or t
  misc_feature (924)..(925): n is a, c, g, or t
  misc_feature (929)..(929): n is a, c, g, or t
  misc_feature (940)..(940): n is a, c, g, or t
  misc_feature (946)..(946): n is a, c, g, or t
  misc_feature (954)..(954): n is a, c, g, or t
  misc_feature (958)..(958): n is a, c, g, or t
  misc_feature (961)..(961): n is a, c, g, or t
  misc_feature (968)..(968): n is a, c, g, or t
ttatagtttaaagagctttattaatgcaataaattaactttgtacacatttttatataaaaaaacagcaagtgatttcagaatgttgtaggcctcattagagcttggtctccaaaaatctgtttgaaaaaagcaacatgttcttcacagtgttcccctggtgtgaaattggggctccctcgcaaacgctggtttcgctgttcaaaaaagcggaatattgtatagaaaagcatgttgtcttcagtctgctttgcagcatctaaaaattttcgtgcagaaatgttgtcatggccaccaatgccccggataaaccttaaggcagctaacacttgggtgtttgggaaagggagaacttctactatttcatcatttgctgttgaaagtcgcttcagcatgtccagagatagctggtgagcaggaggntagaaactctctagggataacagcagacaagccaaaggtttggngtngctgaggacgtggtactgcaggaactgatgcagcatataanagaggttgtgctggncaagggttttgataaccagttcatgtaggtgatgctgtgctgcgatctgaaactggttaagagaacgaatgttttccatcagcacggctatcacaaatttatgaggcatctccttcttttccacgaaggctgacaggacatgggtgtacacatctgactggtccagcaccgcctgggtccgcaccggcctcttgangagcgggctgcttcggctctgccctgcttccancgccatcgcataactctgctcggcatccaggtantttttatactcatggntgagtttatcaaaaacagtggctatnacgggcagcgatgntctgtctgantcantaacatctgtgaacagacagnaaggtgacctcttgcnttcnttctctggaggngaaagtccatnannttcnttctctggtanagattnatatgggncaanttnacttggnggt

SEQ ID NO: 316239 - DNA, 430 bp, Homo Sapiens
agtttaaagagctttattaatgcaataaattaactttgtacacatttttatataaaaaaacagcaagtgatttcagaatgttgtaggcctcattagagcttggtctccaaaaatctgtttgaaaaaagcaacatgttcttcacagtgttcccctgggggtgaaattggggctccctcgcaaacgctgggtttcgctgttcaaaaaagcgggaatattgtataggaaaagcatgttgtcttcagtctgctttgcggcaatctaaaaattttcgtggcaggaaatgttgtcatgggccacccaatgccccgggataaaccttaagggcaggcttaacacttgggtgtttttgggaaaggggggaactttcttacttattttcctccattttggctggttggaaaggtcggctttcagccatggtcccggagg

SEQ ID NO: 316240 - DNA, 722 bp, Homo Sapiens
  misc_feature (613)..(613): n is a, c, g, or t
  misc_feature (623)..(623): n is a, c, g, or t
caacctgacatcattatcagcgcaagcaaggttacctctggaacctccaagtgaaacttgagcccatagtaaatctcttaccagacaaaggaagactcatggactttctcctccagagaaaggaatgcaagatggtcatcctgtctgtctgttcacagatgttaagtgagtcagacagagcatcgctgcccgtgatagccactgtttttgataaactcaaccatgagtataaaaagtacctggatgccgagcagagttatgcgatggcggtggaagcagggcagagcgaaggcagcccgctcctcaagaggccggtgcggacccaggcggtgctggaccagtcagatgtgtacacccatgtcctgtcagccttcgtggaaaagaaggagatgcctcataaatttgtgatagccgtgctgatggaatacattcgttctcttaaccagtttcagattgcagtacagcattacctacatgaacttgttatcaaaacccttgtccagcacaacctcttttatatgctggcatcagttcctggcagtaccacgtcctcaggcgattccaaacctttgggctttgtctggcttgtttattccctaggagagttttctantcctcctggntcattcagctattctctgggacatgcttgaaggcgacttttcaacagcaaatgatggaattagtagaagttcttcctttccaaacaccaagtgtttagg

SEQ ID NO: 316241 - DNA, 852 bp, Homo Sapiens
  misc_feature (690)..(809): n is a, c, g, or t
cgttgcttgtccagtttgaaccgtatgtgcattcacaggtgctggaaagttgtgcaggccacgtaagggcttgtgttcgttgcccaatggtcgcccatggaactccgaagaatagtcttgtccagctccaggtgtccaccataaggctcgagatccagcctttacaattttactaaatcctaatgtaatgtcactcttccacataaattaggtcacaaacaagtaagcaagcattcaaagttgcgctgtctttctgtaaagcacccttgtctaggcaacatatttaacactttaaccccttcaattctccctgaaaagtatttttccattcatcatcacttggggagtaagtactccttcctcgaaagctcttaacgacagcacagtcttcactctaggcccaatttttacctggcccatgcctctagccttttgttcagtttctcctgcttagggcacctttcatcccatctagatgtgtctctctttaactattctaggagttgataaaagggctaggaagtaggaagttgggaagaaggggaggggcgtaagagctctagcactctattttacaggccaacttctttgcctctgaaaatgacagagccaaaatgaaataaaaaccttgcttttacaaatgtttctgagctatcacttttttaagagaggattgggaggctaaggagnnnnnnnnnnnnnnnnnnnnnnnnnnnnnnnnnnnnnnnnnnnnnnnnnnnnnnnnnnnnnnnnnnnnnnnnnnnnnnnnnnnnnnnnnnnnnnnnnnnnnnnnnnnnnnnnnnnnnnnncgtaatggccgaattcccgggcatatgtccggtaccgtcgact

SEQ ID NO: 316242 - DNA, 378 bp, Homo Sapiens
gttccattcctcttccagcgaatgtcatggtaaccaccagcctctcccattgagccacatcttgttctgcagctgtgcttctgactagagaaacctctccctccatctccccactgcccttctagacctattccagttgcaaatttaacttacagtgtgagtatggggcatagataccatgtattaataataatcatacacaaataaatacattagtgtctttattctagagtagttcccgcttgtcagtctcagactgcagtgctactgcagtctgcacatctagctcctgcaagttgcagcaagtcagaattgcttctggcacacctcttataactggaagtcttggtattgagctagattggaggcattccccag

SEQ ID NO: 316243 - DNA, 424 bp, Homo Sapiens
tcatttttctctctcttaggatgctgatattgagtgttatctatgtgccaagcaccattgtagaatctgagatagcagggagcaaagatcgctgccttccaatgggaggagataaaaaatcaagtcgaatatgtgttatgatacataggtgataagtgctatagagataataaagcagataaaggataacaaatcagggcaggggcagggatggaggttttaaatagggtggtacaagaaagtcatcactgaaaacccactggagggattggagcagacaagtgatatgacctgactcacttttaaaaggttcactcttgctgttggtagactatattatagattttgagggtcaagagaaagaaagaaggcctattagagaactattgcagtaatccagatggcctcgtgccgaatcctgcag

SEQ ID NO: 316244 - DNA, 658 bp, Homo Sapiens
  misc_feature (32)..(32): n is a, c, g, or t
tcttagcaattcggaactactttcaagaaggncttcataccagaaaagagccagtgattcccaaatttccaattgccccaaaattctcacggtgcccttggtgctatacaccagccttctttcagccccatgcccaggaagggcctgaccattatggatgcagcatgctcaccctcttccggagcccggtcccgctcttcccggatggcattcatggtggccttagtccggttcagttcttcctctttgctgcacagcatggcagtcaggctctcattctcttccctcagcccagccagctccttctcccaccgagacctctcttcagccaggttgggatacaggtcccggccaagcaccccctcaatctcctcgactgtcttaatagccaggtcacagtgctcgctggctgtggtgagctgctcaatgtgcctgtccacctcggccacggagaggctgcagctgctcttcttcctgccgcagacaacattctccagccctgtcagcaccctctgcagttctgcggggatagagacagaggtctggtcttggtccatgcttcgagagtcctcgttgacctcgtgttggctctggctgagttctgatcgcagttctgagtactcatcttcctccctgatggtggtgccttgcagacggt

SEQ ID NO: 316245 - DNA, 785 bp, Homo Sapiens
  misc_feature (14)..(14): n is a, c, g, or t
  misc_feature (39)..(39): n is a, c, g, or t
  misc_feature (54)..(54): n is a, c, g, or t
  misc_feature (124)..(124): n is a, c, g, or t
  misc_feature (168)..(168): n is a, c, g, or t
aggaagccttgaanctccctaagggcccaaaaacctcangcaactgaaaggaanaaccttgggccacactggctgcctttaaccttgaaattcaattaactagtctccctagagtcctctgttncagggaggtgccagccagagaccactcttgacccccaaactccnattcccccattttcccttcatcatactccctggagatttttggccctgtatatgcatagctgttgggaacaaagaccacatttcccagcctcccatgcagctagatgttgcatgtgactaacttctgtcaaacagagtgtgaccagacgttctgtctgacttctagcaagtgtccttaaagggtggagcacaaccttctgcccttcctccttcttatagctgtagtgtggatgcgatgactggatctcatgctgcctggctctagaaccaacactgtggcagtggctgcagcttcctgatcccaggatcacagctcagaacattcaccgctggatccagcaactacagcagggacttcctgattcctccctctctgcttgctgtctatgaccaaggtggtgactctctagggggtcagttctgcagccttagtctgggagtaatttctcagggccaggcctaaagcctcctccccagctgttatgagctgacttgtgctccgccacccccaaattcatatgttgaagtcctaacccccaagaccttgatcttattacagcagccctggcaaactaatacagcggcccttccaatgactctgtaaactctcacttccc

SEQ ID NO: 316246 - DNA, 2036 bp, Homo Sapiens
gcagagcaattaaattctttattataaaaatctcaaaaatgtccacctttactggagaccaatcttctaaaaggtcaaaagcaatcctgctgtttctctctgaaagctaaactcctttaaatgagaatacgagaatacccagaattttattcccagcctttgtgtggaaaaggcagtttgcattcttaggaaacatctaactgttacctaaaccataaatatttctatctactccattcaacccaattaaagaaaacaaaatgatgagaaaaataggagccgaacagaacgaaaattcacatcattttctactattacgaacattcaaatggtgcttcaaattaaatacttttaattatcattctagccaggatcatactaagtaggatctcatgacagtcacatatgcagcgacttcacctaaaccgtggcactgaatgctctgccatgagccacaagcagcacagtgatcatcacccacaaggacaggttgctgggatgaggcaccctttcctttcatgtttaggttcttctcacctgcatttcactttcctaaaggtcccagccacacagcgttcttttagggattaaagtagtaggaaaaaaataaagagaacacaacatccatccttaaagaaaaaaagtaaatccactttatggtggacttcagctatggacaaatttgggatcagtgttctccagtctgaacatagtcttctgttacctgggagagagtggtcaggtactgccagctcagggcagccaaaagcatgacaaacgacaggtagatgggggagtagtggcttcgggaaatcagctgacagttgggaagattctgcgtccggatggtggagatgatctgccttgttttgctagaagatgggtctgagtcggggattctatgataaatctcttccatatactgatatatgatggctttgacagctggcatattggtggcatccatcatcagggtcactgcttgccctttccgaatcttcactgcccctttgaacacctgctggttattataacaggcagccaaagtggcaatggccatcacctgtggaatagcacagaagttaaacacactctggtttctgagtctcgaaaggtaggtgatgacatctgggatgtggtgcagtgcattggttataagttcattcaggcactgcacggccaagtcaatattctccggcttagcaaaatcccctaacttcttaacatacctgctccaaacctcttgaggccagaactctcttcctccttgctggtcttccagatagtcacggatgatgtttgttttctgcagaaacaggcccatagagttggcacgttctgtatcttcaccaactaaggggtcttcaaactctgaggctgagaaaagacgggaaaggccaattccgaccagcccagcaacatagtggcagtacttgtcccactcctgttcagaggtcacatgcttatccaaaaactctgccatcccaatgcccattctccggcaaatgtcggcaatcactgtttggtatttctcagccagatttctaaactcaagggagatcgttgggaagtcctccagcacctggcgatccttctccttgctctccatgaaccgccagtctggttggtaaaggaaagagtgaaagttgtgtaacagcgggaccttcttttccacactgatggtcatgtcatcttccagtgtgtccagagctcggagaaccagataaaatatgcacactgcgttgcgcatttccccatccagcgcctggataacagctgcgaaactgcgactggtctgattgagatacttgtagcaagttttcaggctgctgctgagcgagtcctggtccatcttgggcatcaccttccgcttgcccccgatccggaagcgcaccaggttgtagaactcttcggggtggccaaggcatttcacgaactccatcctggcgcaggcggcggactcccgggcgcgactctcacctctgcggtccccaggcgctcaccggccggctggacctgggagtaggtgcttcgag

SEQ ID NO: 316247 - DNA, 964 bp, Homo Sapiens
  misc_feature (35)..(35): n is a, c, g, or t
  misc_feature (159)..(159): n is a, c, g, or t
  misc_feature (168)..(168): n is a, c, g, or t
tagccaccggagtttaaccccccttccgggttttnggagtctcgaaagggtagggggatgacatcttgggaatgggggtgcagtgcattgggtataaggttcaattcaggccctgcacgggccaaagtccattatctccgggtttagcaaaaatccccntacttttcnaaacatacctgctcccaaacctcttgagggccagaactctttttcttccttgctggtcttccagatagtcacggatgatgttttttttctgcagaaacaggcccatagagttggcacgttctgtatcttcaccaactaaggggtcttcaaactctgaggctgagaaaagacgggaaaggccaattccgaccagcccagcaacatagtggcagtacttgtcccactcctgttcagaggtcacatgcttatccaaaaactctgccatcccaatgcccattctccggcaaatgtcggcaatcactgtttggtatttctcagccagatttctaaactcaagggagatcgttgggaagtcctccagcacctggcgatccttctccttgctctccatgaaccgccagtctggttggtaaaggaaagagtgaaagttgtgtaacagcgggaccttcttttccacactgatggtcatgtcatcttccagtgtgtccagagctcggagaaccagataaaatatgcacactgcgttgcgcatttccccatccagcgcctggataacagctgcgaaactgcgactggtctgattgagatacttgtagcaagttttcaggctgctgctgagcgagtcctggtccatcttgggcatcaccttccgcttgcccccgatccggaagcgcaccaggttgtagaactcttcggggtggccaaggcatttcacgaactccatcctggcgcaggcggcggactcccgggcgcgactctcacctctgcgcctcgtgccgaattcgccacccaggcc

SEQ ID NO: 316248 - DNA, 621 bp, Homo Sapiens
gacaagatgcgtaaccccactcaccgttgggaagtcctccagcacctggcgatccttctccttgctctccatgaaccgccagtctggttggtaaaggaaagagtgaaagttgtgtaacagcgggaccttcttttccacactgatggtcatgtcatcttccagtgtgtccagagctcggagaaccagataaaatatgcacactgcgttgctgtaaaaaagggaaaactattaatatattggaacaaacagccaaagattttttattttaaaataacttgtgcctggccactttctaaacccatctcacccttaactctaaagaactataaggatatccaacgcttttcatacttaacgaaagttacattagttttccttccttacatgagagtaatgaacttctgtagtttattaaaaagcctactagttgaatgtcaccactactcccagaagtgagttgcatttaaccaatgtagaactatggagaccagaagaccaaacgtttagaccgaactaatatgtagcaaatagaaaagaaagtcaaaaaacacagtaacttctcagtataaatacgatcatacataaaggcaactggtctaagttcatgggtgtaatctgcgc

SEQ ID NO: 316249 - DNA, 432 bp, Homo Sapiens
  misc_feature (328)..(328): n is a, c, g, or t
tttgcagagaatttaaattctttattataaaaatctcaaaaatgtccacctttactggagaccaatcttctaaaaggtcaaaagcaatcctgctgtttctctctgaaagctaaactcctttaaatgagaatacgagaatacccagaattttattcccagcctttgtgtggaaaaggcagtttgcattcttaggaaacatctaactgttacctaaaccataaatatttctatctactccattcaacccaattaaagaaaacaaaatgatgaggaaaaatagggagccgaacaggaaaggaaaattcacatcattttctactattacggnacattcaaatggggggcttccaaattaaaatacttttaattatcattctggccgggggtcctactaggtggggttctcatggacagtccacatatggcggcggt

SEQ ID NO: 316250 - DNA, 346 bp, Homo Sapiens
caatttttaaaaacattttctttaggcataagttagtttatcttccacttctgtcaactccctggaaaaatgcagatgagaatacacagtaggagtaatgctaagtagtcagttaaaatgattgtttagagcagtgctgtctaatgaaaatatgactcacacatgtaatcttaaattttctagtagtcatgttaaagaaaggagaaagaaacaagtaaacataattttagtcatctcttatttaattcaacagagccaaaatattggtttttcagcctgaaatcaatatctgtgtattttacacttacagaacatctcaatttagactagccacgtttcaatgcct

SEQ ID NO: 316251 - DNA, 352 bp, Homo Sapiens
agccactgctctaagtcccgataatacaacaatgaaaaaaacaaagttgttgccctaatgcaggttacattcaaatgaaggagggggaaatgaaaaatcagggtaagaggataaagaatgacatagtggggagatgggacctctttagaaaaggtgaccagagaaagcctctctgagttgatgacatttaaggagagatgtgcaggatgtaaaggaacaagtagagtgctgcaggctgaaagaagaacatttgcaaaggcccttaggtagaaacaagcttggcatattatggaaacagcaaagtccatgtagctggagcctatgaatgggaggaaagggcagagcatagcag

SEQ ID NO: 316252 - DNA, 1964 bp, Homo Sapiens
  misc_feature (465)..(514): n is a, c, g, or t
  misc_feature (1932)..(1932): n is a, c, g, or t
ggggaattccgagccccttgggggcatggacccagggtttttccttgggggaaacccagcttatgggcccccgtttcccactttcccttaattggggcccccgccgcccccaaaaaggaaaggggttttaaaaaaaacttttttccgagggggcccggaggggcggcccggaccaggcgagtgtattatggaatgatgtgttaggggtttgtttttctaaaagaaaaatgggggttcttggctaatgttggccccaaagggttggttttcggaacccctggccctcaaagggaaatccttttccccttcaggcctgcgtggagtccacctgtgattaacagtggtgaggttactgcattcgggagacctttatcactttctaaaattagttttattatatttaatgcttttttccttattaaaatacttttgggacatcatttttcagagagacagtatttgacnnnnnnnnnnnnnnnnnnnnnnnnnnnnnnnnnnnnnnnnnnnnnnnnnnctgtctgtctgtgcgtgcacgcatatcttcactgagatggctttaatctgcaataaacccaggaggccctaacttggtgaagtccttttacatagtttgaagctggtaaacttttgggccttttttcaagaggtaaccctggtcatttagtgatccaataaaattttcaaaatcagcaacctgaatgtttagttctttggcaatctgccgaagttgatgaaattgaaatatattattataagttctttcagcaacgttgttgagagcagaaataaatcttttcgctgttgacctgttgctcattccagaaccatgctgggatcgctcaaaatctaggttcccaaattcatcagagtaagttcctagcatgctatatttcataatttccactatatcctcagcgtcttctttggttgcttcctctctcaattccaaccttgctcgtgcctctgtcagacgaatcaaagattccagctgcctggtagtgattggtgagctatttaacctctggctctgtttccggagctcaaggtaaaaatcttgaagaactcgagcagcttctgtggatagccttgggtacacatactgccgagcatacgccaatgtactttctcaatagctgggtggggaatgggatctattgtttctccaggaaccacctttagtctttctgataatggcttctcagaaactacttcaagtacggaagtatttgaatcttgactattcatacgagctactgtggcactgctaatggttctctgctttccagctcttattgcaatcacatgttcagagagtaagtgatcatgatgctcatttggagtatctaacaggataaagaccaaatcaaatctggatagtagtgcactccccatttttaaattctcagaaactgttttggctttattgtaatgtcctccaactggatttgcagcagcaataatggaagttcttgcaggaaggctacaaaccacaccagccttcgcaagactaatactttgctgctccatggcttccaacaaggcttgatgttgattccccatcttatcaaattcatcgattccacaaataccttgatcaccaagtaccagggcaccagcttccaaagcaaaatctccagaggaactatcttttgaaagagttaccgtcagaccagaggtggtcgtggtgttaccacaaacatacacgccacgtggggcaacattgcacgctgcctgtttaaatcgtggctccaccatgcaccagctgtgtggctctcagacctctctgagcctcagcttccttatgttttatcacagcattgccctgtagcatttgactttttcctaggcctggatctccaacaacaaggatgtgggggtctccccgaattggaattctgtttttgtcatctgcgtatttctggcttcctccanaagagtgctaatgccaaacctgctttaacaag

SEQ ID NO: 316253 - DNA, 646 bp, Homo Sapiens
  misc_feature (480)..(480): n is a, c, g, or t
  misc_feature (588)..(588): n is a, c, g, or t
  misc_feature (593)..(593): n is a, c, g, or t
  misc_feature (618)..(618): n is a, c, g, or t
agcgatgcgggctccggggatgaggtcgcggccggcgggtcccgcgctgttgctgctgctgctcttcctcggagcggccgagtcggtgcgtcgggcccagcctccgcgccgctacaccccagactggccgagcctggattctcggccgctgccggcctggttcgacgaagccaagttcggggtgttcatccactggggcgtgttctcggtgcccgcctggggcagcgagtggttctggtggcactggcagggcgaggggcggccgcagtaccagcgcttcatgcgcgacaactacccgcccggcttcagctacgccgacttcggaccgcagttcactgcgcgcttcttccacccggaggagtgggccgacctcttccaggccgcgggcgccaagtatgtagttttgacgacaaagcatcacgaaggcttcacaaactggccgagtcctgtgtcttggaactgggaactcaaagacgtggngcctcatcgggatttggtggtgaattgggaacagctctccggaagaggaacatccgctatggactataccactcactcttagagtgggttcatccactctatctactngatangaaaaatggcttctaacagctatanaacttgatctgatctggccttgatgggt

SEQ ID NO: 316254 - DNA, 719 bp, Homo Sapiens
  misc_feature (29)..(29): n is a, c, g, or t
  misc_feature (63)..(63): n is a, c, g, or t
  misc_feature (121)..(121): n is a, c, g, or t
ataatcatctaaaactgaaactgcccaanagtccatctgaggaagaatagataaatagatganagtatacgcatataatggaatatcatgcatcagaaagaacgtggatacaaaaacatanactgcataatcacgatgtggaatgaaagaagacccaaagagtgcatgctgtttaattctatttataccatttttagaaacaggaagaactaatacatggtgttagaacttgagatagtgattatcttgctgggaataatgactaagtggtagcacaagggatctctgggatgtgggtgatgttctttttcttgatctgggtgctgattacacaggtgtgttcactttttgaaattcacggagctatacatggatgtgttgtgcacttttatgtgtgtatttataccttgatggagtaaccaaacaacaaaaccaatacctggagtaccaggagatctagctttacctaaaacttagaagctttcaaaaatatttcacattcaactcttgcagaagtgccagcatttatgatttgtgggatttgagtaaatgcaagtatctatccattatggttagcattgctgaaagtggctttgtttatagattgttaagcaaaaccacatgggccacaggaaggaatgcctccaatcagctgtggggtttcgtgaagtgtgtgcatgaagcagaagttttcagagaaaatggtgaaacgctagagc

SEQ ID NO: 316255 - DNA, 357 bp, Homo Sapiens
gcaaatcaaatagctatccatggaatattagaacttgacttgctccatcctcttaaactttttgtgtctcacactaaagaaatgagagatgcagaattctaaggctaaatagctaggaagtattcattcaaacttgaatattcttcaaagagagtgtgggggcaactctaatcagaggaagaaactaaaggaagtcactggcagggccatgggctaatatatgtgctggcaagtcttccaatgagatccggacgtgtgaccgccatggctgtggacagtactctgctcaaagaagtcagaggcctcaccagggtgtggacgtcttgtgctctgctggatctactgtgtacgcaccat

SEQ ID NO: 316256 - DNA, 1042 bp, Homo Sapiens
ttatcttaaatctttgggactgagaaatctaaaaaataaacccactcagattccataggggacagatcaaagagcccgagagcaaccagttcacatgaacatcagagtgacaatgagttaaaatcaaaatgttttctttcttgcatttatcatgtttctatttaaactcaaatttcctttttttaattaaaaaatttttgtgggtacataggtgtatatgtttatgaggtacgtgagatgttttgatacaggcatgcaatgtgtaataatcatgtcatggaaaatggggtatccatcccttcatgcatttttcctttgtgaacacaaatttcttgaagagaagggtatgcatccaggtttttaagatgactttttattttgaagatctgaccattggccttcgatttacaggtatgcagtagggtcactcgagtcacagttttcaatgtgcacatgcgattgtatgccaggataaactttctgcaagggcaatagagttccaagtttttctcccttcttaataggacctttatacttaattggcttaatgtagaacattttgacacaaaaacctcttccagatattcgaacaccattattgatagcattcttgttttgataaggtttctcctggcccacaatcattccagtgaatggtgcgtacacagtagatccagcagagcacaagatgtccacaccctggtgaggcctctgacttctttgagcagagtactgtccacagccatggcggtcacacgtccggatctcattggaagacttgccagcacatatattagcccatggccctgccagtgcggtagaaatcagaccagccaaaaggagggctttggtggaaaacatctggttttacttcctttagtttcttcctctgattagagttgcccccacactctctttgaagaatattcaagtttgaatgaatacttcctagctatttagccttagaattctgcatctctcatttctttagtgtgagacacaaaaagcttaagaggatggagcaagtcaagttctaatattc

SEQ ID NO: 316257 - DNA, 881 bp, Homo Sapiens
  misc_feature (470)..(506): n is a, c, g, or t
ttaaatgctttcatctttatgatatggttattagcacctgcggggagggaggttaaaattgggctaaacagagtgaggcatcctgggacatcccaacatgttctggcagcttcaagctttgttacctcgtctgcaaacagtgggctaacaccatgttcccaggcagtaaagctcccctaaggcagttcctcagtctgttcgttcttatttacatcctagaagtcagaggcctcaccagggtgtggacgtcttgtgctctgctggatctactgtgtacgcaccattcactggaatgattgtgggccaggagaaaccttatcaaaacaagaatgctatcaataatggtgttcgaatatctggaagaggtaagagaggtggagtctacacctggggtgcctcctggagatgttgatgctcatttatttaatgcaggttccatacgtagagattttgtacttctttcaaaatgnnnnnnnnnnnnnnnnnnnnnnnnnnnnnnnnnnnnnagctgaggcactttcaaggacgtttcaccattttctctgaaaacttctgcttcatgcacacacttcacgaaaccccacagctgattggaggaattccttccatgtggcccatgtggttttgcttaacaatttagcaagctacaatatgcctccaaggaaaggtgagaaatctacttagaaaccatctgtagtttttggcatatcgaccatctaatccatatacagggcttgtgccctatttacagcaatttcttgcttttcaaatttcttatttttttccaaatgtttctgcagcaatccattacgacagtttgcaaacaatcaaatatttgacccgtcctaaagaccactttgctgactgaacgaccaaaataa

SEQ ID NO: 316258 - DNA, 896 bp, Homo Sapiens
atcctgtttaattcttgtctatttacatgaagttttgacaattctgatagggcgtgcttttctccagtagtaaagtgactagacagatttagcatggtccctagttcatagatctttcgtttcttccttcacccaacgttatctttcagatgagtctgtggttgctgagtatatcgccccctgcagcacaggtaagagttcaccacttatgaccagtactagatggcattaacccactctccaagggcccctgcaatttaaattctctacaaggcttttcctacatctgagacaatccacatggcatgtcctcacaccaagacaaaactgtggcgtagcatgcctattctgtagcggactctccaatttcagatattcactcccagaaaagtcaataagctttggttatttgtaggacagctatctctaaaagcgacatttcacttcacagctaattgggcttccttcaacacaatggtcaactaatcacacacctaaaaccaaatctagccttacacttaattttgtaaatgaagctttattggcacatggccacacttattattaacattggctatggctgcctttgtgtgctgattagtcatgacagaccacatggcatataaacctaaaataattaccatctggcctttcacaaagtttcctgaccctgcataagctcactctgctgcccacactcaactgaatgctcctcaggaaatgatacaacctccttacgtttttcttttctccatagatacagagcatggaaatgtttgaggaccatacaggctgtatattgtggtggattctctgtcctagacatttacttacaaggaatggagttatttgtctctatacagcattcgtctcgaaacttactaatgtgtaatgaa

SEQ ID NO: 316259 - DNA, 482 bp, Homo Sapiens
agtttgaccagaagttcatttttattcagcaagtatttttagtgtctattttatagagaccaataactccattcgttctaagtaaatgtctcggacagataatccaccaaaatctgcagtctgtgtgggcctcaaacatttccatgctctgtatctgtgctgcagggggcgctattctcaggaaccacaggcttatctgtctcatagtacttatcgactttaacaattgctggcttcaagtctgctactgggatgtcttgcagaaccatgacggtaaaacttagcgtttgatttgtcacctgttccacataaatgaggacatggttgttgctcacttctgtccggctcacagagctggatctttcaggcatttttactgttggtttcaggggaataaaaccggatgccatctttacatatacagtcaccatattggccgcatgacggtttactgtgcaactgatggtcagtgacatccgaaa

SEQ ID NO: 316260 - DNA, 617 bp, Homo Sapiens
  misc_feature (57)..(57): n is a, c, g, or t
  misc_feature (74)..(74): n is a, c, g, or t
  misc_feature (147)..(147): n is a, c, g, or t
  misc_feature (149)..(149): n is a, c, g, or t
  misc_feature (187)..(187): n is a, c, g, or t
tttacttagtacaagtctcagcactttattaagcatgcaagcctacaaaaactttgncaatgcataagtgtacncagtgcaagagagctttacattaaagtcttctaatactgccttcacagtgtggaaattgtgctacatccaccnanagagggccccgtctactcaaatatttccgtacttcacnccaggaacaactccctttgcatttggattcagattgctcttgaccacaagatcttccagagaagagccatcactgataacaaggtcattaaactggtcttggatttggtccatagtttgtgggagatctcgagctggaataaaccattcatgctcttcttcctcttccagcatttcttggaaacagcgttcaataaccatccacatgtactctgcaaatggattgtcatcttcatgagaatgaccgttaataatcacatcttcattgatgatgcttgggctagtactgctgcgacttggatctttcatggctgatgttggttgtcgtttttaacccaatgcacagcagcggggacggcagccaacgaatcctgtcggcctccgcggatctccacaggcagcgccgctcccccgctcgacgtgcgcttcgc

SEQ ID NO: 316261 - DNA, 1453 bp, Homo Sapiens
gtgtttcgttgttgttaaatatttttgaaaaaatataatttttttacaatattttcaacttaaacactattcacactgaacacgtatggcagcttaacctacccaaatatgaagtttaagaagccaaaactgttctagctttgttaaaagttgtgctgcagactctcgtgatggttaacaaagcaaggaaaagcaccactcaaatcataatgttacagtatctttgttcagctggattatgggttggtattggtcatatgttagactccatacaggcatagctatgatgcagtgaatcccttagaagttacaattctcaaattacatacttcctcagatgtaacattagaactcaatatttctaacaataacataccagaaaaggctggactggcactcatctgctgactaacttgtagcctcagtaatatgacatacttgcctttaacaaattatctcaaattaactaacagaccttcagaaaatggagattctttttgatggggacataatcaaatttaagtctgagaaatatgcttaacagttggaactcaaattaaatgtactgattttaaagtttagacattaacaagtgatagattagcctcaaaaaaagacaatttggtaaggtttaggtcttttaatttggtgcttgttcacaacttgactggtgcttctttccttgctgtcttcacatcaagccatggggccaattctattttcagtaaatgtttgacagctttttacttagtaacagtctcagcacttttattaagcatgcaagactaacaaaaactttggcaatgcataagtgtaacacagtgacaagagagcttttacaattaagtcttctaatactgccttcacagtgtggaaattgtgctacatccaccaaaagagggccccgtctactcaaatatttccgtacttcaccccaggaacaaactcctttgcatttggattcagattgctcttgaccacaagatcttccagagaagagccatcactgataacaaggtcattaaactggtcttggatttggtccatagtttgtgggagatctcgagctggaataaaccattcatgctcttcttcctcttccagcatttcttggaaacagcgttcaataaattcttcttcccataactcctcttctatttgtctgttgaattcttcttcattttccatccacatgtactctgcaaatggattgtcatcttcatgagaatgaccgttaataatcacatcttcattgatgatgcttgggctagtactgctgcgacttggatctttcatggctgatgttggttgtcgtttttaacccaatgcacagcagcggggacggcagccaacgaatcctgtcggcctccgcggatctccacaggcagcgccgctcccccgctcgacgtgcgcttcgcccgccgcctcccttctccagtccaaacaaacaccc

SEQ ID NO: 316262 - DNA, 447 bp, Homo Sapiens
  misc_feature (28)..(28): n is a, c, g, or t
aataaaaacgggtccttgggatttgggntcccatagtttggtggggaaagaatctcgaagctgggaaataaaaccaattccatgctccttccttccctccttcccagcaatttccttggaaacagcgttcaaataaattcttccttccccataactcctcttctatttgtctgttgaattcttcttcattttccatccacatgtactctgcaaatggattgtcatcttcatgagaatgaccgttaataatcacatcttcattgatgatgcttgggctagtactgctgcgacttggatctttcatggctgatgttggttgtcgtttttaacccaatgcacagcagcggggacggcagccaacgaatcctgtcggcctccgcggatctccacaggcagcgccgctcccccgctcgacgttgcttcgcccgccgcctcccttctccagtt

SEQ ID NO: 316263 - DNA, 387 bp, Homo Sapiens
  misc_feature (376)..(376): n is a, c, g, or t
ttgaaaaaatataatttttttacaatattttcaacttaaacactattcacactgaacacgtatggcagcttaacctacccaaatatgaagtttaagaagccaaaactgttctagctttgttaaaagttgtgctgcagactctcgtgatggttaacaaagcaaggaaaagcaccactcaaatcataatgttacagtatctttgttcagctgggattatggggttgggtattgggtcatatgttaggactcccatacagggcatagcctatggatgcaggtggaatccccttagggaggttaccaattctccaaaattaccatacttccccccaggatggttaaccattaggggaccctccaatattttcctaacccnatacccatacc

SEQ ID NO: 316264 - DNA, 383 bp, Homo Sapiens
tggtgggacaagcatgggtaaccgttatcgacattcccattgaaatccagtaggacaaattccttcaggcttgaaggctttggctcaggcctctgccctcagggcctgaggctctaccctctgggctatcctttctttttcttgaagggtagcacatgttgcagttcagttttatcaacctatgctgccaggttcaaattttaaagtcttcctcgagcagcaagaaaagacaaattagctgtctttggctgtgttcctctcaatagccatatcagcagtgcgttctatcttcagcaacgtcttgcaaactaaatttgagtatgaggctttggttaagatcactgtgtataagatatggctggccaggagtggtggctcatgcc

SEQ ID NO: 316265 - DNA, 1355 bp, Homo Sapiens
  misc_feature (121)..(307): n is a, c, g, or t
  misc_feature (988)..(988): n is a, c, g, or t
  misc_feature (1176)..(1176): n is a, c, g, or t
  misc_feature (1178)..(1178): n is a, c, g, or t
  misc_feature (1181)..(1181): n is a, c, g, or t
  misc_feature (1183)..(1211): n is a, c, g, or t
  misc_feature (1215)..(1215): n is a, c, g, or t
  misc_feature (1249)..(1249): n is a, c, g, or t
  misc_feature (1255)..(1255): n is a, c, g, or t
  misc_feature (1259)..(1259): n is a, c, g, or t
  misc_feature (1262)..(1262): n is a, c, g, or t
  misc_feature (1279)..(1279): n is a, c, g, or t
  misc_feature (1294)..(1294): n is a, c, g, or t
  misc_feature (1297)..(1297): n is a, c, g, or t
  misc_feature (1306)..(1306): n is a, c, g, or t
  misc_feature (1309)..(1309): n is a, c, g, or t
  misc_feature (1320)..(1322): n is a, c, g, or t
  misc_feature (1329)..(1329): n is a, c, g, or t
  misc_feature (1338)..(1338): n is a, c, g, or t
  misc_feature (1344)..(1345): n is a, c, g, or t
  misc_feature (1350)..(1353): n is a, c, g, or t
gatgctcaaacacagcttttattttacttcaaagtttacctcagatcagcctgggaaggtgaggggaatgaagcagatgctgttaaagggtcatgggagagaaaaggtatctgtgggaagnnnnnnnnnnnnnnnnnnnnnnnnnnnnnnnnnnnnnnnnnnnnnnnnnnnnnnnnnnnnnnnnnnnnnnnnnnnnnnnnnnnnnnnnnnnnnnnnnnnnnnnnnnnnnnnnnnnnnnnnnnnnnnnnnnnnnnnnnnnnnnnnnnnnnnnnnnnnnnnnnnnnnnnnnnnnnnnnnnnnnnnnnnnttttgatgctcaaacacagcttttattttacttcaaagtttacctcagatcagcctgggaaggtgaggggaatgaagcagatgctgttaaagggtcatgggagagaaaaggtatctgtgggaagagaataatctcttttgacttcgtgtgctgcctcacggacacactggagcagggattgggcccccaaggctcaggtagccccgtgcctgtggttttgctgggtgcagcctacgtggctctccgaatgggttgcaggctggtgcctaaagctttcccaagggggcgctgcatgctgccactgactccacagttctggggtcctggtggtggtcaggtcctgctcccagcgctccacaaggcactctctcctgtggcctggatccactagacactagacatttccctggtgggggccctctgtggcagctgcacctcacatttccacttagcatcactctagtggaggctctctgtgggctgggcatgctagctcagttctcttttcctcttcttataaagccaccagtcccattcctgtgataacccattaatccattaacccatgaatgaaggcacagctttacgatccaatcacatctcaaaggccccacctttcagtattgccacattagggattaagtctcaacatgagtgttggagggaacattcaaaccacancagtatgaaaacaatattcaactccaaggtatatggtcaagattacaggtggtaaggaataggctagagaataggaataggctaaatttgctagagatgtgctgtggaattatctgtatttctagctatgatcttagcttcctcaagtccatttcattgcaagaatatgaaaaattaaattgagatcnangtncnnnnnnnnnnnnnnnnnnnnnnnnnnnnngagnacggcgtttcaccctgtcacccagggcggagtgnggcgcncaanctnggctcactgcaacctcnccctcccggtttgangcntttctcctnctncgcctcctgannnctggganacacggccntggctnngggcnnnnaa

SEQ ID NO: 316266 - DNA, 951 bp, Homo Sapiens
  misc_feature (85)..(150): n is a, c, g, or t
  misc_feature (175)..(353): n is a, c, g, or t
  misc_feature (546)..(878): n is a, c, g, or t
tggtcaggtcctgctcccagcgctccacaaggcactctctcctgtggcctggatccactagacactagacatttccctggtgggnnnnnnnnnnnnnnnnnnnnnnnnnnnnnnnnnnnnnnnnnnnnnnnnnnnnnnnnnnnnnnnnnnctgggcatgctagctcagttctctnnnnnnnnnnnnnnnnnnnnnnnnnnnnnnnnnnnnnnnnnnnnnnnnnnnnnnnnnnnnnnnnnnnnnnnnnnnnnnnnnnnnnnnnnnnnnnnnnnnnnnnnnnnnnnnnnnnnnnnnnnnnnnnnnnnnnnnnnnnnnnnnnnnnnnnnnnnnnnnnnnnnnnnnnnnnnnnnnnngtatgaaaacaatattcaactccaaggtatatggtcaagattacaggtggtaaggaataggctagagaataggaataggctaaatttgctagagatgtgctgtggaattatctgtatttctagctatgatcttagcttcctcaagtccatttcattgcaagaatatgaaaaattaaattgagatccaggttcnnnnnnnnnnnnnnnnnnnnnnnnnnnnnnnnnnnnnnnnnnnnnnnnnnnnnnnnnnnnnnnnnnnnnnnnnnnnnnnnnnnnnnnnnnnnnnnnnnnnnnnnnnnnnnnnnnnnnnnnnnnnnnnnnnnnnnnnnnnnnnnnnnnnnnnnnnnnnnnnnnnnnnnnnnnnnnnnnnnnnnnnnnnnnnnnnnnnnnnnnnnnnnnnnnnnnnnnnnnnnnnnnnnnnnnnnnnnnnnnnnnnnnnnnnnnnnnnnnnnnnnnnnnnnnnnnnnnnnnnnnnnnnnnnnnnnnnnnnnnnnnnnnnnnnnnnnnnnnnnnnnnnnnnnnnnnagcgacgcgtgggtcgacgatatcccggattccgaccgtaccagctgcttttaacgtagcaaagggttgttca

SEQ ID NO: 316267 - DNA, 927 bp, Homo Sapiens
  misc_feature (322)..(349): n is a, c, g, or t
  misc_feature (629)..(629): n is a, c, g, or t
  misc_feature (903)..(903): n is a, c, g, or t
accatccaacaaggattctttaatgccagtattattctaggtgtttataaactaattatgaactgagaaaatgtaaaattttaaccaattcaacacttccagggatttgcaaaaacatacaagtttttaaaaaacttttcctgacacatcatttcaaaatacaactattcacattctccttttagatggtattttgctcagcagaaaccagttgagaaacattcacaggaagtctctttccactgcaagacaaaactgtttcaccggccatgatccaacagagaaagaagaccaggtcttaagtcactgtaaatgtgcagcnnnnnnnnnnnnnnnnnnnnnnnnnnnnaaaaaagtacattcccctgtgagttttatcttgttttaaaaagctgctcctgcagcaacatcttgttgaaacactgctgttttagggttcacagcctaagtacgggcaaagtgctctttttagtcatcaaaatacaagggtttccctggacacttggtaaccaagcaggttttaaagtgcactattgtgtccaaacactaggaccgttcagcagagctctgagaagggctgggttcagttccatcctccgtgtactgtctatgtcctgctccattgctgnctcctcatcatccagctgttgactagtgaagttgtttagctcaagaagcccactgggctccaccaccacattggagctggagtgacaaggaatagcatactgaggaatagcctggatgataatttctgctggactctcttcagctttcttttggcctacattctgaatacgcatgaactggcctgtcgcaggcactgctggtggatcaattttccttgtcgttagggaagagccaacagtggatggactcgaacaggactctctacatttctgntgctggggagctcgtgccgaattc

SEQ ID NO: 316268 - DNA, 641 bp, Homo Sapiens
  misc_feature (464)..(464): n is a, c, g, or t
  misc_feature (528)..(528): n is a, c, g, or t
  misc_feature (563)..(563): n is a, c, g, or t
ctcaaatgtctcctcctcagagaggacctccctgactgccccagctaaaatatgcccctcacctcagctcccagttactctttgtcacatctctctgttttatgatatttccttcatctgtcataacttttaactaccttggttctttatttatacatgtgtctgctcctgccccagtgtaggcaccccaggaacttagggatatacccaccctgcatgacagtgtccccagagccttgaaaaaactccagctctggatgcatggcttatttgtttggggacctcacttccttatctgtggtatttgataacatgaagagcctatgatcattcattacgagttgtctggagcctgtggagctgctgccacccacacgcactgccttggccttggagggaagcccggtgcagagtgcccactcgagggaaacacgcttttgcctagggctgaagctggcagtctncgcagacactagctactcagtcggtgaagcttgtggatgcctgcaggaatcacctgaggctcanagggtgcttgccagagggggcccggtgcacctcgngtcccagctgtggcttctcagccctgtggagctgtgcaagccagcaacacctgggtagagcctgacttctgggcgccg

SEQ ID NO: 316269 - DNA, 761 bp, Homo Sapiens
tgcatatttaaaaaacaaagcggcttattttaatagtatcaaactcttcagtatggtattgaatagtcagtcatatattctagctaggcatatgagtttcttatgataaaagctgaacttgttctctcaagtttaagtgaaaaaaattagttgagaaaaaataattatttaaaatataagccttcatattattgtacaatatttctcctttgagaagataggatatatgattttcccaaaaatcacaactttgaaggaagacttagttgctgacttcaattatatcctggaactggcaacttgtgcccttcctttgcttcaaaaaaagtgtaagaaagagtgataagatcaactttaatcattcttggatcttcagcaaattcaggatcaatgtagaaaaacactggcatatctacttcctcttggggattaagcctttgttcttcaaaacagaagcactgtattttattgaaatactgtccagcttcaaatggaacaatattgtatgtagaaattccaattactggtttgtcagtaggattcttagctctgtaaaacgccagtgcagtctctcctggcaccacatatatttctgtttgctgaggtctaaagttccactggagacttgcatgcacatctgcattaaagctaattttaatgattcgatctttaacaggcaccatgttttcaatcttgtctgaggcatgacctgcaactgctgatcctccaagtccagtagtctggcaatagagccgataaag

SEQ ID NO: 316270 - DNA, 624 bp, Homo Sapiens
  misc_feature (194)..(241): n is a, c, g, or t
  misc_feature (450)..(450): n is a, c, g, or t
  misc_feature (558)..(577): n is a, c, g, or t
gttgaacaataccaaaccatgcaggccataactggatctctctctatattgtcatgcaccacataacagatcccatatattaattctatggttgtcccgtaagattataatggagctaaaaaaatttctgttgcctagtgacatcttgatgatcctgaccctgtgtagacctaggctaatgtgtgtgtgtcttnnnnnnnnnnnnnnnnnnnnnnnnnnnnnnnnnnnnnnnnnnnnnnnncagcttatagaatgaagatataaagaaagaaaaaatttttgtacagctataaatgtgtttgtgtgttaatggttattacaaaagagtcagccaccgctcctggccacaattttattttttgtacaggcagggtgtcgctatgttgcccaggcttgtcttgaactcctgggctcaaatgatcctcccacctctgtttcccaaagtgctgngattataggcatgagccactgtgcctgggcctaagtgctctattgtttggattcttagttatttctagataaatgatcatctttaatgttctctttttggtatgtacnnnnnnnnnnnnnnnnnnnngagctggaatctcactgtgtaacccaagctagagtgcagaggcacga

SEQ ID NO: 316271 - DNA, 1021 bp, Homo Sapiens
  misc_feature (27)..(27): n is a, c, g, or t
  misc_feature (54)..(149): n is a, c, g, or t
  misc_feature (158)..(160): n is a, c, g, or t
  misc_feature (504)..(504): n is a, c, g, or t
  misc_feature (513)..(513): n is a, c, g, or t
  misc_feature (520)..(520): n is a, c, g, or t
  misc_feature (565)..(565): n is a, c, g, or t
  misc_feature (597)..(597): n is a, c, g, or t
gtttattgcatgcctagaacggccgtngggtgtatgagccctcccgggtgggannnnnnnnnnnnnnnnnnnnnnnnnnnnnnnnnnnnnnnnnnnnnnnnnnnnnnnnnnnnnnnnnnnnnnnnnnnnnnnnnnnnnnnnnnnnnnnnatgagcggnnntttgtattccccttatattaataacttttttaaatttaataaatactacctcccaatcacattaaataagagagcttctttgtacatcaaaatagacagaatctatgtggattatgagagatttttacaataactgataatggttttggaatacttattatatgctaggcaccgtcctaaacatattatctcacttaaacctcatttaaaaaccccatgaattagacactataccccaagtttacagaggagtgaggcttagagagtggagctcagactcacactcaggtctagatcccaagcttataatcttagctattcactacctttattttctttatctnttctgtatntaaagtnttctccaatacacattataagcacagtcggttaacgtataaggtntgttaacttagttcaactgttgatgactctcnaaggccttctggaaataccatctccactctggtacacagctggtactcaatgaattatatagtattatataaatgtcaaagaatgtttttatattgcttgatgaaagatatattacacatctaattttctcattgccctgataaagcaagaaaagcagcatgttaggagcacgtattctagagccaggctgcctgagttcaagtcctagctccaccacagacaagatgtgtgaacctaagcaagttgcttattgtccctgtgcttcagttccctcatctgcactacagatatagtaacagtaactaattccactgggttgttgtagggattaaatgaattaaaatcttaaaagcagtactgaaatcagtgcctagaacatagaaaattacatttaactaaagtaaaaccagtatctcgtgggag

SEQ ID NO: 316272 - DNA, 520 bp, Homo Sapiens
  misc_feature (17)..(17): n is a, c, g, or t
  misc_feature (22)..(22): n is a, c, g, or t
  misc_feature (43)..(43): n is a, c, g, or t
  misc_feature (93)..(93): n is a, c, g, or t
gccccccaaaaatgccnaaggnctgtacctccctaatagtatnggggaaccctgaatagcccctgggtgtgaactgtttaagagagttatgcnaaaataaaatgcatttggacacacctgaattccatcgctccgtgagaggcaaggagttccagtgactatacataatacaattgacccatacgtggaaaacccaaggaacataatgaagcctggttggttgctccctaagttccagtggataaagtgatgaaagaaaatgatgaactcggggattctatctcccaggcttcagaagcagatattgagcctcaaatctgctaagattgccctgagtgagagtcttatctcctgtagagaaagaactgaaattgtggaaaaatagacataagctcttatcatgttagtggctgacctgcaatgaaaggtgcatgcacagcctcaccatgcacagcctcgccaagtatctactgttaaagtgagggccttggattggttttgccgggaagtcaggggaccc

SEQ ID NO: 316273 - DNA, 154 bp, Homo Sapiens
ctcgtaccaaaggtgtatgtataggcagatttacagtctgtatcagacagtggtctccaaagtgaagtacatgatgtcaagggatgggcaagatctgtttgggcacatcaagaaaacagtagctttggtatgcatatttttgtctcatttattt

SEQ ID NO: 316274 - DNA, 476 bp, Homo Sapiens
  misc_feature (34)..(34): n is a, c, g, or t
acatggtccatgtacatttgcagctgccaccatngcatctggttcctctttggcttccagatttaatatggttttatccttactcgtagagtcttggaatgcaatattatcatgagctggacttgtgccttgggcctctatcgtgggagaagctgatcttgtatcctcctctttcttacagagcgagtttctgtcaaggtcacaagaagccatattcagaatttctaatccaggatcacttgaagttatagtaccgtctgtcgatgaagtgtgtctgggtaatggtagtgaggaatattccctggactgcagcaggctctcaggacacacgcgttcaacaccattctcttccatacttgggtcatcattcatcctgatgcagcctgagagattcgttcctgggctggggccacttgtggggcctgggcacttgtgttgtctttttacatccaaagcaccatcctttacttctcccc

SEQ ID NO: 316275 - DNA, 1005 bp, Homo Sapiens
  misc_feature (53)..(54): n is a, c, g, or t
  misc_feature (76)..(85): n is a, c, g, or t
  misc_feature (123)..(162): n is a, c, g, or t
  misc_feature (185)..(185): n is a, c, g, or t
ccgacccgacccctccccatcctcccccccggggtcaccggcgcgtcagtcgnntgcctcggggctgctcgatgtnnnnnnnnnncctggtgggtccagcctttccggctcctccacagtctnnnnnnnnnnnnnnnnnnnnnnnnnnnnnnnnnnnnnnnntgccgttgctctgcgtcccctcnccggggatgtcgtaaatcaaagtactattttattaaatgagttattttacacaatatgaacatcaatataattacaattgtaaaaaaattttttataacaaggatggactgattttcatatttccaaatcagagtcaactgtacatttacacagaattgtctttgcatgaagcccaagagggaacagcataaaaatgagtgtttctgtagcccctttatttttgctgatcaacagtttgttagaaaagcagctgcaggtatgttacctaaggtctgagacagtagaagagtcaaaggtgtcatgaattcacctgtaaacaaccttatgcctgaacatcagctaattctggaggaagtggagtcttaggatgcttgctctcaaagtgctgcttgaaggtcttagggtctggcatttgtgtcctacagacagtgcaggtatatattaaggcagctttggcagcagccttttggtcatgtccttgtttcttcttttgtccagcttgctttttggcatttttctgctgagactgaattttctgctgtccacgagccatatccgggccgggacagtcttgcgtcggagagacagtgcagcgcgagagggccgggagaggacgccggagggaaaggaagggggagcgcgcccagcaccgcttgggcctcctccacccgctcaggaggggaaacacgagagccgggagcacaacagcctcgcacgcccgccgccgcctcagccttaggggagaccactacgcctcgtgcccgcgcacgccgcgccgctctcctcggcgcccccgccccgcctgctccctcgtgccga

SEQ ID NO: 316276 - DNA, 1066 bp, Homo Sapiens
  misc_feature (430)..(440): n is a, c, g, or t
  misc_feature (574)..(586): n is a, c, g, or t
  misc_feature (716)..(716): n is a, c, g, or t
  misc_feature (900)..(900): n is a, c, g, or t
  misc_feature (988)..(988): n is a, c, g, or t
actatttttagtgccagtgtaaaggattaagaataacattcaattagttggctatttcaggctttattgtacatggtaatgtttcagggagtgtgatttggtctagaatatatccagatccttgtaattatgatattgggttatgacaggattctattatttttagctatgaatggtgcttatttttccctatattaggaatgttaatatttggattatcagagtccatgttataaacagaatttacctatgcaagacaaattctaactgtgcaacattttcatgagaattaaaagttgtgtgttaaggggaaaaccctctgaatgtttttatgtgtaagtgcctaaagaaccgtagaaacagtacatcaaaagctcttataaaagaaaaactgattgaacattagccagaaacaaaatatgatttacannnnnnnnnnnggttgctgggactgaataccctaaaaactaagagatgtgagtggggaaaatgtctaattgataagaaagttgatttatattatatttacatgcatcttctaagattgcctttacagtagccaatcagaactttnnnnnnnnnnnnngctaacaacatagatcctatgtgttgcccttaagactaaaatactttgcacacgtgattgaatggctcacttaagttgttgaatttccttatacatttaaagtgtacttccgttaagaattattccattntaaatgggtaactttcagcttccgaactattttcctaaacattccaggtgtgtattataaaagatcaaaatatctctaagtgggagtacaattttcatttataacgtggaaagttaactggtaaggttaacattagaattaggggtttttgaattgctcatagaaaagaacactgaataatggntttcatacaatttttggaaaacattcttctcccaatttggatccaaatgcgtttccccaattggctaataatcataagccaggggtgncctggatttaaaattttccttccacaccaaatttaggagaaatttgataactttgggaggagcgggagaaacacaaaa

SEQ ID NO: 316277 - DNA, 708 bp, Homo Sapiens
  misc_feature (29)..(29): n is a, c, g, or t
  misc_feature (89)..(89): n is a, c, g, or t
accccagcttctacaccagggaaccttgnaggcatcagaaggacagaataagacccaggttcatagggaatgaaaaatcgaacagaganccgtctcagggcatttgtgaaggtccaaggatggagagaagaagcgctggcttacaagtgggtgaagttctgctataccacaatggagtgcagatccagtaattgtcaacgtcacatcgattgtcgttccagccactgccactaaattccgcacagtcttcattcccgctattgttgggttctccactgttccagtaccgctggaagctgggtgacagaggtgagccgtccacccattgccacgtgccttcctgatttaggtctgaaagtcccatcccaggagaagcggttactccctggaagtctgcagctgtaggaagttctgctcctcagcagttttgattacgacgagctgggccctcacttcctggcaggcggtgacggagtcgtgccagttccgctgggagttagacatgaagtaacagtttccttggaagaatgtccagtccttgggacagtggcggcacaggcgttctgttgggggaggctggtcagggctgggctcagattaggttgtccatattcccatatctgcccagccttcaagcccttgaaaatcagggcccttccttgactgtccatgttgggtggaccgcttggaatggggagagaccattcc

SEQ ID NO: 316278 - DNA, 830 bp, Homo Sapiens
  misc_feature (40)..(40): n is a, c, g, or t
  misc_feature (447)..(447): n is a, c, g, or t
aaaagcccccagggacagggccagcttacacatgaatccnaaatagtctaatctccaaaaggaacagagagtggattcatacaacataccaagcccgccccctaaatgcatcccactcaggtcacttataaagctccaaggatgggccaagaacacaagctctacaccagggaaacttggaggcatcagaaggacagaataagacccaggttcataggggatgaaaaatcgaacagagaaccgtctcaggggatttgtgaaggtccaaggatggagagaagaagcgctggcttacaagtgggtgaagttctgctataccacaatggaggctgaggctagcagggaaacaactattcgtctctgaagcaggctgcgggctttttgcagatccagtaattgtcaacgtcacatcgattgtcgttcccagccactgccactaaattccgncacagtcttcattcccgctattgttgggttctccactgttccagtaccgctggaagctgggtgacagaggtgagccgtccacccattgccacgtgccttcctgatttaggtctgaaagtcccatccaggagaagcggttactcctggaagtctgcagctgtaggaagttctgctcctcagcagttttgattacgacgagctgggccctcacttcctggcaggcggtgacggagtcgtgccagttccgctgggagttagacatgaagtaacagtttccttggaagaatgtccagtccttgggacagtggcggcacaggcgttctgttgggggaggctggtcagggctgggctcagattaggttgtccatattcccatatctgcc

SEQ ID NO: 316279 - DNA, 384 bp, Homo Sapiens
  misc_feature (324)..(324): n is a, c, g, or t
tttgtagttacaacatttaccactttattataaaggctacaactcagaaacagccaaatggaagacatgtataggacaaagaaagatgtgggggtggaagaggttgtatggagcctccatgccctctctggatgccattggttgactgggggaattaattccctggtgcttccagcctgcaagatgagctccttcaaccagcaagtccccagtcaaaagggtgcacggggtgtagctggaagttgagcagatgggtagtttgcatggatgagataaagccccaggggacagggcagctacacatgaatccaaatagtcttaatntcccaaagggacagagagtgggtttcatacaacatacccaggcccgccccctaaattgca

SEQ ID NO: 316280 - DNA, 451 bp, Homo Sapiens
  misc_feature (317)..(317): n is a, c, g, or t
  misc_feature (331)..(331): n is a, c, g, or t
  misc_feature (337)..(337): n is a, c, g, or t
  misc_feature (363)..(363): n is a, c, g, or t
  misc_feature (378)..(378): n is a, c, g, or t
  misc_feature (409)..(409): n is a, c, g, or t
cagttacaacatttaccactttattataaaggctacaactcagaaacagccaaatggaagacatgtataggacaaagaaagatgtgggggtggaagaggttgtatggagcctccatgccctctctggatgccattggttggactagggggaattaattccctggtggcttccagcctggcaagatgagctccttcaaccaggcaagtccccagtcaaaagggtgcacggggtgtagaagtgggtgaagttctggctataccacaattggagggctgaggctagcaggggaaacaactattcggtctctggaagcagnctgcgggctttttncagatnccagtaattgttcaacgtacacatcngattcgtcgttccanccactgccactaaatttccgtcacagtcttnattacccgctattgtttgggttctccactgttccagtagccg

SEQ ID NO: 316281 - DNA, 408 bp, Homo Sapiens
tggcagctgctgctgctgacgctgctggttggctttctgtttggcacggcgctcaaggaactgcttggcaaactccttggcctcagaagtatctcctaaataggccctgatataatcatggacctcataaggagattctacttctttcaggaaagaaacaaatgtgggaacatccaagttatttgccgtattaagggcatgaagcatctgttcacaccactcttcttcttctactttcttattctgccggttagacacacctacagatttactgagactggcgttgtttttatttttatttgttgaattcctaggtcccacctctttcactgcatcatcccagaatcccatgttggagtttttagtgtcagcattactccaaatactactgactaggtcagatgccca

SEQ ID NO: 316282 - DNA, 905 bp, Homo Sapiens
  misc_feature (332)..(384): n is a, c, g, or t
aggctagtttaaaaggcgaggagggggaggggggatgtgaggtgtcaactccaaagaaagcgagacgcgagtaggatagtttgcgggaattggaggtaaactgcgattgtcgggcaaattttaggtagtgggagaacagcttgagggcatagtaagtttgtagagggtggtggggcatacgaagggggagagactggttaacatcgttaagaggaagttgattagtgtatcgcagacgttgtcgctgagggcacgtaaagtcagtggtactaggtaatttaatgggttgagggggtggatataaaggcacccactccctaccctcccccgcnnnnnnnnnnnnnnnnnnnnnnnnnnnnnnnnnnnnnnnnnnnnnnnnnnnnngcatttgccttccctccaacagtcagagacgggttcagagagttgcctcttcaaggggaccgagtgttgttgactttgatcttaggctacaatgtgctttttaaaaacaatgcagggagaggaaaatcagaatattgaccaaagagcagtgacttcctgtgccgtcaagtgtgcctcttctggggctcagttttcacgcgtctgtttcctgggagtacttttgtcctttcggggtccatccctccctggcttccacgggcagcacctcacaaagcgttggccagcgcctttttcgatcgcttgatcatgctggggtggaactcggtgtgccgccgggcgtgctttgtgaggtggtcactcctcatgaagcgcttctcacacagcggacagcggaactgcttttccccagtgtgggtccggtagtggcgggtcagctcgtctgagcgggagaactttttaaggcagtctggccacgtgcagggaaagggccgttcacctgtatgcactatgtaatgggcttt

SEQ ID NO: 316283 - DNA, 1034 bp, Homo Sapiens
  misc_feature (153)..(153): n is a, c, g, or t
  misc_feature (289)..(289): n is a, c, g, or t
caggtactcccgggttcccccagaaaggttttcatggtggccccgtcccctgatgccctcttgcagaaggccaaagtcagtgatcttgatgtggccatcttggtccagcatgaagtttttccagcttgatgtcgccgtaataccccgtcccgncgagtgcaagtactcaagagccgaagacattctctgcacccataaaacccggggcccggtccctctgtgaagacacgctcccggggaccaggtggaagaccagctcaccccccgttgggcatactccatcacaaangcacaggcggtcgtgggtctggaaggcatacttcagcgcagtgaggaacgggtgcctggtgttctggaggacccggctctcggtgactgtgtgagcgacttcatccttggcaatgatgacttccttccgcaggatcttcatggcgtagtagcggccagtggccttctcccgcaccaggatgactttgccaaaggttcccttgccaaggagtttgagatagtcgaagtcattcatggtcactttagcccgtgccttgctgaccgccacttccatctcctcagtcgtggaggagtcactgggggagccacacttgtagtccatggggtcctcgcctggggcccgctgcttgaggctgttggcgaccatctggatggcccgcatccactcctccctctcgtctggagaatccacgtggaaggtcctctcgatgactgtggtccactgcaggcagcgtatgacaaaggtgttgggtcgcggcctctcggtcttcatcagctggcattctgctacggagaagttgtttaaggggggtagagtctgatcaggggcctcgggcctctccttgtacccaatgaaggagccgtcgctcttcagcaggaagtaccgtggcctccaggtcttgatgtattcaccacgcttgtggagccagccttctttgatgacagacacctcattcatggtggcagcgtggtacgctgtcacctagctcgggacagctcagggcagcaggacatgcaggaggcac

SEQ ID NO: 316284 - DNA, 1125 bp, Homo Sapiens
aaggaagcgaggcctgggtggcgaattcggcacgaggctcaagaaggaagtcatcgtggccaaggacgaggtggcccacacactcaccgagaaccgcgtcctgcagaactccaggcaccccttcctcacagccctgaagtactctttccagacccacgaccgcctctgctttgtcatggagtacgccaacgggggcgagctgttcttccacctgtcccgggagcgtgtgttctccgaggaccgggcccgcttctatggcgctgagattgtgtcagccctggactacctgcactcggagaagaacgtggtgtaccgggacctcaagctggagaacctcatgctggacaaggacgggcacattaagatcacagacttcgggctgtgcaaggaggggatcaaggacggtgccaccatgaagaccttttgcggcacacctgagtacctggcccccgaggtgctggaggacaatgactacggccgtgcagtggactggtgggggctgggcgtggtcatgtacgagatgatgtgcggtcgcctgcccttctacaaccaggaccatgagaagctttttgagctcatcctcatggaggagatccgcttcccgcgcacgcttggtcccgaggccaagtccttgctttcagggctgctcaagaaggaccccaagcagaggcttggcgggggctccgaggacgccaaggagatcatgcagcatcgcttctttgccggtatcgtgtggcagcacgtgtacgagaagaagctcagcccacccttcaagccccaggtcacgtcggagactgacaccaggtattttgatgaggagttcacggcccagatgatcaccatcacaccacctgaccaagatgacagcatggagtgtgtggacagcgagcgcaggccccacttcccccagttctcctactcggccagcggcacggcctgaggcggcggtggactgcgctggacgatagcttggaaggatggagaggcggcctcgtgccatgatctgtatttaatggtttttatttctcgggtgcatttgaaagaaccacgctgtcctctcgagccagatgaaaagacgttttttgtgctgtggggcagcaccctcccccccaaggggggttagga

SEQ ID NO: 316285 - DNA, 1034 bp, Homo Sapiens
acccccataggggagggtggcattcggggcccccccaggttgaactgaggcccccggggcccccagagagatggccagatagctgttgacagacagccccagggcgggctggctgacagagtgaggggacacatgggcagggaccttgcccggcccccccaaatgccacattgcgcatagctgcagaagtccttaacattttccctaccgtgaatcggattgttctgagggctgaggccacacccggaggaacaaactggatgaaataaattaaaaccccgcagggatagttttcttccctacccccgctgcgggggagggtgctgcccacagcacaaaaacgtctttccatctgggctcgagaggacagcgtggcttctctcaaatgcacccgagaaataaaaaccattaaatacagatcatggcacgaggccgcctctccatccctccaagctatcgtccagcgcagtccaccgccgcctcaggccgtgccgctggccgagtaggagaactgggggaagtggggcctgcgctcgctgtccacacactccatgctgtcatcttggtcaggtggtgtgatggtgatcatctgggccgtgaactcctcatcaaaatacctggtgtcagtctccgacgtgacctggggcttgaagggtgggctgagcttcttctcgtacacgtgctgccacacgataccggcaaagaagcgatgctgcatgatctccttggcgtcctcggagcccccgccaagcctctgcttggggtccttcttgagcagccctgaaagcaaggacttggcctcgggaccaagcgtgcgcgggaagcggatctcctccatgaggatgagctcaaaaagcttctcatggtcctggttgtagaagggcaggcgaccgcacatcatctcgtacatgaccacgcccagcccccaccagtccactgcacggccgtagtcattgtcctccagcacctcgggggcccctcgtgccgaattcgccacccaggcctcgctaccttagaccgttagtagtactgcc

SEQ ID NO: 316286 - DNA, 930 bp, Homo Sapiens
caaaattaggggggaccacatgggccagggccctggcccggccccccccaaatgccaacatggcgcataggcggcagaagtcccttaaacatttcccttacgtgaatcggattgttttgagggctgaggccacaccccggagaacaaactggatgaaataaattaaaacccgcaggatagttttcttccctaccccgctgcgggggaggggtgctgcccacagcacaaaaacgtctttccatctgggctcgagaggacagcgtggcttctctcaaatgcacccgagaaataaaaaccattaaatacagatcatggcacgaggccgcctctccatccctccaagctatcgtccagcgcagtccaccgccgcctcaggccgtgccgctggccgagtaggagaactgggggaagtggggcctgcgctcgctgtccacacactccatgctgtcatcttggtcaggtggtgtgatggtgatcatctgggccgtgaactcctcatcaaaatacctggtgtcagtctccgacgtgacctggggcttgaagggtgggctgagcttcttctcgtacacgtgctgccacacgataccggcaaagaagcgatgctgcatgatctccttggcgtcctcggagcccccgccaagcctctgcttggggtccttcttgagcagccctgaaagcaaggacttggcctcgggaccaagcgtgcgcgggaagcggatctcctccatgaggatgagctcaaaaagcttctcatggtcctggttgtagaagggcaggcgaccgcacatcatctcgtacatgaccacgcccagcccccaccagtccactgcacggccgtagtcattgtcctccagcacctcgggggcccctcgtgccgaattcgccacccaggcttccccacggggcgccgagtgcgttcctgcaaggagc

SEQ ID NO: 316287 - DNA, 1853 bp, Homo Sapiens
catgtgtctctccagttatcccgccaataatctttcccacccgcgttcacattggaccctcatcctcccccaatcctgcgcactccaacctactttcccacttatcgtttttagcctacccacccgggacccactggttaataattaacccgattattttttcccaaccccctcgtggaggtctcccacacacaaacttcttccatctggcctcaagagacagcgtgcttctctcaaatccacccgagaatcaaaccattaaatacagatcatgcacgagcccccttctccatccctccaagctatcgtccaagccagtccacccccctcagcccgtgccgctgccgagtaggagaactgggggaagtgggcctgcgctcgctgtccacacactccatgctgtcatcttggtcagtggtgctgatggtgatcatctggccgtgaactcctcatcaaatacctggtgtcagtctccgacgtgacctggggcttgaagggtggctgagcttcttctcgtacacgtgctgccacacgataccggcaaagaagcgatgctgcatgatctccttggcgtcctcggagcccccccaagcctctgcttggggtccttcttgagcagccctgaaagcaaggacttggcctcgggaccaagcgtgcgcgggaagcggatctcctccatggaggatgagctcgtagagcttgctcatggtacctggttgtagaagggcaggcgaccgcacatcatctcgtacatgaccacggccagcccgcgcaccagtccactgcacggccgtagtcattgtcctccagcacctcgggggccaggtactcaggtgtgccgcaaaaggtcttcatggtggcaccgtccttgatcccctccttgcacagcccgaagtctgtgatcttaatgtgcccgtccttgtccagcatgaggttctccagcttgaggtcccggtacaccacgttcttttttcgagtgcaggtagtccagggctgacacaatctcagcggccatagaagcgggcccggtcctcggagaacacacgcttcccgggaccaggtggaagaacagctcgccccccgttggcgtactccatgacaaagcagaggcggtcgtgggtctggaaagagtacttcagggctgtgaggaaggggtgcctggagttctgcaggacgcggttctcggtgagtgtgtgggccacctcgtccttggccacgatgacttccttcttgaggatcttcatggcgtagtagcggcctgtggccttctccttcaccaggatcaccttgccgaaagtgcccttgcccagcagcttcaggtactcaaactcgttcatggtcacgcggtgcttgggcttggccagggacacctccatctcttcagcccctgagttgtcactgggtgagcccgaccggaagtccatctcctcctcctcctgcttcttgaggccgtcagccacagtctggatggcggttgtccactcctcccgctcctcaggagtctccacatggaaggtgcgttcgatgacagtggtccactgcaggcagcggatgatgaaggtgttgggccggggccgctccgtcttcatcagctggcactgcgccacagagaagttgttgaggggagcctcacgttggtccacatcctgcggccgctccttgtagccaatgaaggtgccatcattcttgaggaggaagtagcgtggccgccaggtcttgatgtactcccctcgtttgtgcagccaaccctccttcacaatagccacgtcgctcatggtgcccgaggctcccgcgacgctcacgcgctcctctcaggctgcctcgtgccgaattcgccacccaggcctcgctac

SEQ ID NO: 316288 - DNA, 1852 bp, Homo Sapiens
cgataatcgacatcccgaacggtcctacctgattattcctggtatctgaggtgccaaagccccccgaggggtcctccaagtccggaccgtttccagccgactgtaacgcgccgcctacttataatcgctcctatgggccccttgacaggaagggggtacgctaaagcttggcccctcgaggaaactctaggcgcccccttttgtgtggtgtgagaacaactttattgaagaatttggagggaaggttccatattatattataatagtaaaaatactaaagttgaatgttgtaaaaaaacgccgtggtgcagcggcagcggcagcgtctggccaggaggcgtggaggggcccagggatggccacccccacagggagtcagggagggcctggggcgacagcggaaaggttaagcgtcgaaaaggtcaagtgctaccgtggagagatcatctgagggggaggctcccggtgggacagtcaccaagaactgtgacacagaaggggaagggggagggctttcctgtcacaaagattaaaaacccccaaaatgcatttgaacaacataatacacaataacaaatttaaaccttgctcctctgtcccactgggtaaaccctggcccatcccccatccctggtcccatcccaggggcccagcctccgatgacgtcctcagagacacggccttagtgctggggggctgctgtgtgcctgccacccccaggagagggtgctggccagcataccatagtgaggttgcatctggtgccaccaggttgaactgagcccagggccccagagagatgacagatagctggtgacagacagcccagggcggctggctgacagagtgaggggacacatgggcaggacctgcccggccccccaatgccacattgcgcatagctgcagaagtccttaacatttccctacgtgcaatcggattgttctgagggctgaggccacacccggagaacaaactggatgaaataaattaaaacccgggcagggatagttttcttcccttacccccgctggcgggggagggtgctgcccacagcacaaaaaacgtcttttccatctgggctcgagaggacagcgtggcttctctcaaatgcacccgagaaataaaaaccattaaatacagatcatggcacgaggccgcctctccatccctccaagctatcgtccagcgcagtccaccgccgcctcaggccgtgccgctggccgagtaggagaactgggggaagtggggcctgcgctcgctgtccacacactccatgctgtcatcttggtcaggtggtgtgatggtgatcatctgggccgtgaactcctcatcaaaatacctggtgtcagtctccgacgtgacctggggcttgaagggtgggctgagcttcttctcgtacacgtgctgccacacgataccggcaaagaagcgatgctgcatgatctccttggcgtcctcggagcccccgccaagcctctgcttggggtccttcttgagcagccctgaaagcaaggacttggcctcgggaccaagcgtgcgcgggaagcggatctcctccatgaggatgagctcaaaaagcttctcatggtcctggttgtagaagggcaggcgaccgcacatcatctcgtacatgaccacgcccagcccccaccagtccactgcacggccgtagtcattgtcctccagcacctcgggggccaggtactcaggtgtgccgcaaaaggtcttcatggtggcaccgtccttgatcccctccttgcacagcccgaagtctgtgatcttaatgtgcccgtccttgaggtcccggtacaccacgttcttccctcgtgccgaattcgccacccaggcc

SEQ ID NO: 316289 - DNA, 1335 bp, Homo Sapiens
gcttttcactgaagaacccttatgtgctgcatagacatgagctcatgaaacctccctggcggggagggggcaggggcagcctcatctgtgacattctctctgggcagccttcactggccctactctcttccttccatcagaagatggctttgggcccaggagactcatgaagacctcaccctctttgtcttcaaagatgctttttctgtggcagatcaacctggttctgcagagggttgggggctcagccgagaacacctgtttcttcacaggggaagtaagctagagtcagtagggagcagcaaggatggcctgtgactggaggacagacgtcctgtggccccggcggtgctcttccctcttgtgctttggggcagcagcattttaggtttgtagctttggtggaaaagttgctccccactgttttgaagtgtaatgccccatgaggaggaagttggagccagtgtggttttctgggtcctctgccagaggacatttggagtccccaatatttttcctcaggactgacttcgtgaagacagtccttcagcccaggcagggctcaactctgacgcccggggagctttactccctagagtgttttctcttgctctcccccttgggctgatttctaaagggtctgctctaggccttcctgggagtcgttcaaactgaagatggaaagggtgagaaggcacagtggtttaaaggacgctcatcgccaggttaaaggagggaaggaaattacacttgttcccaagccaggctcactaatggctctggaaaggaggtgacgtcactctcacaggaggatccatttgcaggctctatggtgacttctgactttcagggaaaatgtctcccccactcagcaaggatgaggtggagcagcttcagcccaatccctccatcctcccaccaccgggcaaaggaccaggcacagactccaggccgactgcctgattttcctcctccccaggcctcctgctgctgccccaggtggagggaagagaccagccgctgctcacatgctccagggatggctctgggcagagccgttgccttccctccccttcagagccctagctctgcaagagccttggggaagtagcaaaagggaagttgtggggatggggtgggcagggataaatcgaacccaccacagcacaagcctcttctgtacaaaaagtgtgtgtatatctctgcaaatgtcacaatagcatgatctgctcttctcttaacgtacggcacttgtttttaaatctacaagttgaatctcagagacccaactttttagctagctatgtataattgcaaatcctgttatatatgtgg

SEQ ID NO: 316290 - DNA, 494 bp, Homo Sapiens
gatgagtaggtgagtttattgggacttacacacaggtcaatcctgggcggcgacaagacagctctagagatctgagcttcctcccaatgctaaactgctttcatgctaattttctgactgtttacttaccgggtaagagcgatgggactgttttcattggttggttctcacatactctctgggaagtttgggttctcagggacacctgctcctcagctggggaccatggccatggcccaccacctgcccttcagtgttcaagcaggggacatgcaccctttagtaacctggaggggacccatcacatgacaaccaccccaacgaccatcatcaggaagccgctgcctgactgagatatgcccccaggaggacaagggagagtggatgctggaaagacagggcaggggaccatcaccagggaaagacttcattcttcggaggacattgaacctggggctgggtctgtaatggagccgctgtttcttctcctgtat

SEQ ID NO: 316291 - DNA, 309 bp, Homo Sapiens
gttaactccgcactccctcggtaaagtacggggggaggctgaacattcttagctggcagcctggttcctaggacaccagcacacttctgctcccaccagctgaggcctgggctttccaagagtcattcttgtttcttgccaaacctgggaatgccagatggacttgttgttttaattataccatttaattaaatatcccccaaatgaaagacaaatacagaaagttatttctgtgaaagtcattgcgagtagctagaagcagtggctttttgcagaggggacagggcttttaccttttattgccgaata

SEQ ID NO: 316292 - DNA, 410 bp, Homo Sapiens
aacaaatgactgtttaagtccatggagtcattcaggcggcccagccatcagttattcagtctccacaagtccaaacagttcagatttcaactattgcagaaagtgaagattcacaggagtcagtggatagtgtaactgattcccaaaagcgaagggaaattctttcaaggaggccttcctacagggagaagtctgaagaggagacttcagcacctgccatcaccactgtaacggtgccaactccaatttaccaaactagcagtggacagtatattgccattacccagggaggagcaatacagctggctaacaatggtaccgatggggtacagggcctgcaaacattaaccatgaccaatgcagcagccactcagccgggtactaccattctacagtatgcacagaccact

SEQ ID NO: 316293 - DNA, 559 bp, Homo Sapiens
  misc_feature (190)..(203): n is a, c, g, or t
tggacatctgttttcactcttaggcttttaaacaatagttattgctcttatccctctcagattctaataactgagagcgatggggctatattgaatctctgtatgcactgagaactgagctatgaagaggatcttattaaactgctggtctgactttatggattgacactgttcctttcttttattgtgnnnnnnnnnnnnnnccctgaaagtcttgggaaccccctaaagtcttttgggaatcctcaaaaagcatgggaagttaagtatttagctacataaatgttgtaagatcatatcttatgtatagaagtaataagaccatttggaattactggactaattgaatagttaaggtttctattcgggacaataaaatgtattttgaaagtgctgctaactattgatgctgacagtgtttcactcctatgagtgacccaaacatattataaatatgtggtaaagggaatggagcctgtggggttgagcagaatgttgtactagctgtgcctggactgagtataacagctttatgattatgagccataaagtctagaat

SEQ ID NO: 316294 - DNA, 616 bp, Homo Sapiens
aataattaatgaccggcctttgccacgtctttgtactgtcttagccctggcagcaactggttcggggtttatccatcctcctgctggactaatggttcaccagtgacgtcatcaataccatgtacatgaggtggattgaagtccaggttatatacccttccgctagaagggtgaatccagcggcggctgagacgatctttgtccagggcttcggcttgtcctaatgtcctaggaaaaccatcaaggagccagtgctggccacgcctgttctccaactcggacatcattaggcgtgtgatcacatggtctggaaccaaaagacttttctctatatactgctttgccatctcaccaacttcggtgctggccttgatgttctcccgcaagaagtggccgctggagagatgctggagaccaaagttctgggcgatcctctggctcacggtgcccttgcccgagccgggcggcccgaggatgaccgcgcgcaggagtttggaagccattgccttcgcgaggaggggggcggtcaaacgcgcagccccgaccgcggccccgagggagccccgggaactttgtttctcggccccctacctctggcaccctccgctctcactgg

SEQ ID NO: 316295 - DNA, 941 bp, Homo Sapiens
  misc_feature (916)..(916): n is a, c, g, or t
ctctcggagtgctgcctccagccaggggcggccggcgagtcccagtgagagcggagggtgccagaggtagggggccgagaaacaaagttcccggggcttcctccggggccgcggtcggggctgcgcgtttgaccgcccccctcctcgcgaaggcaatggcttccaaactcctgcgcgcggtcatcctcgggccgcccggctcgggcaagggcaccgtgtgccagaggatcgcccagaactttggtctccagcatctctccagcggccacttcttgcgggagaacatcaaggccagcaccgaagttggtgagatggcaaagcagtatatagagaaaagtcttttggttccagaccatgtgatcacacgcctaatgatgtccgagttggagaacaggcgtggccagcactggctccttgatggttttcctaggacattaggacaagccgaagccctggacaaaatctgtgaagtggatctagtgatcagtttgaatattccatttgaaacacttaaagatcgtctcagccgccgttggattcaccctcctagcggaagggtatataacctggacttcaatccacctcatgtacatggtattgatgacgtcactggtgaaccgttagtccagcaggaggatgataaacccgaagcagttgctgccaggctaagacagtacaaagacgtggcaaagcagtcattgaattatacaagagccgaggagtgctccaccaattttccggaacggagaccgaacaaaatctggccctacgtttacacacttttctcaaacaagatcacacctattcagtccaaagaaagcatattgaccctggcccaatgggaagaaccaggaagatgtgggtcattcattccaatagtgtggtgtagtaattggtgctgttgtccaaatttagnagcctagctgaggtagccttgcagc

SEQ ID NO: 316296 - DNA, 1147 bp, Homo Sapiens
  misc_feature (174)..(178): n is a, c, g, or t
  misc_feature (182)..(182): n is a, c, g, or t
  misc_feature (190)..(191): n is a, c, g, or t
  misc_feature (193)..(193): n is a, c, g, or t
  misc_feature (195)..(205): n is a, c, g, or t
  misc_feature (416)..(436): n is a, c, g, or t
ggggaatttccaaggccctttggtgccatggcccagggttttttcctatggaaaaccagggttatgggccccagtttcccctttaccttaaatggggggcccgggggcccccaaacggaaagggttttagaaaaagctttctcggagggcccggagggcggcccggacaagggnnnnntttntttttttnntntnnnnnnnnnnnccccaaataaaaggaaagggaaccagggtcaaatccataaagtccagacccagcagtttaaataagatcctcttccatagctccagttctccagtgcaatacagagattccaatatagcccccatcggctctcagtttatttagaatcttgagaggggataaaagcaataacttattgtttaaaagcctaagagtgaaaaccagatgtccnnnnnnnnnnnnnnnnnnnnngccaaattctttcatcccaggatgtctgaaaaggagagactctatggagcgtggatgtagaaaaggagttattcctaccggaaaaaaatgaactgtggacacagtcactcaagaccagagaaacaaccactatgagtaagtagcttcaatttcactgttaccaggagggcacacaccagaaagcctgggacaaagcctgggctagagccctcaggattcattctcaggcttcctggtgctgtggttcaacagcctttgtggggatggggagaaccagagactatcaccatcacatgtcaaaaatattaccacagcaacagctgtcaaaaaccagctggagctgaagttacacaccatttgaaatccacactgtacttgctttcttgtgatgggcttgagacatgtgcagagacaccttaaacatgtgtaggtgaccagccttttgaaaggcagaggagggcctcttcatgaactctttctactcatttgttttcctatcagttcaccatttcaactagaaaagatgctgcaagctacctcagctagcttctaatttggacacagcaccaatactacacacactattgaatgaatgaccacatcttcctggttcttccattgggcagggtcaatatgcttctttggactgaataggtgtgcgacgcgtggtcgacgatatcccgaaattccggccggtaccagcgcttgccc

SEQ ID NO: 316297 - DNA, 175 bp, Homo Sapiens
acttacaaaattaattttattttgcaaaactcaacaaatacatgttcagatctggtttctcttcaaaacatgtgtttgtttttttaacaaacatgcaagttaatttggcatgccaaacatctttctctctagctcgccttggaaaaatttttttcataacacaaacaagggtgcc

SEQ ID NO: 316298 - DNA, 961 bp, Homo Sapiens
attgaggagctgcctcgcgcagggggtgtgcgaggctgagtccaagagatagcaaatcgagtcttaaataatccggggagaaagacgcccgggtagatttgaggtgcagccttggagggagggattagaagccgctagactttttttcctcccctctcagtagcacggagtccgaattaattggatttcattcactggggaggaacaaaaactatctgggcagcttcattgagagagattcattgacactaagagccagcggctgcagctgggtgcagagagaacctccggctttacttctgtctcgtctgccccaaccgctagcctcggcttgggtaaggcgaggcggaattaaaccccgctccgagagcggcagcttcgcgcgcggtgcgctcggcctatgcctgccccgaggggcgtctggtaggcaccccgccctctcccgcagctcgacccccatgatagatacgctcagacccgtgcccttcgcgtcggaaatggcgatcagcaagacggtggcgtggctcaacgagcagctggagctgggcaacgagcggctgctgctgatggactgccggccgcaggagctatacgagtcgtcgcacatcgagtcggccatcaacgtggccatcccgggcatcatgctgcggcgcctgcagaagggtaacctgccggtgcgcgcgctcttcacgcgcggcgaggaccgggaccgcttcacccggcgctgtggcaccgacacagtggtgctctacgacgagagcagcagcgactggaacgagaatacgggcggcgagtcgttgctcgggctgctgctcaagaagctcaaggacgagggctgccgggcgttctacctggaaggtggcttcagtaagttccaagccgagttctccctgcattgcgagaccaatctagacggctcgtgtagcagcagctcgccgccgttgccagtgctggggctcgg

SEQ ID NO: 316299 - DNA, 1131 bp, Homo Sapiens
  misc_feature (1032)..(1032): n is a, c, g, or t
  misc_feature (1036)..(1036): n is a, c, g, or t
  misc_feature (1043)..(1043): n is a, c, g, or t
  misc_feature (1054)..(1054): n is a, c, g, or t
  misc_feature (1065)..(1065): n is a, c, g, or t
  misc_feature (1068)..(1068): n is a, c, g, or t
  misc_feature (1082)..(1082): n is a, c, g, or t
  misc_feature (1084)..(1084): n is a, c, g, or t
  misc_feature (1109)..(1109): n is a, c, g, or t
  misc_feature (1115)..(1115): n is a, c, g, or t
  misc_feature (1118)..(1118): n is a, c, g, or t
agacatcaactctacatttattgcagtcctttaagtctatgacggcggggcagccgctgacagcatgcagagcaagttaggaaaaaccgaggccctgtgggaacagcaacgcgggctccagccaggctctcgtcctcgcagcctcccacaagacctggggctcagggcagccgcttccccacccagcacagcagcagaggggccctagagcccccacagaaaggactgtcccagcctcgggagcaagagatggctccctccggacgggcctcatccaactccgccctggagtgtggctggaaggaagggacagagaaagaagggacagaggaaaggggctgtcccagcccaagaaggcagttccactgggaagtcagtcaggtccggcggcagcgcttcctctggcagggccgaggctcgcgactgctggggtgggcggaggtcgctgcctggggatcggacactggagccttgcggcggctgcaactcatgctcaggacccagcccagcttgttgtgtagcacctgcttgaggcccggcggcagcggcagaccctccagcgtgtctcccgagtctggccgcagctggcgcaggcggtggcagcacaggtactggagggaagtggcgctggcacaggagcgggtgaccttcatgctgctccgggccgccgtggagcacaccatcgggtagaatctcttgttctgcagcttggtggctgccacacctatacacttcctgttcttgaaaaaaggtgagtgtgccgtgccaggtgtaccaggtgcacgccaattatggagccctggccgaaccgcgatgagaaggctggtcttgtcgcccttgtggtggaggaggcccgtttaggagaggccccagctgtcctcactccctgcccagcaggctgcagaacgtgtgggggtatttgtccaggtccacatccgacgtcccgatgcccaccatctaggaacaggggccaggcagagggcgcggggctgggctgcggagccaggttcccagaagcacctgggccgaagnactnacatgtnggtgcgtaaanggagaggtatnttntttccagaagtctngnctcccagctctttgtgccggatgcngtgtcngantgtctcatgtgga

SEQ ID NO: 316300 - DNA, 1157 bp, Homo Sapiens
  misc_feature (948)..(948): n is a, c, g, or t
  misc_feature (970)..(970): n is a, c, g, or t
  misc_feature (1022)..(1022): n is a, c, g, or t
  misc_feature (1027)..(1027): n is a, c, g, or t
  misc_feature (1043)..(1043): n is a, c, g, or t
  misc_feature (1050)..(1051): n is a, c, g, or t
  misc_feature (1055)..(1055): n is a, c, g, or t
  misc_feature (1061)..(1061): n is a, c, g, or t
  misc_feature (1072)..(1072): n is a, c, g, or t
  misc_feature (1082)..(1082): n is a, c, g, or t
  misc_feature (1095)..(1095): n is a, c, g, or t
  misc_feature (1103)..(1103): n is a, c, g, or t
  misc_feature (1117)..(1117): n is a, c, g, or t
  misc_feature (1136)..(1136): n is a, c, g, or t
  misc_feature (1150)..(1150): n is a, c, g, or t
gttgtttacgtctcgctccggggcggaaagtgggtcagggccgggccggcggagcgcgcagcgggggctgcagattctttccaccatggccagacgcccccggaacagcagggcctggcacttcgtcctgagtgcagcccgccgagacgcagatgcccgggccgtggctctagcaggctccactaactggggctacgactctgatgggcagcacagcgactcggactccgaccccgagtactccacgctgccgccatccatccccagtgcggtgcccgtgaccggcgagtccttctgtgactgtgctgggcagagcgaggcctccttctgtagcagcctgcactcggcccaccggggcagggactgccgctgcggagaggaagacgagtgtgagcgtggggcccagcccctgctgggactgcactgcgggcgggcctgggggtgggcagggcagagccccatggagctctcagggctgccccagcctgggcctctcttgcagatttcgactgggtctgggatgacttaaataagtcatcagccaccctgctgagctgtgacaaccgtaagtcagcttccacatggagtacagctgcggcacagcggccatccggggcaccaaggagctgggggagggccagcacttctgggagatcaagatgacctctcccgtctacggcaccgacatggtaagttgcttcggcccagggtgcttctggggaacctggctccggcagcccagccccgcgccctctgcctggcccctgttcctagatggtgggcatcgggacgtcggatgtggacctggacaaataccgccacacgttctgcagcctgctgggcagggatgaggacagctggggcctctcctacacgggcctcctccaccacaagggcgacaagaccagcttctcgtcgcggttcggccagggctccatcattggcgtncacctggacactggcacggcanatcaccttttcaagaacaggagtgtataggtgtggagcaacaagctgcaganaaganatttaccgatggtgtnctcacgnngccngagcanatgaagtaccnctctgtgcancgcattcctccantctgtgcngcaccgcttcgcantgcggcaaattgggaaaantgagggtttcgctncgcgggc

SEQ ID NO: 316301 - DNA, 1017 bp, Homo Sapiens
  misc_feature (3)..(3): n is a, c, g, or t
  misc_feature (43)..(43): n is a, c, g, or t
  misc_feature (45)..(46): n is a, c, g, or t
  misc_feature (68)..(68): n is a, c, g, or t
  misc_feature (80)..(80): n is a, c, g, or t
  misc_feature (82)..(83): n is a, c, g, or t
  misc_feature (85)..(85): n is a, c, g, or t
  misc_feature (92)..(92): n is a, c, g, or t
  misc_feature (115)..(115): n is a, c, g, or t
  misc_feature (122)..(122): n is a, c, g, or t
  misc_feature (138)..(138): n is a, c, g, or t
  misc_feature (140)..(140): n is a, c, g, or t
  misc_feature (143)..(143): n is a, c, g, or t
  misc_feature (151)..(151): n is a, c, g, or t
  misc_feature (155)..(155): n is a, c, g, or t
  misc_feature (158)..(158): n is a, c, g, or t
  misc_feature (174)..(174): n is a, c, g, or t
  misc_feature (178)..(178): n is a, c, g, or t
  misc_feature (186)..(186): n is a, c, g, or t
  misc_feature (229)..(229): n is a, c, g, or t
  misc_feature (667)..(667): n is a, c, g, or t
  misc_feature (676)..(676): n is a, c, g, or t
  misc_feature (690)..(690): n is a, c, g, or t
  misc_feature (709)..(709): n is a, c, g, or t
  misc_feature (714)..(714): n is a, c, g, or t
agncccgcgcagcggaaccttccagcttttcccgattttgctncnntgcgcagcgttgcacataggantggaggaagtgngnngnacagagnggtgacttcatgtgctccggccnccgtganacaccatcggttgatntnttnttttcagnttgntgntgccacacctatacanttcntgttcttnaaaaaaggtgagtgtgccgtgccaggtgtccaggtgcacgccnaatgatggagccctggccgaaccgcgacgagaagctggtcttgtcgcccttgtggtggaggaggcccgtgtaggagaggccccagctgtcctcatccctgcccagcaggctgcagaacgtgtggcggtatttgtccaggtccacatccgacgtcccgatgcccaccatcatgtcggtgccgtagacgggagaggtcatcttgatctcccagaagtgctggccctcccccagctccttggtgccccggatggccgctgtgccgcagctgtactccatgtggaagctgaccttacggttgtcacagctcagcagggtggctgatgacttatttaagtcatcccagacccagtcgaaatctgcaagagaggcccaggctggggcagccctgagagctccatggggttctgccctgcccacccccaggcccgcccgcagtgnagtcccagnaggggttgggcccnacgcttacattcgttttcntctcngcagctggcagtccctgccccggtgggccgagtgcaggctgctacagaaggaggcctcgctctgcccagcacagtcacagaaggactcgccggtcacgggcaccgcactggggatggatggcggcagcgtggagtactcggggtcggagtccgagtcgctgtgctgcccatcagagtcgtagccccagttagtggagcctgctagagccacggcccgggcatctgcgtctcggcgggctgcactcaggacgaagtgccaggccctgctgttccgggggcgtctggccatggtggaaagaatct

SEQ ID NO: 316302 - DNA, 914 bp, Homo Sapiens
  misc_feature (43)..(43): n is a, c, g, or t
  misc_feature (107)..(107): n is a, c, g, or t
aagtggcgctgggcacagggagcggggtgactttccatgctgntctccgggccgccgtggagccacacccatcgggtaagaatctcttgttctgcagcttggtggcntgccacaccttataccacttcctgttcttgaaaaaggggagtgtgccgtgccaggtgtccaggtgcacgccaatgatggagccctggccgaaccgcgacgagaaagctggtcttgtcgcccttgtgtggaggaggcccgtgtaggagaggccccagctgtcctcatccctgcccagcaggctgcagaacgtgtggcggtatttgtccaggtccacatccgccgtccggatgcccaccatcatgtcggtgccgtagacgggagaggtcatcttgatctcccagaagtgctggccctcccccagctccttggtgccccggatggccgctgtgccgcagctgtactccatgtggaagctgaccttacggttgtcacagctcagcagggtggctgatgacttatttaagtcatcccagacccagtcgaaatactcgtcttcctctccgcagcggcagtccctgccccggtgggccgagtgcaggctgctacagaaggaggcctcgctctgcccagcacagtcacagaaggactcgccggtcacgggcaccgcactggggatggatggcggcagcgtggagtactcggggtcggagtccgagtcgctgtgctgcccatcagagtcgtagccccagttagtggagcctgctagagccacggcccgggcatctgcgtctcggcgggctgcactcaggacgaagtgccaggccctgctgttccgggggcgtctggccatggtggaaagaatctttcctcagggccatcctgcatgcagggcaggccgcaggcaggcagcgagggagggtacgtct

SEQ ID NO: 316303 - DNA, 749 bp, Homo Sapiens
  misc_feature (690)..(690): n is a, c, g, or t
  misc_feature (727)..(727): n is a, c, g, or t
tttaaatttttgtagagacagtgtttcaccatgttgcccaggcaggtctcaaactcctggggctcaagtggtcctccagcttcagcctcccaaagtgctaggattataggtgtgagccacagtgcccagccccgtagtggagaatttctgttgaatgaaccaaaagcaactgccaacctctccatgcaccatgtgtttcagaggagaaagcacagtgaagaatgcagtgtgttctgaggtcctgtcacccctgaggctgtgtgtgtcctttgccaaattaaagagtcttactgaatgcggtgcatccagggagacaggcccagggtttgggactggtcctctaggcctcagaaggcatctttttctccgactgattccgtgttcaggtaatgtctgcctgcctgcctagggcatctccacaccttaggccagccacgtccgcctcgcccgctggaacctacctgcccatcagagtcgtagccccagttagtggagcctgctagagccacggcccgggcatctgcgtctcggcgggctgcactcaggacgaagtgccaggccctgctgttccgggggcgtctggccatggtggaaagaatctagaagaaaacacaggctctgggcaaaggaagactcacagcactcccagccctgagcttccaggctgggccacggacccactcaaagtgnggactgcaggggccgcaccggtgcccagccagggctncagaacgcttcaggagcccgta

SEQ ID NO: 316304 - DNA, 984 bp, Homo Sapiens
  misc_feature (858)..(858): n is a, c, g, or t
catggtctcggtggccgtcgccgcaagaggtggcgcacggtgaggagagctcggcgccccctgcgtggcgtgtggaacgcggttcggcgggcggtcagagccggcgtccgcggatggaatggtgctggctgtgatggtcggtgcctgcgttttgaagacctagaggagccacagtggatacgccggcgctgcctcatgcatgcacaaaggagggtgatcataagcctctggatttataagatgataataccgaaaaacactgtgcagggacagtgaatccttggcatatgaagaaagctttcaaagtcatgaacgaattaagaagtcaaaatttgctgtgcgatgtcacaattgtggcagaagacatggaaatttctgctcatagagtggtgctggccgcctgtagtccttattttcatgccatgtttacaggtgagatgagtgagagccgagcaaagagagttagaataaaagaggtagatggctggaccctgaggatgctaattgattatgtttacactgcagaaattcaggttacagaagagaagacttgttgtgaatttttggaatcccagcttcaccctgtcaactgcttaggaatccgggcttttgctgatatgcatgcatgtaccgaccttctgaacaaggccaacacctatgcagagcaacattttgcagatgttgtacttagtgaagaatttctcaatcttggcatcgaacaagtgtgcagcttaatctcaagtgacaaacttaccatttcttcagaagagaaggtatttgaagcagtaatagcatgggtgaaccatgacaaggatgtgaggcaagagtttatggcccgactgatggaacatgtacggntacctttgctttctcgggaatatttagttcagagggttgaagaggaagcattggtcaagaatagcagtgcttgcaaagattacctcattgaagcaatgaagtaccatttgctggcaacagacaggg

SEQ ID NO: 316305 - DNA, 730 bp, Homo Sapiens
  misc_feature (634)..(634): n is a, c, g, or t
gaaaatcaggtgctggactgaagttttttaaatgcaggaaaatgcaagatttgtgatgctatcaataaaccatattaccagcctccttgttaatacataataaaggatacagaatacagcagacaacagtacacagatagtggtataatctaagttttatgcaaacacttgacatctgtctcatacctggagtagaatttcccttgcttggctctctgttcatgctgcagcctcatgttttctagtttgactgggcttggaatgaatccgatttcacagccttcttttaccaatcgccctatccaccagtcattgttaaatttctaaacacaaaatcaaaagcattagagaaatatggcaatgaccattaactatgccttaaatattatcattcaagaaacccttcggctcatgggtttcacatgtaagaaatgcatttagcgtcctcagcaatctatcaaaggctctgcgttccttgtctgtcctggtgctgccgtaggaccaggctgaattcccttgcagcagctgctgtcaccatgagtagggataagctctctgggttcaaagaataacagcccatcctacccagagatctttaggaagtactgttacagaaatcttccccttatataantcagaccaattggaattattgagagaaagagataatatttgagtgtaccttaatatttcatgcacaggacatttaccttgtgcaacagtttataat

SEQ ID NO: 316306 - DNA, 728 bp, Homo Sapiens
  misc_feature (91)..(91): n is a, c, g, or t
  misc_feature (109)..(225): n is a, c, g, or t
  misc_feature (363)..(371): n is a, c, g, or t
ccccctttaatttatatagtactgaataatggatgaatgaatggatgaaagatgaatatgtaggtggagcacaagatggataaatagaagncgatagctaggtgtggtnnnnnnnnnnnnnnnnnnnnnnnnnnnnnnnnnnnnnnnnnnnnnnnnnnnnnnnnnnnnnnnnnnnnnnnnnnnnnnnnnnnnnnnnnnnnnnnnnnnnnnnnnnnnnnnnnnnnnatggtggtgcatacctacagtcccagctacttggaaggctaaggcaagagattgcttgggcccagaagttcgaggctgcagtgagctatgactgtgccactgcactcagccttgatgacaaagtgagacctcatctcnnnnnnnnngaggggacagattaagggagaagagttgggaaatgaattcatacgaaaacggtggatactgacttaaaattcagggtttggtgtgatatttagttttaaattctcatacacaacatccttgtgggtgatttagactgagagtctcagtgaaatgagttttcagtcaggatgattaagttgggccacagaatcagtttcccagagaggtctaaaacctgacagaaaatatgtcttgtttttgtctctgctatttggcagaaaaatccctgatgttatgaaagtccaggtattaaattaataaatttttattaagatactgccattgtccccaatgagtatataaaccaccatttcaac

SEQ ID NO: 316307 - DNA, 714 bp, Homo Sapiens
  misc_feature (633)..(641): n is a, c, g, or t
ccagcactgaagctcttggtatttattcaaatgaattaaaaacatgcccatagaaaaacctgcacaaagatgtttacaacagctttattcataattgccaaaacttggaaaccaccaagaagtctttcaataggtgaatggataaactattcatctagacaatggagtattattcagtgctaaaaataaatgcactattaagccatgaaatgacatggaggaaccttaattgcgatattattaagtgaaagaagccagtctgatgaggctacatactatatgattccaatatgacattctagaaaagggagaactatggcgacagtaaaaagtggttgccaaagaaagatcatgtcctttgcaggaacatggatggggctggaggccattatccttaacaaactaacataggaacaggaaaccaaattttccatgttctcacaagtgggagtgaaataacatggacacaaaggaataacatactggggccacctgagggtggagggtggggaaaaggggacgggaccggaaaagtactatggggtactaggcttagtacctgggtcactaaataatctgtataacaaacccccttgtcacgagtttacctgcacatgtaccccctgacctaannnnnnnnnaaagtggttgcaggggatagggacataatggagattatatacattggctaagcatacatgacacaccgagtga

SEQ ID NO: 316308 - DNA, 1386 bp, Homo Sapiens
  misc_feature (1282)..(1282): n is a, c, g, or t
  misc_feature (1296)..(1296): n is a, c, g, or t
  misc_feature (1360)..(1360): n is a, c, g, or t
  misc_feature (1363)..(1363): n is a, c, g, or t
cagatttattaaactttatttcctctgagtctctgggcagtcagcagggatgtaaggcgaagtggcagtagctgaaggggcctgagcagagctggtgctgggaggggccggcatggacaggaagaagaggaggagatttaaatatccagggctgaaagccagttaatagttctccttcatctgtttttgtattttgtgtagcatctcctgcatccgccgcagctcctcatctttctctcggataagcttctcagtttctggatctgtccctggtgggacagcagggatggggaagtcggtaccactttcccgagtcagtttgttgcgattccgttccttcaccaccaggcgggtcatgctctggatgcactgtgcccggtagttctcataatgtgtctcccgtgtcacatccttcaggtcctgcatgtgggtacgtaccagcattgtcctcagcttcacaaagtcgcagtgccctgggttttccacttccacgatgccccaggggtagagtcgaccccgaactcgccgccctctggcctctactacagtgttgctgccaattactgcaaatgggatgctttcctttagggcttggtcctgcaatttgaagtcctcatcctcatcagagtcacagtctgggaattgatagatcttgattccaaaatgctcaatctcctcccggattttgcgtttcttgtggtccacttcgggaggtgtcagtgtgtctgccttagccaggataggcacgatgttgacccgctgatgcagggccttcatgaattcaacatccaatggccggagcccatggccgaagggtgagatgaagtacaggcagcagtgcaccctgttgtcttggatgttctttcggttcaggccactctcgtctcggaaatactgctcaaactgctgatcaatgtattctgccacaggcttccagcactctgtgttgttgactgcatccccaaaacctggtgtgtccacaatggtgagccgcagcctcacacccttctcttctatgtccactgcatgcttagtgatctccacagtttgcatgatcctctcttcagcaccaagaagtttccggtcccggtacagatcagtgaggaagaggctattgacaagtgtggatttgcccaggccagactctcctgccaccatgagggtaaagtcaaagcctttcttcacggactttcggtggacttggttggggagggttgcaaagcccacatactccttgtcatcctagtagacaggaaggcagaatgcatcacggtgaggagcnaaaggggccccggnacccagcgccaatcttctctccctttcaggcctttgccccagcctccagagagtcagagaaganccnaagcccagctgcttgggagcctt

SEQ ID NO: 316309 - DNA, 682 bp, Homo Sapiens
ttaggaaactaatagataccccatcgcgcttatatctcacttacccattctgtaacatggctatagtaatacctttctcagaagcttcgctccgggattcaatgagatatgtttgtacggcacttagcacacagtgaatgttcaaaaatagtgatggctgttcctcttctttaaggactgggagttttcgtcctcttgaataagaactcgacaacagagtgggaactttctgtcttgtgatccattgcctgtgtgtcgcactggagcacagaggacactcgatcgtgcggcgcgcagggcggggggccgccgctgcctccccgcgggatggctggcactgtgctcggagtcggtgcgggcgtgttcatcttagccctgctctgggtggcagtgctgctgctgtgtgtgctgctgtccagagcctccggggcggcgaggttctctgtcatttttttattcttcggtgctgtgatcatcacatcagttctgttgcttttcccgcgagctggtgaattcccagccccagaagtggaagttaagattgtggatgactttttcattggcctctatgtcctgctggctttccttagtgccatcttccttggaggcctcttcttggttttaatccattatgttctggagccgatctatgccaaaccactgcactcctactgaccactct

SEQ ID NO: 316310 - DNA, 1559 bp, Homo Sapiens
  misc_feature (222)..(234): n is a, c, g, or t
ccagggcccctccatttaaggcaaatttcatttggtctgggagatcagacaggtatagagttatatctgatgttgagaatataccttcctcactagctttggagaaagggctacaaagatgaaaagtgaagacaccccaaaatggactcatggtaattaaataaggcacacacagcccaccacatcatggaagaaaaaaacctacagatacatggcaagacnnnnnnnnnnnnncaatatttccatacctttcctctaatcccaaggaaacctaaagaacttgattaaaaagccgtggccaagagttcgaagtgaaagtcagccctttagctattatttattgctttattagagcagagggaagtgacactcattgccttcacagagctctgcagaaatatatgcacagagtggtcaatgaccaacatctgagtaagtcttccaaattatcacattaaaataacctttcaaatttgagtgcctctcctttgcaaacaactgcaacctcataatgaataattttatatattatcaaaaagaaccagaagcccaggtgcttttttccccaaaatccacttactaaggacttgagtgaaaatccactctaagcagatcactgttactatttccctttcaaaacagttggaaatcctaaggtacgggtactaaagaagatagcaatatccttcttaagctggtaagaatctagcccccacagggacaatttggcaatcctgtttctggaagccaggactccagagatttgtcttagtgatggacagatactcctctaaccttaaggcatgagggctgtcaaaacaaggctctgaatagtgccttcctgctcatcaatgtcatcacaatgaaggagagaacaggttttcgttttcctgaagagtggtcagtaggagtgcagtggtttggcatagatcggctccagaacataatggattaaaaccaagaagaggcctccaaggaagatggcactaaggaaagccagcaggacatagcggccaatgaaaaagtcatccacaatcttaacttccacttctggggctgggaattcaccagctcgcgggaaaagcaacagaactgatgtgatgatcacagcaccgaagaataaaaaaatgacagagaacctcgccgccccggaggctctggacagcagcacacacagcagcagcactgccacccagagcagggctaagatgaacacgcccgcaccgactccgagcacagtgccagccatcccgcggggaggcagcggcggccccccgccctgcgcgccgcacgatcgagtgtcctctgtgctccagtgcaacacactaagaactggtagaagacaccagggcatgggaactccagggccaaagcagaagttgaagctctcaggttaaatccatggtgtgagctgtgactcaccaggcaatggatcacaagacagaaagttcccactctgttgtcgagttcttattcaagaggatgaaaactcccagtcctctgcccccttcacctggatccaccctcgtgccgaattcgccacccaggcctcgctccta

SEQ ID NO: 316311 - DNA, 617 bp, Homo Sapiens
ttaaaatcatattatcgcatgttttttccaaattaacagggcaataaaaatcctctcttaaaattcagggatatcagtattcatctcttttcatgtaaaaatattaaaaaattagaagtgaaatatcacagaagatattttaaatatgaagacaaataatgaaataaggagaattttaaaagccaaatattttggatcagagtaagaagttagtggtaaaagataaaggttatccaacaaccttttgcaaatgaagccaaaaaagtaggtttgcgcaacactgaataactaaaattacaactcttttatatttcattaagaaacatgccctttttcaaaaagtcagatcggtttaatcacaccataaaattatttacccaaagttaaggaaaaatagcatgctttcatataagtagaaaatttaaatacacaattgatatttaacgttctctaagcaatgtaaagattgcttttaagccatctaacagagttgtatttattattagggatcaaaaagtgtgtaaattagcacaatatattttatataaaatgaatctgttttctcttataagagtatacaattataattctgaattttgaatttattcttaaacaaa

SEQ ID NO: 316312 - DNA, 956 bp, Homo Sapiens
agtttttaagaattattttaatacacttttcctgcgaaactcaattcaaggcagcttcaaggtaaaaatgcttatatttggcatctgtccttgtatttttaggcaccttgatgcattcacactcactacgctcacacccagaagacccccaagaaatccgcttctttgtgcagataaaggaaatgcaaactggtcattctggaaaccagggtcaattctagatttctagaagcctggctgtgggcctcaaggcccttcatgaaagcaagggcctcagattgaccctttccaagcatcccctaccaggaggggaagggcacagattctcaagggaccgtggtgcatgcaggtaaaccgaaacctctaggctggcacgtggcaccactgccctgggagacaagccatccccgctctctgtctggatggcctggtcaatgcagtgtagatcatggatgtgatttctctcactgatatttgggggatacaatttaaaatgtatccaagtatctgatggaaataagagggagctacagaaaatgactcaagctgaggacatataggaaggaatcggttcaggtgtaaggaaggatttctggggaactttcttccttgtgttcatccctccctctttacataaggtcttgagtcacgagcaccttgtgttagatgctgggctacaaaatgatcaaaacagaaggcctgcccactgagagtacacacttccgtgggccacatccaccctccaaagtaatcccaccataacagggcagctgtcatcatggaaggactgcccacgtgcagaggggcccaagaaagtggtcttgtcctcaaagcaacttgagatgaggatcctgtgtcatccaacagctacagcttaggcagatgaatagcggcttccctgggcccaggcagtcctccaattcataaaagcaaacaggcctggggcagtggctcac

SEQ ID NO: 316313 - DNA, 731 bp, Homo Sapiens
  misc_feature (683)..(683): n is a, c, g, or t
aaaaaaaccaggcccatcatcttcgtttcggacagagcaaacagcaacaaggagctgggtgtggaccaggagtcagaggagggcaaaggcaaaacaagccctgataagcaaaagcagtccccacagccacagcctggcagctctgatcaggaaagtgaggaacagcaacaattccggaacattttcaagcagatagcaggagatgacatggagatctgtgcagatgagctcaagaaggtccttaacacagtcgtgaacaaacacaaggacctgaagacacacgggttcacactggagtcctgccgtagcatgattgcgctcatggatccctgacctccctcctccagacagatggctctggaaagctcaacctgcaggagttccaccacctctggaacaagattaaggcctggcagatgcgaaatgcagtcaacgacgcaggattccacctcaacaaccagctctatgacatcattaccatgcggtacgcagacaaacacatgaacatcgactttgacagtttcatctgctgcttcgttaggctggagggcatgttcagagcttttcatgcatttgacaaggatggagatggtatcatcaagctcaacgttctggaagtggctgcagctcaccaatgtatgcctgaaccaggctggcctcatcccaagccatgcagatcactncagaattcaagttcaccctctattccaaagcatttacctaaagaccca

SEQ ID NO: 316314 - DNA, 1074 bp, Homo Sapiens
gaccagccatacacatgcctttatttagatcagcttttttcaaaatgcagccaaacttatgagttggacagcccaaagtaaccagccctattccactgagttagtttaccccacagcagtagaacccagtgctggtttggttcctggcccatggtgggacagcgtgaaggtgatggagggctctagcacaaggaggtgctgagtgccaccggcaggtgcttctgcagacagcctagagcaaggtaagcaggagcactcgcttcagaaccgaggcggctcggaccagaggcaggcactttcctccacatggcaaagggacaagggtttgttcttcctacctcattgctttactaaagggtcaggctaggcatgaccgatcaaggatgggtagggggtaaaatggaggaggaacatgactgatgaggtgcctggaagcctgtaggggtgtagctgctgggtcctttgaggtaaatggctttgaaaatagagggtgaaactgaaatcctgagtgatcctgcatggctttggatgaggccagcctggttcaggcatacatggtgagctgcagccactccagaacgttgagcttgatgataccatctccatccttgtcaaatgcatgaaaagctctgaacatgccctccagcctaacgaagcagcagatgaaactgtcaaagtcgatgttcatgtgtttgtctgcgtaccgcatggtaatgatgtcatagagctggttgttgaggtggaatcctgcgtcgttgactgcatttcgcatctgccaggccttaatcttgttccagaggtggtggaactcctgcaggttgagctttccagagccatctgtatccatgagcgcaatcatgctacggcaggactccagtgtgaacccgtgtgtcttcaggtccttgtgtttgttcacgactgtgttaaggaccttcttgagctcatctgcacagatctccatgtcatctcctgctatctgcttgaaaatgttccggaattgttgctgttcctcactttcctgatcagagctgccaggctgtggctgtggggactctcgtgccgaatcctgcagcc

SEQ ID NO: 316315 - DNA, 1430 bp, Homo Sapiens
  misc_feature (861)..(861): n is a, c, g, or t
cgctcgtctcccttgggtctgctgctcgtgtgttgtactgtcacaaacgtctcgtgtatggtgtaggttgttcacccggtcccacaccccccgcatccaccccccgggtctgcacactctcaggcgctcacaccggtgtatattcccaccaccatgtgtgtgtttctcccctttagttaattttatacaggagcaagcacaacaccatgacaccctgactacctatcccacgtgtcgtctgctcttgtccccgccctccccgcccattgaatgcctgttcctttctgttttgtttaaccccatttgatcgcgccggagcgcccccggctcttcgagcagctggggtggcggcgggtgtgggtagggggcgcgcgcgggtgggccgccccccccatgtattttgttgtgtcccccgtgtttaggtggtcacacccctgttcccgcctgtggtcccccgcgcccgggggtgcgaggggcagaacgaaggagaggccgacccctccacgcaggacacgggaccatcgtgatcgtgtatgtcgtgttgtgcgggcgaggcctctgtcggctgtcgcctattagatgcgagccgtgacgacccttccagaccccgagcttgagatgccatctccatcctgtcaaatcaggaaaagctctgaacatgccctccagcctaacgatgcagcagatgaaactgtcaaagtcgatgttcatgtgttcgtctgcgtaccgccatgttaatgatgtcatagagctggttgttgaggtggaatcctgcgtcgttgactgcatttcgcatctcgtagctgttgatggtgccggactggtctgtgtcatagtgtttgaaaattttctgccaggccnttattcttgttccagaggtggtggaactcctgcaggttgagctttccagagccatctgtatccatgagcgcaatcatgctacggcaggactccagtgtgaacccgtgtgtcttcaggtccttgtgtttgttcacgactgtgttaaggaccttcttgagctcatctgcacagatctccatgtcatctcctgctatctgcttgaaaatgttccggaattgttgctgttcctcactttcctgatcagagctgccaggctgtggctgtggggactgcttttgcttatcagggcttgttttgcctttgccctcctctgactcctggtccacacccagctccttgttgctgtttgctctgtccgaaacgaagatgatggggtgacgtgccagctcccataagcttttgggtttgcaggtcctgatcaatactgcacaccgatgaccagcatccagatgaccagaacagatccccacacacctaccactaaaaccaatcgcctgtggtcattcagaaggcacttggagacctggcactggctcagggtcaggattatgaccatgactgtcactccc

SEQ ID NO: 316316 - DNA, 625 bp, Homo Sapiens
ggggcaggcagagaagccgggagcgggcgaggcggcggcggcagcagcgatggcaggaatagagttggagcggtgccagcagcaggcgaacgaggtgacggaaattatgcgtaacaacttcggcaaggtcctggagcgtggtgtgaagctggccgaactgcagcagcgttcagaccaactcctggatatgagctcaaccttcaacaagactacacagaacctggcccagaagaagtgctgggagaacatccgttaccggatctgcgtggggctggtggtggttggtgtcctgctcatcatcctgattgtgctgctggtcgtctttctccctcagagcagtgacagcagtagtgccccacggacccaggatgcaggcattgcctcagggcctgggaactgacccagctggtcctgaaggagaagccaaatggctgcactggccgattctggtctccagaggaccttggtgtttgctctcccttgacccaccccagtgagtgccaaagggcagccccaacatgtgcacccctgcatttcctgtcatgccacagactggcccttgagggcagcctgctgtactggccatgctgggccagccccccctggagctcagtaaaaactgctg

SEQ ID NO: 316317 - DNA, 670 bp, Homo Sapiens
ataagtatgaactttatttttatttactatgccaacattttcaggagagactttacatctgctttttagaattcattttacaggcaaattctaatatacagtttgtactctaaactgacttaaaatcaatgggaaaaacaatactgcagatattatttttgctctttgttagtaatgacttagagaccttacattctcgggtattattttgttaagtaaacgctttaccaaggagaaagtgggtaagcttattcccaacaagattaaaacatgtatcttcagttaatgacatagttgtagattggtgcccaccatcagaatcatttaatcaaaagtactctctcaaattggctgcagcaaaaacttaaaggggagatgtgaaaaatcactagaaaatagaattcaagcatcagaatttaaaaaggaacaaggccatcatccccaaggaaaaacatcgggtagtacagctataattaattttcaaatgtgtgcttaagcatgcaaacataaccaccccaacgaatttaaaaacacatcttaatggaagcctggttcgggattccaaatacatccccaatgcccctaagaccaggaacccagttgacacctcttgtagaaaccagaaggcaccttagggtttggacaccattatgctcaggacatttgaagg

SEQ ID NO: 316318 - DNA, 745 bp, Homo Sapiens
aaaattttagatgagcccacgggtggttttgcagaggaggtgatgctgatgaaatagggttttgaagcataagcaagagctctctgaacacacatgggtggtggagcccaggctctcagccaggcttttcaaacctgaaaccaaacaactcatggtcgtgtcttgaggagtccaggaggcacttaacgtagcttcagagccctgagagtgcttctagtcatggtttaccagctgggccggcacaatgggactgctgctcaaagctagcagtttggcatctgtcacgggcttctgccttttacaagaaggtcctcaagaccaagaagtcttctacttgttactttttgtcaattacttctcagcaaagcagctcttagcttatcgctgctttgtagaaatgggtatctattgaaatacgtttttttattttcctggctcttgtcccatggggctcccttaccaaaacaatgacttcaggccctttactgtatcctgggtggcccgtctggacctgtttattcctgctgttgagtcctgagtgtctgctctaccctcctctccccctttgccttcctgggcctgttccaggtcagtggactcgctgagctgtccagcagcccaaagggagtgcttcctctctgctcgaacactgtggaaaagggcaagggggaaaggttggtccgttggtcaagtgtttttgggtccaggaccttatgctatataagaagcttatataagaggcttt

SEQ ID NO: 316319 - DNA, 233 bp, Homo Sapiens
gatttaatctaccatatagacaataccttacctagaatgtgttatattttacagtactgtcaacagtttgtaatggcatatgtggactatgttcatgacaaagggacagtgccaccatgtccactgttcaagaaaacctgagtctgtttttaactcctctgcaagtttacagtttacttctctcaatacctgctcatcttttctacagaaggggagtaaccaaaagtcacagg

SEQ ID NO: 316320 - DNA, 1146 bp, Homo Sapiens
  misc_feature (264)..(264): n is a, c, g, or t
  misc_feature (441)..(441): n is a, c, g, or t
tccttcagtgtgcttagtaaagtcttttcccgccccaaccttaaccatgttccatcattatttttccagggaggtataacccctctctttcattttccctctaagggatacccccttgcccggtcttggcactcatgggagtgaaaattctgtcagaacttcccgggcagtcagtattcatcatgaaatggtattcaggatgttggcgccccctgaaattttctttgatcctttcagattaaagcttttaggattgccaacccnccctcgctggatgtgaaacgcaaaacaatttgagctgctgtcttattgtaccttttccccaatgagtttagaagtgcatcctttaacaaaggtggagaagaaccatccacccagattggattcctactggtccccaaagggctatatgcagtaatgacaatgtcatgttgttggcanaatttcaagagttttggctgggtgaaatacggatggcactcaacctggttgctgactggcttgtgtttgagtcctggcttgttcaggatgagctccagctgcctgcggttaaaattggacactcccagggatttcaccaagccagcgtcctttgcaagcttcccatcgcctcccaagtggcacacagatttgacttgtgatataaccatttgccattctcatctctagggtatatttcatctcctggcttaaaggccatgggtacttcaatgatgtaaagatccacataatctagctggaggaccctgagtgtcctctccagggttgggcggaccatctctgggacatgatttgtagcccatagctttccacagtagaagatatcttccctccgcacctttccttctgctatcttctccctgatggcctccccaacttcgtgttcattttggtagatgtaggccccatcaatatgtcggtaccctgtgtcaatagcaaccttcaccgatgttgcacaggctcccttaggggtcgatttaggttctgagtaggtaccaagtccgatgatgggaatgctgtttccatcacttagaggtatgcggtgacttgcagcactgagatccattgtggagaacctgactgtaggagtgattctgaacaccacagggagtctttttagaaaggtgtcctagggcctattccatc

SEQ ID NO: 316321 - DNA, 859 bp, Homo Sapiens
  misc_feature (414)..(423): n is a, c, g, or t
  misc_feature (668)..(668): n is a, c, g, or t
ggtatccatggtaacgaataaatgctatgattttatctgacacagatacacggggatcagcccactaagtgaaaacagtcaatttctatcaagttcttcaccagcagactatgtagctccttattaatggaaaaaaagatttagattgttggccattcttttttggttggtttcttattttaaaatatcttacttgtgaaaaatgtgtttttggataatatgtaactctccacaatgtcgcttccgtagcaattgtagagtttcaaatactgtgttaaatactgtatcccagaaatttggaaaccagaaatctgctatatggatttttgagatctgtcctttaactgcctggcattctctgaggatctctgaaattgttacttaaaaatgtaatttaaattgttcatttattgnnnnnnnnnncttagaaatatactgcttttatatatgattgggtttgctggtccttaacatttcaaggatgtaagtctttgtttaatataaacttatttgttttccaagtggatgatattatcaaaagaataatggattttgaatctattaagggagcaaatttaaatcttccctggttccattggaaaccatctgtccgaaattcaaacaccttcagcaaactttttcttgaaaaggccgatagcaaatatttntggggtggggttgaaattgggttatgggtaatagtttgctgccacccaatttaaaggggtgggaaaactatcttctaacctttggaatttataatttactggtagtcctatcatgatgaggcagttagatatgcttagctcaagaataatcgatctactctacaaagcctattacagagtgtaaatcgtta

SEQ ID NO: 316322 - DNA, 1905 bp, Homo Sapiens
  misc_feature (48)..(48): n is a, c, g, or t
  misc_feature (60)..(60): n is a, c, g, or t
  misc_feature (71)..(71): n is a, c, g, or t
  misc_feature (74)..(74): n is a, c, g, or t
  misc_feature (77)..(77): n is a, c, g, or t
  misc_feature (81)..(81): n is a, c, g, or t
  misc_feature (104)..(104): n is a, c, g, or t
  misc_feature (118)..(118): n is a, c, g, or t
  misc_feature (129)..(129): n is a, c, g, or t
  misc_feature (131)..(131): n is a, c, g, or t
  misc_feature (250)..(324): n is a, c, g, or t
  misc_feature (405)..(405): n is a, c, g, or t
  misc_feature (409)..(409): n is a, c, g, or t
atttattaaataacaataattcctgacaaaatcattcttcgggatgtnttagccaaacantctggtcaaanggngtnagcngtccctcaccccagtaataagcnccattcatattgcnataaaccacangnaaatccaaaagattttctaaatggcttccaaatttctgcacagatgcccttattgagcccagaggtaaatataaacaaattgaaattagagagaaattagaaggatagctgagaggaannnnnnnnnnnnnnnnnnnnnnnnnnnnnnnnnnnnnnnnnnnnnnnnnnnnnnnnnnnnnnnnnnnnnnnnnnnagctacttaatttctgagtaacttaatttctgagttacagttgcttttgggtgaccatgttctctttctgacttgcctaanaaanatgttcagttatttcttttcaaaccctgaaaatacaaaatcagctctttctcaggtgatgccccccctttctactatctacaaaaactttccaaagctttctagaaagcttaaattaaggggctacagtacactgatatggttttgttgttcttggaaggtgttggactcaaacgctcatcgaaggtctgtgatggtcactgctctgtccacaacagtcacgtggctgcagctacagaacagaggtggatccttgctgtgtggatgaaatcctttctggcgacaggaagaaatctcctctagtccatggtcagttagtttaaagaatccagtttcctggaacttgggggagcaaacaatggctactgactctggcaacatcatctggtaagagcagtgagtgtgtaggtcgacactggagagaaacgcggtctgtgtggggtgagtatgaatccagcccagtgtgatgaggccctgctgatcctgtatgaggaaaagttcttcttcgttctctgtgttgcagtaatcagacccagcactttgcttggggatgagaacatgggtaatggtaaattcattcctcatcagttttccacagagaattccacatgtctccactccccgggcagtgttggcactggctaactggagaaactgtgggcacagccgcccaggcaccaccacatggcgcaatccatcgattgtgggaatactttctgagttgctcagtgctccaggtttcaaggacctgtccaccacaggtggcttagctggccttacagttgtgtgacagtctgaaggctgtatggatgagactgttaaggtggggaacacatctaaggagggcttctccaagtcaggcactagcgggccacctaggccagggtctaccttcccaaactcctgtacaattttcagtcgctctttttctagctcctggttccggatcatctcctcgaaggcatggaactgttcctgttccaattgctgctgcttctgttgtgctaccctctgtttttccttttccagctcttgctggatggccatgttccgggccaattcctctgcttccttcttcttttcttcattatattctgtatattctttggtatatcgttttaacagctctgccttcagctcttctgctttgggaaatgcaatctcctttaatttctttactgtgtctttcttttcaggaatgacagcagatttgtaatctcgatgttttggtagtttctcaataaagagcgtgatatacttgttatagaggatgaaggcatgttcaatgttgccttcctcagagtaaatggatgccattcggataatctcaactccagagcggaagtaccgacggggtggaatgtcttcattcacctctaccgcactacccagctgggagagagccctcacccggtcttcgggcgggaggctcacatctccatggtcagacatcaggaccaagttctttccccgcggatgacacccggaggttccccc

SEQ ID NO: 316323 - DNA, 539 bp, Homo Sapiens
  misc_feature (295)..(369): n is a, c, g, or t
ttaagttaattgttactttattgtagaggaaaaatatcctgaaatatttattaaataacaataattcctgacaaaatcattcttcgggatgtgttagccaaacaatctggtcaaatggagtaagctgtccctcaccccagtaataagctccattcatattgccataaaccacaggaaaatccaaaagattttctaaatggcttccaaatttctgcacagatgcccttattgagcccagaggtaaatataaacaaattgaaattagagagaaattagaaggatagctgagaggaannnnnnnnnnnnnnnnnnnnnnnnnnnnnnnnnnnnnnnnnnnnnnnnnnnnnnnnnnnnnnnnnnnnnnnnnnnagctacttaatttctgagtaacttaatttctgagttacagttgcttttgggtgaccatgttctctttctgacttgcctaaaaaatatgttcagttatttcttttcaaacctgaaatacaaaatcagctctttctcaggtgatgcccccctttctactatctacaaaaact

SEQ ID NO: 316324 - DNA, 423 bp, Homo Sapiens
  misc_feature (353)..(353): n is a, c, g, or t
  misc_feature (371)..(371): n is a, c, g, or t
gggatttctgacatgctcagcaggtagaccagaggccgtgtgaccagctcagtgctggtttacggaacaactcttacttttatctttccctgttttgattttgctgaagggagaggtggtggtggttaggatcagagctctccctggcatccgtggggaggatttgctggtggtggcctttgggctcatgcccagacacactcactgccccgtctgtccaaggcctccccttcccctttgctggtgggaggagctcgtgtgctccttggccgcttactggaagggcgtttttcagagctgcagggacagggtgagcagctgaagggctaggagggaagccggcccccgctctncgaagctgcatttcagcngaatctgtgtttcagccgtcagttggttgcaccgttagcccctctctcccgg

SEQ ID NO: 316325 - DNA, 369 bp, Homo Sapiens
ctgtgatgccatgatcagcattcggcaggaaattgctgacattgaggagggccgcatcgaccccagggtcaatccgctgaagatgtctccacactccctgacctgcgttacatcttcccactgggaccggccttattccagagaggtggcagcattcccactccccttcgtgaaaccagagaacaaattctggccaacgattgcccggattgatgacatatatggagatcagcacctggtttgtacctggccacccatggaagtttatgagtctccattttctgaacgcctcttcccagagcatttgataagcaagaaagatttcatcttccaccccagcctcaagtaggagttttatatactgtgtat

SEQ ID NO: 316326 - DNA, 1252 bp, Homo Sapiens
  misc_feature (45)..(56): n is a, c, g, or t
  misc_feature (1194)..(1194): n is a, c, g, or t
  misc_feature (1201)..(1201): n is a, c, g, or t
ttccgatcaaaatgcttttattagaatactaataaatgcagattnnnnnnnnnnnncctcacacagaaaaagaggaaaacactcagaaatgtgattacagattaggcatattagaggaaaaagagttcttcagggtatacaaaatgtaaacatttgccctgggatttcccacagatggcacagtccacatggactcttttggaacaaaaaaatgtctattaagtctccaggatagcttctatgacatctgcaaacttgccacattaaaagttaaagttcctaaacctttctacgcaaaacacaaaatggctcccaatccaggcaactggcacatgtggaagcagaataccaaagcaaatccgtcttccaaccatcagcttcgactccctccagctactgtatttacatttaccttgacagagattacagagatatacacagtatataaaactcctacttgaggctggggtgggagatgaaatctttcttgcttatcaaatgctctggggagaggcatcaaatcagtcctttaaacttagggagagaggactaagaagacgccctcttttgttcagaaaatggagactcataaacttccatgggtgggcaggtacaaaccaggtgctgatctccatatatgtcatcaatccgggcaatcgttggccagaatttgttctctggtttcacgaaggggagtgggaatgctgccacctctctggaataaggccggtcccagtgggaagatgtaacgcaggtcagggagtgtggagacatcttcagcggattgaccctggggtcgatgcggccctcctcaatgtcagcaatttcctgccgaatgctgatcatggcatcacagaatctgtccagctctgccttgtcctccgactcagtgggctccaccatgagggtccctgccacaggccaggacatggtaggggcgtgaaatccataatcctggagtctcttggccacatccacagcctcaatatttgcagactttttgaagggtctcgtgtccaaaataaattcatgacccacataacctcttgcacccctgaaaagaattctgtagtgtgtttctaatcgcttggccatgtagttggcatttaatatcgcagtttccgtggcttgtttaagacccttgcctcccatcatcttgatataagcccaggaaatgggcaagatggaactggnacccatngggccgcactgacggttcccacaggacagggatcctcattccgctttagta

SEQ ID NO: 316327 - DNA, 495 bp, Homo Sapiens
aaagctgtccactccttgaccccatcatggcctttgtccttcatcaagcagccagcaaacacaaggaagccttttgaaatgcaagatgcttggccaatgagaacccaaatccagagtcacagcctgtgacccaggaacagctttgcttgcccaaacgtccgccgcactggcataagtccgacggccaatcgggataaaggaagtagaaccaagcaatagtgggcgtcttgctccattttctctatcacaggcacttagggtttttcctgggagccgtgacaggggtctggagaggcgggtggccagcatggtagcaacgggtgttagaatggcccagttcctcccggtggttcttagctggcaggtgcctcagcactatcagcatgcaggatcctctccaggcaagtgaccagccggatcctcttaattctcagttgacagggcgtattgacacccctggaaaccttttccaggctttctgtgtattctttcaac

SEQ ID NO: 316328 - DNA, 829 bp, Homo Sapiens
  misc_feature (43)..(43): n is a, c, g, or t
  misc_feature (101)..(101): n is a, c, g, or t
  misc_feature (264)..(264): n is a, c, g, or t
  misc_feature (280)..(280): n is a, c, g, or t
  misc_feature (469)..(477): n is a, c, g, or t
attattcggtggccgtgaggtcccctggtaaataaaaaccttnttcatggagtgctgaaaggaccctttcatccaggcatgattatggcaacaataggccntgcagaagcccttttaagcaagattcaatagccaaagcaagttctgggtcccgaagatgaatgcaagctcctaaagggcctacaggtttataggtaaaatgtccttgtctataagcatcatctatggcttcaagaagagctggaacattagggccaaatcttntgagtcgatcagtttnactatcttcaatttcttccagttgcccctgattgtagctcagtgcatgcttcacatctaattcttctctcttaattttgccatgttcttctttgtccttttctatggcttgctgaaactgttcgatctcttgattgactgaattttcttgattttgaaaggcctttactctctcttttaaccaagatannnnnnnnngtctttccaaccgttcaggttccaaagattggtcagtactttttttcagctcttcaattcgtttacaaagctgctcatcatctttctttaatgctttatattcgtttaaggatcggttatataaaacctcagcttcattataggcccttttcttagcaacaacatctgctttcaatgccatacattctggtgctcgtgcatttgtctcttcactaatcttttctagtttgtcttgaatatccttgtacttttgttctgcctcattaagtctgacctgctgttcttccattttcctgtcaagtctagcagcacgatcttctccaattttgatattatctctgatggcattccc

SEQ ID NO: 316329 - DNA, 841 bp, Homo Sapiens
  misc_feature (81)..(118): n is a, c, g, or t
cgttcctttatataacgtcccttgtaaaaatggaaagaataaaacccacccggaaaaagagggggcagggtaaattttttnnnnnnnnnnnnnnnnnnnnnnnnnnnnnnnnnnnnnntaagacgatttattgcttctcctcagcatcctccttggtctcctccttcaccgagagagcttctagcttttccgccactttttcggcatgatcatttttgcctgatcctgctttcttttctctctcttcgatctctttcctgcattcttcaaactttgttttgaatttctgtgcattctcagcattcaggaagcggatggccagcagctctggcttggggcactcgtcggcgaagtcagcgtgggtgttccagacccaggcacggtcgctacctgcgttgggcttcagctccatcatcggcgtgatgtagtggttggcacagatcttcagggtcttgtccctccgcatgaggaggcggatggcccctttctccttgtgcttcaggagcttgacgtcaccagtgcctcgctccttccattctgggagatcgttctcagaggcaaatcggaacagttttgcccgcattttaaaaagttcctcttcatcttcttccagtgttttaatttcttgctcaggaagagaaactattggctcaaactgagggtcatggttggactcgtctgtattctcagtggaagtatcatggtcctcatgagtgtccttggcggccgccatgggggcgcggcggcggcggcggctcggctgggtcggtcgtcgctggctccgcggcctctcggcggctactcgtagctccttccctcgtgccgaattcgccacccaggc

SEQ ID NO: 316330 - DNA, 943 bp, Homo Sapiens
  misc_feature (50)..(50): n is a, c, g, or t
  misc_feature (74)..(74): n is a, c, g, or t
  misc_feature (110)..(110): n is a, c, g, or t
tggggtaggttggggtgggtgcagggggaaccaagttctcaatagtcctnaactccactccagctgttccctgntccacacgggtccactgagctggcccagtccctttnactcagtgtgtcaccaaaggcagcttcaaggctcaatggcaagagaccacctataacctcttcaccttctgctgcctctttctgctgcccactgaactgccatggccatctgctatagcccgcattgtcctcagtgtgtccaggccccagacaaggaaggggagcccatggtgagactccaattcccaggccttaatccttaaccctagacctgttgcctctagcatcatttatttatctacctacctaatagctatctaccagtcactaaaccatggtgagattctaaccatgtctagcacctgatgctagagataattttgttgaatcccttcaattataaacagctgagttagctggacaaggactagggaggcaatcagtattatttattcttgaacaccatcaagtctagacttggtggcttcatatttctatcataatccctgggggtaagaaatcatatagtcccaggttgggaaggggaaaacggtttgcaacattctcctccttgtaggaggtgagctctgtctcactagctatgcccctccatcaattcaccctatactcagatcagaagctgagtgtctgaattacagtatattttctaaattcctagcccctgctggtgaatttgccctcccccgctcctttgacaattgtccccgtgttcgtctccgggccctgagactggccctgcttatcttgctgaccttcatcctctgctggacaccttattacctactgggtatgtggtactggttctcccccaccatgctaactgaagtccctcccagcctgagccacatccttttcctcttgggcctcctccc

SEQ ID NO: 316331 - DNA, 1762 bp, Homo Sapiens
  misc_feature (11)..(11): n is a, c, g, or t
  misc_feature (318)..(343): n is a, c, g, or t
  misc_feature (548)..(548): n is a, c, g, or t
  misc_feature (550)..(550): n is a, c, g, or t
  misc_feature (552)..(552): n is a, c, g, or t
  misc_feature (556)..(560): n is a, c, g, or t
  misc_feature (1295)..(1304): n is a, c, g, or t
ccgccgcgtancacccagaggggaggattggtatttcgtcgagggggcagacttgggggaggtggtcagtaaggggacatcgcgaagcgtatatcgagcccgggtatgggcgggtggttttcctatagccggcttaaggcgcatccacgcacggagagtgcttattgctgggcgaaggcactgacactcccattgcggttttccccgtgtatcctttcggctcccatagcgcggcgccgcggcgtaaaaggccgatgtggaggccctcgcagcggtccgaatggagggttgttcgcacgtcgagcgcggtcgcacttnnnnnnnnnnnnnnnnnnnnnnnnnnttcccccccgcgtcgggcgtttcccagggacttcgtgggaagacccttgcggccctttggggccctgcgctcacgggggcaggggggtatataacgatttggtcaggcgaggtttttgggcggccccgcccaagcacaaccaggatggtgcatgctatgcatgcctcgcgcctcggggttttcgtgtttgtttgttttttctatntntntggnnnnngtgcattaaacagagtcatatatttatttcaaaacattaagttgacttcccattaataaatactttaacactgagtgtagaaaaacttgtgcatattctataaagataatttattaaagaatcagagaaaaagacagttctttacctctaggctattgataaaaccatctgggagtgggaacagcttcaggaatgttacaggggaattgagggagggcaagagaggatttgataaaatgaggaaaaatgttctactctcctttctttcctggagccttaaaattaaaaatctggaattgaaaaatatactttcacacacatatctgcttcaatgggtgctgtctttctcaattttggagaagaatcactagttagtggtcagggtcaaaaattgcaaataagttcccaattttagtctaggttagatcactctggttaatcatagggcccatgatgccctcagaactcaagcaggagctgctgctacttgtgcttaaagctgaggcacgaacgcaatatcatttactggagaactgaagatgctgcgcaatgctaacagcccctctcagaagttctgtgtggctctgagtccttacagtgcagttgttgtattaacccatcatccagtgagctggccagtagttcagcccctccacttgctgcagctgccgcaagacacattcaccaggcagttgcccaggcctctcacccatggggggaacacatctggccacnnnnnnnnnnctgtaaacctcaaatgaaacagaatctcacagatgtggggtccccctcctaattgtaataaacgttagagaaatgctccagaaaggaacaaagggagaccctctcagatcagcctaaaaccagagtggaatagggctcctctgggcggtttaagggcacagaaaggaccctcagctactcctggcctccccgggtctctttcccagaagacacaactttccaggctgccaaaagtaatagaagtcaaaaccctcaaaaccaccactgctctcgggaagtttttgagtaggatgaggaagaaagaagagagccctccttcattttgttacacgatctcaaggccaagagcaagtagaagatgtctaaagagaacaaaagaggtttcttcctggtactgtactacagatcagcaacagtttcacagggaggcgttggctcaggttctggtacatttgaag

SEQ ID NO: 316332 - DNA, 516 bp, Homo Sapiens
taccgaggcactgctcccctgcggtgatgatggctggggtggcagggaagacaatccacttaaccttcatcaagctcctgtcattggccacatattacaggaacaggaaaccaagtactgcacattctcacttctaagcaggagctaaacattgagtacacatggacacaaagaaaggaacagttgacaccagggcctactcgagggtgagggagggaggagagaaaggatcggaaaactacctatcaggtactatgctcattacctgggtggtgaaatcatctgtacacccaacccctgtgacatggaatttacctgtgtaacaaacctgcacatatgcccctgaactcatagatgagacagcgaagactcaggatagctggtccttgaagattagtgtcttgggttgaatggtggcctccccccctaaagatgcgcccaacctctggaacctgtgaatgtagatttatctggaaaaagagtccttgcagatgcaattaaggatcttgagttgag

SEQ ID NO: 316333 - DNA, 421 bp, Homo Sapiens
  misc_feature (373)..(373): n is a, c, g, or t
  misc_feature (392)..(392): n is a, c, g, or t
ttgaaactagacagacatttattttgtgtttgatttcactggttcaaatgtctacatgctggagtaaatccacttgcctctcttcagggcttttcctctgcagtatattaacctggccgaggatggcatatgccactgttgactcctggtcctccaaggcctaggaggctcaccccaccggcagggcctggagccatagcaaactcagaagaaggccacaggtacagtctcagtgacatcagacattgggctgattcctgaggcatcgctcctgtctcccagggacagcagggtctggctctctgataagtaggctaccagggtcacaatcacatgaccactgccaaaagcatcagccccagctggtccgggntccagccagtttccctctngggcagcatgttagaattggggttccccg

SEQ ID NO: 316334 - DNA, 376 bp, Homo Sapiens
cgaagcttatattctcaaaggcccaaagtgctgtgccgagacaaatccaagtgctgctcttgctgaagtgcgcactgaagtccagctgtccgtgcttacagcagtgccaaaagtggggattccatggaccaaaaacggtgccataagggaagccagaagagttgcagtgcaagatcctgggagagattataccaaagaaatcaagcctttttatcctgatgcttctaagatgatgagggtgagctgtgacagatgctgtgggaggggagttcacatacattccatgtcaaggcatttagctgataaatccatcctcagaaaagcacctttttaagccctggcagatacaaagttcctcagtatttaagggggaggg

SEQ ID NO: 316335 - DNA, 358 bp, Homo Sapiens
gggaaaaaggttgaagtgatacagatttcagcttaataaaaggaaggcggcccgaaaaatggaactgttcaaaaccacaatggcttcatttaatgggttcgatgtccccagtctgcaggaatgctgtagaagattcaggtagtgagaaatacctcaacaaacattgaaaacacccatccttcggagagcttgaagccgcaagtgtccatcttccaggatgcacgggactccccgagccttcgtcctcccattactatttaatatccgcgctacattgttcggcgcttggtttccctccagtatgcgccgtggcagccagtgagacgcccccagggagcacaaccgcagctcactattt

SEQ ID NO: 316336 - DNA, 623 bp, Homo Sapiens
  misc_feature (25)..(25): n is a, c, g, or t
  misc_feature (29)..(29): n is a, c, g, or t
gtagacatcattttttacaaaaggncganatgataaaggtccacaagacctcacccagaacggctgttgcaggaagcagaggcttgagcagcctatagccagaagcccaggcagggggtgtgccaactacacaggcccacatgaagagcctccatgaggaagacgttatggcaagaatcctctaagtctccaagggacgagatcagaacaatgtatggaaggtgaagtgatacagatttcagcttaataaaaggaaggcggcccgaaaaatggaactgttcaaaaccacaatggcttcatttaatgggttcgatgtccccagtctgcaggaatgctgtagaagattcaggtagtgagaaatacctcaacagacaagaaagctacttcaaggacttccttcggcaaggcctttcaaacaagttttaacattgaaaacacccatccttcaaagagcttgaagccccaagtgtccatcttccaggatgcacaagactccccaagccttcatcctcccattactatttaatatccacactacattgttcggcacttggtttccctccagtatgcaccgtggcagccagtaagacacccccagggagcacaaccgcagctcactattt

SEQ ID NO: 316337 - DNA, 466 bp, Homo Sapiens
  misc_feature (56)..(56): n is a, c, g, or t
  misc_feature (103)..(103): n is a, c, g, or t
  misc_feature (141)..(141): n is a, c, g, or t
cccctaaaattcgctccctgaccctgcccttatcccaaaaactgcaatttttattntttggcccactaacttcgaattattcttgtacccaaattcaacaccnaatttgtgtgaggaacaaatcagcccataaattttttntctgtaaattgatgaagcaagcaagattttcctactcccatgtccccaataataatatatttaaagatgtaagagtagttgtatggtgcagttgccatggtggcactggggggttgctggtggctgggcagctttccgggcgggaggggggcgtcaggaccaggaacaggagtgcggacgcagcgggagagggggcgggggcggtcgaccgaggcgccggcaggtacactggcaggccgagaggtgcagacgcgccggcagcagtagcggcagtagcagtggcagcggtgactgctcctgtgctccctcagtatcttcctcgggc

SEQ ID NO: 316338 - DNA, 374 bp, Homo Sapiens
caagtcagcttccatcagtaagatcctggcgatcaattttgtccgctccccagactcgtgaacgatgtagagtgcgaactcactggggccatcttccaccctaaatttgttcagcagcagggtgagcacctgcagggttgtcatggtgctgttgaccctcacattggtcacggatccataggctggagtaaacacggaggtcttatgattgtagaagtggccgttgatagagaaccggtgtcgccggatgcgctgggcctcaccgggggcgcggcacttgggcctcctctggctcatgcaactggcgtcgctcttggtccgcatcagctggggggcctcctctgcctcctccaggggccccgagctgtctgtgg

SEQ ID NO: 316339 - DNA, 1059 bp, Homo Sapiens
tttttcagccttggaactattcttttattgaacatcagtaacagaaagatgcttgatttaggaggaagctttccctccctccctcccccattgcaccccggaactcagcaaaggtgagccagccacagagcataacactgtggctggggacacatgtccatgtgtgtttcacatacgtgggcatctgtgccacaagggtcatgtggcaccacagttcatcagctgtgtttccccttcctgccctgctgcagcgccacaggttggaggaaaagcctgcctgtgagcagggtcccggcagggcccaccccacccaacagtggagatcgggcctcagagctgggcagtcatgggagttcagggcctggctcgcctcggcagcctggtcttaaagagggacttgcccgaggcctcgatgtaagtgacagtcatctctttggagctgatctccacataggcaaagccacccagtgagtcttcagtcccatagtggaagcgcagatagccgttggggaccttgcgctggtgccgctttgaggggtccatgaaattcccagccccactcagcacgtagcccacgccattctcatcttgcaggtactgcagattgtgatcgtggccgcacaggtaggcagtgaccccgtatgtggccagcagtggccgtagctgcttgaccaggcagtgggtaggcccgtgctcggctatggaccacacggggtagtggccagccaccagcacgtagtcctccctggccgccgccagctgtttcttgagccaggacagctgtgtgcgggccagcttcacgtctcggggcctctcaggctgctggctgaggaagtcatcctgagttgcccacatagtgtcactgtgtcccagcataaaaatggcccacagacacattggtctgtgggatcttgaagtgcaggcggtagaaagggctggggaagttccagcgcttggagatcttagagtatgcaatctgggcagagacattgccaaggtggtcatggtttccggctagcacgtaccagggcactttgcgaagggagcggtcagagaata

SEQ ID NO: 316340 - DNA, 1232 bp, Homo Sapiens
gatgtacggacggggcgagcgcgctggcgaatggcggtcggggtggtgggggtcgatccgtccgggtagatggggacgcactgcgctggctcatgggtctgggttatcgtctgtcgcgtccgttgtctttatattgcgaatggggcgattttatggaattcgctgctagtcggttggtgttcggaaagaatgaaggcagcggtcggcatccgggggggtgcgatccgtatagtggggaaggtggacggtagtgaaactgttagaggggggcgattgggtcgagggtctggtcatcagggtgcaaggtgctgggcggcaaggcgtcaagcatttgaggctgcgctgtcaggcgtccttgcagagctccacgatggcctcctcttcactgctcggggcatcatttgcggcctcacacaccatccggacgtgggttaagagggtgtccggccgctgagcccccagccagatgtcctttatgtagagagacactaggaatgctgcggaggcttgtgtggcttcatccttctcactcagagaagacagggagagggcttccatggccgggtggaaggggctccctgcccggccctgggcggccaccagctgcagcatgaccgtattgaacaggcaggccacctcctgcacaggccctgccagcccctcagccccacagagccggctatacagcctgaatatgctgctcctcacggcactgtccttaaggaggtcagccacgaccacagggtgtggcaaaatatggctcttaagccagccaatgagtcctgcagcctctgccctgctgagcgggtgctcggccaccgaccgcagcacccaactgactgccagggaagcggcagcatatacggggcctggcgcatcgctctcggggctggctgagtccacaggctcctgagtggggtcaggaccagggatcactggtctccagtaagtcaagatggacctcaggaggcccttgcatgtctccaaggtagatgccatcagctcagggtcagccatctcctcgtgcctcctcaggcctcctctttcggccccgcatgagctcccgggcttgggccttctcaatggctgctctcaggtcttcctggagcttgaggtctctttcaatgaggctccacttgtgcaagaggacaaggacgtccttggtggaaagcactgtctcatttacggtgaatctgttcatgtccctaaaggcctgtatgacagtggcccgg

SEQ ID NO: 316341 - DNA, 680 bp, Homo Sapiens
  misc_feature (26)..(26): n is a, c, g, or t
  misc_feature (105)..(113): n is a, c, g, or t
ccataagaggatattttccacaagantcctcaggattcccagttccctgttctgaaacctttggaggtacaactatatttaggcaccactgcccataaactaccnnnnnnnnntgtaattcctagaagctgtgaagaatagtagtgtagctaagcacggtgtgtggacagtgggacatctgccacctgcagtaggtctctgcactccctaaagcaaattacattggcttgaacttcagtatgcccggttccaccctccagaaacttttgtgttctttgtatagtgaagataagattcttctaaaaaagcttcccaatgcttgagtagaaagtatcagtagaggtatcaagggaggagagactaggtgaccactaaactccttcagactcttaaaattacgattcttttctcaaaggggaagaacgtcagtgcagcgatcccttcacctttagttaaagaattggactgtgctgctcaaaataaagatcagttggaggtaggatgtccaagactgaaggtaaaggactagtgcaaactgaaagtgatggggaatcagacctacgtatggaagccatgtagtgttcttcacaggctgctgttgactgaaattcctatcctcaaattactctagactgaagctgcttcccttcagtgagcagcctctcctcccaggattctgg

SEQ ID NO: 316342 - DNA, 453 bp, Homo Sapiens
  misc_feature (18)..(18): n is a, c, g, or t
tggcctgaacctccagangccccggtccccaccctcccggaaactttgtgtcccttggtatagaattttaggaacttcctgagggccccacaaatacacacattaaaaaaggtagaatttttgaagataagattccttctaaaaaagccttccccaatgcttgagtagaaagtatcagtagaggtatcaagggaggagagactaggtgacccactaaactccttcagactcttaaaattacgattcttttctcaaaggggaagaacgtcagtgcagcgatcccttcacctttagttaaagaattggactgtgctgctcaaaataaagatcagttggaggtaggatgtccaagactgaaggtaaaggactagtgcaaactgaaagtgatggggaaacagacctacgtatggaagccatgtagtgttcttcacaggctgctgttgactgaaattc

SEQ ID NO: 316343 - DNA, 934 bp, Homo Sapiens
  misc_feature (867)..(867): n is a, c, g, or t
  misc_feature (912)..(912): n is a, c, g, or t
gatgattgtattttgttttagttgacatcattctcaacttttagaaatactgttgaggaaaatgattaccgttggttttcaaattgacaactattttgcttccaaagacttcagtttccctttgttttatgtgtagacctcatatatgttcaacacattgcatactgccttgcacattgtaggaattcaacaagtcaagagttgataaaagctagaaagataaaactagcttagctatcatatcatcattgtccatattcttagctttgggaaaaatataccattttgcataaaatacataatcagtttcaaatgcataaggcaaagatatacagttgcacaacattgcaagtgaaatttacaaaggatttttatttttgtgtatgctaaaagtgctcctacttaaagcagttttctttattagaccaacaccttccagcaaagttagaaaccaaacacaagtgctcatttgcccaaattaaccagatagttatgtaaactgttcatattaagtctttagtggtttacaaacaataacattctggcttttcttccataccttttaggaatcagccttaattttaagtatagcagtcactttcctcaaggtactatgcagcatactttagattgcttatttatcattataaggtgataggtaataaatttgagggtttacttgtcatataatttcatatggcagatattgattcaaggagcattctattagaaaaagttgataaattatcctcccttacaaatatcatcttgcatttggagcaggtatttttttcttattagttaaagactgggtacagttatagtagatgctcaataaatgcttagtcagtgattgatctaacatcnaactaacagctttcagaaaggagactgttgacatcttttcaccanggggtatattggtagagtaata

SEQ ID NO: 316344 - DNA, 425 bp, Homo Sapiens
acacgtctcagtggccccttttgctaaagaattttgataagctgaatgtaaggacaacacactatacacctcttgcatgtggttcaaatcctctgaagagagagattggggactatatcaggacaggtttcattaatcttgacaagccctctaacccctcttcccatgaggtggtagcctggattcgacggatacttcgggtggagaagacagggcacagtggtactctggatcccaaggtgactggttgtttaatcgtgtgcatagaacgagccactcgcttggtgaagtcacaacagagtgcaggcaaagagtatgtggggattgtccggctgcacaatgctattgaaggggggacccagctttctagggccctagaaactctgacaggtgccttattccagcgacccccacttattgctgca

SEQ ID NO: 316345 - DNA, 414 bp, Homo Sapiens
agaaatgtccctaaactgaagaacagccggggaatgcaagtagagcaaggtcgtaggttgttccgactgctctttaacgacctgcctggcagggaccgactaccgtgctcctacccgcagccccatgtggagcaggcatccaccagtgcctccccgcgcttgctagcagtgaacattcctgaagacactctcctctcttatcgtgaatcctcgctcccactgcagagacactgcgccttccataggttctccaaggtcctcagtgagctctgtccgcgctgcctaccatccacaccgtgcgccatccccttcttccttgcctggtaaaaagattcacaaaacccggcgactagaagcccatgcagtcttccttggagctttgactgtccctcgtgccgaattcctgcagcccgg

SEQ ID NO: 316346 - DNA, 637 bp, Homo Sapiens
  misc_feature (99)..(99): n is a, c, g, or t
cagcttctcaagtcagctaagtcagacagaactgcagagatagaagtagaagggaactcagattcttcctcagctagggtagaatccttggaacagtgnaggtctttaaattctttacaatcgtcatatctaccattgttggactgttcttctgcatgctgtgacctgatatttgacatgcaggggaaggaagatcttgctcagttcctggatcaataattgaggagtctcttggtctcattgtcagaagtgctcggttggggtcaggaccatccctggtttctgttttcatgtcactgatgcagctgtctacagtgtgctcctcatcactgctaacacgccgccttttaatgggagttgctccttcatcatctttagtttttctttctttggcttcttgctcttggagtgagtttctctgttgcagacaagtcctgcatttgcttaaaagctcttgcagagttggaattagagctgggtttaactgtttgggagtgtgtactgacaggagcaaagcgagtgccctcaggtcctacaaaaacccagataggaacatttcaaattctaaagccaacactttgatgcagttgtttacagttaattgcagatgtttattttcccaggaatccattctttc

SEQ ID NO: 316347 - DNA, 1206 bp, Homo Sapiens
  misc_feature (1098)..(1098): n is a, c, g, or t
  misc_feature (1147)..(1147): n is a, c, g, or t
  misc_feature (1155)..(1155): n is a, c, g, or t
  misc_feature (1178)..(1178): n is a, c, g, or t
tatgaaggtttgccacttcatcttgcactgttccccaaactttggactgagctatgccagactcagtctgctatgtcaaaaaactgcatcaagcttttgtgtgaagatcctgttttcgcagaatatattaaatgtatcctaatggatgaaagaacttttttaaacaacaacattgtctacacgttcatgacacatttccttctaaaggttcaaagtcaagtgttttctgaagcaaactgtgccaatttgatcagcactcttattacaaacttgataagccagtatcagaacctacagtctgatttctccaaccgagttgaaatttccaaagcaagtgcttctttaaatggggacctgagggcactcgctttgctcctgtcagtacacactcccaaacagttaaacccagctctaattccaactctgcaagagcttttaagcaaatgcaggacttgtctgcaacagagaaactcactccaagagcaagaagccaaagaaagaaaaactaaagatgatgaaggagcaactcccattaaaaggcggcgtgttagcagtgatgaggagcacactgtagacagctgcatcatgacatgaaaacagaaaccagggaggtcctgaccccaacgagcacttctgacaatgagaccagagactcctcaattattgatccaggaactgagcaagatcttccttcccctgaaaatagttctgttaaagaataccgaatggaagttccatcttcgttttcagaagacatgtcaaatatcaggtcacagcatgcagaagaacagtccaacaatggtagatatgacgattgtaaagaatttaaagacctccactgttccaaggattctaccctagccgaggaagaatctgagttcccttctacttctatctctgcagttctgtctgacttagctgacttgagaagctgtgatggccaagctttgccctcccaggaccctgaggttgctttatctctcagttgtgggccattccagaggactctttagtcatatgcagcaacatgacattttaggataccctgtgtagggaccattggaatctacaatccatggtcgtcacaagggatatctnggccaaagggaaaccaaggttgcttttttgacattaggggtgtagggcntgtcttantttttaaggtccctttaaccccncaaccccctggttgttttgtattaggtt

SEQ ID NO: 316348 - DNA, 1033 bp, Homo Sapiens
ggcctgggtggcgaattcggcacgaggcgtgctctggcctgagtgccacagccagggcctctgctctgtacacagaccgggcaaggtcccccaggccaggatgtcaggcctggtgttggggcagcgggatgagcctgcaggccaccggctcagccaagaggagatcctggggagcacacggctggtcagccaagggctagaggccctacgcagtgaacaccaggccgtgctgcaaagcctgtcccagaccattgagtgtctgcagcagggaggccatgaggaagggctggtgcatgagaaggcccggcagcttcgccgttctatggaaaacattgagctcgggctgagtgaggcccaggtgatgctggctctagccagccacctgagcacagtggagtcggagaaacagaagctgcgggctcaggtgcggcggctatgccaggagaaccagtggctgcgggatgagctggctggcacccagcagcggctacagcgcagtgaacaggctgtggctcagctggaggaggaaaagaagcacctggagttcctggggcagctgcggcagtatgatgaggatggacatacctcggaggagaaagaaggcgatgccaccaaggattccctggatgacctctttcctaatgaggaggaagaggaccccagcaatggcttgtcccgtggtcaaggtgctacagcagctcagcagggtggatatgagatcccagcaaggttgcggacgttgcacaacctggtgatccagtacgcagcccaaggtcgctatgaggtggccgtgccactctgtaagcaggcactagaggacctggagcgcacatcaggccgtggccaccctgatgtcgccaccatgctcaacatccttgctttggtgtatcgtgaccagcataagtataaggaagctgaccacctgctgaatgatgcccttagcatccgggagagaaccttgggagctgaccatccttctgaggctgccacactcaacaatttggctgtgctctatggcataaggtgcaagttc

SEQ ID NO: 316349 - DNA, 670 bp, Homo Sapiens
  misc_feature (15)..(15): n is a, c, g, or t
  misc_feature (206)..(308): n is a, c, g, or t
gccagatccaagaanccaaaacctttcttcctggtgcccattgaaagtgactgagcacgttccctgctctcccggagtgtctggatatatttatatttatcaggtaatgtaccgttggatgtaatcactgcatctctcaccacaggagaaaaattctgactttcaagaggctgtgtcgcgtctgataatatctgtggtcctggctnnnnnnnnnnnnnnnnnnnnnnnnnnnnnnnnnnnnnnnnnnnnnnnnnnnnnnnnnnnnnnnnnnnnnnnnnnnnnnnnnnnnnnnnnnnnnnnnnnnnnnnatcatttcttcaacataagggtaaagcatgtctccaaagcattctgtagcttcaattgggagctgtgccggcaaattgtcaatggaacacatcaggatccccgagccttcaacactgtcatgaataatatgctggtctgcatcatacatgcaaaagggatgctctattgttgtacactcagtcataaactctatagaccctcctgtgtcagctgaaatgtcacatattgccacgagtctgaaaataacatcaatacttagatgagaggatgaaattctgaagtctccaacaagattgtgtggtaatgcagggcagccttccacaccagcaggtgagaacttgcccggagccaggagactctg

SEQ ID NO: 316350 - DNA, 629 bp, Homo Sapiens
ctcttgtacatcctttcacacacatctcatcccaagctatcctaaggcactttgcttagaagatataaaaattaggcaggaacgcacaaagctaagaggttcttacggtctcaaaaagcagttttgcctctagatgaaagaaaagcaccatgtcaagcaaacttttctattggctatttacaaaaataatacaaaaattagtaataagctttacaggtagctgttaaatgtactaatctgtatgattttgaaaaatagtattttaactatagcattatacatatgctagaaaccattttaaccacagcatgggtgagagagggtgctacctgcccctttgtcatgtggacactgcaccaggcagttcacagtctttattatgaggtcactggcatctctccatcgtaaagctatgagcacagggcctgccctcatttaatcatctacatgcagtgtatgtaggtaagtatttacagatgacaaaaccaaacagagtttaagctacgatagtgaaagaagaagattttaataatcctgaaaaaattgtagatagtattgtcttcacagggtatgtgaatgacagattcaaaaaagtcttttgggatagcctttcaaacattctatttctc

SEQ ID NO: 316351 - DNA, 711 bp, Homo Sapiens
gtttgggggcagccagagattctttttccctttgtcaccacgaatatggaaaatagaacagacgaattaagaccaacttgatttttaaacgtacttttaaatcaacttcagtgtgcaaatagatccctttcgcaaatatcttctgtttgcccttgatcttttcttatccccacccagtgctgatccagcaaacgtttaaaggtcgaccttaccatacttgcctctccggctgttaccgtgagagggagggagggagagagggacagacggaggttttttaaaatcagactaaaactcagaaaccctggccttaaacagaataatcaatagttttaatttgtgtctttgcttttgttatacttgctgccgaataggtattttcagatttagaaaaatacacattgaaaacaaaaggcccagagaagctggattttattatattgtatgctcttagtatacttaaggccgaaactatatagaataatttggttcataattatttactaggatgaagttcatttagtactcagtgtctttaattttagcatcatgtactatggaaattaaaatgatcttcctaacgtaaccaaatttttaaatgtcagtgacagagcagatttaaacagtatatatccaaagtaaactaaaacatggattcacttctaagttggtgaataacaataaaaattactacctaaaagtggcatctat

SEQ ID NO: 316352 - DNA, 598 bp, Homo Sapiens
  misc_feature (105)..(105): n is a, c, g, or t
tgcttcattactgtttgtggcatgctttctttagcaataaaggggtacatacacttgtccgctcctaggaaccgatacatgcacacaactgcttcaaatggtagnatgctcttcatgaaggtcacgatgtacatgaggcggggagtgcagatcatgggctggtcagtgaggatggccttcatggcctgcttcacacagtaatcaggcttcagaggtggcagaaaaggctcaatttctttcgtgattcgaattccatccttttcagcagcctttagttcatggctcagggattcatgaaaacccacaactccaaatttactggcacagtaatcctcaactccggcagtactgaacaatcccaaggaacttgcaactgtcacaatatgaccatgattaatctccagcatcgtaggaagaaaagccttagtggtccagaagtgtgcatggcaattgaccatcatggttctctcaatgagctcatcaggacattccagaaggtgatgcccagagaccacaccagcattattgaccaggactgagacttcgccaacctccttgcggactctttcagccgtcaggtagacgttctccctcttcc

SEQ ID NO: 316353 - DNA, 623 bp, Homo Sapiens
ctcgtgccgaattcggcacgagcgcccgctatccacatccttctagagtcagaatggtagggtccgttgacttcagcttttgattttgcaggatggccctgtgtcctcctctgccccattccctggttcattaaccagtttgaagtgtatgtagattgttgccccgtctttcccaggtcacatgtgtgagatgcctgggtgctgcttcagaaatcaagatgatctcctttaatttgcatgaaactacaccatgctgcgttccccaggcagacagttctgctttgacacaccaaagaatcctgtaggctagcagagccgccagcacaaaccaagggcgctgggtgtcgagactcagaggggtcagctgtgtccctcggcatcagcgtctaccaaggtgctgctaggtacagagccagccagtgttgggcagcaggctcacagcctcaatagggagaaaagacaaaggcctcaaaatgacaggcagcctgacagaggaaggagtctgacacctcagcttgaggcgtctttggaattcctagctcatctcagaattatatcttagagtgataatatgggtggtagccagtggccaaacagcaagaactaagagtggcccttgtcaa

SEQ ID NO: 316354 - DNA, 1219 bp, Homo Sapiens
ccttttgctatcaggaaataaaactaaaaatggtgtcattgagtaaaaacaaaacaaatggggagaaaaaaattctccgggtaaacggcatttctggtattctatatatatttttccttaaactgtcaccttttctctacattttaaaagacacccggagttgctctcaataagcacatcacttaacacttggccagttgggtggggtgccatgttctgaagtggaggtggggatggggttgggggacaggggaaaaaaagctccaacctgtagcctctgtcccaagggaatgtgcctctccaatcctgcgggggactccctcagtgactgagggctatatgagaaacgtgctgggaacagaggacgggtttagtccaattcagtctctctcctctgacccagaagggtctctagtgaccctatgtctcacatgccaagtctcatctcacatgccacgtctcatgttaggtgtcagatgccctgtagatgcatgcagaagtagcatcaccccatgggtaccgcaggacctcgctgctgcctcctccttcagcagcaaccacattacaatttggatgttatggaaaagcaattccatttgcctgtagagaaaatggcccccagaatgctggtccttagaactctgagctgagttcattcaagtcgggctctgtttcttctggctcctcatctgaggcaggaagtatctccaggcagagtgagaggagctattaagtcaacagtcaaaaggtgaaaagacaccaaatttgtgactttacctgcctactagtgccaggttatcccacaataagtaaaagtatgtacctgggggatgtaagcccatgcttacatcaaacctgaaaaaagaaaagcctatggaagtaggccatatcctgcccaacttgcttctttccccattcctcctggttacttcacaagggttcttcattgctgaggtcccaatgtccccatctcccaatgggcagtaccttcctctaaaacaaggaagtagccttctgggggaagggctccatgtgttacatggaaaagccccagggaaagggaacaactaagagttggttattgcaagaggtactcaagcactaagcagcagagggtggtaattggctgtgccaggtttcccagcagcaagcagcctcataggcattctttgcttaggaggggcaagtccggtgtagaaggatgggcagagcagagttg

SEQ ID NO: 316355 - DNA, 731 bp, Homo Sapiens
ttaatagcaaaaatgtgtttatactataatagcttacaaccatcttttcaaccatctttttcaatacaaattaaacatattcattttcatattttacatttctcacctctataacatataccataaaaatcccagacattgttggctggctgattcttgcaaagagatgcataaggtaaactaggtcaaggtacatcttaaccattttgggtgtcatttagtcagtcagtcatgaaacagtaatatggagacataattttgaaaattaagcaaatgaatctgttctctagaaatgccttttctcgagttatagtattatatttataactattaaaatttatacaaatcagtaggttttatttccacaccttcacaatcccatctctagaagcagttacgatgaagccctgtgtggtctggaatgtggcgacatcagtgatgatgtcatgatgtcccacgggcagggactctgggccccttcgaggggtgtcatcacttggtcctactttctgcttattctgaatttcctggacaacttcagtgccttcaattattttcctgtagtaggacacagatggggaactagtacttcctgcaacaacataggacctttctgggtaagccaagtcccaaaaccttattttcatatctgagccagctgttagtaggataggatttccatctgcaggactacagtagataccatggacgctatgaggagaaggcttaaa

SEQ ID NO: 316356 - DNA, 648 bp, Homo Sapiens
tctggtatcaagtcacataattaacacacttcatttacacactaggtaagctccagctattacttctactggaagtattcttcattaatagggctttatagcataataccttcaataatgaatgagtttccttcatataaattactgactttaggatatttttaaatgataaagaaatacaaccctcaaaatcatcttaaaattgtactgctcaaagccccttcccccaattactggcctatattagattaaaatgtactttaaagtcttcatttctaagtacctatcatctctgtagaataggtgttctcaaacttactaaagaatcagagatctcttggtaatgtatcacaagctacttttatattaaaattaaagtaactacataatcttctgctaaacagatatcttgtgatatgctgtaagagtggcagaaagtgccaaaggcataataaaatttcatggaagaaaaattaatagtcagaaaattctatccaccaactctctttgtttccctgtgaatgtgctattatctgacttaagcaaacaaaactccttaagtcactattcagaagaccacgactctgttggagcaaagtccaggccttagttataaaagaccacttcaatgcagaatagcttactgtg

SEQ ID NO: 316357 - DNA, 690 bp, Homo Sapiens
tcgggcgttttacttttgcggggcccacgggcaaagaattgttctttccccaggcccctttaaggcccagtttggggggaaaacctttgttaggaaccagccaaagcctggaagaatgccttcctcaccccagggtaacatcttttcccgcatttttgagttgattccctgtttccggaaccatatgttgttcgggggtgccatatcctttctgagttagccaggaggacccaaaagacccctccaattcgtgcgttttttacagggggctttagatgacgtctcatttgagaagaacccatctggacatcttttgcaaactgtatttcgctctggggttccagcttgcaccactccaaatccaggagggcagctcctatgtttcaagcagaactctatctcaaggtagcgcccttccttgcattcgcacacgcggttgtgggtgcgattgcactcctgcttgacgtactgcagctccttgcacacggggctgcagtatagacactcgtcactggtgtgccagctgtctgtgtagtagaggtaggtaccaggaggacatttgtcacacaacagctgatgagaggtttcttcgtcataatgaaggtactttggaggaaacgtttcctgggtggtccacttaatggagatgtccagaaacacgagcgcgcagcacagcaagttgttcattgt

SEQ ID NO: 316358 - DNA, 677 bp, Homo Sapiens
  misc_feature (19)..(19): n is a, c, g, or t
  misc_feature (100)..(100): n is a, c, g, or t
  misc_feature (129)..(129): n is a, c, g, or t
  misc_feature (135)..(135): n is a, c, g, or t
  misc_feature (170)..(170): n is a, c, g, or t
tagagaaaagcagggaagnccagaaggcagtctggcttatctgattgaagctcaagtcaagggtattcgagtgatttagaccctttaaaagcagctgaancagcatcctcttcaagccggttgtgctgnagatgnatgaaggtcaggtttaccatcctttcaaaagagcncagcttagtgatcctgttatgagtaagctgcagatcctccagagatttggaaagtgggcccacagactctgtcaggttgttgatcttggagttttctagaaggttgtgatctagaatgagccactgcagatcagttacattctcaaaggccttttcatcaatatggtcaatctggttattcctaaggtaaagatacttgattccaggaggcaccattggtacacttttcaatttcagctcatcacagtacatggcacttgggtagctttcagggcagttacattctggtgcacagtttggtgatgattgcccataaattgataggggaaaatcataatcatagtactggccactggtaccaccaatcaatgccaggaagagagtaaatgcacttagactcatttttggcaaatggtttgaatccttactgtcttgacactgctttcgttaattcttaaagcagatgcactatggacaagaatccaccaatatatgctgtgaactctg

SEQ ID NO: 316359 - DNA, 934 bp, Homo Sapiens
aggtaatagttttcaaggttttcattgacagttggtatgtttttaagcttgttataggacagatccagctcaaccagggatgacacattgaaagaatttccaggtattccactatcagccagttcgttgtgagataaacgcagatactgcaatgcattaaaacgcttgaaatactcatcagggatgttgctgatcttattgttgtctaagtagagagttagaagagagacagggagaccagaaggcagtctggctatctgattgaagctcaagtcaaggtattcgagtgatttaagacctttaaaagcagctgaaacagcatcctctttcagccggttgtgctggagatggatgaaggtcaggtttaccaatccttcaaaagagcccagctttgtgatcttgttatgagtaagctgcagatcctccagagatttgggaagtgggcccacagactctgtcaggttgttgtggtttatatgcagcttcttcagttgtttcaatttagagaaaactctcccttttatcttggagttttctagaaggttgtgatctagaatgagccactgcagatcagttacattctcaaaggccttttcatcaatatggtcaatctggttattcctaaggtaaagatacttgattccaggaggcaccattggtacacttttcaatttcagctcatcacagtacatggcacttgggtagctttcagggcagttacattctggtgcacagtttggtgatgattgcccataaattgataggggaaaatcataatcatagtactggccactggtaccaccaatcaatgccaggaagagagtaaatgcacttagactcatttttggcaaatggtttgaatccttactgtcttgacactgctttcgttaattcttaaagcagatgcactatggacaagaatccaccaatatat

SEQ ID NO: 316360 - DNA, 485 bp, Homo Sapiens
  misc_feature (28)..(28): n is a, c, g, or t
  misc_feature (37)..(37): n is a, c, g, or t
  misc_feature (47)..(47): n is a, c, g, or t
  misc_feature (60)..(60): n is a, c, g, or t
  misc_feature (155)..(155): n is a, c, g, or t
aggctgtttcagctgccttttaaagggncttaaaacnactcgaaatnccttgaacttganccttcaaatcagatagcccagaactgcccttctggtctcccctgtctcttcttcctaactcctcctaccttagacaacaataagatcagcaacantccctgatgagtatttcaagcgttttaatgcattgcagtatctgcgtttatcctcacaacgaactggctgatagtggaataccctggaaattctttcaatgtgtcatccctggttgagctggatctgtcctataacaagcttaaaaacataccaactgtcaatgaaaaccttgaaaactattacctggaggtcaatcaacttgagaagtttgacataaagagcttctgcaagatcctggggccattatcctactccaagatcaagcatttgcgtttggatggcaatcgcatctcagaaaccagtcttccaccggatatgtatgaatgtaa

SEQ ID NO: 316361 - DNA, 621 bp, Homo Sapiens
ccagcctaggactttaaaaatctccccaaataaagggttaattcccagtggccaagcaaataccttggtcacgacttgaagaattgccaaatcaagcctgggtgcatgcatcaacacccaagaagcctgggggtactgaagatgtgaccaggtgcacatcggctatcttctctggttacttagaaagagagccaaaactcagttaatgctcaaaaaggatttctagacagaaatactatactctcagaagtcaggggtctagtgaagggcatctgcatttcaacacaaagccatactcacctgaagcgagggtgcttgtttattgcttcatctggaaagaagagggacttggaagctcctccttccactgggttgggtttgacctcgggcagtgtgacttctaatatagaagtagcctccttccggcgttttcgcatgttggcctcaactgtattgaactcggacattgttcctccgtagggctgtcctggtgtcccttcaatcatgtaactcccatactctggtctccaaagggtaggatggtttgggtttgtcctttcccccttctcttgcagagtttcaagaactttctccccagacaggaccaaccggactttttta

SEQ ID NO: 316362 - DNA, 1627 bp, Homo Sapiens
  misc_feature (1090)..(1098): n is a, c, g, or t
ttgttagggaaagtatctttactcatgcaatgctttcatgctgagatttcagcacatatatactgctgaaaagataagtatctttataagtgagtggctgaagacataagagaggcatctctccatggtatgagactgctcagtttaggaggtgatgcagctcagggtacaaggcagtgtacagggtagagtgcagcccaagccgagggtcagtctcattatttccaatcccagtcaacatgctgagaccaagaagagtcaaaaaggcgtccttcactagccactctacgtgtgcacgctctgtctctgtccatcgtccccatcgcctcccatgtcatgcggcgcaccatacccctacagaagactctgtgtgattctcatggcggaaggacaagagggctggcattctgggctggccctgggcactcagcagtgcgtgctttttctctggggaaaggcaggacaaccagcttctcctccataggctccaggaagaggaaggaaatatccagggtttctccctggggattcgtggttaggtccagatgcacaggaaaggcctcctgagggcccttttcctgggaatttttatcatccaagtcaggaagatattggacagatcctcttggcccagctttggagggggagtctgttgggggggtgtttttctgctgggattcttccaccttgggaaggtttgtaggtttctggttaacagcagagttttcacttccagtggctggagcctgtgattcaaagaagtcacaagtcacagagacaaacttttcccagtgtgttcgagtcagagaacctttgcaaagaccaacaggcacagagtcggaggactgaagtgaacagctgctggcctgggatttagtacatggtgattctttaattaagtattccacaaagtaagaagggccgaccacccactggctagaagccctggtgactttgaagagagaatactgcttggatgtgttctcattgttgtatttcgcaagagactcggtggcagcctccagcacttggtgattggaagagtcagtgggtatggagcttgggcagtcagggcacgtcatgtaaatcnnnnnnnnngaaactgggcgaagagtacagttataagcagctaaatagagaactctacttgggttgttcatataaaatattgctttgcattgaccataaactgattcaaaaaatatcctcattccacagtcttgccatgccttctttctgagcacatggcagtcagtctctagcacatccagtgtaagatagaacagagatcccaggccaccccgtctgtattcctgggcgtcgttcactcggttgagtctcagcacatagccatcctttctgtctttgttaatatcccgcagggcaaagcctgcaactgccagcacatcggagtcattgcagccccgggagagcagagccgaggggttgagggccagctggggtggagacattgctccgcagcacaggactaggatgcagagtgccaggggaaggagcagacccattctgtggagaacaaggcccaggatgggtcagtttgtggagctgcagggactggctggcttgtaaggctctttaaggcagacttgagcggttttgttacaac

SEQ ID NO: 316363 - DNA, 490 bp, Homo Sapiens
  misc_feature (23)..(23): n is a, c, g, or t
  misc_feature (31)..(31): n is a, c, g, or t
  misc_feature (43)..(43): n is a, c, g, or t
  misc_feature (59)..(59): n is a, c, g, or t
  misc_feature (75)..(75): n is a, c, g, or t
  misc_feature (179)..(179): n is a, c, g, or t
ccgtgcctttttcctcctggggnaaaaggcnaggaacaaaccnagcttctccctcccanagccccccccggaaangggaagggaaaataccccccgggtttctcccccttggaattcccgtggttaaggtccccagatgccaccaggaaaagcccctccctgagggccccttttccccngggaatttttatccatcccaagtcaggaaagatattggacagatccctcttggccccagcctttggagggggagtctgttgggggggtgtttttcctgcctgggattccttcccaccttgggaaggtttgtaggtttctggttaacagcagagttttcacttccagtggctggagcctgtgattcaaagaagtcacaagtcacagagacaaacttttcccagtgtgttcgagtcagagaacctttgcaaagaccaacaggcacagagtcggaggactgaagtgaacagctgctggcataagatttagtaca

SEQ ID NO: 316364 - DNA, 498 bp, Homo Sapiens
  misc_feature (46)..(46): n is a, c, g, or t
  misc_feature (105)..(105): n is a, c, g, or t
  misc_feature (482)..(482): n is a, c, g, or t
acccctggccactccacctattccgtgctttttctctggggaaaanggccgggaaccaacccaaccttctccctcccataggcctccccaggaaagaggacggcnaaaatatcccccgggtttcctcccccggggaattccgtggttaggtcccagatgccacaggaaaggccctccctgagggccccttttccccgggaatttttatcatcccaagtcaggaagatattggacagatcctcttggcccagctttggagggggagtctgttgggggggtgtttttctgctgggattcttccaccttgggaaggtttgtaggtttctggttaacagcagagttttcacttccagtggctggagcctgtgattcaaagaagtcacaagtcacagagacaaacttttcccagtgtgttcgagtcagagaacctttgcaaagaccaacaggcacagagtcggaggactgaagtgaacagctgcccncctgggatttagtaca

SEQ ID NO: 316365 - DNA, 473 bp, Homo Sapiens
  misc_feature (39)..(39): n is a, c, g, or t
  misc_feature (86)..(86): n is a, c, g, or t
  misc_feature (105)..(105): n is a, c, g, or t
agaaaaactcctacttgggttggttccaataataaaaanaattgctttgcattgacccataaaactgattccaaaaaaatatcctnaattcccacaatcttgccnatgcccttcctttcctgaaaccacatggcaatccaatcctcctaagcacatcccagtgtaaagattagaaacaagaggatccccaggccaccccgtctgtattccctgggcgtcgttcactcggttgagtctcagcacatagccatcctttctgtctttgttaatatcccgcaggcaaagcctgcaactgccagcacatcggagtcattgcagccccgggagagcagagccgaggggttgagggccagctggggtggagacattttccgcagcacaggactaggatgcagagtgccaggggaaggagcagacccattctgtggagaacaaaggcccaggatgggtcaagtttgtggagctgcagggac

SEQ ID NO: 316366 - DNA, 378 bp, Homo Sapiens
ctaagccaaagaggaacatattttggggtgataatccccactctggaaatttaagcaccttcttggaagattgttaaggatccttagtggttatatttcctgtttcagtctgggtgggggaggccagcccatggacttttcctgcatacaggcttcaccattggtgcccttcctccaactgctggtatctgtattcacccatgctggtgcttccatgatgggaaacatcttctttgtgctcaccattccagctcccttttcttctccatttgccctggttctgctaccagcaccacctcacctggcttctgttttatcagttcacagtgattttatgatattgtgtcacttgtaggtatttactgggatatcagtgag

SEQ ID NO: 316367 - DNA, 416 bp, Homo Sapiens
tagtttccagttttaaataatcatgttttttaaaccaaaatgtttgattccccaatcactgatgggttattgtataacactggagcttgtattattaggcttagtgtagtcatttgaaagcaaatggaataaaaagtgctacacaatttatggggtagggggagaaaaatattcctaaatgtttccaaaggaaacatcagaggcaaattagatccaaagcccttaaattgggccatttgccatttaacaatggaacaggccgttcctatcagaacagggggattttctcttcttctatcccttcatctttccctctttgcatgatgctgctgtagccccctcatctctaagacaagacaaaagaaacagagaaacaaagaagtgaactctgggcctgacgaggttaagaaaaaaac

SEQ ID NO: 316368 - DNA, 371 bp, Homo Sapiens
ctcttttcccacttggaagataaaatcaaggcaggagtcttcacccagggtaactttcaccctgagtcctctttcctgtaactgtcacaatggtgccttgtcacccttctgacattgcttctaaatttgaacagggttgtaaccttgtggaaactagaaccactgcctgccctgacaccctggaaaagcagatacatgttggcacataggatgttttcaatacagactttgtcgtagtatcttaaaagactatttagtagcatatactaaattgtatttagacttttggtcttaaaatactttgtagtcgcagatcaagactactttgttcttaatttcttttaaattcttaatgacttttacaatcctac

SEQ ID NO: 316369 - DNA, 424 bp, Homo Sapiens
gcaaatttattcttaaaaagtatggtaatcatggccacaattgctgtaagcaatgggaaagcagtatctgtatcattaataccactatgatctgagtgcgcttgagctagaattcatgagaattctgctaatattatggttatggtgtttataacacgtttcactcaggaggtatgcttcttgcctggacctctagatatttctgcagaggacagagtgaaacaactgaggttggactagagtaacatgtccaacttcctgcatgttattcatgccagggtgtctttgggcaggaccgggtaacaagagcttagaagatgaatttcccatactgagtaaatttatttaccccttccctatcatatacacagatgagatggcgctgcctttcaggtgatatggtttgtgaaacagtaagtgtctg

SEQ ID NO: 316370 - DNA, 384 bp, Homo Sapiens
cagtctgaagctcaccaaatgacttctttccacagcttgccattctggtcgagttgctggcttcctggtcatccaggtcttggggctgtagtcccagtactctggaggctgaggcagaaggatctgtttacaatctgcttgagatcttcctgattcttggtgtagtaagtgattttccattgaagcctgggtatttcgagtattgtgggttaagatgtagaatcatatttacatcccattttcagcaggcctcctgtgccaccattcttattaccgccaggtgggtgtggatgcccaggctcccgacgagaactccactgacacacacaccaaatctattggcaccttgagcttggaacttctagtctctaaaatccaaatcaa

SEQ ID NO: 316371 - DNA, 637 bp, Homo Sapiens
  misc_feature (95)..(95): n is a, c, g, or t
agatggactaacatgccgattctcatagagaaagtaggcctacagactctcttccatttttattttcaccacttatatttcatctgctaatatanaatcttctccaaaaagtcaacagagaactctgaagttttgttctattgactattcacaagtcaatagactgagcagatgtacctaccaaatgttcaaaatggtcaagtactaaaatctcaaggccttttagaattatacattaactactttgtcagactgtttctaattttaccatgttaatttagtaggcaaagcaaaatttagctgacctaaaaagctgactttacatattcacatataaggagagtttatctgatacagattaacttcaccaggccaccataaggaaacaatggaacagagctggtgttttaatatctgggtttgtatggttatacaggtaccaaagcaaatccaacaatcagtttaatctggtaccatctgtaatgacaaggctatgatgtgcatggcctatttaaccaatggtatttaggaagaatctgttgtgttagatatagtggggttttaaaaagaaaatctattattcttcctcaaggagctaattattttgagaggaggataggctacaaagtcactaaag

SEQ ID NO: 316372 - DNA, 1169 bp, Homo Sapiens
  misc_feature (811)..(811): n is a, c, g, or t
  misc_feature (1057)..(1065): n is a, c, g, or t
  misc_feature (1076)..(1076): n is a, c, g, or t
cccacgctccgcacccaacgacgacccttaggcctgggtggcgaattcggcacgaggcacaatcagctttaaccaatggatgaggggggtggccacaggagatggggagaggagtctgaactaaacccctggcttttgtgcacactgcatatgtttcagaactcctggatggtaaccatctctggagtgcagcgcttgctgcagtggaaatgatcaggaatactgaccgtgtttctcttgcctccgaggttcttgggcacactctatagccatactggacaggaaccaggtgccccgtgtaggcatcgtcggtcggtttgccgtcagagatggcgcatctcgctgcatcccccgagagtacaccggttgctctagccacctgcggcccgcccatctgcgctagctggccttcacgctcttgatcgtctttcctttgtattggagaaggactgggtcagagatctgttggagagagagaataaagagattatttttcattatttttaaatggttgtttttgttttaatttgcacagcctacacagaggaaataacttacgcactttctgttttttttaaaaaaataataagggtctcatgggcttcatttagaggaccccagttaacaaccagcagccccacccaatcaagagaaagctgggtttgttaattaacccaagcctaacagattcaccactttttctgggccctaaaccccttacatgcgcgatgaaggcgcttttttccaacccccacggcccattggcctggggggcgtgaaattctttttctaacccccccttaaaattaanaaaccacctggggaaactaattttgccgtgggttataacctttcgataccgggatttgggcacaacttacgccaaaaggggggtgaacttcccaaagcgcacaaagcgcctcaattcctatggcgccagcccgaagacattttctcacaacaatttctcgccttgaaagaaccttcccaaacttcttggtcgaacggggcacaaaacgcattcttcaacaaagtgcacaagaactcgggccttttnnnnnnnnnaacgtcgcttnaattcccccccaaggcggagaaaaacaccttgggcgctcacaaattggcttgagaggccctccctttttggagagctccgcataaacatcttt

SEQ ID NO: 316373 - DNA, 523 bp, Homo Sapiens
  misc_feature (16)..(16): n is a, c, g, or t
  misc_feature (26)..(26): n is a, c, g, or t
  misc_feature (38)..(38): n is a, c, g, or t
  misc_feature (50)..(50): n is a, c, g, or t
  misc_feature (52)..(52): n is a, c, g, or t
  misc_feature (60)..(60): n is a, c, g, or t
  misc_feature (72)..(72): n is a, c, g, or t
  misc_feature (166)..(260): n is a, c, g, or t
ggaaatgatttgactnagtgaaaacnaaggtcccaacnatggctctgaancnatgcatgnccttgtcagtcntgtactttactctgaagcttcttggcatacttaagagttatttatgcacaacccagacatttgagaattatgatagatgaaggtgctgataatnnnnnnnnnnnnnnnnnnnnnnnnnnnnnnnnnnnnnnnnnnnnnnnnnnnnnnnnnnnnnnnnnnnnnnnnnnnnnnnnnnnnnnnnnnnnnnnagtaatgttcagacaagtaaacaggctgctgagagctatgataggaaaacacaaggtgttacagaaggcacacaggactcccgggaacctaacccaggcttggggatcagtggggacaatttcctggagaaattgatatctaagctaatcacgaaggattagtaagaacagttaggtggaagatgaacaaggggaagacagtatttaaaaaaaaggaacactatgtataaaggattgaaagctacagagaacaagtttgtttg

SEQ ID NO: 316374 - DNA, 109 bp, Homo Sapiens
ctgctgtttgagagaaaaatttgtgccttggacacttggatcatttttataaaaattaatttcattttcttttctgttaaattaaaaatcgtcagcttttggaagattt

SEQ ID NO: 316375 - DNA, 630 bp, Homo Sapiens
  misc_feature (419)..(419): n is a, c, g, or t
  misc_feature (459)..(459): n is a, c, g, or t
  misc_feature (476)..(476): n is a, c, g, or t
  misc_feature (587)..(587): n is a, c, g, or t
  misc_feature (593)..(593): n is a, c, g, or t
  misc_feature (616)..(616): n is a, c, g, or t
gtactttttccttttgttgctgaactggcacctcaggtacaagacaaaattccctttaatttttcttccacttttatcaaggggaacagagtcttggctccatggccaccacagcttagaatgttctgagtttcaccagaaaaaagcaagtctcaaagtctcacccaagactcttgatgtagtacctggatattgctatttcttattcaggtcaaagggctctttagttaacagacatttaattctgccaggactgcatccttcccttcgtgggtgtcagttcccttttttatcagggagtgtctagaaatttcacccaggagctagggcctggaaaggaggcctgatgattctgacccatggtgccctgttttgccatggctgacctggtacccaaaatgcaagagagccataagctntttagcctggagttatggaaggagtgatgccagcactttnttagctaccatggctgntttctcagtaggtcatctgcgccacctgcaaatccactgtttctgggtccaattcagcaccaggactcaactgcagtggcagtccttgtggcctagactgcctttcagggntattanggccccatagcactttagtctgnaacagtcagtcttt

SEQ ID NO: 316376 - DNA, 1389 bp, Homo Sapiens
  misc_feature (76)..(87): n is a, c, g, or t
  misc_feature (132)..(293): n is a, c, g, or t
  misc_feature (793)..(807): n is a, c, g, or t
ggggggaaaccacccccctttttttccccggtttttctcgggaaacacttttgccccctttcctttccctttgggnnnnnnnnnnnnacaaaagttttttaaaaattttttgggggggggggggccccccannnnnnnnnnnnnnnnnnnnnnnnnnnnnnnnnnnnnnnnnnnnnnnnnnnnnnnnnnnnnnnnnnnnnnnnnnnnnnnnnnnnnnnnnnnnnnnnnnnnnnnnnnnnnnnnnnnnnnnnnnnnnnnnnnnnnnnnnnnnnnnnnnnnnnnnnnnnnnnnnntaatgaaaataagctttattacatcaagtaataaatacatacaaagatgcaaacagttttagtcattttcttccagatgtttttatcaacttacaataaacgcagaactgagatctacttacagtcttagtatgaaagtgttcgggggtccttgttaggtttggtgggttgctctttcttctgtatttataacttgtgcatttttaaaaattgactttgaagcactaatagtcatgcaaatgcttaagcaaaaaagaagttacattaagcagaacctacattgtatggcaaatgggaaccggctactaagtaaagcgtgctgtcaatatgcgttcaaaacaaaatccctacagtggtattagcttatgaaaaggaacaaagaacaccatgggtaacaaatgtatacaaaagagaagattaaagggagacaatggtgtcttggaggcaaactacagtttgctgtaagataactttccgtgcatcttttaaatcaatgcttnnnnnnnnnnnnnnncctgggcagttcctaactacttaaaatgcaaatcctaattaactgcaaaatcttttctcaatctttgagactgtaggttcagagccaagtgaaccatgggaggaaaaacgaaactgtaaccattttgaaaacaagggtttcatctgaacaggggagatgaactgtaacttctcatcttgtaaaaagatggaaatccttcaaaaccaacaaggcagctaggatctggcattccgttccgtttctgccaagcactcccgaaccagtcctctagcgtgaatgatgccgcgcttcagcctctccatggcactcttgctccctgcgtacgtgggtctgatctccttccccagctcttcaatgatggccagcagctccgcgtatttgctttggggcacctggctgttcccagttccctgggtgtagcctagggacggtggcccgtagtcactgagcagctggcggtactgtgaagacgttgccatgctggtggaaggcgagtggacactcccagcggcgttgagggcggcggcgggcatgtgcgcggccaagttcggtttgtaagacatccccccgggcggcgggccc

SEQ ID NO: 316377 - DNA, 582 bp, Homo Sapiens
tcagggcaaaaatcaagcatgaaaaattagaaacatattatgtgacaatccactctgcatagcaaacccaacatgtaatgtggtttggcatatgacatcatgagcttccatcgctgccctcgtccctccttccagataagctgctgcttccgcagcggatataactcttcttattgtgtttggactccaatcccatgtgaacacacagctgcacagtccaggatgcagcctggccaggtcaagaagcaaaaagccagctgggagtcgtgcccactttgggaagaacgcacagattccccaacacgggctccaggtgtcagcagaaggccctgatgttctacagacatgtgatgcctataatcaaagatcctccattcaaaattttcctacggatgggagtatctacacacaaaaaccgctcacccccaacactcttcatttgtctagctaaacgggttgttttaaccagaaattctgataaaacggagagggccatcatgtcaaggaaagttgctgttttataaactagaataatggatcaagccttggagtccctaaagagagaggatctcttgagcccaa

SEQ ID NO: 316378 - DNA, 458 bp, Homo Sapiens
  misc_feature (351)..(351): n is a, c, g, or t
aaacttgaaaaagaggtcactcaaataaaagacagaagtttacctgctgtggtaagagagaatgcccagttattgaatatgccagtggtaaagggagattttgatctgcagattgctaaacaagattattatacagcaagacaagagttagttttaaatcaattaataaaacaaaaggcatcatttgaacttctacagttatcatatgaaattgaattaagaaagcatcgggacatatatcgtcaacttgaaaatttggttcaagaacttagtcaaagtaacatgatgctctacaagcaattagaaatgttaacagatccatcagtttctcaacagattaaatccaagganttacccttgatactaagggttattctactcataggctttaccaagttttggagggagagaataagaaacagaatatttctttagtacaagatcagttggcagtatct

SEQ ID NO: 316379 - DNA, 660 bp, Homo Sapiens
  misc_feature (67)..(67): n is a, c, g, or t
  misc_feature (425)..(440): n is a, c, g, or t
tctatgtgaagaataacttgatcagaaacggattgaaagccaaacatgaaccttgctcagaccaagnagagtgttccactgattataactagttacctattttttcttttatctttaaaccctgatattattttctttatgttccaaacatgggaacatatggctgaaaaaatgaagactctgatggctaaaaaactattgcccagaacataaacatctaaatttagagaactcagtcttgcaacgattttttctactttgatttagctctgctatgcaacagtaaacctatgattcctttaccaacaaactctcccttcaaaccataaaatctctgagtatgctcattaactatggtccaaataaacaaataaaaaggattattccaaacacagattctattctaaaatagagactcagaggcnnnnnnnnnnnnnnnngcgtagaagacaatgcatgttgtgaatataatgaaaacctcataaaagaaagagaggagagtaaaaaagagggagactttctaaaaatgcctagcacttctggacttgacttagaaatccattaagggcatataaaatgtggttcaaacacagaacctgagcttgagaaacagctctgattgtttgctgtatggcataaacagatggcatagcccctctg

SEQ ID NO: 316380 - DNA, 413 bp, Homo Sapiens
cagtgaagcctgctggggaggtttttgggaggagtcttgtatccttagtctgcttctaagcatttgaaactactgataaccaaatgaatctgataattttgactggcaaaattgagttaggttaattcataacagtcaaggcctgagaaaattatcttgggccactggagccagtactgattaacattaagtaggcagtaggctgctatggatgggcgcttcttaccagttgctagtatgaaagactattgatgtcattctttggcacaagcgacatgattctcacttgaatggatccagaagttttagagtttctgacttagtatccgtggtgttcccatgggctgacagtataaagtgccactccagtgggggctggctgttccctggatgatgacttaccttcattctgc

SEQ ID NO: 316381 - DNA, 554 bp, Homo Sapiens
tttctaagcctttattgagcactactgtgggtcaggctctgggcttgactttgtaatcgcaagaggggcagaaacgggctgctctcaggacactcaggagaacacgggcggagaaagctcactgatcacgtcgacctagcaagcgagcgcacgctggagaaaacgctgggatcaacacgcatctgccaggcccagacggcagagggggcactgctggaaaggccgggaacctcccctctcaacctcccacccaaacccatccctcttttgggaacttggcaggcaatgaggatagggccttaattaagtggacgcccagtatgtgtatttcacgtgcgttattccactggggcctcacccattatcaggacaccagttctattttaacccagcgctgaggctctcttgtgcgaattcctgcagcccgggggatcccactgttttagagcggcccgcaccgcggtcggagcttcagctttttggtccctttagggaggggttaatttcggagcttgggcggatcatgggcataagctgtttcctgggtgaaattc

SEQ ID NO: 316382 - DNA, 362 bp, Homo Sapiens
agaaccgacttgctgatcttttgcttggtctgttctagttccttctggatggcctcagatttttctctcagttttcccagaatatcttccaagtgtgacatacgcacttcatgttcttggtgaaaggccataaagtcagtcttaggaaagagaaggagtgaacaaatgatggagaaagttaagcaacaaaaacctggcaaatcaggccaaggcgtttctacacggaataccgacaatcagagaatctgtggtcgcaatgtggcacggaccttaaaggaataatccgcttcataacaatatccttatttcagccctggctccagaggtctttatttatatatatatttattttaaggttgcac

SEQ ID NO: 316383 - DNA, 677 bp, Homo Sapiens
  misc_feature (174)..(174): n is a, c, g, or t
  misc_feature (304)..(462): n is a, c, g, or t
tttacatcacatccactaattctttgacatacctcccatccagagctgaaatctgtcccttctcctggaatctgaattgacattagtggctcattgattaggtaatttctgagactaaatcttcataggtgatttaaccttaattgtatttgtaggttcaaatcacctagtaanagtctgaggccactgtgctgtgaggaagtcctggccacatgcaggtgcctcttgtaggtgttccagccaacagccccagctgaaaccccatgagtgaagcttccttccactcatcccagatagaatactnnnnnnnnnnnnnnnnnnnnnnnnnnnnnnnnnnnnnnnnnnnnnnnnnnnnnnnnnnnnnnnnnnnnnnnnnnnnnnnnnnnnnnnnnnnnnnnnnnnnnnnnnnnnnnnnnnnnnnnnnnnnnnnnnnnnnnnnnnnnnnnnnnnnnnnnnnnnnnnacactgtgagctgtcctcagcataccctttggattccctcctgtccagagggggccaaggtggcagggggctggtgggtcagcagtgccccagcctgtccacacctagccaggctgtgacagtgccagggctcagccccaaccatgcttggatatcaaagtgagcaccaggagtggggagaggccaggcagcaggagtagacatccccaaacctg

SEQ ID NO: 316384 - DNA, 393 bp, Homo Sapiens
ttcagtatatgatgttcgagcttgacaagtcatcctttgagcagcttgcagcgaatctgcgcgccgtccctcatggagatcaccgcgtgctcgctgaacatgagggtctcggcgcgcttcttgggctgggacatcttgatgaacatgcagccgatgaggaaggcgtccacgatggagcccaggatggactggaagaggaagaggatgatgccctcggggcacttgtctgtgatgtatcggtagccatagccgatggtggcctccgtctcgatgaagaagaggaaggcagaagggaagttatagacattggccacgcaaggcgtgtagttaccgacgtgggctttgttcaggtcgccccgagtgtaggcgatctcgtgccgaatcctgcagccc

SEQ ID NO: 316385 - DNA, 422 bp, Homo Sapiens
  misc_feature (332)..(341): n is a, c, g, or t
tctcaaactatacttcttttgttatttgtttacttattgttattgttaatattattaatagaattaatattacttgtttacttattattatttttgctaatttcctatcttccctactagacagaagacagtttctgaaggcagaggccaagttggtcttgttcactgctgaatccctcattgtctcgtacagaaccttgtatataataggtgttcagtaaatttttgctgaatgaatgcatgaatctaaaggatcattatgggggaaaagtagactaatgtagtataactataaatggaaaatctacatcaattgggagagctccatattnnnnnnnnnncctttctgttagagatgtccaaagatggaaggcactccttcaggagtttcctgaccctggagatatcatgttgaatctggg

SEQ ID NO: 316386 - DNA, 223 bp, Homo Sapiens
atgagccactgcgcccggctgatttattttgttaaataagttaatgtgcagatctgaagttaggtaattatacacaggcattttcctgggacaaacttcaagtgccaggtacttgcactcttaatactgtcttaccatccagttataactggacaaaatatacacttgagacacggttgaggcatggagataatgtcttcaaggttccccttctgtgtacatg

SEQ ID NO: 316387 - DNA, 613 bp, Homo Sapiens
tatatcccaaatctagaagacagcccatgtttgtgagacctcactcctaacttctattattatagaggtgaaatttcatcttctctacaaaatcctcactaaagtaaaaggaatcaaaatacaaagaccaaaatttaattctggaatgaattaattcattcacaaagatcacagtttataatctagcttgaaatatcacaaattaaatctttctctagtgtcttttctctgaaaaagatgtttatttaggtttagattgtcttgttagtaatataaaacatttgcaaaatggtttcttggacctctccatcctcacccaaagatatcaacaaattttctttttctccttgtccggcacaaatcttgaatcatcttatataaactcaagataatttgtactgctttctttacactattttttcacaactgcataaacatattcaagtgcatcaatagtttaaaaatgtaaacaaaaaaaggaatttgaaatatcttgtaatacaataaaccaccaacagttctaacaccaattcagatattactcacttcaaactcctgaattttaagaaatcaaaaaagggttccttctgccaatcaatggtatgaacatggc

SEQ ID NO: 316388 - DNA, 485 bp, Homo Sapiens
ttcattttcaatttcacaaatttgtctctagggctgagagtctttttattcatcctttggtgcttggtgggactgccccaccaagaatggctctcatctctgattccagcttcttctgtaccccgtattaaaggatatggcccctttattctggttcatctgctgtggacttattctcttctgtgaatcgtgtctcttcagtgggatatgaggaaggagagagggtaaacgtgtgtctgtctgtctttcaccctgacctagagtgtgacctccctcacggtgctctttgtctgattgcttggacctcagaaggcccaggtgtttgttttctaagccaacttgtggttgtttgtatgaaccttcactagaatattcttagagggcaggaaccagttttattaacatcaattttgtgcacatctagaaaagatagctaactgaaatttttatgccagatgataaccaaacactttaaaatattgctg

SEQ ID NO: 316389 - DNA, 764 bp, Homo Sapiens
aaaaattaaagcatggggaaaaagtataaataaccaaattggaaatattaacttttggcaaagttggcgtagatgagtctctgtcaagcaagcagacatcagccaaatgtgaatgatctcttggttcatggaatgcctctacagccaagaaatctctccctaatggacaagctcctagatcttgatgacaagctacttatgaggcctgggtccagtaccatcctttcaactcgaaattggccaaatcgagctgtggagtttagtacatcatctctgtcatacacagtgcagtccaccaggagacgcaatccaccaccacgaactcttcatccgatcagcacgagccattcatgtgctgaaacaccaagatctgtggaagaaatcctcagaggagcccgagtcccagtggcacccgactcgctctcctctccctcaccgacgcccctgagtcgaaataatctgctaccacctattggcacagctgaagtggaacatgtgagcactgtggggccacaaagacagatgaaaccccatggcgactctagtcgagctcaaagtgcggtggtggatgaacctaactatcagcagccacaagaaaggctccttttgcccgactttttccccaggcccaacacaattcaatcatttttggtaggagttgacgttatttcctaggattgggtttttgatagttggggggaaggaaaaggttggggggattattagttttgggcagatttaaggtttttattttaggagggtgg

SEQ ID NO: 316390 - DNA, 577 bp, Homo Sapiens
  misc_feature (559)..(559): n is a, c, g, or t
caggaagaacaggattacataataaagttatgcttatctgatgtgtactgggatttaatattcttgcttgtggtcagacatatcttaagtgttaaattgcttagaatatttgtgatttctgtataaggcattaaagaataggcatcagggactagttagaatttgaacaaaatgtatttataacactttttattgttggaaactcaacttttattctgggttaagcctctagataaaatcttaagtctgccaaactattattccccccaccttttctttccccaactatcaagaccattctaggaagtacgtcactctaccaaaaatgattgagttgtgttgggcctgggggaaaaagtcgggcaaaaggagcctttcttgtgggctgctgatagttagggttcatccaccaccgcactttgaggctcgactaggaggtcgccatggggggtttcatctgtctttgtggggccccacaggtggctcacatggttccactttcaggctgtgccaatagggttgggtaggcaggattattttcggactcgggggggcgtcnggtgagggggagagggag

SEQ ID NO: 316391 - DNA, 979 bp, Homo Sapiens
  misc_feature (630)..(669): n is a, c, g, or t
ctagtggatcccccgggctgcaggaattggcacgaggtttttcagatggcttcaaggtccaaggaccagatactagaattaaagacaaggttgtaacccacgttcagagcggtacagctgagcacagaccccgcaacacgccgttcatgggcatcatggataagactgcgaggttccaacagcagagcaatcctccaagccgcagctggcactgtccggcaccagaggggctgctgacaaacacgtcttctgcagctggcctgcagtctgctaacactgagaagccctctctcatgcaagtgggaggatataataaccaagccaaaacctgttctgtttctaccctgagtgcaagtgtccacaatggggcacaagtgaaggagctagaagaaagcaagtgccaaattccagtccactctcaagagaacaggataactaagactgtttctcatctgtaccaggaaagtatctccaaacagcagcctcatattagtaatgaagcccacaggagccacctcactgcagccaaaccaaagcgatcatttatagagtcaaatgtgtgaaccttaagaaagccccatttgtggaatttggaaacgtgtgttgactcctggtggtaaattaaatagnnnnnnnnnnnnnnnnnnnnnnnnnnnnnnnnnnnnnnnnctttggggtggatctgatgccattgatatatctaaaatgtgggataaaacttctttaatagctagaaatccccataaataagaatgctaaacagaattgaaaattatatcaactttaaaattttaagaccagcccagaaagacattaaatgactcctcacttatgaaaattgttttggcttttgccactttccctccttggcctttgctatatgggtaaaatcacagaaccttactttagagaataaatatggcctaattggtccagaagtaacagggtttaactccttgaccaaaggaatggaacatcc

SEQ ID NO: 316392 - DNA, 564 bp, Homo Sapiens
gctacgtgttcactgaatgagactgcccaaggcttaccagagattagatgctacagaatgagagtggaattgtaatattagagatagagccgtggggaatctggagttccaacccagtcaacatggagaaatccttgttaacttcagttatctagctgagataacacaaaagataggtttgaggaacaaggaccatgctctaatataaggcctactctagacccaggctaagactagtaaaagaaggccccaattaattcttacagggtagaccaaatttggacaatgagtctcaccgagatagagaagcctgggaaatatcctgagctttcagcagatcagcataccaaaggttaaatccaaacctatacaagttcaaggagtcaactattaactgacttatatgtactagaataaaaatcactgctcctcagaagaaattaacagaaccatatttgcaatatatcccatgttgaacttttaattaccagacatgcaaagaatcaggaacatatgatctatagagcagaaaagagcatgcagtagaaatcacctctgaggagt

SEQ ID NO: 316393 - DNA, 581 bp, Homo Sapiens
gggacgcagaagtgcagccgccctctcccacagcggagtccaaaacaggcctaccagtcagttcttatttctattgggtgtttccatgctccaccatgttaagagctaagaatcagctttttttactttcacctcattacctgaggcaggtaaaagaatcatcaggctccaggctcatacagcaacgacttctacaccagcaacagccccttcacccagaatgggctgccctggctaaaaagcagctgaaaggcaaaaacccagaagacctaatatggcacaccccggaagggatctctatagtgaagccattcacacgtggaccatatcctaccatgtatacctttaggccctggaccatccgccagtatgctggttttagtactgtggaagaaagcaataagttctataaggacaacattaaggctggtcagcagggattatcagttgcctttgatctggcgacacatcgtggctatgattcagacaaccctcgagttcgtggtgatgttggaatggctggagttgctattgacactgtggaagataccacaattctttttgatggatttcctttagaa

SEQ ID NO: 316394 - DNA, 882 bp, Homo Sapiens
ggcatgtgctttgctgtatattcaaatatgtcagcaataattttcatggatggttctggaggaaaaatgtatgtatttcgaaccataaattcctttagtatatcattttggatggtaccagtaagtttctctttaggtacaccttgttcttctccagttactataaaatttgcaagaactggaataactgctccatttcatagtcatggaaactgacattttttctaaaggaattccatcaaaaagaattttggtatcttccacagtgtcaatagcaactccagccattccaacatcaccacgaactcgagggttgtctgaatcatagccacgatgtgtcgccagatcaaaggcaactgataatccctgctgaccagccttaatgttgtccttatagaacttattgctttcttccacagtactaaaaccagcatactggcggatggtccagggcctaaaggtatacatggtaggatatggtccacgtgtgaatggcttcactcctggaagttcttcaggtaagtccatagtatctctcttggaatacaagggttttatagagatcccttccggggtgtgccatattaggtcttctgggtttttgcctttcagctgctttttagccagggcagcccattctgggtgaaggggctgttgctggtgtagaagtcgttgctgtatgagcctggagcctgatgattcttttacctgcctcaggtaatgaggtgaaagtaaaaaaagctgattcttagctcttaacatggtggagcatggaaacacccaatagaaataagaactgactggtaggcctgttttggactccgctgtgggagagggcggctgcacttctgcgtcccccgcctcacctgtcagacatccccc

SEQ ID NO: 316395 - DNA, 2531 bp, Homo Sapiens
  misc_feature (576)..(576): n is a, c, g, or t
  misc_feature (606)..(606): n is a, c, g, or t
  misc_feature (680)..(689): n is a, c, g, or t
  misc_feature (778)..(792): n is a, c, g, or t
ccagcccaagcgaagcgggctgtgtgtcaccgctcaccgcgtacacaactaaaagggggggtgggtgttggccaatgagcagcgaatctccaggggcgaaggagggcttttctaccataggtggccggccaaggaggaagaggccgggtaagacataattatttgaccgtgcagcccgtggtctataggggggtgggattggagatgtgggcccaagcggggggtgggggcggcggggctcttaaaagttctccgacgctatgttccgtgagcgcgttctcccccccgattgtggggccaccgcccccgcgtaggtttgcgatacgtaggacaagtacctccccgactcgtataaagaggcgcccgtgtctcacgggggaaagtgcgggctcgcgtttcgcggggaagagatctcgggctgactccaagcggggaacccggggtcttaccgagagatgtccatataccccgcgccgccgggaaagagagaggggggaaatgtcgggcgaagcttcaagtgggggagagaggaggtgtcccgcaacaggccggcctttaaggctccagatgtgggcnccacgggattatttgtcggcggaggggganaaccacagcgctatgtgggggcccgacggttgggccccgtgaagcctgggggtggggggcccgacggggttgcnnnnnnnnnnttgggttttaggacaaacgtttttttcggaggggccggaggggcgggccgaaacaaagggtgtcatgtcgtggggtggcgcattcggcnnnnnnnnnnnnnnnaaagcgggccttttagtttaaatcaccggatctcgttccttcctgttgttgaaggtaccttgctccacatcattagatattatgttcactgtttcacatgaataacaagtttctacgtgaattgtaaatgcctataagccgagggtactttaaaattcttttggatgccattatacagtagtagactcataactgatgcccagttaacggtgaaagataaatgtgaatatccaactaaaagaagagcccataacgtaagctagataaatgagaatggactatttcatagatggagagattaaatgtctggcccatagttcttaccaatcagctgtaggttacaactatgacttaggttccccatacccagtctacttctctatggccactgctaggtttctcaaggagcttctacccatcatctcctagtgtctaaggccacacctttcaagcaacacacctttcacactctatcaagccccaaacacaaggcacagtgtgggcagggccatctttattgaggtttttaattaaaatgctttgcagaggagaccacagcctgccaagggagcagctgcccaaatgtttcctgacccgtgacctagagatgaagtaatttgatttattccctatttcctttagtctcaatggctaaggggtaatggatggaaatggggagaatgaccgagtagaggcaaggacgaagctcattcttaaagaaaaacctcaaagttcaacttcaaacagctgaaatttgtttcatagctgttggtcacccagttctagccaaccagggaataaattatagttttgccacctcagcagatggcaaaaggagctttccagaactttggcctgggtctgcaccaggtaccaacatcacagctgctaaaatcaccagaagggattttggaaccgctgtactagtgtcctttcattcgatgggatgtccaggcttcaccccaaagaggcttcatttatgcttcttctcctgtgtgctggtgaaccaagagtctaggagcttcttgctgtagtacaactgccaggcatgcacttgcactgccaacaccaacaccaggtacatgatggaaacggcagaaaaaccaaagaggaaacggtaggccttgccatggcggtagagctgctgtgcagcagggaacatctccatgctgccataaatgagtggagcgatggaaaagagtcccatgctgatcatggagagcaccaggtagctaatgttgttgcggggaaaggagagaaggcccaagagagagggcaaaatgctcagcaaatacgggtattcccactgatagggcatggccacctgatcatgtgacaagagcctcaggtgtcccacgctcatcttagcaaccagcagcagccatatgaccagatgtacgtagatcagcttcttgatttcattcttaccaccaactatatgccagacaactgtactggacactgggatacaaatttgaataaaacagcctagaagccggacacaaagaacagaggaggaaaaagtaattagaaaatgaagtgaaaaagttctggtaaatatatgttcccagatatatgggatcacaggaaggaggaatcaactctgcctggcatggaatgtcagagatggctatctagaggcaggtgatatctgaactaggctcaggaatgagtgaagatgggcatcccatgcaggagcatgcagacaaaaaggcccaagtatttgtgttccaggaaag

SEQ ID NO: 316396 - DNA, 923 bp, Homo Sapiens
  misc_feature (35)..(35): n is a, c, g, or t
aacttcaaaacaggctggaaatttgttttcatagnctgtcgggtcaccccagttctaagccaacccaggaataaaattatagttttgccacctcagcagatggcaaaagggagctttcccagaactttggccctggtctgcacccaggtaccaaccatcacaggctgctaaaatcacccagaaggggattttggaaccgctgtactagggtcctttcattcgatgggatgtccaggcttcaccccaaagaggcttcatttatgcttcttctcctgtgtgctggtgaaccaagagtctaggagcttcttgctgtagtacaactgccaggcatgcacttgcactgccaacaccaacaccaggtacatgatggaaacggcagaaaaaccaaagaggaaacggtaggccttgccatggcggtagagctgctgtgcagcagggaacatctccatgctgccataaatgagtggagcgatggaaaagagtcccatgctgatcatggagagcaccaggtagctaatgttgttgcggggaaaggagagaaggcccaagagagagggcaaaatgctcagcaaatacgggtattcccactgatagggcatggccacctgatcatgtgacaagagcctcaggtgtcccacgctcatcttagcaaccagcagcagccatatgaccagatgtacgtagatcagcttcttgatttcatacttgagggtcacactcatctggtagtgcatggcgacgcgctcccggtgctgaaagtcgctgccgtcggtgccggccgctcgcgggcctgctcgagacgccattgtgcctgcccagaacccccgaacccctcacgcggacctggtaccgcaacgacaccgccaagcggcccagtgaccctatttgcgcccccgcagccgcgcggctccgtgaagagaccc

SEQ ID NO: 316397 - DNA, 641 bp, Homo Sapiens
  misc_feature (581)..(581): n is a, c, g, or t
aaattctggaaaactattttgaagattgatctcaaagcagttcaactctgtagggattcttccttttatccatctcttaataattttcttctgaaatattcaaatgctttctcagaataaaatgtcatgaaagcatgtcatgtatctgaaaaataattaaaataattgacaggaatgtcagttttctggtgaggtgtgtttctcctaatcccactgtgcaatctttaatattgatccaattgttaggaaatcttgtcactctccactcaccatacctgggctaaatattttcagaactgaggatcctgaaggtatagaatatttacatctgtatcataatcatcatttgacatatgtaagaggtatatgcagcatatgtacaatgcttgctcggatttgacagtttattcattgtgtacattgcatataatattgcaaatgacacatcagagtattggaatctaggcaataggagttcagcactgaaagtgtccaggttgcacctgaaactagtttgagccttgcagccccttgcaagcccactgagagcatctgtctcgccaccaccttgctcatgctgntctactccgcaagcccttcgattcttctgactatgagcataaataatcacctgtcacgaa

SEQ ID NO: 316398 - DNA, 693 bp, Homo Sapiens
  misc_feature (596)..(596): n is a, c, g, or t
tctagttacatttaatatatagtattttcctttgcccttattttctgttaactgatggttaaatcagaggcgtgatcagatttgggttacatttgtttggcaaaaacatttcataggtagcgttgtgtgctttcatcaggaagcatctaatgtctactttgtctttagttgcttattaagattgatcacttagtataggtgttgccagcttgatccatctattacaacttttccaccagctttttacttgatggttttaaacagacattgatattcatgactcacttttatttttaaaattgtgcaggattgggtactagtacagctaaagaagcaaaggaatattttgctgatatggaaaggcatcgcatcttgtttagatatgctggtcctgaagatgatgctgccattaccttggtaattaagttaattttttaaaagcttttgttagccatccccctaccttctattcctttccctcccagtccttgttccctatgataagtctcttttgaatgctcaagctagttaattttaattttttccccagatgatgctgtgcttgtataaacttttttaattgaaaagaccttagntttaaatgtgtttttgattaaaatattgtaaaataaccctaatttttccagaattaaggattagttatttggcacttattacatttaaattttgaat

SEQ ID NO: 316399 - DNA, 667 bp, Homo Sapiens
  misc_feature (562)..(562): n is a, c, g, or t
  misc_feature (634)..(634): n is a, c, g, or t
atccccaattgcactaaatgggttcaggattgactaatcattgtcttaacattaactcagattttcgatgtgtaaagagctgtgtgacttggcgtctgagagatccctctgctttgctttgcttcagagtcctcgcacccgcatcctcagaactgtggggcatggtgggctctaacgagcactccccttctgttttccttcattacttttgacctccttaagacttcagagagaatgtccgtcaagttcttttctccatcaagttctttaagttccttgaaaggaagggactgtgcaaacacaaagcaatattcttttgtatctgcaaatgcgtcagctggacataccaattggtatcaaatagaataaaatcaaatataaatgtttgagtcttaggttaaaaaggaaggttatttgtatagtttatagataatgaaggaaaaatttctttttcattgcaggaaatcttggttactggaagatagagtcactcttttcatataagacaaatagtgctttaatgccaacttctttttatctcaacatttcaggatcatgctangcacactgccccctgaatagacattatatgcacagttgcaagtcagccaatgtttttattcagaagtatttncccccattataggtgctgcctatcagagataca

SEQ ID NO: 316400 - DNA, 627 bp, Homo Sapiens
gctcgcgctgttcgcggccttcctggtgacggagctgctccccccgttccagagactcatccagccggaggagatgtggctctaccggaacccctacgtggaggcggagtatttccccaccaagccgatgtttgttattgcatttctctctccactgtctctgatcttcctggccaaatttctcaagaaggcagacacaagagacagcagacaagcctgcctggctgccagccttgccctggctctgaatggcgtctttaccaacacaattgggctagcccattctgacttgatgtgtacaggggataaggacgtggtgaatgagggccgaaagagcttccccagtggacattcttcctttgcatttgctggtctggcctttgcgtccttctacctggcagggaagttacactgcttcacaccacaagggccgtgggaaatcttggaggttctgtgcctttctgtcacctctactttttgcagctgtgattgcactgtcccgcacatgtgactacaagcattacttgcaagatgtactagttggatccatgattggaatgacatttgcctatgtctgctattggcagtattatccttctctgactgatgcagaatgccataaaccat

SEQ ID NO: 316401 - DNA, 1639 bp, Homo Sapiens
cccagaaaggtatatatagccaaagtcagtcacaaaaactcaaggaaaatataggcatcccccactgttttaagaacagtcagaaatgtattaaggtgtcaaatgaagattgttactaacgaacaaaaaaggagagtcatttgaactgtcagtaagatggcaacgtggggaagggtgtcctaagtgcctggaaacacgcacagcaatgctaaggacatgggagggtagagtgatgctgaaacacagtcaacaccaaccagaaaggacgggaatgtctgtgaggctgctgaaaagagacccccaacgctaatgtgccttatgggtccatgggcagacgctgaacgctggcaaaaccgggtggccgttcttgcactactcgggttctgactgcaggaggggcagagggtggtcgatgtcctagtccctgtgtctaaaaagtcatgaggggacagagtacaacaggcagcacgttaagtccctgggctcttttccaaagccaagaggaggctccctggagaagcgagctttgcgaatgctcaggcccggaagccgcacactaacgcggcgtgcagcaggtgtggctgggtgtgcacagctggcgtccagcgacagccatgccgggcctatgcctatagcgagtgtacaccccatgcacggccatcccccaggatgctgctgcttctctggccagatgggttctggaatgaggcttctgctactgctcccatattcaccttcaagtctggcctggccactcccatggccatccgtattactgaagatgagacttgccaactttaagttgctagtaccaatatttcagcagggatatgaatgaaagaaataacaacttagctcatggtcataaaatatacgtatgggtaaataaagtatacacacatactagagattcatcaatggagaaattctatcatcacatgacattgtcatgaaaattatatcattccctccctggaaaactgtgactattatcctgggtagaaatgttattttgctatatggaaatactgcaatattcatgcataaaccaagttgtcatcatgaaagtcggtattctacagtataaagcaaaacctctgtgcgaatttgttaccatgaaaacgggaaaccatcaggacccatgatgcttcattctggctggcatggttaaagccacttctcttgccttgatcaatcccaagaaactaaaagttagcatttgaaatcctcttgaggattctgaaagtaaatgtatctgtgaatctacatttaacttcctaatgagaatgaaaattgcttacaaagactagagtcacttcccattattctgtgaagcaggggtgggggccctccatcccccactgtgaatatggcatcacctcctgtccgtattcacgctgtctacatttcatgttgggattgcccacacaaatgctttctttcagggaccaggcaggtgacctgggaaggtggtgggtaggtggtctcacaacactctacaggcaaaacaaagtacggggtggtggttcaaagccccagcaacgcaggccaatgatgtgaatgggaagtgtcatgacacagaccgcgagtggccaccgtgtcccccaatatctccccttcaggtgtgtgcttaaaccca

SEQ ID NO: 316402 - DNA, 1109 bp, Homo Sapiens
tataatttatgtacatttatggctttatacaattatagcaaagattgttcttgtgtctgtaagtacatcaacatcaggcacttctcagagtatcggaacaagaacgtggaatctgcactgttactaaactcgggtagcgaaatgcaggaggcatgactacgtcctgatgggacttacatggccacccctggcaacactgccaggctgtgccacctcaaggagaggccaactgtaatgccaggttggtctgttcgcataaaccacaatacattttttttaatgaatgattattcccaaactaaaaccagaaaagaaacttctcttttaaaattagttataaattaagaactcttaggagcttgaatgtaagaattttaagttggggctggggttattggtagcatatatccagcagttgaacaagtccaatttgtatatcgttggagaatgatttccattttaagcatccttatcttcttcttgggatgttccattgatttactgctcactgggatacatgtgctcatttagactttgtcagtttgtcaaagcagacttttccaagtaatacatctattacctaaatatattccatacgtctatattacggaaacaatacatctttatatttaaaatatctgaatagctctataatacaatatgcttttaataacagtacaaaccagagaaaataaatcaaacaaggctgcataggtgatatcatttgcacatttcacaaagcaatcatgtacaataactgatatatactcattactccagaaagtcagtattcttacaggaaaaaaactaccagaggccacataatgtttgctttccagacagaccagatgcctttccctggacttcactgttctcagagagctaccaaggattcatgacaggatttcaacacacaatgggggcttgggagaggtataattacccagactcaggaggaagatatattttcctaagagctactccatgaagtagtaagattttaacagtgattttggctgtagttgcctctttaatgaacaaatgggggctctgaggttccttgtattatgatgcagtaatggcacgggaggaaagtgacagtacgtagt

SEQ ID NO: 316403 - DNA, 970 bp, Homo Sapiens
  misc_feature (83)..(83): n is a, c, g, or t
gccagcttggccttgtggtccacaagtaagttaacccacccaactgttcttccttccccggaaattcccaatggttttccggngcccatccttccttccttgttctttacccagtgaacttcttggcccccaggtgcgggaagccccccaggagggctttccagctgggaataggcactctcaccagggcctgcaggaagcctaccctggtttgggctttgcaggaaactcctggaaagaggagaagaggaggtaatcaatggcgctgaagtcctcactactccttgttcaggcggaactggaggaagaccagctcccgctttttcacttcccgggggcccttggacaatcagggcagatttcacagtctgattgaagaaggggtccgtgtagttgatcctctgggtgtgcaattcatgtcaccggctggccagggcttgtcagaggaggaatgacctcgtaatggtgcttacagctgagcaactgggcctgaccggggtacaaggcaatacctggggcatcatagcgatccacttccttgtaagacacagacatgacagggtgcttgagtttctcacgaaagtctgtgatggtccggtagaccaggaagacggccacagccatgagcagcaggtagatgaagatgagtaggaccgagaagacgttcttcaggcaggccttgctgaagcggatgctgctggaggcggactcgctgtccaggcctggtaagatacccggaccttggactctgaccgtctccttgtcctgctcgtctgccagctctgagttctcaaccacctggaccaactcctcactcagctcctggtaggatgtggagcgctcctgccggatcatggcactgaccagagcttcggcacacctgagaccgccccagcccgcggcgcacggacgcagcactgcggccgctgcacctggacctaccggctccgcgaggcgaaaccggtccgga

SEQ ID NO: 316404 - DNA, 1668 bp, Homo Sapiens
  misc_feature (1145)..(1145): n is a, c, g, or t
  misc_feature (1158)..(1158): n is a, c, g, or t
  misc_feature (1504)..(1529): n is a, c, g, or t
cacaaaagccatctttctttatttttcattcctgccgttcaaccagtttgtgcaagctgaggatgagtgggttttggaacgggaggcagagcatctggggacagaccctcctggaaatggtctatgcacactgctgaggctggttagacttgagaagcaattgacaataaactctacagaactggaaatgttcaaaagtgtcaaggtggcttctggctgttttcctgcctccctgtgggggtcagttatacccatcagtcctgtgcaaaggtcctgggactggcccaggggcagccggattcttcgctggggacaggagctgtcctgctcacccagcagaagcatgccaatggacaggtgctcgggtgtgtgcccaggtgctgtggcccccaaactccgtggctcctcaagcatgtcttcatcctgtctctatgtccgccctttgaaagtgttcatgcaggtgtaggttcctgagaatttgtggatctcctcgagtgcagcctgtggaagtatgcttttcaagataacgagggcatgcattgtccatgggaggaggaggagggcctggttgagctgcacagcttccactgtcctccgggccaccgtctccggcttcagtgggggaaagaggttgggaaacctgactctcatgccctggaacatctcggtgctggtgtggaagggcagcactgtggtggcgctgactcccggacagtccagcagccccagggtcaggctctccatgaaggcgaaggctgacgctttggatgtgcagtagtcgatggcaccggggatggcagacagtgccagcacggagttgaggcacacgatgtggccattctgcagctccagcatacgcggcaggaaggccttggtggtccagaactggcccagggtgttgatgtgttgggacttgaggagggcatcatcatcactgtccattaggctcttcccatggaccacggcggcattgttcaccaggatggtgatgtcacccaccttctccccggacggccttggccgtctggtacacctcctcccggttgcccacatcacagatgaagtaattgcactcagtgcccatctgccggatctcctccgtcgtctccttcaggcatttctcagtccggccccagagaacaatntttttggcgccgntccgcgaactcgcgggcgagctgacgcccgatgcctctcccgccgccggtgatgaggacgttctcccgcgacaggtcccgcagcttggcgggcagcaccagtccgacggctgctttcaccaccagatagatcatctgtagagggaacatcaccagcgcgcccagccgtttccacaccatcctccgcgccgcggagccgggcagggggcgaaactccccgggccgagcaatacaggaattaaaaaacaccccgaacaataaatagtaaaccgaataaggaggagagaggcgtcccacctggccactcttgaaatcacctcttcccaaatgcaaagcaccgggtgagnnnnnnnnnnnnnnnnnnnnnnnnnngataaattctcctctgggggagaaaaagcgtctcctaaggttgggacggtaaaagaggtggagggggaagccggaggtggaaagttctaacaagaagtttcttgccccagcagccgtttcggctggggaattctcaggt

SEQ ID NO: 316405 - DNA, 570 bp, Homo Sapiens
  misc_feature (112)..(136): n is a, c, g, or t
ttgggggcaagaaacttcttgttagaactttccacctccggcttccccctccacctcttttaccgtcccaaccttaggagacgctttttctcccccagaggagaatttatcnnnnnnnnnnnnnnnnnnnnnnnnnctcacccggtgctttgcatttgggaagaggtgatttcaagagtggccaggtgggacgcctctctcctccttattcggtttactatttattgttcggggtgttttttaattcctgtattgctcggcccggggagtttcgccccctgcccggctccgcggcggagcaatgggtgtggaaacggctgggcgcgctggtgatgttccctctacagatgatctatctggtggtgaaagcagccgtcggactggtgctgcccgccaagctgcgggacctgtcgcgggagaacgtcctcatcaccggcggcgggagaggcatcgggcgtcagctcgcccgcgagttcgggagcgcggcgccagaaaggtaccaggcactgcgactccagggagtggggggccgcagggcggggtaagcccactgctgcgctgcggatcccg

SEQ ID NO: 316406 - DNA, 727 bp, Homo Sapiens
gtctcacacgagtttatttgtgataaacatctcagcaatcagcaagcccacgagctatagtgttcttccgagtctatgtgggcaaaacaaaagcatattagagcaggccacacccaaaagatatattcccatagattaaaaaaacacacacactataatattacaaaaatatatttaattaaaaatatcttataacacgagtatctattagagcatatactttctcacacttatagcacatctctatatatacatggtatgaaatgtcactcatttatctatacaatatgtcacattcttgcagagaaaagagagttctctgccccgttatcatcatctattttacactatatatgtaaaaaaaatatatctacaatgctctggtagattagtaaagcttcaaaacaaaaattgagctccttggtcacaaagtaggcttctaaagtcggatctactcttgatcttctatttatcagtcctgtcacacttaagcttaaaagtttaactgcacctccaaaaaacacagaaatgtacaattcacagcagttataaatgaagagacaaaagagaatacgtatgtagaatgtttatgaacgtgcaaagaaagaatgaaagttgtatttttctttcctctctctctcttggaatgacgaatgaaaacgtttctaggttggccgatgttttttcctttcctccggtggctttttttctctaacttctgctcttc

SEQ ID NO: 316407 - DNA, 403 bp, Homo Sapiens
tgagatacatcattattttatgtaacttactgaagaaatatgctgagaaaatggtgctgagaaatcaccaactacaggagacattctgacctgacaaatttaaaatatgaaaaaaaattattctagatatatgagaaaattttgttgtttaggagatagggaaatgatttattctgttttgtaacactaaagctttatataatgtattggggtattgttttatgactagaacataaaaacatgatcaaatatgtttaaaagaatgaaaaaggtgaagtgctcagttaaaagctgactggtgtcttgtgtgtggcactagcgaatctatattaatgactgcttctgctatagctgattctgcatttatagtccagaattggtttccacttaagagtggttaggg

SEQ ID NO: 316408 - DNA, 912 bp, Homo Sapiens
  misc_feature (272)..(280): n is a, c, g, or t
catgattgctgttttaccaggaatgcagcatcccattgacaaaacaagtgctctgagaaggtttaaaatactacagagaatatgggaacacagaccttgaaatttagctgagttgtaacagctgaaactccaagaggtgtcttccttgtttgaggtgaaactagtgttgcttccagagggcagctggaaaccgtaaagctgtttggaaatctttttgactgacttgctgacaaagaggtactgtgatgcattttaacaatatctaagttgannnnnnnnnaaatcaaggaaaataaaaaccaagcatgaatgctatggtatgtgccccttttgaccatcctgggctgattaacatcatttaaatcaaagtaatcataaaaaggcatattctacttcaattatgtggtcaaataagagtaaacacacacactcacacatgctgaccccaattgccagagcattactgcactataaattacggttaattcccaaattatactactgtttatcttatttaacaggtcagaaagcacttttaaaataacttgagggctacaaggtcattctattaatgtcattctccattcgggttgtaggcatgtggaagtacccattaaaagataagttagagtttaaatactgataaacaaaaccttttattgcaactggacagtttctggagagttagcggaagaatcttggagtttcctttggtcagatgaatacaacatttcacttttgcagcactatttagaatgtactccatggttctcttgttcccaacttccaaaaagaacagctttgatctgactcacacctccacatatgacgtaatcaacccaaatttgacaccaattcactcttttctgcaaagggcatattttgaaacaagggacagcctgagggcggcta

SEQ ID NO: 316409 - DNA, 540 bp, Homo Sapiens
ggcaattgtggaattatctaacaaatttagggaaaaatccagttgtatctcagttatgtgaatgtgtccttcgatttacaattttcaggtaatctctttattttgctggtatttttattatacatagagcacattgttttatagaactgtaattataccataatactttttgtattgggaaatgttgagaatttagaaagaacaatcctaggcatttccttttgctctgtattcttctgtttagaagttttccctgtggtttgttcctggcaattaaacactgttcaaattcagagtcagactgccctggctcaaatcatggccccacgatgtgtgaaacttgacaaagtcaaagttatcactataatttcggtcacttgaaatccagtaatttcttgagcagaagaaagggaagtggaattactgtagaaattatgcatagttttatattatctgtgtagtagcctgtttaaagtgatcattgctagtgcatggtatagaattacaaactttgtaaatacttctcaagattgccacttt

SEQ ID NO: 316410 - DNA, 383 bp, Homo Sapiens
cataatttctacagtaattccacttccctttcttctgctcaagaaattactggatttcaagtgaccgaaattatagtgataactttgactttgtcaagtttcacacatcgtggggccatgatttgagccagggcagtctgactctgaatttgaacagtgtttaattgccaggaacaaaccacagggaaaacttctaaacagaagaatacagagcaaaaggaaatgcctaggattgttctttctaaattctcaacatttcccaatacaaaaagtattatggtataattacagttctataaaacaatgtgctctatgtataataaaaataccagcaaaataaagagattacctccctaaatttgttagataattccacaattgcc

SEQ ID NO: 316411 - DNA, 1080 bp, Homo Sapiens
  misc_feature (866)..(866): n is a, c, g, or t
gttcttggaaatatctttattgtcagcaaggcagggaatggtgggaaccaggggtgtcccgctggagggtcaggagggagccacaagccgcctgggaggccgtatccggtcgttgatccagtccacatagttggccacgcgggtgtagacccccggcttgtggagccgcccgcagccgtcaccccagctgatgatgccgtagaggtaagccacgccgttcttctcgcaggccaggggcccccctgagtccccctggcaggcgtcggacttgcagtcgaagtagccggcacagagcatgttggggctgatgtcggcgccgtagacctcagggctgctgcacttgtggtcggcgaccagggggaccagggcttcccgcagggagctggagtagccgctcacgttctcatccaagtggccccagcccgcaatctggcacttgtgtcctgcggggaaggtgctgccgggctcgggcaggcagatgggctgcacgaactgcgagcgtgtggcacagcggtcccctttcttcttcagccggatcaggacgaggtcgtggtcgctggggttgaacaccgagtacagggtgtacgggatgtacttctcgatgccgaaggtctgcgtcacgtccgtcgtgcggttgaagaagtgctggcccagcaccacggagacgctgtccctgggggggctgtgggagaagcagtgggcggccgacaccacccagcaggtgtggaccaggctcccggcgcagaagctgtccccgatgtagatggcggccagccaggggtgcgagccgggcagcgaggaggagccgccgatgatacgtggccgcaggaaacgtcctcttcttgtgcctcctgccgcaggcctgngcgccccggggaggctggctcaggcagggtcgccaggagatccgagtgacagttggactctggtgagggattctgggagcaaaggtcaccgggtcacacccctggggttcacagggccagcccccttccacacacaggccctacccggcaggaggcgctgcagagggccatggccggaccccctgtccacgctgctcaggccctggcgcccact

SEQ ID NO: 316412 - DNA, 983 bp, Homo Sapiens
  misc_feature (739)..(852): n is a, c, g, or t
gcgtcagactatcaccaaagtttatttgctggcaaagctggttttcccagaaatttgtatgtaggaatggtttaaataaaagttgatggaattcttagttagcagttgctctgccaagaataacacttttgtgtgctttctgtatataacagttttggtcagctatactgacagagctgggctaagatattttcctgcctgttaatcaaggccacacagacaaagctcaaggaaggatgatccctgcctcaggaagttttgaatcaactgctatttttaacaagtatacagtagaacttgagatcaggtcttcactcagttggtaggagcctctgtgtgaaaggaaggaatgtgacagtggctgtaagtatttgtattgatttgggtcaagggtgtggtagcatagatgtggggaagtccagtcgtcaaatagggtattacattttaaggcaactgatagttcatgggcaccttgagttgtctttagtgtatatggaatcctgtgctgctaatagtaaagttgaaataggctatgtgatgggctgatattattaatcaacgtaggacaggaggagaaagttggctattggtgtgtttccatgctaactggctcttgctgtggacatatataaattttgggggggttttgagatgtaattctgtgtatatatatgctccttgtttcattaagagaaggtttcataaagaattaatttatgcctgggtgcggtgcctcatnnnnnnnnnnnnnnnnnnnnnnnnnnnnnnnnnnnnnnnnnnnnnnnnnnnnnnnnnnnnnnnnnnnnnnnnnnnnnnnnnnnnnnnnnnnnnnnnnnnnnnnnnnnnnnnnnnttagttgggtgtggtggcatgtacctgtagtcacagctactcagaaggctgagggggaagatcacttgaacccaggaggcagaggttgcagtgagccaagatcaccaccactgcactccagacttagtgac

SEQ ID NO: 316413 - DNA, 787 bp, Homo Sapiens
tttcagcccaagtctctttattggaaccgggccccgctggcctcggcttcaggcatttccatttccattagtgggaccaacccactgggtgatttgagtgttgagccgctggttggtccagtcctgccggatgtcatcaaggtggcagtcaaagtccacaaggtgctggtgggcccgatcttccagtagagctcccaccatctgccgtgactcttcccagtccctccacatcactaagttcttatccttagggacccagcggagaccttggttctccaggacgatgaccgggggcacacgaggctgaggcaccagtttcttgattatccaacataataagtactgcatcagggaagaattctgcaattcgcccagcaattttcaaggccaggggcccagggctctgatcgttcacagctgcattggcatggtagtaaccagccaccaccagaccgggctgtgctccccacacatccacctggttgagggcgacctccaacatgacggacagggccaggtggctgtggaagaggggcacacagtcggtgaggcacaggcattctccagaccgcggcgctggcgccaaaaacagcccgttgactgcggcgtgtgggtaccgggcagcatgcaggcacatcttcacgtaggccagggccgagatctccacctcccccatggcgagcgaggcctggacgggaagcagcaagccggattagtaccggattaggcgagccggtgcctagctcgcgtccgtgaagctccctccagcgcttcggcacgctctttg

SEQ ID NO: 316414 - DNA, 838 bp, Homo Sapiens
  misc_feature (431)..(431): n is a, c, g, or t
gtgttctctaccagaggattgtgccgtgcgttaagcatcgatccgtgagagttctcagaaacctcttcagctcagcagttatatgctgtatactgatctggtttatttacgttgatctgagccctggaaagccctttgcttataggtccaaaggtgggatctggaggttaaatcttttccaaggtccgaagaggaatggttttgccctgtgggcctttaaaggtctaaactctttccttggagttagcatcaagaattcttaaccctttaataaatccaggttgtcttgaaaggtcctttccaggctttccattgaaatcccttataacggtccattggcttaaataatctcgcagagtttaaaatggtgaatatattcatgttccagctttgcttgaaattttactttcttcaaactaatgcagccaggnaagagcatgtccatgaattggcaataggccgctcctgaacaaagctgttccacttttgtgtagtttaaagatactatgtcattaacccatgcaatgatgtcatgtctgctcatagtctcttgggttatcgaggtagaatacacattgaccgccattccccaacttgagcatccaggctttctccctggctgttgaaatgaactgttcctctgggaaacaggacacttttgatctctgttctgtttcattccacagtgtcctattcagcaaaagtgtaaatcgcgggtcctcagattagaagtaggtgctgcgtctgaccacaatcgcaaccggtctgcacacttcaccccagctgggaccgaacctccgcctcgcagcgcggccccagggtcgatactatgctaaat

SEQ ID NO: 316415 - DNA, 769 bp, Homo Sapiens
  misc_feature (145)..(145): n is a, c, g, or t
cttttatccagttttaagttaaattttgtatatggtgttgggtaagggtccaacttcatctttttgaatgtgaatgtccaattttcccaagcaccatttgttgaaaagactgtcctttccccattgcatgactgtggcaccattngtcaataggcattttaccatatatgcaagggattatttctgggctgtttattctgttggtctgtatgtctgatttgccaataccacgctttagctttgtagccagttttcaaatcaggaaggtatgtgtcctccaactttgttctttttttcaagctgcttttgactattcagggtcctttgagattccatatgaattttaggatggatttttttatttctgaaaaaaagaagtcatttggattttgataggggattttattgaatgtacagaatcaataaaatccatattgatcaatacagattcaatatctgtatcaatctggggtagtggtggtcatcttaacaatattaagtcttccaatccatggatgtggatatcttttgggttttctttgatttctttcagcagtgttttgtgggttttcagtgtacgagtcttttgccttcttgattaattctaggtattttttattctttgggatgctattggaaatgaaattgtaatctaattttcttttatatggttattcttagatatagaatggactatttgggggactttgatgcggtacttcctgattactacttggaaggttttcgtgggatattaaaggttcttcga

SEQ ID NO: 316416 - DNA, 568 bp, Homo Sapiens
tagtttccttgtgatgtctagtctagtatcagggtaatactgaccctagagtaagttgggaagtgttctttcctctcctacttttagaaacagtgtgcaaaaaattagtgctaattttaatgtttggcagaattcaccaatgcagccatctaggcctgggattttctttgtgagacttttaaaattactaattcagtatttttccttgttaatgccaattgcatttttaaccaacttttaggtagagccaaagataagagtattatctcattaggccagtgaaattcaagaagaaaatacatattatcaaggaagatgctaaatatttgggaaattctgataggcagctatgaaaattatccattatatcttgattcttaacctctatctagctttaacaaacattttatcacttctcatgtggtttcataatcttatgacaagaaatttcagcctgttctataacagatttatatacaaacctcttaactaaaacttgcagtgaagtccttataatcaaaaactaaagtttgtacattccttgagataatacacagatatgtatctg

SEQ ID NO: 316417 - DNA, 339 bp, Homo Sapiens
atgagccaccgcacccggcttactgggggctttttaaccttgtttggctacattacctcagtgaacaaggggaagctcacaacaggaactcacacaaagaaggaagagaacagtaccaacaaggtagaacatcacgatgagaagaaagaatgatgcaaatatgtggacccccaggataaacacagctgcccaaaatttagctctggcccccttagatgggggaagtcaacagtgaagtgtttctcagcatcataaaggcagaagctgtggttcctgtggggcctgccaaccgttcccagatgctgaactctgctgggagttttttccatgggactttaa

SEQ ID NO: 316418 - DNA, 624 bp, Homo Sapiens
tttttaccctccatgaagatgtggccccccccatggaaaacacctccccttgtgtttgaaagtccaccttaaaaacttgaaacactgaccagcatccagcctggtttaagaaatactttgccatttggtatgaaattaacattaagtggttaatgaagaaatttgaacaaactcccaatcccagcaccttttggaagttattttaatcctgcagtctagctgtggggtatgcctgcaagagatatttatggaatgtgcatgctgaacaccaaagccaggcttgttggagtttatgcacatcacaggcttgaacttccccgagagcaagtgtggtcaggttagcgtaagggttctgatgaaaagccagctacattcttaaaaccagcactagtttctctttcttcccccgaggaagtatggaggcctactcacaaatttctacctgcatgggcaagatgctgacacatccttggagtgatgctgaatgtggatgtgggtggaggggcagaaggggcagtaaagacagtggcaatgggcaaagctaccctcttctatttctgttagaggatcaagcttctgattcttcttgctgagtatggctgttgaaggggcactaaattattg

SEQ ID NO: 316419 - DNA, 561 bp, Homo Sapiens
  misc_feature (342)..(350): n is a, c, g, or t
  misc_feature (364)..(435): n is a, c, g, or t
  misc_feature (484)..(501): n is a, c, g, or t
  misc_feature (521)..(521): n is a, c, g, or t
  misc_feature (530)..(530): n is a, c, g, or t
  misc_feature (544)..(544): n is a, c, g, or t
aatttcaacatgtcaaacctattgaagggagataggaaacaatgagaaacttacttttgctcctttatacagaattattaactatattttactaactaaaaaactctagtattctttacctaaagtcaattggctggtaagagggagagatgcaaaattctccagctctgaacttggagctacttcacactctactcttaatggaaacttgaactaatgatagatagtatttttttcctctatttaaaatttttgtcttgattaggagatttttcagttctccatataataattttctacaatcagatctatgctgtggcatattttgctttatttaaaaannnnnnnnnagagatgagttctnnnnnnnnnnnnnnnnnnnnnnnnnnnnnnnnnnnnnnnnnnnnnnnnnnnnnnnnnnnnnnnnnnnnnnnnaagtagctgggattacagacaggcatgtgctatttacacctgggctaannnnnnnnnnnnnnnnnngtaaaagataggggtctttnctatggttngccccgggttcgtncttgaagcttccggggc

SEQ ID NO: 316420 - DNA, 904 bp, Homo Sapiens
cccttgtgtccaggtttattttacattctcttccagaggggatgtggggctgggggagagccagcaggcaggcgggcagcacacagcagtctccctggggaatatttgagccaggctagtggtgcctggccccacagtgcggggtgatatgccagggccagggccaggacttggcagcccctgggaagaggaggccttggggcaagagctcttgccaggcctagatcgctaagaaggtgctgcgtctgtcccccgccttgctccgcccccccacacccagctggaggccagaaggcaaagagggcagccagcaagctggggtgctgggaggaaccccagcaggcgggggcggcctttggtctctacgaggctaggaagctggttctggttagaggaaccccgtgggggcaaagcggagagctggtccctgttagaggaaacgctggagcaggatggggatgggggacttggggtctggtctcaataaggcctggaaatggtctccgcttcaaagcagacctctgtatttggggagtggggtggctccaagttgccatggagaccactcacaccggggcaacgtaatttccagggaacgttccgaatttctgggtcctccgggagacacccacaaaccagccatcgtcacactgctgcatgacatccaccctgtccccctcgcgcagctccagctcgtcttcgttctggggcctgtactggtacatcgcccggtacggggtccagtgtatctgagaggtgttaggagaggaggtccccaggtccaggggatggctgggacctcgagagtgggacagagctggaccaggggtgccaagattctgggtctggggtctaggctcctgggtgggcaaagagggcagccagcaagctggggtgctgggag

SEQ ID NO: 316421 - DNA, 536 bp, Homo Sapiens
  misc_feature (70)..(70): n is a, c, g, or t
  misc_feature (118)..(118): n is a, c, g, or t
  misc_feature (373)..(373): n is a, c, g, or t
  misc_feature (455)..(455): n is a, c, g, or t
ccagccatcccctggacctggggacctcctctcctaacacctctcagatacactggaccccgtaccggcngatgtaccagtacaggccccagaacgaagacgagctggagctgcgcangggggacagggtggatgtcatgcagcagtgtgacgatggctggtttgtgggtgtctcccggagagcccagaaattcggaacgttccctggaaattacgttgccccggtgtgagtggtctccatggcaacttggagccagccaggatggggtggggagcggtggcactcgtgggagggagaggacccccgcccacatcctccttccccaggacctgagctcccagcatctgcagacgacccccgcagcctttcccncggacccccctcgaagccccctggactgattcccacccacgactcacaggcattcctcccacagccctttcatttcctcccnaccccactccccaaatacagaggtctgctttgaagcggagaccatttccagggccttattgagaccagaccccaagtcccc

SEQ ID NO: 316422 - DNA, 456 bp, Homo Sapiens
  misc_feature (153)..(153): n is a, c, g, or t
  misc_feature (194)..(194): n is a, c, g, or t
atttgactatatacccaaagttcttatagcagtgacctttggtctataatgcatgtagaagtattgacttaattctagattttgttaaatcaggtgtacatgttgaaaattttaaggtgtatcaattagaaattgcattcatctgataataanaatcttgactaaagtgacttgaacaagataaagtttctctntgtttcacatgaatgagatctggaggtgggcagtgcaggacggaattggctgcttctttatcatcagggtttcagctcttctttctgctttaccgtccttagtgtgtggcttccatcctcagagttgcctcatggtccatgatggtttctggagttccgtctacacccacattcctacacctaaaaataatcgtaatccactttaggtgaatataattcttgatttgtctctacagagatagagagatagaggaaatatata

SEQ ID NO: 316423 - DNA, 400 bp, Homo Sapiens
gctgcaggattcggcacgaggttcactataggtgtttagaccacccagatctttgaagctttagatgaaattcagcaatgagtttgtaggaagacatcactactgtgctctttcatggcaccacacggtgctgtttcttaaaccaaagacaggctgtcatagtaagtatattgaagactggtaaatcccattcgtgacagatttgttaaagttaactcttctctgactatggaataggttaaaaacacctaaaattgtgactttggtacattgacctagtttaaaaaaactcagtatgataaactggcattgtggcttttggttataaaagggaagtacttgggaagcaagtttttttaatgatgtgatatgacagtgaaggaaggaaaccaatcttaat

SEQ ID NO: 316424 - DNA, 669 bp, Homo Sapiens
  misc_feature (25)..(25): n is a, c, g, or t
  misc_feature (47)..(47): n is a, c, g, or t
  misc_feature (52)..(52): n is a, c, g, or t
  misc_feature (69)..(69): n is a, c, g, or t
  misc_feature (78)..(78): n is a, c, g, or t
  misc_feature (108)..(120): n is a, c, g, or t
  misc_feature (133)..(133): n is a, c, g, or t
aaggctgaggcaggagaatcgctgnaacccgggaggcagaggttgcngtganaggagattgcacccatnacactctancccgggcaacaagggtgaaactctgtctcnnnnnnnnnnnnnctcccctactttnacagtcacatctcctgcaatgcaaaaaataaaggttggtggacacctgatttacaacttaaaatattcagtgagtttagacagaatatatactgctctgaagttccttaaaatctgtttttctattattgtttgtttttaaaatcataaaaatataaaaagtgtaaactttctaataaacattccagtgaaaccctgttacactactttttatttagtgggtcagaaagaacaaaagtgacaccatgttcctttgggcagacccaaaatcatgctcccagccctaaatctaccattacatgtctcccacccattagacagctctgtatgccaagcatgtctctcacgacaactgcagctaccactcatgaatacaccctgtaaccaagcaacagatctccctggtagctgtccatgtgctctcagcatcttacacctattgcttcacactcgacctagcctcagtaactaggcaaacatagggaagtaaggacacaaaaaattggagcacctcctttgtgctcgtgccgaatcctg

SEQ ID NO: 316425 - DNA, 1123 bp, Homo Sapiens
  misc_feature (46)..(59): n is a, c, g, or t
  misc_feature (71)..(71): n is a, c, g, or t
  misc_feature (74)..(224): n is a, c, g, or t
ctttggggggccgggccccccaaaaagttgtttaaaaaattttttnnnnnnnnnnnnnnccccacattttnttnnnnnnnnnnnnnnnnnnnnnnnnnnnnnnnnnnnnnnnnnnnnnnnnnnnnnnnnnnnnnnnnnnnnnnnnnnnnnnnnnnnnnnnnnnnnnnnnnnnnnnnnnnnnnnnnnnnnnnnnnnnnnnnnnnnnnnnnnnnnnnnnnnnnnnngaccattttaggaaaccttttattgcaaatgccattctgcatattgatttttgacagaaagtaaagtatcagaaatgcttctttcctgggaaaaggaatataaatgacagcaagacacattttagttgctactaaagaacagcattattttcaatcattttaagtcgctcatttaataagcaaggtatgaaacagattaaaggtgggagcctgcaaaagggtaattaaaaaagtgtttcctccccgggaaacagcactgtttggtctgatcaaatgccgaagctgggatctgattctgggtgccgtctctcgctactggagtgctgaccagcaggctgcccatcacggaaagaggttgcaaggccaggcccccaggtgcgctgggatttctggctggctctacttggggccagagaagggggtaaaggccttgtcacagcctgccatgcatgcttcaatctcttccacagtgcggggcacgcaggtcagcagctctatgccgctgtcagtcaccacgacgtcctcctcgatgcggaccccgccaaaaccgcgaaagcgctgcaggacctcgcggttaaggaaggaggcgcgtgccgggtccgccagggccttatacatgaggtggtcgatgaagtagatgcccggttccacggtgagcaccatgcctggctgcagttgccgtgcagtgcgcaggttccgccaggccgggcttgtacgatccgcctccacgccctttgggttgccctcccacgttgtgcaacgtgaatgcccaggtagtgggccacagcccgtggagtgcttaaacccggtcccccaaggtgaagccctggtacccatggtttatcacccctctccgcttcagaattgcccatggtggcgccaagcttccctccaggtgg

SEQ ID NO: 316426 - DNA, 652 bp, Homo Sapiens
  misc_feature (68)..(68): n is a, c, g, or t
acttacagagcttccaccaaagagaggagagcacggattctcagagactggcttccacttgaacaagnaaggccaattcctgtggggcctgtcaacatcaacttcagttctctcgcccttacagtaggcctctgactgtatcactatcttagaactatgactgccatgtcagcttcttcaaaggtgaagcttgacagctattctccaagtccatcctcagcagctgaggccacaacagattaactgaagagactccttggcttcttcctcttgacctttgacagctgaggtctctgcagagggcctgaagtacccgtggactctttctcaggtgctgagagggttggggctgaggagaccagttgttctggctggtttacacattggctatcgattccttgcagggaagcactgtttgaggtatgaggatctccagcgccttgatgcttctgtcccacttggacctcttgtgtggtgactgccatatacagatcctgcagattcatgacaaagggctttccatcaccaacttcaaatggttctgtcttcaatcgatctcgaatcagcgtagccccactctcctggtagtcttggatctctaggtctttcatatgaagtaacgttgctagctccctcacttggcactgtaatg

SEQ ID NO: 316427 - DNA, 1202 bp, Homo Sapiens
  misc_feature (885)..(885): n is a, c, g, or t
cgtgcagtactactaacggtgttaaggtagcgaggctgggtggcgaattcggcacgaggccaagaccctgcctcctcttgcggtggggggaaagcggcctcttactctaggcctttcggtttgcgcgagcgggcaggaaagcgtgcgtgcggctaagagagtgggcgctctcgcggccgctgacgatggaagaactggagcaaggcctgttgatgcagccatgggcgtggctacagcttgcagagaactccctcttggccaaggtttttatcaccaagcagggctatgccttgttggtttcagatcttcaacaggtgtggcatgaacaggtggacactagtgtggtcagccagcgagccaaggagctgaacaagcggctcactgctcctcctgcagctttcctctgtcatttggataatctccttcgcccattgttgaaggacgctgctcaccctagcgaagctaccttctcctgtgattgtgtggcagatgcactgattctacgggtgcgaagtgagctctctggcctccccttctattggaatttccactgcatgctagctagtccttccctggtctcccaacatttgattcgtcctctgatgggcatgagtctggcattacagtgccaagtgagggagctagcaacgttacttcatatgaaagacctagagatccaagactaccaggagagtggggctacgctgattcgagatcgattgaagacagaaccatttgaagaaaattccttcttggaacaatttatgatagagaaactgccagaggcatgcagcattggtgatggaaagccctttgtcatgaatctgcaggatctgtatatggcagtcaccacacaagaaggtccaagtgggacagaagcatcangggcgctggagatcctcatacctcaaacagtggcttccctgcaagggaatcgatagccaatgtgtaaaccagccagaacaactggtctcctcagccccaaccctctcagcacctgagaaagagtccacgggtacttcaggccctctgcagagacctcagctgtcaaaggtcaagaggaagaagccaaggggtctcttcagttaatctgttgtggcctcagctgctgaggatggacttggagaatagctttcaagcttcaccttgaaagaagcttacatggcagcaatatttctgttgacaggccccacaggaattgg

SEQ ID NO: 316428 - DNA, 950 bp, Homo Sapiens
tccccgcgcctttttctaaaggggaggttccgtttccaggtaggggggaagcccattgccccagtaaggataacttttacccccccgggtagcccaaagccggagccaacttgccggcctttctaataattgtgcaagtcccaaggaggatcccctggagcccatagccaatacttggtttcctgtttgtgaactgaacagcccaacttccattgttggggtctgcatgcaggttggggggcacaggccagccatctcccatggcccctgattttatctgctacattgcaaaggaagccccccagaggtacagctgccttattctccaactccatgggctgctgcccaggctctgactcagttttgccctggaaatgtcctcttgctttcccttttagtaacttattcatcaaatcatctgtaaggctgactcccacatgctcaagccttaatttggctacattttcagccggcgtggcttctctattaaatggtaatggcttcaggttaacatcaagctggacctctaagtcagaagatcgggtatgaggcaaaatcatatggtgcttgacgtactggggcccccccagcatggtctccagtaaaaagacagtttctaagaattcaggctttgaattcatatccttctctgctaaataccacagcaattcagacccctcttgctgaaggtgagtactaagacgattgcctctgtaatctggacactcaatgccaactgtaccatcgagggtatatagttccttaaggaggtcaaacttagttctctcctgagctaacctgacaaaccctggactgagagcgaaatcaattaactctactggaaagtactccaaaaatgccaggcccagcaggcaggtgggcaggtgttctgcctcgtgccgaattcgccacccagcctcgctaccttaaaaccgttagtagtactgcca

SEQ ID NO: 316429 - DNA, 843 bp, Homo Sapiens
ttttccgtaggacatattaagatgtttattatttactaagagtaacatgtatacatttgcagtaatttgtacaatccaactacattacaattcacagtaacatacactagctctaacctgccttggatacaattaagtctcctcaacacactattttatcgccaaacttacattctggcttttataatcattttgcaacacctggtacagtatacacctatagctttgccatagaaatgcccctaaagtgcccttcagagagcagaggtgaatactttctcatgaagaaacgccaacttttctaagcgagttcgtttcagtagtgggagccattcccagtaggataactctaccacacggtagccaagccgagccagctgccgcctcttcatattgtgcagtccaaggagatccctggagccatagcaatgctggttcctgtttgtgaactgaacagccagcttcattcttggggtctgcatgcaggctgcggggcacaggccagccatctccatggcccctgatttatctgctacattgcaaaggaagccccccagaggtacagctgccttattctccaactccatgggctgctgcccaggctctgactcagttttgccctggaaatgtcctcttgctttcccttttagtaacttattcatcaaatcatctgtaaggctgactcccacatgctcaagccttaatttggctacattttcagccggcgtggcttctctattaaatggtaatggcttcaggttaacatcaagctggacctctaagtcagaagatcggggtatgaggcaaaactcatatggtgcttgacgtactggggccccccag

SEQ ID NO: 316430 - DNA, 1003 bp, Homo Sapiens
tcgcatcagcaagtgctcaggctttatttacaatgccgacactgcagggaatgaacagcctccatctgggcctctctggtcaaaaccacttttttgagtcaggggcccagccccaggcctcccaggtcatcgtcctctgccccgaagcccgagaagctgatgggctggcaggccaggctgcgcaggttcacaaggcaggcggtctgcgtggcactgaagtcagggacagtcaccaacagcactgtctggtcctcaggacctcggatgattttggagccaaagctgggggtgttgccacaaaagtagacatgcgggcactctgggaagatgaacgggtcagttttgtagaaggggtaacaacctagagtgtcaggggctgtggggctgatgtgacggacccgcagggtccactccaggatctccaagtgatcctccatgctgctgtatcggaaaatgtcactcacgttctgtcctgatgtccccaaaaatctgactccatcaatggtggcctggtaggggttggtgaccagctggagcgtggagtaggcagtggccagcgggaacatgcaggggtggaggggctgctgggggagcgtgtaattggtgggatcaaactcgcctggcatcacgtccacgggcactgaggcgctcagctgcaggaggatctcatccagcatcttaacagcctccacgctggctgcctgggttttcttggtgaggtatttggccttattgatagaatccctgctctgggtgctgtggctgaggaggttgccagcgaggataacccgggagacgtgggcggcgctgcactgctccccttcgtccccaagctgccccgtcaccacatccaccagcagctgggtgcccagcaggctctcgcctccaccgccacccaggcccaggccggacaccagtagcacaaaccctcgtgccgaattcgccacccaggcctcgctacttaggacggatgcgggcgtttgcaggagggagggggaggagt

SEQ ID NO: 316431 - DNA, 1129 bp, Homo Sapiens
  misc_feature (269)..(269): n is a, c, g, or t
tgtggccttgtagggctggtgaccagctggagcctggagtagcagtgccagccggaacagcagggtggagggcctgctgggggagcggtaattggtgggatcaaactcgcctggcatcacgtccacgggcactgaggcgctcagctgcaggaggatctcatccagcatcttaacagcctccacgctggctgcctgggttttcttggtgaggtatttggccttattgatagaatccctgctctgggtgctgtggctgaaggaggttgccnagcgaaggataacccgggagacgtgggcggcgctgcactgctccccttcgtccccaagttgccccgtcaccacatccaccagcagctgggtgcccagcaggctctcgcctccaccgccacccaggcccaggccggacaccagtagcacaaacctatctgtgtcaagtgggggtgcgggcttctggggagcaaggtcagcaaagcaatagtcctccaccagaaacttcccgtcgtctctcacggagccaaacacagccaggacagtccccgtaaccagctttgacacgtcaatggtgccttttagtttgatacgctgcagttcatcttccaagaccagctcgtcatctgggtgtatgtatttactccgaggaggctgggggagcaggttgtgctcctcgctgacctcccgcaggatggagggctgcagcggcatggccttgaacagagtgcccaccacacagcacttctcctcaggctgcagttcacacagcttcttcactcccactccactgccccagtgctgctgggcccggttctccaggaagggtctcatttggatgaggcgggtggcataaatgtgggcatactgccggctaaagctgcgctctcctagccggaagggttgtgaggagttggtgtaggttgccactggcacccgggcaaaggtggcattgttggctgatggtggggacagtagagtgtgggccctctgggcagcctgctcagaaaacatggccacactcctgacttgcttggtccacacagcttcgcccaggccaaggaggttcacgcgcggcgcgccgcatcccgccaatcccgacgcgtgggtcgacgatatcccgtaattccggaccggtaca

SEQ ID NO: 316432 - DNA, 720 bp, Homo Sapiens
aaggagagacaaaaaaaggcacttgtctttaaaacaatggtgttctaatgtcttgatatttatcagagcttccaaagtagcctccctttctcagtatagtatgtgctatatatagctcaccaagtcaaaggctgttcaagttggtaaaaagtttttaaaaaattaaagttggtatagccttttaaatctaaaagttgtcttttcctgcctaagaaaaagtacattaatttgaattttcttgaatcattgagtaaatttgaaaaattaggcttcaagcttttgcacaaagatttgtatgtatcttatttgcatataatcaataattttgtatgtatcttagttgcatataatcaataatcaataaatttgaaaaattagccttcaagttttagcacaaagattcgtatgtatcttatttgcatataatcaataattttggaggatgcgggaaatatcttttcatcatttacatttatttttagtatagtaccttttacatttgtatgtaagagaattatatatcttatagaaataacaatgaaacagtgatttagtatattagaaaggagatagtagggcaaaagcctactttggcagcaagatttaaaattcagaaatctgggttctagtcacactcttaaagtgatataattttgttaatcatgttatttttaagaatattggctcattggacgagagcaggctcagtggcttacccca

SEQ ID NO: 316433 - DNA, 424 bp, Homo Sapiens
atggatgctaggcttaatacttaggtgatgggttgataggtgcagcaaaccaccatgacacacgtttacctacgtaacaaatttgcacatcctgcacatgtatcgcagaacatcataaaataaagtaaatctacattgaacttaaaaacaaactctccaacctcattgtcccaccatccccctcccccagtctcctgctagagcttctcgtcctcttcgtggctgaatgaggaagacagaaaggagggaagtcctttgatttagttcacattggtcggcctcccagggcacagaggcagggagaagtagggcagagggtggatctgaggggcaacacagacatgtatccggtccagtgaatgatactgcgtctgaataacaaatggccatgtatggacaggtcactcctgaatggacaaatggc

SEQ ID NO: 316434 - DNA, 377 bp, Homo Sapiens
ggttcgctgcccgtggtgcttggctgaaaggaagcctgtgatttttgcagctggttggctctcactgaccccagggatgtggccaggatcgaaagcaagacggttatcgtcacccaagagcaaagagacacagtgcccatccccaaaacaggcctcagccagctcggtcgctggatgtcagaggaggattttgagaaagcgttcaatgccaggttcccagggtgcatgaaaggtgagcggaacattgatttgattgggtaaaacagcagagagccttttcttatttacatctatcctaatggtaattcaaacaataatggaagctcccaccacctcagatgtctttcagttccatacatgaagttggcaatgtattg

SEQ ID NO: 316435 - DNA, 373 bp, Homo Sapiens
ccaggacatgattactgcaacacctcacctccttatgaataataatgcaaaactcccataaagggagtttctccagcaataatcaatgctgtctcacccttacgagcagccggccctgaattcttttgcaataaattatgctgcatctcctttgctgtctcatttaaattcttttaaaccaagaagacaagaactgaggtatcacaacagctgtcaacacatgcattttgctttattcatttgctttatcttatggatctctccattttgtagagtattccattgtatagctgtacagtaatttagataaacttttgtattgatagccttttcttttggagatgggggtctcactctgtcactcctcgtgccg

SEQ ID NO: 316436 - DNA, 680 bp, Homo Sapiens
  misc_feature (165)..(165): n is a, c, g, or t
ctcatgaccatccagccaacacaataagcctcagcattcacattgtaattgagctcatttaagcaaagctatcttcagtagggactttcccttctagagagcatacacattttgattttacctgtcctcaaactgatcctttgcacatgataataataaataacnacacctctaggtggaaatttaagatgctactgagacatgtggtgtatgatcaagcattatcagctactgcacctgtgcagaggaccactcaggacatgattactgcaacacctcacctccttatgaataataatgcaaaactcccataaagggagtttctccagcaataatcaatgctgtctcacccttacgagcagccggccctgaattctctctctcaggtgtactgtctgttctgcacctaactttcaaaatactccttttcttttgcaataaattatgctgcatctcctttgctgtctcatttaaattcttttaaaccaagaagacaagaactgaggtatcacaacagctgtcaacacatgcattttgctttattcatttgctttatcttatggatctctccattttgtagagtattccattgtatagctgtacagtaatttagataaacttttgtattgatagccttttcttttggagatgggggtctcactctgtcactcctcgtgccg

SEQ ID NO: 316437 - DNA, 391 bp, Homo Sapiens
ttgacatcttttcctttctgaaacttatatgggctaatctcaattaaggatgataggtgaccatggtaagcatggtcaagagtgatcacatcctggtggcctctgaactgccgagccaggcgtaaggctaagtcgttggcttcggatcctgaatttgtaaaataacgaacagagagtttctccggcagagttgctgaaaggcgtttggcatactcaacaatgttgtcgtggaggaatcgagaatttgtatttagcagttccatctgtttcagggcagctttgaccactcctgggtgacagtgtcccaccgatgtgcttcttcctcagccccagagtgtcccgcttactgttcagctcgcacatggtggcggggtgcaaggcgctgcgaagg

SEQ ID NO: 316438 - DNA, 371 bp, Homo Sapiens
tagctctggctctctgaggagctgtctccagcctccaggtggacgtcctttccagcataccagggcttatggaggcaaaatgaaagctggtccacgtgggaactccctactgttgtcctttccttgggcagacaccatatactttttagctcctagcagtgtttatcccgttttccccaaagcatccttggactcaggcctttcatcctggacccatctgtctggcctgttgtgctgagcctttggtctaagtggttggttggtcccagccacttcttcagtgaggctgatgggcctgttcccaagggtactttggcagggggtgctggggaaggggctggcctagggccaggttcatcataccgttagcc

SEQ ID NO: 316439 - DNA, 371 bp, Homo Sapiens
tttagactaaggtttgatggactaaatttatatagtttagagtcgatgagttgtgtctactcaacaattaggaacttaatccttttccttttgcttttcctacagaaacacatgcaggatttctgcagggggcagtacaggttctgggattgtgaggctgtgagtgaaggtggacaagctgtctggatggcaggtctaatgctcttccgaataaagtgctgaactgtgaggagagaggcggactgtgaggcagccagtagccagttgcgtccgtgtgtggtctgtcaccacgttgcctgcttcttatctgacacagcagctatcagagtctagtggttgtgcttttaagatgctctgataccattgagata

SEQ ID NO: 316440 - DNA, 1057 bp, Homo Sapiens
aaacaatggcataatactattttttaacctctacacgtttttcatcttttgtatatttccttgtcattcatcacacatctactccctatctactcggtatcgcaatatatgtctacacattctccttctctcgtgtttcaacatgtgtgacccattcttttgggccttactgctgtcaccgcacttccatcttttgtagttggagaaaattgtccgacctcctggcccagtttgcccttatactccgcccctgcctgcctaacacatgactacttctggaagctttcattcttcgatttcccagctgttcccaacctcttcacgtattaccgtccatctgttccctatggatttctctgtcactacccagcctttcatcctcggccaccccatccaacagccttcccagcacctccctcctcttcagtttggctcgctccataatctctagcttcacgatcacggcgtcaatcttggacactatgctgccgatggaatgctccatccggtccactcgtctcaccaggacttgaaactcttcgtaagaaacgccactagaaatgcttcccctccttctggagctatgtccgctatcttcatcgtcatcctcctcagagtcatccaggcttcgagggaaacttcggctgctcatgggacgtggtaaagaactgtgatccaaatccaggtcctccctctctttctccaagtcgtctctcatctgctgatgttcatgttcggtcagttcttggtctccatcttggtcgtactttgtgaatattgcctcaatctctgcatcagtatggcccttccctttgagatcttgtcgaagttcgtcacaagtttaacttgcctcctccttgccgcagactctctgaaatgtcatccacggtattttttttcagttttagtttgaccaagctttatggtagccctttctgataagatctgagagttccatttcagctttctgctgtgccaagtcagatttcacttcagagtaagtatcattgatgcggacgcgtgggtcgacgatatcccggaattccggaccggtacc

SEQ ID NO: 316441 - DNA, 1320 bp, Homo Sapiens
  misc_feature (1182)..(1182): n is a, c, g, or t
  misc_feature (1196)..(1196): n is a, c, g, or t
  misc_feature (1238)..(1238): n is a, c, g, or t
  misc_feature (1255)..(1255): n is a, c, g, or t
  misc_feature (1261)..(1261): n is a, c, g, or t
  misc_feature (1268)..(1268): n is a, c, g, or t
  misc_feature (1272)..(1272): n is a, c, g, or t
  misc_feature (1274)..(1275): n is a, c, g, or t
  misc_feature (1285)..(1285): n is a, c, g, or t
  misc_feature (1288)..(1288): n is a, c, g, or t
  misc_feature (1298)..(1298): n is a, c, g, or t
  misc_feature (1300)..(1300): n is a, c, g, or t
  misc_feature (1304)..(1304): n is a, c, g, or t
  misc_feature (1312)..(1312): n is a, c, g, or t
  misc_feature (1315)..(1315): n is a, c, g, or t
tcgggaccggtcaccggccggcaaccgtccagcggcctcgaccaccgcctctagcctccgttcccggtcctttctcccgggccgagagacagcgtcgccgacaggggctcattcccctccggttctcctcggtgactcacctcgggcgggccgttttgtctttaggggccgccttggtggggcgaggtttccgtgacgaatctcctggggccgtccgtgccggctcgggccgtcgtggcgactcgagctcctggaacttgctcaggctccggaggtccgaggccctcgaagttatgcgtcgcctccaggcggttgcggcgggcgcgggctcctaaagggcgtcacacccggactccgccgactaggcaacctccattcatctttccactgcgcctccagcgcccccgccttctccggtcccctcctcggagtcattttttcctgttccccctctgccgccctttcctcacgccccgggtgaggcaattctcttggaagcgaaggtgtcggctatgagccggagcctccttccttgaatttctccgtggaggacccgccgcgccccccggcatgggggtgaacgccgtgcactggttccgaaaggggctccggctccacgacaaccccgccctgaaggagtgcattcagggcgccgacaccatccgctgcgtctacatcctggacccctggttcgccggctcctccaatgtgggcatcaacaggtggcgatttttgcttcagtgtcttgaggatcttgatgccaatctacgaaaattaaactcccgtctgtttgtgattcgtggacaaccagcagatgtgtttcccaggcttttcaaggaatggaacattactaaactttcaattgagtatgattctgagccctttggaaaggaacgagacgcagctattaagaaactggcaactgaagctggagtagaagtcattgtaagaatttcacatacattatatgacctagacaagatcatagaactcaatggtggacaaccgcctctaacttataaaagattccagactctcatcagcaaaatggaaccactagagataccagtagagacaattacttcagaagtgatagaaaagtgcacaactcctctgtctgatgaccatgatgagaaatatggagtccttcactggaagagctaggttttgatacagatggcntatcctctgcagtntggccaggcggagaaactgaagcacttactcgtttggaaagncattggacaagaaagcnttgggngcaaatnttgnanncctcgaattnatncgaatctctncntcanccccactngcntagtc

SEQ ID NO: 316442 - DNA, 593 bp, Homo Sapiens
  misc_feature (281)..(291): n is a, c, g, or t
aaatattatttttctatcatattgacctaccatgtccacagtcttccttgaattaccttccagttttactgggctgcatctaccgtttatgtctagtttgactttttctgagttcaccaattgctgctaggaatgtgctggtcactcagcagcacacccacatcacaggggaagattttgaaatacctggacagtctgaacacactgctctgaatacactcaattctaagaagtaccagggaaccgcatcttcttgctgaaatcttgaatttttgtcagcnnnnnnnnnnnactgtggacagtaaagctggaaagatctaaataacccaacaggaaatgcggatgaaagtgcaagagttggtttgtggtcatctggagtccatgtctccaagactgctggaccttcaaattctgcaacttgttagatcatctggatgatagcacaactgttagaagacctagaagaatacagcgttgctatgactcagtggtgttgaatgcagaccatctaccagctggggaaagaatcaattataaacaggtattttcacaacaattcagtctgttttttaatggcagttaggatagtgtat

SEQ ID NO: 316443 - DNA, 593 bp, Homo Sapiens
  misc_feature (242)..(255): n is a, c, g, or t
tttgcctttagtttgcccgacaccagcagaaaagtggaccttgggggctggttctgctcctggcccccttgttcagcccctgccggcacacgggcggctcaccctggacactgtgatgcgcatgggcaaggccagcgcccggggcttctgaaccgagcggggtgtttcatttttttgcttttccctgtcttaggctcccagtctttgactgccttcccatggcgatctataagttgaaagannnnnnnnnnnnnnaatcacctcatgatgatggagttggccctgtgccctggagggtgggcggctcatggtgccacagcccctggcagggacggccggcccgcccccgtgactgactgacagatgcagggatggccgaggcagccctcgctccagctgaacgcctccattgctgcttgttctggagacccccgcccccgcaccttccagacttagcagaagaacaaactgaagaacagacccagccagagaagcagggattccagaagctgcccattaagggagaaggagaggatccggtcggcagcagccctgagcagaaagctgggggggggactgtcgcggggtttttc

SEQ ID NO: 316444 - DNA, 919 bp, Homo Sapiens
  misc_feature (221)..(221): n is a, c, g, or t
  misc_feature (245)..(245): n is a, c, g, or t
  misc_feature (263)..(263): n is a, c, g, or t
  misc_feature (273)..(273): n is a, c, g, or t
  misc_feature (540)..(540): n is a, c, g, or t
tttttaaaagtcattgctcatttaattttggaggcacttggaggagcatggcgtcttttgtctcgcctgggtgagcacaccgaggcccagagtttgatgattccttcaaggtctcaaagcttgccttcttcacagcgcttggtgatgcacgtggttgtttctcagtatggtttgccaaagggatgctctgattcaggaggctgaggtggggcctgggaatnttcatttctaaccttttcccaggngatgctgaggccactggnccaggggcanctttggcctaaagccgctaattaacaacatgagtcactttcatctggtccaggcttttcgccccctcgatggaacacagagctccctctttccctcttggcctcatcaccagcccccagaacaggacccagcactagcagcactgaatcgtgtttgttggtgaactgatgcgtcgtgatgctgggtgagacaaggacggccgcgggagaggcggaactggccaagtctttgatgaccatgtgaagaagccccctagccgtgagggcngagaggccagagcctccctgatgctgagtccagaccaggagtccagccaggagctggtcactggtggagctagaggcttttcaagtgcatcctgggacttctgaccttccctcctgacagttctcatccccagctgcccggtgagtcacctgggagcttcgaaaagtcccgatgccctggctgctggccacacccagcccaaccacatcagagtcgctgggctgtggccagcttgtagcagctactcaggtgttctccaaggatgagaaccacagatttagtcactgcagcatggcaggggtgggggtgggagaacaggaggcttggaaaaggaaactcgaacaggctcaagaatatcagacacagccttgggagcggc

SEQ ID NO: 316445 - DNA, 536 bp, Homo Sapiens
  misc_feature (23)..(23): n is a, c, g, or t
  misc_feature (64)..(64): n is a, c, g, or t
  misc_feature (74)..(74): n is a, c, g, or t
  misc_feature (118)..(118): n is a, c, g, or t
acaccccagaaacagtggggccngtaccctacccccggtaacccaacacagttgtgtttggagnccgcctcaantccccaatactggatgcatgtaatgtaaaacatgttaatgtccncctagtgccaacaaagaaacatcatctttttcagggcctggcctcactctgtcaggccctaatcctaaaggcctagatataaggtcatgtgactgctgccttcaataaaaccaaatttatattcgataaagtgtggtcctcttatttatttactgtggtggtggggttggctaattccaacattggtaaaacagttaaacacatttaaccagtaggggcggcaggggaggattggattagcagaaacagaagttacttgtgcgatgcgcctcctgctggcactgaagtgcatttgtttgggatttgctgctgtcttgcataggttctgggattgagttaaatattgtgttagtgtcctgcaagaccttttaatttagaatcctgaaagactgcctttagagtctcttctcatttttct

SEQ ID NO: 316446 - DNA, 404 bp, Homo Sapiens
gaatttttaatgagatttgtagaagctaccagaaagtggaaagtcggcattccctctgatccactggtcagaagttacgtcaagagagctcttgctgaaggtgcccaaatttggtgcggtgagggagtggataagttgagcctccctgccaggaaccaggcaggctactttatgcttcccacggtgataacagacattaaggatgaatcctgctgcatgacggaagagatatttggtccagtgacgtgtgtcgtcccctttgatagtgaagaggaggtgattgaaagagccaacaacgttaagtatgggctggcggctaccgtgtggtccagcaatgtggggcgcgtccaccgggtggctaagaagctgcagtctggcttggtctggaccaactgctggctcat

SEQ ID NO: 316447 - DNA, 354 bp, Homo Sapiens
ggataatgattgttctgtttttctcaccctactatgtgaatatatattctgttagagatgggctgttatctgcaatgtggactcaataccatgggcttgagtttggttagttcatcattagagattttttttcagcagttggtttactttatgagaaaggatcatgagtttaattttcccactgatatatttgtgttctcattgctgagatataagtttcttaatgatttgttacctttttctattttcctagactagtattacttactggtattagcacacacacatcacatgcagaaatggtgttttcttgccacttactctttctcataagatgcttatattcctgtgggc

SEQ ID NO: 316448 - DNA, 1175 bp, Homo Sapiens
  misc_feature (717)..(788): n is a, c, g, or t
cactcaataaatgctgctgcttgacttaatgatactctaacatcagataaagtcaggctgtagtaaaggtttttgatataatggggtaaagtctctagagaaaaaagaaattgaccttggggcagggtgaagcacctctaagctgggggtatgtgacaaccaggttactttcactcgtcttttggttcccattagccagtgtcagccatctggtccttccgaaaacatgtgtgggttcagaacataacagactagaagtatagaggaaaaataagattattctgtgcaatccccattctggaggtcccatatcaacccccggagtctgtctttgcttctaaggctcagcaaaaattaggccagcataaagaagatgaagacttgggatctagacgtggtgaatgtgaatgaatattggcaatattatgtatttaggaatgtatttaattagttttgcaaggaatggtgacttgaaccaaaaaatataagcgtgaatggtagaagggaaatgggccagaaatcaaagaatactagaaagtttacagactttcaactatacaaaggttaaagcagcaaccagaaaagtaccatgcagatgataaacatctaagatgtgatttaattttcattaactaaaaactatttttaacatgcagcccactaggactcttcttcacatttctttgtaataattactactcctatttttgaaagttnnnnnnnnnnnnnnnnnnnnnnnnnnnnnnnnnnnnnnnnnnnnnnnnnnnnnnnnnnnnnnnnnnnnnnnnttactgtcatctgacagatcaagaaactaacttagaggagttgagtaacttgccaagactatcccaaagacctgggattcttcacacccagctaacctaaaacctgcattctaccaccacgttttaaccgcctcctatataccaatgaaaagtggtccataaaaccagagttggagaaacacaagctcttgcacagaaaatcagtttcatcaaattatgtgctgtagtgtggaagacaaatgcccacaggaatataagcatcttatgagaaagagtaagtggcaagaaaacaccatttctgcatgtgatgtgtgtgtgctaataccagtaagttgtgaacatttattctctacaagtggaaccaaacccatatgccatcaaaatttt

SEQ ID NO: 316449 - DNA, 470 bp, Homo Sapiens
  misc_feature (348)..(348): n is a, c, g, or t
  misc_feature (360)..(360): n is a, c, g, or t
  misc_feature (385)..(385): n is a, c, g, or t
  misc_feature (392)..(392): n is a, c, g, or t
  misc_feature (417)..(417): n is a, c, g, or t
aaattttgatggcatatgggtttggttccacttgtagagaataaatgttcacaacttactggtattagcacacacacatcacatgcagaaatggtgttttcttgccacttactctttctcataagatgcttatattcctgtgggcatttgtcttccacactacagcacataatttgatgaaactgattttctgtgcaagagcttgtgtttctccaactctgggttttatgggaccacttttcattgggtatatagggagggcggttaaaacgtgggtgggtaggaatgcaggttttagggttaggctggggtgtggaaggaatcccagggtctttggggatagtcttnggcaagttactncaactcctcttaaggttaggtttcnttgatcntgttcagatggacagttaaacctcnggagtttgtggaaaattaatggggttttatgtgtgttaaagccctttggcctt

SEQ ID NO: 316450 - DNA, 645 bp, Homo Sapiens
tcactttattttgtagaaccatttgaaatcctaggatgtgcttgttctggaagaatgacatgggcccagactgaacaagtcagcttgatgatcttaaatgatggaagtataggacgttgcttattttaaaacaagggaaggacacaaaatggaatgactgcttagtcctttctcagatactcttaaaacaattttttattgttaaatttgtggtaatacatggtcacacccgtggatcaaaccaaggtcagtctaaagtggcaggtcctaggtgtgacctgataccaccaccctttgtggcagcaccgggctggactgccctgatccctgggacgtgagacttagcttccagccagtgtgaatcattgtatttgtctcataatcacagcacagctgcagacacaacaacgtgcagcattttttacataaaaatatggtagaattaatttatgacatggaaatgccttacgtggtatcacacttagtcttgaaaaaaacaccaaggtgacgtttaaaatttttagtacatatcctcaaattggagctaagttatacttcttttataaccttttgggcatctggtcgagagaagacaagattttctctatttacagtgatgcaataaatatgtttgccacctttaaa

SEQ ID NO: 316451 - DNA, 846 bp, Homo Sapiens
  misc_feature (787)..(787): n is a, c, g, or t
ttttacatattcagcagacagcatttacttatttatttgatgtgcaattaggggggcttttatgtacacttagatgcacaattaggagctctatggggtcccctctgaggcattaggagaaggaaccagagtaaacggcctgcccccctgtccctaagcagccgcggtggcttccagtgattcctaagggtatttcggaagcaggggcattggctctggaaattgatgcattactttcactcccccggattagtaaagatttttgaatgaaatgagatgatgagacaggaagggaaaataatatttacaggaaatattccattaacttggcgtggactcccggcggcattgccccgctaaattatgcggtgcggtggacgttctgccgagtgcgccgcggatttatcgttctcttctgttcggcgtttgccttggctcgctttctccttgctgggcctctgacttgaccggcctaggtggctgcctccctcattccagcatccacattccccttggaagccacaccctgtgcacacctgggagaaacacttcacttaatgcactcagcattcttagcattttgcagctgccccttactcattcacagggtaggaccaaagggccttctcctcgtatgttatcattccttcagatcgcagcacaggctgagtggacctgaacgctttccatgctgtgggtgacagaccctgggcttgggcgtctagggaccaggctacttgggcgcggggccggcggggccgaatttggagtaagaggtggagggctnggggggtcccaaaactgtacttaaaaacctgacacctcttttaaataacatatagacag

SEQ ID NO: 316452 - DNA, 799 bp, Homo Sapiens
  misc_feature (539)..(539): n is a, c, g, or t
  misc_feature (612)..(612): n is a, c, g, or t
gctttctttgctaaagtgttttaggacctaatagtccaggaaatacatatatgtatattggacaaattcatgtctgtttaaagaatagggtagtctgagtgttgtccttcattggtgctaattgggaaaagttttttgaggaaatggacactgagtagagaaataggagtaagtaggagtgcaatttgttatttggagagtgtatgttattgtatgtttttgtggttcatgtaaataccatggttgaagatgatcagaattttttcaagcatctgaaaattatggtttaagttctaaaactattgtttatcatcaactaaaaaattatgcattctcagatttctcttattttcaagattatttatgcttgcttgtattgggccccttatgtacgtaatgggactttaaaaaatattcatgtccttttagatagggagtatagccacatggttcagaaattaaagtgatttaaaaacagtggacattgagcagccttgcttcagaacctggccttggtctcctttcctgcaaattctttntggggaatcttccaatgctttttaaaaatgcaaataaacaaatattctaggaagattgttttttccccagaanaaaaggtgatgggatttattatctggaatttgttgcatattaaaagaacattccaggactttcataaatataaggggagatatgggaacccccttcttactatgccaggtcttcacttgggtggttaaaggaaaaatatttattaacgccttaactcacctggaagataaatgcttcgggggaggct

SEQ ID NO: 316453 - DNA, 712 bp, Homo Sapiens
gccaagtctgtgttgctgtgaaatgaatgaaggagaggctcctgttcatcttgtggtaatgatgggttgtttcatgcttatcagaacccccagcgttttctgagaagtacttcagaatctcattcctcatatttcattggtatttgtggagtctatgtttaatgttgccacgtgtttttatgtcctttttgttggacttgagtactcagcccagttgttctcatagatgctttgcattttctctgtgctttggcatctgaatatgttctttaaatgtgtgtttagtttaggacagttactaggaatgagtttataacttcattagaaatcatttctatttttgttatcctgtgattattttgatggtgctagtgactagtttctttgctttttttgttggtccgtatgctaacatgtgcatggcattctggaagtacttgcttcatgtatgggtgagtgtcaaagggaatttgatttgtacttagacacacgcatgcacaccacacacatatcacaagatctgttagaaatgggatttttcttttttctggagatagtttcacttttaggtggaggggaatcctttatattacattgagttttttatttggatacgctgctcattatttcatgtttatacacttcccacgtgaggggggggtctgggctggactttgaatcttggcagggctggatgatatctaagcagctg

SEQ ID NO: 316454 - DNA, 929 bp, Homo Sapiens
  misc_feature (74)..(74): n is a, c, g, or t
aggtgaagcaaactaaaacatgtagaggttccactacaacggcaggggcatgaagagttggccacgagaccacnccgagcgccaagcctgtatctgcagatccctctctgctcaggaaccaccacgtcctgtgttctcgccaatggagaccaagacctggggttggttctgggctcctgacagttctcttgatgttaagagtgcagctctgtcaacactcagcataccaaaagctctggagcagcttatggcccacttttccctggtgccatctcttcagacacgatgtgagctcattacaaccgcatcagtaaatggagctaccatgtatattttagtgaaaatacataggcacccgtgtccccatggggtctcacagggctaggctggggacactgctcggggggcagtctgctccataggagctccaagacccctctttgacgctgcttccacgggcccgattacagggtgtgatcccaaaagccaaagtcacacactgctggccagtgcctttaagcaagcttcactgtgcttccctgacaaatctgaatcacagaattttagaaatcctgtcccaaggcaagatgctttccaaaggcccacaccaggcagcaagcagagggattcagcgctcttcccaggaccccactcaaccgcctatctgcatttcggaggcctccctaaaagcagagttgttgggggcggggcggggtttggtctgttttaagacccaccttcccacttttattacagccatcaaatatatacttgtgagacctgttcttctggtgaggtctaagaaattaagggctcgtggagttgtcacagatgagaggaggatgctctgtggggatctttccccaaagagggccaggtttatgggactgggctcagtggctctggtgcatgccccctgcaggggcggg

SEQ ID NO: 316455 - DNA, 629 bp, Homo Sapiens
  misc_feature (260)..(295): n is a, c, g, or t
  misc_feature (488)..(533): n is a, c, g, or t
ttttcagagtttgaaaggctctttaatagcaagcgaatggtaattacatggtcggatgaggtcctcactctcaggggagggaggagggagcagaggtggacagggtgcagtataggatttacactgtttgaagcatctaacgaagggcaacagtttttggcaacccaattcacagttttgtaatttacaagagatttctttgaaaggaaataggaaggcaaagaaagcacacataccctaccggcaacacttcttgcctnnnnnnnnnnnnnnnnnnnnnnnnnnnnnnnnnnnnccaacaactattccttgcttttgcttcttgtgtagatgactaaattttgctctcatgctcaaattaagactggatcacggatagtgaagatctgccctagcattgaagatttacttcctcctcttcagagctgacatttgtactgcgcactactcttatctttatctgcctaggtgtcagaaggggcttagtnnnnnnnnnnnnnnnnnnnnnnnnnnnnnnnnnnnnnnnnnnnnnnggcagtttacaaagaacagactgtcagctttctgtctggtatcaaacaacttgaatacagctctaagtaaattaaaacacctattcctatgtggcc

SEQ ID NO: 316456 - DNA, 488 bp, Homo Sapiens
  misc_feature (189)..(234): n is a, c, g, or t
caaaatatagtacccatgagcatttcatgttagaaaccccatttaaagcactataaggctgaataggcacaagcgattaaaagtagatgccaggccacataaaaataaatgttttaatttacttagagctgtattcaagttgtttgataccagacagaaagctgacagtctgttctttgtaaactgccnnnnnnnnnnnnnnnnnnnnnnnnnnnnnnnnnnnnnnnnnnnnnnactaagccccttctgacacctaggcagataaagataagagtagtgcgcagtacaaatgtcagctctgaagaggaggaagtaaatcttcaatgctagggcagatcttcactatccgtgatccagtcttaatttgagcatgagagcaaaatttagtcatctacacaagaagcttttaggcaagaagtgttgccggtagggtatgtgtgctttctttgccttcctatttcctttcaaagaaatctcttgtaaattaa

SEQ ID NO: 316457 - DNA, 527 bp, Homo Sapiens
  misc_feature (347)..(347): n is a, c, g, or t
ctcccttgcggcctggagctccttttatggccagcgcaattcagagcatgatcccccctactggcggggtgctgtgtggctcaatgtcaactacctggctttgggagcactccaccactatgggcatctggagggtcctcaccaggctcgggctgccaaactccacggtgagcgtccgtgccaacgtggtaggcaatgtatggcgccagtaccaggctacaggctttctttgggagcagtacagtgaccgcgatgggcgaggcatgggctgccgccctttccacggctggaccagccttgtcttactggccatggctgaagactactgaagggagggagagggaggngagccaagacacttatgccactctggctctgaagggacaaaggcttctggcttttgcccccagccccttggatacccagaattcaaaccctcctcatttcatctcaggggtctccttgctgtcatcccacatagccctggggtgaatgtaatccagagtctatttttctaaataaattgg

SEQ ID NO: 316458 - DNA, 778 bp, Homo Sapiens
cgtgcactggacgaggtcatgtgagatacgctcagcttgtccccgggtgggcttggtccccgagctgttgcgttgtctaaccttctcctgtgctgcttgcgacacagtggtcccagtctggtgtctgcggggcccatccccttagtctgtgggaccccattgcagtgctgatagggcccctgggtctgccggttttgctgtggcagtggttcccagagagtcagagctggcacccctcagtgcccccttttggagagatgagtctgtatcacctgcagatgtggggcatggggtgcctcactgtgagcgggatgactgttcactgccactgtcctgtggctcggggaaggagagtcgatgctgttcccgctgcacggcccaccggcggccagccccagagaccagaactgatccagagctggagaaagaagccgaaggctcttagggagcagccagagggccaagtgaccaagaggatggggccatgagctggggaaggggtggcatcgaggaccttcttgcattctcctgtgggaagcccagtgcctttgctcctctgtcctgcctctactcccacccccactacctctgggaaccacagctccacaagggggagaggcagctgggccagaccgaggtcacagccactccaagtcctgccctgccaccctcggcctctgtcctggaagccccaccccgtttcctcctgtacataatgtcactggcttgttgggatttttaatttatcttcactcagcaccaagggcccccgacactc

SEQ ID NO: 316459 - DNA, 559 bp, Homo Sapiens
  misc_feature (446)..(459): n is a, c, g, or t
gctttttctctttacaggggagaatttcatattttacctgagcaaattgattagaaaatggaaccactagaggaatataatgtgttaggaaattacagtcatttctaagggcccagcccttgacaaaattgtgaagttaaattctccactctgtccatcagatactatggttctccactatggcaactaactcactcaattttccctccttagcagcattccatcttcccgatcttctttgcttctccaaccaaaacatcaatgtttattagttctgtatacagtacaggatctttggtctactctatcacaaggccagtaccacactcatgaagaaagaacacaggagtagctgagaggctaaaactcatcaaaaacactactccttttcctctaccctattcctcaatcttttaccttttccaaatcccaatccccaaatcagnnnnnnnnnnnnnnactccctctctcccttttaccctccatggtcgttaaaggagagatggggagcatcattctgttatacttctgtacacagttatacatgtctatcaaaccc

SEQ ID NO: 316460 - DNA, 964 bp, Homo Sapiens
  misc_feature (543)..(543): n is a, c, g, or t
  misc_feature (545)..(545): n is a, c, g, or t
  misc_feature (547)..(596): n is a, c, g, or t
  misc_feature (603)..(603): n is a, c, g, or t
  misc_feature (608)..(609): n is a, c, g, or t
  misc_feature (611)..(611): n is a, c, g, or t
  misc_feature (613)..(613): n is a, c, g, or t
  misc_feature (628)..(628): n is a, c, g, or t
  misc_feature (640)..(640): n is a, c, g, or t
  misc_feature (669)..(671): n is a, c, g, or t
  misc_feature (678)..(678): n is a, c, g, or t
  misc_feature (685)..(685): n is a, c, g, or t
  misc_feature (690)..(691): n is a, c, g, or t
  misc_feature (694)..(694): n is a, c, g, or t
  misc_feature (707)..(707): n is a, c, g, or t
  misc_feature (721)..(721): n is a, c, g, or t
  misc_feature (731)..(731): n is a, c, g, or t
  misc_feature (740)..(740): n is a, c, g, or t
  misc_feature (745)..(745): n is a, c, g, or t
  misc_feature (751)..(752): n is a, c, g, or t
  misc_feature (769)..(769): n is a, c, g, or t
  misc_feature (772)..(773): n is a, c, g, or t
  misc_feature (822)..(822): n is a, c, g, or t
  misc_feature (830)..(830): n is a, c, g, or t
  misc_feature (832)..(832): n is a, c, g, or t
  misc_feature (846)..(846): n is a, c, g, or t
  misc_feature (854)..(854): n is a, c, g, or t
  misc_feature (864)..(865): n is a, c, g, or t
  misc_feature (880)..(880): n is a, c, g, or t
  misc_feature (887)..(887): n is a, c, g, or t
  misc_feature (899)..(901): n is a, c, g, or t
  misc_feature (903)..(903): n is a, c, g, or t
  misc_feature (909)..(910): n is a, c, g, or t
  misc_feature (912)..(912): n is a, c, g, or t
  misc_feature (925)..(925): n is a, c, g, or t
  misc_feature (927)..(927): n is a, c, g, or t
  misc_feature (934)..(934): n is a, c, g, or t
  misc_feature (936)..(936): n is a, c, g, or t
  misc_feature (938)..(939): n is a, c, g, or t
cagacaccagttattaattacaaagggaaactacgtcagttggtcagcaactctctagaagattcaagatagaaggattaactataatcaaaatgttccatggtgaacacgaaaccagaaaaggacaacttagttggctgattggaatgacttatgcctttgagcctgctgcacccttctccacttcggggtatgctagttaaaggagacatgatacttatgtcctctggtctaggcaacttcaacttcttgcttggctctgaacactgctgaagacacactgttgaattcttcctcaaagtctctactagctgtagattgcaaacgaacggttctcttctttctgttagcattattattattatttttagaaagagtacaatatgtctgggtcaatgtcagcttttttagttacaatgatatgccaatcttgccttcgtgaaatcatgcctagtcagacctccataaccatacaagctcttagaatggcttattgcttccattatatgtgtgtatgcgtgtgtgtttacacacacataaacnancnnnnnnnnnnnnnnnnnnnnnnnnnnnnnnnnnnnnnnnnnnnnnnnnnnaaaatancttanntntntgagagagacttttnccccaaactttncaggcaccttacttcatccctatgttctnnnaagcaantttccantaagnnagngagtttgggtttnatagacatgtatanctgtgttcanaagtataanatgangatgcnncccatctctcctttaangannatggagggtaaaagggagatagggagtaagaaagagaaaaactgatttnggggattngnattttgaaatggtnaaagattntgtaataggnnagagtaaaggagtantgttttnaagaattttagnnncncagctnncncggtgatccttcnanatgagtntngnnctgggcttgtgattttttggaccaa

SEQ ID NO: 316461 - DNA, 725 bp, Homo Sapiens
aagaaaaaaacgccggtcagcctgcatgttttatttattggtacccgaggacatgggggctgcttttccagagtcgccacctccaaccccctagccttttggacattggagaagactctaaagtagatacctaagattggaaaaagttcgaattggaaagcactgagaccaggggtcaaccctccagggctggccagacacggaacaaatgttcaatgaccctcaggttccttcctttcccttccaggactgagggtcctgcatctccggtacccatgattggagggtccagtactggccccgcaggctggcctgagccttcaggaagccctcgctgaactccatctcagcctggctgctctctgactcccagtagagcacctgctgcccatggaacgctgtggtcctcaagctgtgggtgtcccggatcaagatgtagctggcattggctccctcggtcccagcgcccatgttggtggccagggcatggatggcaatccgtgcgtgcggagccacattaatgaagagccggcagccccctgcattactcgtggctggactcagcgaggggctcacgatttcaccccagggcccaaagagctgcatgtcacattctctgtagaaggtttcaggagcaagctggctcccataccgcagcagcaccccacctcctggccgcccgcagcgctgcctcaccaccagcgtgttggtcttggagctgaaag

SEQ ID NO: 316462 - DNA, 761 bp, Homo Sapiens
ttttactttctatagtagtttattcttcataaataaatcactattataactgactacttactgagaaatgaaaatattttaacttaaaaaaatacagagcccttgttgattaacagaatttgtcttaaataggattttatctatagtatcatatatataaaatccttatacaagtaaccattgaaacaagtcagtaacaaaatattcacataactgtatcacagatcttaggaaacagacattcagaaaagatttaaggccactaagtaacagcctctcataaaacccaacaaatcttaaaattgcaattagacttaaaagggacctaaataccacttcatgctgaaccaagattagaaaaatcttccactcttgacattttcatgttcttagtttttcaatcaagtgatcagctgtgataaaccaataggaattgactctataaaccaacttggataagaagccaagctgatccactggtgccagaacatgaaggtgcaagtgggaaatggaacagaatggtggcatatgaaaacccatcctcacattcgtgaagtcagtgaaattatttctttcaagaatggtttttccaacagttaccatgttctcaaccagttctacttgatctttccttagagttctgcagtttccaatatgcttctttggcaccacaagataatgatgagttgctgctggtttgatatctttgaagcaaattaggtcctcattctcgcagtgcaggagttcggtgcccgggtcct

SEQ ID NO: 316463 - DNA, 822 bp, Homo Sapiens
acaggtctgaatgtttgtagattttctaagtgttgaaagttaaagcaagatcctttgagatctacgatcacacattttggtagaaattgcagatttacagagatgactactgagcagtaggtagtaaatggagccaagaagtacactcttgcccatccatcttccatgggaatcagaatattggcttcaatcactgactcatctttatataatcttcaccaggaattgctattagcatctgtcttcccagccttggtatgcctgcttgagttctgctgagatttgttctgctcttctccagtgagtagggcctttatttcagaagggatttttccttggtccattgccatgcaccactgcttgtacatttccagttcctctctgagggcacatatagctctttctcgactggataccaactcttccaaatactgatatctcagcttttttcgggctcggcattctcttgcactctgccggctcctctcaagttttgctttcaagtcaattttggctggcttccgaccacgtttaccgggcttctttactttgcctccaaccaccttactgtcatccatcgcggcagacaggccggcctggccaggcactccctcccggagccctcccccggctcagccggcgtggcccggcccccgccccgaggaagaaggggatatggttctggctgcctcctcctctcgcctaacagttcgcttccctgatgccagagtcacggggacgagggcacagttcaggaatggcagagcggaccctggaggcggccccaaacgcctcctttcgccgccggcgcctcctcctccc

SEQ ID NO: 316464 - DNA, 417 bp, Homo Sapiens
  misc_feature (31)..(31): n is a, c, g, or t
  misc_feature (46)..(108): n is a, c, g, or t
tggggccgagaggttggagttggggcgatgnggctgagagaggtcnnnnnnnnnnnnnnnnnnnnnnnnnnnnnnnnnnnnnnnnnnnnnnnnnnnnnnnnnnnnnnncgggctggccgagaagcagtgtttcagggaggcctgctgggtttcggaattatgctctctctgggaagaaaactttagcactttttttccacaagtggaaaacggaaatatgaaaagtcacagggggcgtgaggacagacggcgtgtcctttcctacacatatggagacgcaggccggagcaacggcacacggaccacgcacacgcggcggacgcaccaacgcctacgcagaagagaacaaaagtcgcttctaactgggcacaaaccctctgcacccaaatatcccgactaatgccgaattcctgcagc

SEQ ID NO: 316465 - DNA, 472 bp, Homo Sapiens
  misc_feature (251)..(309): n is a, c, g, or t
atctttcctcccgtcttctctgatcagcctcacgcctctgggggaggggcacagctgggttcagatctccagctataaaatcgcagttttctttctccctttttaatcaggagggggagaacccccccgttttctttgtccatttctgagtagctcttttgccaacacacaaaaccccccaaaattctttgctgaaaatataagccaccaattcgattttttcattgaagagaaagtgtgtgatagtcatnnnnnnnnnnnnnnnnnnnnnnnnnnnnnnnnnnnnnnnnnnnnnnnnnnnnnnnnnnntgggcagagccgccgcgcctgcggcatctgctctgctgtctaaagctcagtcgaggcttctgaggatgcttgaagagacgttgtcaggaggtctccgcgcggaatcattaggtagctgaggcaggtgcactgaatgcggttttgttggttctctgtcttcttt

SEQ ID NO: 316466 - DNA, 1642 bp, Homo Sapiens
  misc_feature (38)..(38): n is a, c, g, or t
  misc_feature (339)..(406): n is a, c, g, or t
  misc_feature (694)..(702): n is a, c, g, or t
  misc_feature (1431)..(1431): n is a, c, g, or t
  misc_feature (1440)..(1467): n is a, c, g, or t
ggacaccgtgtcccgctgaccccactggcccctggctnccggacacagcaccgtgccaaccccacccagctccaggcccaccggatgctgtgcctggcctccgatgcctggcctgccagacactgcgccccgcctgacctgggggagccgaccaattagtcactgctgctactgcccctctccgaaagaagacacagaaccaacaaaaccgcattcagtgcacctgcctcagctacctaatgattccgcgcggagacctcctgacaacgtctcttcaagcatcctgcagaagccttcgactgagctttagacagcagagcagatgccgcacgcggcggnnnnnnnnnnnnnnnnnnnnnnnnnnnnnnnnnnnnnnnnnnnnnnnnnnnnnnnnnnnnnnnnnnnnatgactatcacacactttctcttcaatgaaaaaatcgaattggtggcttatattttcagcaaagaattttggggggttttgtgtgttggcaaaagagctactcagaaatggacaaagaaaacgggggggttctccccctcctgattaaaaagggagaaagaaaactgtgattttatagctggagatctgaacccagctgtgcccctcccccaggggcgtgaggctgatcagcgaagacgggaggaaagatttcgatttctgactcaagatgcatttttggtttcagannnnnnnnncctgtaatgttaaactctttggctttaagtaaaaatccaaaaagtttttttaaaaaagcaaaggaagcatacttgtgaactaccttgctagctagccagccaaggataccggacacacctctgctccaaaggaaatccaaaaaagcaaacacaagaaatcaaaatccaaaatttgtttgtcactgccaaagtatttttttcactgtttcacttgctcttgggtttgtttggatgtgggtctttttctcttctgttctgattttgtttgtgggtgtcgggatatttgggtgcagagggtttgtgcccagttagaagcgacttttgttctcttctgcgtaggcgttggtgcgtccgccgcgtgtgcgtggtccgtgtgccgttgctccggcctgcgtctccatatgtgtaggaaaggacacgccgtctgtcctcacgccccctgtgacttttcatatttccgttttccacttgtggaaaaaaagtgctaaagttttcttcccagagagagcataattccgaaacaaaactttgacaatcttttgggttgattctcgactgcttttcgagcatgcggagccagcaggcctccctgaaaaactgcttctcggccagcccgtcctcctctacctctctcctctccgcgccctccgacctctctcagccccatcgccccaactccaacctctcggccccatcgccccaccgcagctactcccctttcttccaaanttttgcagnnnnnnnnnnnnnnnnnnnnnnnnnnnngcagccctctgcctcctccccagggaagaccctgaccgtgtacatagccctggtgctcctgcccagccacccctcagatgcgttcgcctctggccctggggtgtgtctcggtgacgttttctatcagacgtgctccctcccatcctccagccctgcccaccctccctccactcct

SEQ ID NO: 316467 - DNA, 664 bp, Homo Sapiens
  misc_feature (232)..(246): n is a, c, g, or t
  misc_feature (586)..(586): n is a, c, g, or t
  misc_feature (615)..(615): n is a, c, g, or t
  misc_feature (626)..(626): n is a, c, g, or t
ctttatccctttatttccttcttgaaatcgctgaggcagttcgcagaggagtggacggatggtgggcagggctggaggatgggagggagcacgtctgatagaaaacgtcaccgagacacaccccagggccagagcgaacgcatctgaggggtggctgggcaggagcaccagggctatgtacacggtcagggtcttccctggggaggaggcagagggctgttttgtctgtagnnnnnnnnnnnnnnnctgcaaaagtttggaagaaaggggagtagctgcggtggggcgatggggccgagaggttggagttggggcgatggggctgagagaggtcggagctggggtgagggggccgagagaggtcggagggcgcggagaggagagaggtagaggaggacgggctggccgagaagcagtgtttcagggaggcctgctggctccgcatgctcgaaaagcagtcgagaatcaacccaaaagattgtcacaagttttgtttcggaattatgctctctctgggaagaaaactttagcactttttttccacaagtggaaaaccggaaatattgaaaagtcacagggggcgttnaggacagacggcgtgtcctttcctacacntatgggagacncaagccggagcaacggcacacggaccacgcacacgcgg

SEQ ID NO: 316468 - DNA, 770 bp, Homo Sapiens
  misc_feature (45)..(69): n is a, c, g, or t
ttttacaaagttgagtaatactttatttgaaaaaatgaaaagtgnnnnnnnnnnnnnnnnnnnnnnnnnttacataggcacaggataatctggaagtatgaccagcaaatgataactgattccctcaggggagaagaaactgggtggctgaaggacaggaatgagaaagaaggacagttgcgtttgtttgtatcgtttgaaattgtccagtgtgtatgtgttcttttcaaatgtttgaagaaccattggctcccttatcaaaatgtaaataccaaggaaaatcaggaatttaagaagtctaagaattctgtaatgctgggtagaattttctgtacgtgtaaaactaaaatgtcttttgtaaatcactgagtcttcctgtttatttctggttagagatctttgggggcttggatggaggaacaggaaaagaggagccaggcttttttggaaaattggcggcagcggtggcatacgggaaactgaaatctttatctaatctcatcctttgtatattcgtcttggatttgctgaagaaaattaaaaggtaaattttgctgtgagctcactgaactcaaattgaaagggaacatatgctgtttatttttgtgaaggacattaattgggtgtgactggcagggttgagacctgaagttccttttttagataaggaaaatttcccttggtgagaaatctttagactagttatgatagattcctaacccccaaccttgaaaggtaacttaaggctccctcctttaagggaagggctg

SEQ ID NO: 316469 - DNA, 903 bp, Homo Sapiens
ccatggaaacattttattaatccactcatcagttgatggacatttgggatgtttgggcttactttacaggtgtaatcatgtaagcatattctttgcctgctccttcccaccgattaaggaatatcagtagcaagatgaagggcaagcccctaaaacagccagcaactggcacacagacaaggaaaagcacctctggtttttaggttaagccaatgaagagtggggccgagatttagtatccacctagttcaaaacccctaacactttccaagcttgtgttctgagttgagtcgatccactaaaccatcaagcgcacccatgggaaagtccttggatcagcaggaagagctacaaattacagatcactggtttttaatctgtcctccagagactcctaagatttcatggaagcaactcatgggccaccaagggggctgtggttgggggttagataggtagaactctgagcctggtccccatctctgatttaaatagaacagccttgattgaattgctttatttgtggggtttcttctaagagttaatttggaacaaagaaagggtgttcttggctttaaaacagcttggcaagcattggtcaaggtggttgtggaattgctggactgtgactgggcctccctgacagctgctcttacgagttcttctgaggaaccttgatggtgaccgtctttacctctgtgtaggccttaagcccatcctcacccagctccctcccgtttccagattccttaaaccctccaaatggcgtgtggcaggtgacgatgttgtaggtgtttacccacacggtcccggcctggagtgcctgggtgaagtacatggccttgtccagatcccgggtgaacacagccgcagccaggccatacctggtgttgttggccctct

SEQ ID NO: 316470 - DNA, 912 bp, Homo Sapiens
  misc_feature (138)..(194): n is a, c, g, or t
  misc_feature (219)..(219): n is a, c, g, or t
  misc_feature (239)..(239): n is a, c, g, or t
ggggacaaaccgggccccccggcgccaagagcgcagcgacggaaggggcgcccccccgccggggacccacgagggacccgcgccgccccccagaaaggccgggggcgccaacgaggcgcccccaggggcccccggaannnnnnnnnnnnnnnnnnnnnnnnnnnnnnnnnnnnnnnnnnnnnnnnnnnnnnnnnaatccttcccaaccaaaccgccaanaagcccccaacaaaaaaagngcaaaccccaaaaaggcaacctaaccaaagcaaaatttaagcaaaatcagacaacgaagcagcgatgcatagctttcctttgagagaacgcataccttgagacgctacgtgccaacctaagttctcaacgacagcttcacagtaggattattgtgataaaaatgactcaagcgatgcaaaaagtttcatctgttcccagaatccgagggagaactgaggtgatcgttagagcatagcgacatcacgtgcggtttcttaatgtccctggtggcggatacgccgagtcctcggaaggacatctggacaccactttcagccacctccttgcaggggcgacatccgccaaagtcatcctttattccgagtaataactttaattcctttctaacatttacacggcaaacaggaatgcagtaaacgtccacgtccgtcccacggctgggctgccgttccgtttcctccacgaacgggtacgcgcttccatgagaaaggatatttggcaattttatattccacagtcaggtgggtctgcgatagctcatttaatgttaaacgccatcaggggcctctcctcccgtttctgccaggggcttttcttgtcttctccctcgtgccgaattcgccacccaggccggtgttggtgcgcagatatacgagaagataggtggggggg

SEQ ID NO: 316471 - DNA, 745 bp, Homo Sapiens
  misc_feature (539)..(659): n is a, c, g, or t
cttttatttatttattaaacatttgtggagctcctgttatctaccaggtattgtcctggatactagaaagagagaaagcgctaggcctgcccttctagtctaacagagggaggcacatatgcacagagataaatgctgtagaatgtctcgtggtttacagagggctatcagaggaggaggtcagttatactttatcagaaatagatttagggagcgattaaggatatagagggcggtcgaaatgcgtaaagtggttaaagtcacctagtgaatgtgtggtatataaggagtgaggagaatatagtgggggcggaacctcagggaacacatttaagggatgagtacaggaagatgcacccccccttcccaaagaatacttagaaagaacagcctctgaggtaagaggaaatctcagaaaaggtcaatgttttttgaagccaagagaagagaacttcttcaagaaaaaaagagttagtagctgtctaaagttccaataaaatcattgagagaagaattgaaggccaggtgcagtggcttannnnnnnnnnnnnnnnnnnnnnnnnnnnnnnnnnnnnnnnnnnnnnnnnnnnnnnnnnnnnnnnnnnnnnnnnnnnnnnnnnnnnnnnnnnnnnnnnnnnnnnnnnnnnnnnnnnnnnnnncatggtggcgcacacctgtaatcccagccctagtagcaattaaggaaatagcaaaacaggatttctgctcctcttgagtgggtctc

SEQ ID NO: 316472 - DNA, 396 bp, Homo Sapiens
cagatgcctcctgggtttggaagggggatgcactgtggatctgccatccattctgcagtctccagcagagcaggcagtcaggccccagcgtgcctccatcccagtgccccgatgaccatctggtcagccctcccaacctcccttccagggggcttaccagcaaagccatattcggctaggaatttggaattcacaacctttattaacccctggcaaaacttcccgtttgcatgtcaaatcacattgacgcctgaaaattagcttttcttactggtttttccaataagtgatagcaaagcccacttatcatacttaaactacagtaaagtcccgaggtctccttggtgggtggcaggatttaaattcaatcaaatcctgtcctagtgtgtgcagtgt

SEQ ID NO: 316473 - DNA, 763 bp, Homo Sapiens
  misc_feature (20)..(20): n is a, c, g, or t
ggtgatagaagaatgggaantatgttccactaaaatacacaggcttttatttgttttcttcagattgctttttcgtgaatataaagatgaggagtccattctgcaacctaaaaatatttacttattaaaactatattaatactttaataaactatacaaaaaggtaatgagacaaacatctgcatttatggaactgcatgtcagtcaggccagttccctgcagagggaattcccagcatgacctcattcatctgtgaggacacagagcagtccttgtttagacatacacattcatctactgctcatcatggtcagccttccacttcttgatggtttccttctgctatgaatgcgcatgtccggttgtctgcttcttagagcagacatttaccttcctcatccaccagccattggagggggactagggccacgcagatgattgattctacccattcttcggggagggtttcctggtggccctcttccatcatcatatctggaatcagatgagtttccatagcttcttctttttttcacatcttgctgaagcagagttttgaaaaacaaaaccacaaactcagctattccccagaagaaatctgttatcaaagataatctccatggagactgactccggctgtccaacacttgtccgttcgagatgtaaaccatcttgtcccacttccccgcttcggagccaccgggcgcctggcccctgtcggtttctgtatctccctctgctccccgcccttcgagcgtcccc

SEQ ID NO: 316474 - DNA, 1041 bp, Homo Sapiens
  misc_feature (882)..(882): n is a, c, g, or t
tcggcggcggacttcgcaagtgtgaatacaccccagatatttacagattccctgtaggcactttgtaaaccccctcccaaaggacgggaggctctctttcgaaaccctttgcaaagttctcccacccaacaaacaaccccgctccaagactcccctcaacgtgttaaggagtcacaccatttcccactctccaaagttgatagctggacggtgttagaaaataaaagtcccgctcatggttgctcttgtatgcagacgagacttgtcaagagctgagctcctcatctttatacagcaatactcattctagagaagcccgacgcctcagctgtggaaataggtagtctgggagtcatcctgtcacgcctgtagcatcacccacaccatgagtagcatccagtcccgcgtgcagcaagtcccactggtgtgcagacgtgtgcgctctcagcatgtgagtccgattcaggtaatagttgtcccccttcttcctgctggggtgatcagctgggatgagcaggctgtcaaagttctgccaggtcgtgaccactggagaaaggttgtcgtagaccgagaacaacggggtcccaaagcggcccacatactgcttgtagaagtgctccttcaccctctccttgatcagccacagagggtgatgctgctggttgtgcaggttcctgccaactctggtgaggacctcccgggtgaggttgctgtggtcgtcctgagggtaggatttgcccagcagctccaccacactgcctggagctctttgggtggcacactctgctgcaggaggcctcgatccccaggcctggtgctgatggcctctggagatgtgactggccttactcaccaggtagacatatgcatgggcacctttcntgagagctgagcccaccattgtagaaacttctcacaggttccaccgctcgcccgggaagcccagacccaggtgtttcaaaatcagaagcacggcaggctcgttcgctctcacgggcaagaatcttaaaccccaacttcagagatacccgcgcacgctgg

SEQ ID NO: 316475 - DNA, 364 bp, Homo Sapiens
ctgacgaggagatctccccacagctaggtgtagtgagccagacgaggcagcttactgaacctgggggttctctccattgtcaccgcattctccttcaccaggtgtggctgtctgggagccagggggtgactcgctctggagagaggggccagcctcacttagtggaggttcttttaccatggacccaggctgcctggtttgtatccaacctctgccccttctgacctggaagaggcgcttgaccttcctcccacatcccttccagtggggtgagtacaggtgttcctcagtttacaatgggttacattccggtgagtacatcataggttgaaagtattgcaagttgaaatgtgtttaatacacc

SEQ ID NO: 316476 - DNA, 942 bp, Homo Sapiens
  misc_feature (100)..(114): n is a, c, g, or t
  misc_feature (125)..(152): n is a, c, g, or t
  misc_feature (157)..(244): n is a, c, g, or t
gccccggggttttctttggggaacaacaatttttgccccttttcttcttctcctttgggggcccgcgcgcccacaagaagaggttttaaaaaattttttnnnnnnnnnnnnnnncgccacacagnnnnnnnnnnnnnnnnnnnnnnnnnnnnaaaannnnnnnnnnnnnnnnnnnnnnnnnnnnnnnnnnnnnnnnnnnnnnnnnnnnnnnnnnnnnnnnnnnnnnnnnnnnnnnnnnnnnnnngagacagaataaagttttatttttatattaagctactttgcctcagtggttgcacagtaaggggtagagggtagatgaggacaagaacaccctgagaaagtattttacagcacaagctttatgaggaataggagaacacatttttttcacattatactaagtccagcagagcccaggctctggggctgttgctcttaatcctcagtggaggcttcaggctttaccacttagaacgttctccagggctctggttacctgatcagcactgaagttgttcaaagggacattcgtctcttggccaaatgcgtagcgggcccagagcttgggctgcacatcggagcattcgcggattaggatgggtaggtcgggattcgccttcttcagctccacgtagcgtttctcaatgaagtccctgacgccctggctgccgggcgagcgctgacataagtggatgcgaatctcacgcaggcccagctttgccccgactcctcgacttgctgcggccgccgccatccttgttaatatcgaagtcgccaattccaggtcttcaggccaagtgccccggtctgaccaaccgcggaccctaaagcctagcccataggctgcatgaggcaggggcggggtaaagcttggccaatgatataaaagcattgtaggaccgctgcgaggtcaatttctttgcgctcggggttggtcgg

SEQ ID NO: 316477 - DNA, 362 bp, Homo Sapiens
gcgtcccgcactcaccgtagcgggcccagagcttgggctgcacatcggagcattcgcggattaggatgggtaggtcgggattcgccttcttcagctccacgtagcgtttctcaatgaagtccctgcggggccggagagagcgccgcgcgtgctgtgggcgggggcttccctcaacttcagggaggtcgaggtcgtgacactggcgtcccgaagcccgcccgcctcaccacgccgcgcctcacctgacgcactggctgccgggcgagcgctgacataagtggatgcgaatctcacgcaggcccagctttgccccgactcctcgacttgctgcggccgccgccatccttgttaatatcgaagtc

SEQ ID NO: 316478 - DNA, 1521 bp, Homo Sapiens
  misc_feature (961)..(961): n is a, c, g, or t
  misc_feature (1016)..(1016): n is a, c, g, or t
acaagggggtttttaatagatttatgtttgggggtagtccacaaagaaacaattttattagcccaagaagtgaagacccagtccctctgcttgccccagccccaccccaaagcccctcaaaaggataggtgtgggtaagggagaagcttgggatggaatgtcccctatccctcagaagactggagggaagacgacggtctgtgcaaataggtcaccagaggtgtatgtgtggggggttattagaccaggataacaggggaagagggaggggacagtgggggatctgttgaaggcccaggaaaaacaaggggagctggggctaaggaaccaaaggaggtgggaagagtggggctagaacccaaaagtggggtcctttctgaggcagggtggtcccttggctccccttcatcaccctcctcttgcccttgagtttcttcctcttggtcttcgtccccaggaccccgatgaacaggctgcttgcaaatggggcaggtcttccgggtctgagtgagccaggggtccacgcagcggctgtggtaggcatgagcacaggggagtacccgcagcttgtccccatcctcatattcatccaggcaaatggcacagacatcatactggtctcccttctgatagtcatgtgtaggaatctgtttcagttgctctttggtaagtcgattccgctggagccgtttccggtgctggatacaacgagctatcattactgctcccatggccaaaaccagcagtcccacaatccctgtgaaagggatgaggtaatagcccaaggggaaggtatttgtctggaaccagaagcacccgagcccccttctcgtagacaaagagcggcacgcaggtactcggagcttctctccccaataaatacagacgggatccagatctgctgctggatttcctcactattccacaccatgttcagaagttcattggaattcacattgtntactacagcggcaccatatccagccttctgggcatttaggaccttgaggtcaaanttgcagtcgaatcttcgaagcagcgcaataaagactgacccattgaccggggctgggggtggtggggcaatggggctgcaggcattgtctgggtgagcctccacaaggaacccctggaggccctcctggctcaaggtagccccaaacagagctggaaggtctgcaaagtccatgctggcattgtggtccgaggtcgctcgaatgagcccccgggtcggggccgctccccacagcacagcggccacaaccacaggaagcgggaaggccgtttagtggagctgggtgggaggcactaaatgtatccttttctggtacggggataaaacgcggaaaggggacggagcctaacacaggtgacagaaaaacttcgggaagggtggcggagctcaaggaggtgggacttcctgctaggtgggccgtgttcccagcctctggaaaagggcttccggtagagaaaatcaggccgctttcagcattggatgcttgagatgaaggacttccggtc

SEQ ID NO: 316479 - DNA, 1019 bp, Homo Sapiens
  misc_feature (38)..(38): n is a, c, g, or t
acctgaagtccttcatctcaagcatccaatgctgaaanggtcctgattttctctaccggaagcccttttccagaggctgggaacacggcccacctagcaggaagtcccacctccttgagctccgccacccttcccgaagtttttctgtcacctgtgttaggctccgtcccctttccgcgttttatccccgtaccagaaaaggatacatttagtgcctcccacccagctccactaaacgggttggatatctcattctttgagttggtgttccttccccggcgcccccatgtagctgggaagtgggacctgggggtggttggacccctgggatcctaaaggaggggcagggagggcgcagaactccgcttctgctccttgctaccaggacgcgcggcctcctcagcctctttcctcccgctgccatgcaccctgcagccttcccgcttcctgtggttgtggccgctgtgctgtggggagcggccccgacccgggggctcattcgagcgacctcggaccacaatgccagcatggactttgcagaccttccagctctgtttggggctaccttgagccaggagggcctccaggggttccttgtggaggctcacccagacaatgcctgcagccccattgccccacacccccagccccggtcaatgggtcagtctttattgcgctgcttcgaagattcgactgcaactttgacctcaaggttctaaatggccagaaggctggatatggtgccgctgtagtacccaatgtgaattccaatgaacttctgaacatggtgtggaatcgtgaggaaatccagcagcagatctggatcccgtctgtatttattggggagagaagctccgagtacctgcgtgccctctttgtctacgagaagggggctcgggtgcttctggtttcagacaataccttccccttgggctattacctcatcccttttacaggggattgggggaactgcttggttttggccctggggagcagtaatggatagcttcttgtatccc

SEQ ID NO: 316480 - DNA, 586 bp, Homo Sapiens
  misc_feature (123)..(123): n is a, c, g, or t
ggtaaattccattgttattcactaccaacagtatgattggcaagttgtacctgcagatggtttctacctccatgccagaaaacccaaatgcactgtctccttccacacagatgatccattgcncagggcttctatctttagccaccacggcagctgcaatagcaaatcccaaaccaactcccattgttccgaaagtaccagcatcaagcctgttggagaacaaagttaaaatgaaaccctctggggcatgtcatagaggatgggattggcacaaaccttctagtcatatttacatggttgatggaaaaatgaagaaccataaaaacattctctttcttcaatataaaatctttagactgctaggaactaatttgtcaaggatagaaaaaagccacccatgtttgcttggaagactataaacatattcctagaatactaagtaaacaattatcatgataccaagaacacatcaagcataaaaactctacaaaacctcacctaaggatacttttatgaaatatgtccttacatactaaacatgtattaattctcaaacgtcttcttaatctgcactattacagtttca

SEQ ID NO: 316481 - DNA, 2005 bp, Homo Sapiens
gacattttaaatgtttattttattttgcacaattttaacagtagagtaattttgctgtggaaaataaaatttcatcttgcaagaaagagaaaactcaagaccaccaactggcgtctttatttacatattagagcgggtcagccaatgaaaatcctgggccttccgtgtggcttgtggctcaatcatgatgttgataagagaaggtttagttgtgtctgctaggctctgcctcagggatttttggagttcttctggtgtttgtacaaaataccctttgcctccaaatgcagtcatgacttgctcataatgtgaatttggcagcaaacacattggagggaccactgcagtagcatcttgaaattttaacatttctttccaagtatctgtatcaaaaccttggtaaattccattgttattcactaccaacagtatgattggcaagttgtacctgcagatggtttctacctccatgccagaaaacccaaatgcactgtctccttccacacagatgatccattgcccagggcttctatctttagccaccacggcagctgcaatagcaaatcccaaaccaactcccattgttccgaaagtaccagcatcaagcctgtgacgaggaaggtagttctgaagcacagtccgtccaatgtccatagtatttgctccttcacttaccacgaaacagtctctaggtagttgttcttgaacatggtagaatactgtgtaataattcataggcagggattttttagaagctagttccttggatgcagcttcattgctcttcattttttctctcagagttttccaccacttgctctctggaggatactgccatggtgttttatcaagttcctctaaaagctgcttagtgacagcatgtatgtttcctagcaaagtaacagcgggctttacattattccccaattcttctgcacagatatcaacctggataaacttcacatctggctgatatcttggaggcagtccaaaatgtaaaatccaatttagtctggcaccaaataacacaattacatcagcaaattgcaaagccctggatctggctgcacctacacagtatggatggttgtcagggacaacacccttccccataggggtgggcaaaaatggcagtttatattgctccaccaatttcttgatactctcttctgcatgagcgtaagcagcacctttcccgatgataagaaggggttgtttggcattcctaataacagaagccgccgtgcacacagcagaggtttctgccatgctaataggaggtgacatgcagcgttccatgtactttatagaattcacattcacctgaaggttcacaaaatctgctggtatgtcaacatagcaagcacctggacgaccatagatactgcttctcactgccttttcaataacaaaaggaatagcttctatgctgcttgggcgggcagagaacttggtatataatctacaagcttcaacctgaggaaactcctggaaagctcccattgtttcttggtttctttcagaggaaccaccaatcacaagcaagggccagcagttcatgtttgcatttgccataccgcccaaggcatggatgagacctgggccagaaacaacaaggcagactcctggcctgcttgtcagatatccaatcgcggaggcagcataacaagccgcttgctcattcctcatcccgatgtacttgatgcctagctgctgggcagcaatggcgatttcggtcactgggatgcctacgatgccaaatatgtactccacatcttgcgttttcagggcctgagcgatgactttagcaccagacacctgctcctcgctgcgctctgcgaagttactgtccggcatcttccaccgaaaagctctaagcactcacgcagccggcaaacaagcggaatcatccagcaaggcaaacgcgaagtcggcagcacgccacctctggcggacgcgtgggtcgacgatatcccggaattccgggccagtaccagcctgcttt

SEQ ID NO: 316482 - DNA, 373 bp, Homo Sapiens
ctggttgagttctttccagacaaagacaagtgacaagaattagaggtttaaaaagcaaccagattcatctcagcagcttttgtagttttaaataagcaaggagtttctccagcgaaacttcctcacacctcttggtcttggtctcttcagacactttccttcctgttctctggagatcttgcagtgctggggatacattttgtcctgagaactgccagagcccagtcagtgacccagcctgacatccacatcactgtctctgaaggagcctcactggagttgagatgtaactattcctatggggcaacaccttatctcttctggatggaaagaactgttgaagaagcttttatacttcttgtttgcttgaagc

SEQ ID NO: 316483 - DNA, 974 bp, Homo Sapiens
  misc_feature (53)..(70): n is a, c, g, or t
gcaggttgaaatccaaacttggagtatataacttcttattgagcccaactgcnnnnnnnnnnnnnnnnnngcttctctgccccttttccatttcttttgtatttgttttctgtgagagcactgaaatggcggccctggaatctacaatttggctctccactgagcaccttatcttgccaccttagccttaagaatgaatatgaagaggatggggacaaggaaaggatcagatacctgctccagtagttgtgaggccactgtgtctcaggggactccaggaagagcagaagagggatcccacgaagttatttttatgcagctggggccaggagggtcagagtggtgccaggtgcaagttaggctaaagaagccaccactattcctctctcttgcccattgtggagggcaaaggcattggtcaccaagagtcttgcagggggacccacagatatgccatgtccttcacacgtgcttgggctccttaacctgaaggcaaattgctacttgcaagactgactgacttcaaggaatcagaaattacctagaagcaccatgttttttctatgaccttttcagtccttcaggtcattttaaggtccactgcagggggttagtgagacagggtatcctttgtggtatgttttgctttcctaatagggacatgaaggaaacccagcaatttgctgttatgtgaatggcctgtagagcagagtcaagagcggtgtgctttgcccgactgctcccatcaggaataggagagtagacagagatcttccacatcccaggcttctgctgctgctttaaaagctctgtccttggagcctcccgctccctgaagtgtctcgccccctgcacagcactggcctttcggaagcatcccagtagggttttctgaggctcgctggtgactcatgccctaattgcaatcctctgcttttatcttgactttgaaggatctaacactgctctctctt

SEQ ID NO: 316484 - DNA, 536 bp, Homo Sapiens
ttttgcttctctgccccttttccatttcttttgtatttgttttctgtgagagcactgaaatggcggccctggaatctacaatttggctctccactgagcaccttatcttgccaccttagccttaagaatgaatatgaagaaaaatacacagccacctctgtccagggcagtaagaagggctgcaaggaaggggaggatggggacaaggaaaggatcagatacctgctccagtagttgtgaggccactgtgtctcaggggactccaggaagagcagaagagggatcccacgaagttatttttatgcagctggggccaggagggtcagagtggtgccaggtgcaagttaggctaaagaagccaccactattcctctctcttgcccattgtggggggcaaaggcattggtcaccaagagtcttgcagggggacccacagatatgccatgtccttcacacgtgcttgggctccttaacctgaaggcaaattgctacttgcaagactgactgactttcaggaatcagatttttaaggtccc

SEQ ID NO: 316485 - DNA, 626 bp, Homo Sapiens
cttggttcacaaagtgctgggattacaggcatgagccactgcgtctggccttctataattttctggtagtcacgatggaaacaaacaaaacaccttagaaccagagatcgaccccctcaagcaatacatcaattcccttcacaagaaacgtcggggctacatgagtatctgtgttgaatgcggtctgaaatgatcctatggattttcccggctggttgccactactgtacaacattcagtgcccacatccatctgtgccattaagcttttttgagacatgagagatgcctcttccctgctgtatgacatgcatttgggaagttggaaagaaatgacaaaatcagggagaaaacatccaagcttcttacctgtagatagaatcagccctcacttggtgcttattaccagttattcaagaacaataacaacaacaaaattagtagacatccaagaagcacatattaggaccaaagatagcatcaactgtatttgaaggaactgtagtttgcgcattttatgacatttttataaagtactgtaattctttcattgaggggctatgtgatggagacagactaactcattttgttatttgcattaaaattattttgggtctctgttcaaaa

SEQ ID NO: 316486 - DNA, 1051 bp, Homo Sapiens
  misc_feature (1018)..(1018): n is a, c, g, or t
tttgtgttttaccttccaagacccccgaagtttttcccctctgcttctctgtcttgcaggagggaactctcctactttggggtgaaggtggctatgattgaacctggctatttcaagactgctgtgaccagtaaggagagattcttaaagagcttcctgggagatttgggaccggtccagtccagaggtcaaggaggcctatgggaggaagtttgttgcagactataagaaatcagctgaacaaatggagcagaagtgcacacaggatctgtcgttggtgaccaactgcatggagcatgcgctgattgcctgccacccccgtactcgctactcagctggctgggatgccaagcttctctacctccccatgagctacatgcccaccttcctggtggatgccattatgtactgggtctctccaagcccggccaaggctctatgaagctaaggttggatgcatggttgcatggatttggggtgtgctatgaggggtggtgtatccttgggagagatataaagtggagggagggagccgtccggtcagtagggcaccaatcccacctccttcattacctcctggccatgattctcctgggagataattctgctctctggagatgttggtaggaaagtttcaagttacgcagctgagaaacagggaccaaatagtgctcctgggtgcattgtcaccgtgggtggccactcaagggtccaagcctctagggccatccttgggctaacaactggggtgggtgtgagcaggtggaaggagcctcagcccatgccattacctcctgcttccttatcaggctgtgtgttaaatctgggccagtctacacccttccacggggtggaaatggcctggaggatgtgagggcacccctcctctgaagatccctgtacacgtggtgttgggactggaaccattaatgcggcccataggcctcaggagtcatcccagaagcagtggctgggaggtggtgtcctaagtaaggatctgtgcagaggacaaataaantcagtttttgatttgtcttgaaaaaaatgaact

SEQ ID NO: 316487 - DNA, 593 bp, Homo Sapiens
ttttgaatttttatatgatttatttaataataaaccaattaaagatacaaaaatgtttagaggattccaaaatttaaatttttgtttaaatacaaattcactctgtaatatgaaaacatagcattagacctctaaacataatgatttttttcatctacaaaaatttctgttatactagaaaatttgcagaagacatttttttcttgtgacattaaatgtacattatttacagttgaaaaagtaatctaaaaacatttcatttcagaaagttggatatatatgttatctttgtatgcaaccccccccaagtccgcccccagtaaaaaatgatccaaaatataaagcaattatgcttttataactgactactcagccagattagcccaaggctcaagttgctttcttggcccttaagaaagagtcttgactctctcaaaatagcagtattctgtttagcacttagcaacacaagtttactaatggaccgcaaagcacagtggcctaaagagttagtaaacaaattatttaggaagaatttatggcagatcttacccataatagatgaataaattttgttgggtcacttatttctc

SEQ ID NO: 316488 - DNA, 376 bp, Homo Sapiens
aaagttaataagtactactggaaaaacaagtttaaaattatgactacataatttgtaacttcctaaatataacgaaattctattatttctgttggattactgcaatacttaagaagaaatttcacaccaacatgtcaataactaaaactgagtccaagctcatttaaaaatatttttcctctaccaaaatagtcttattgctctatctctgaaatttacttgcacaaaacaatcattgtttttggtgacacaacaccacacaatatagaatgaaatgagaaacaactgctgtgacagagatgatcacagcgatacccactcttgcctgcaaggtcatatagttaccagtagctgttttgcttataattgaaaataa

SEQ ID NO: 316489 - DNA, 938 bp, Homo Sapiens
gcactttagggttgacatttattactttaaacaggttgggttccattccttgtatgcctttctttgctccaataattagcaatggtgctaaaagtagtaaagctctctccccattagccatgccatgggtcctccttaattccctttttttggaatgtgtcactgaatctgcgtgaatctgtgtgccctggtgggcagatggtggggcattgttgagggtgctgtggctgtttgtgtgccctgttgtgttcagggctcttcgaggaaagtacacccactctgccctcccagggtgggctcaccttggttgctgttcactttcctgtaagggaggggttcatttccaacgttgtatagatagcaaagagaggcccacaaggcatgggaccatctttcaccccaaacaatcactctgagtttgtgaatattttccggtcatagaaagagatttccaaaaattagctactcttcattgtttattcattgttagattcagtaacctcaggggagcttaaatatctaccatggcagcgtgattgtcacagcttcagctcttagggcaggacaactccacacttgtatattttaggatctttgcattgacaaatgttaatggctgttggtctattggttcagcaagattttgcaattcctgatgttcacagacctccttcccttctcctggggctctgtattcacacacagcacccatttggactggggaccattgcctcttgattagcaaatctggtgctgtgctccactcctcagtttatatttgttgaaaactctgaggaaagtgtccaggagcaatctgatgcagtgtcatggcctttggggaaatgcttgggagggtcaaagctcagcctggggagaagctcatgtgcttttagtcacagaagactcttaggacaatcagtgtgctttattcatttccc

SEQ ID NO: 316490 - DNA, 938 bp, Homo Sapiens
  misc_feature (572)..(837): n is a, c, g, or t
tttaggcagcacctaaggacttttattgaccacatgaccccctcaggggtgctagtggggtatccttcggcatcctggcagcagccgccgccacagttcttggctgagcagctcctgttccctgcgggcaccctgaagcacgctccggttctcctgggccctccggatcaggtaggggattacctcctccaaggagccatagggaatggacttatacactacatagccggcctgccccagtgctagagagacgtggtcacacatgcccagaagttgtccgaaacagacagtcccatccagaggaatgcccagctcccacatgttccagaaaaggccacatcatcagtccagactgtggctgcatctacagcttaaagtcagccactatgcacccatatggcggctccagtaattcaaacattgaagtatttccaaactcaatgatacataataaccagtcctttgcattccttgaaggtcccccagtgactcccagccagttccctggagccctcagacctcctcatgccccagcaaataaggggcaacgtcttgtccatctgggacctaannnnnnnnnnnnnnnnnnnnnnnnnnnnnnnnnnnnnnnnnnnnnnnnnnnnnnnnnnnnnnnnnnnnnnnnnnnnnnnnnnnnnnnnnnnnnnnnnnnnnnnnnnnnnnnnnnnnnnnnnnnnnnnnnnnnnnnnnnnnnnnnnnnnnnnnnnnnnnnnnnnnnnnnnnnnnnnnnnnnnnnnnnnnnnnnnnnnnnnnnnnnnnnnnnnnnnnnnnnnnnnnnnnnnnnnnnnnnnnnnnnnnnnnnnnnnnnnnnnnnnnnnnctataaatatttttaaaattctccccagaacacctctgtccatctctggcatttgagcaaaggagaggaagggagggcccttttgtgggcacctatttccc

SEQ ID NO: 316491 - DNA, 433 bp, Homo Sapiens
  misc_feature (81)..(81): n is a, c, g, or t
  misc_feature (91)..(91): n is a, c, g, or t
aggcagcacctaaggacttttattgaccacatgaccccctcagggtgcatagtggggtatccttcggcatcctggcagcancgctcactangttcttggctgagcagctccctgttccctgcgggcaccctgaaagcacgctccggttctccctgggccctccggatcaggtaaggggattacctcctccaaggagccatagggaatggacttatacactacatagccggcctgcccgcttggttgcctgggcgaacagattcctcattgtggggaagacaccatgaggtggcacatggggccatggcgggccacgtgcgtcagcatcagttccaggcagcggctgtaactctgactggtggcctcatagtcaggctgagtggggtcttccatcccatggagctgggccaccgctctctccttgtccagatat

SEQ ID NO: 316492 - DNA, 1873 bp, Homo Sapiens
  misc_feature (948)..(1005): n is a, c, g, or t
  misc_feature (1007)..(1100): n is a, c, g, or t
  misc_feature (1386)..(1436): n is a, c, g, or t
tttctgtgtcttgtttttgtgttttgtctcttcgtcttgtcttggtggtcttgttgatctccgttcggttgtcccttatttttgtcgtgttctgtgtccgtgcgtcggtggtgtcccagtgctctgtctgttgacccccgttgatgtgtgcgtgtcctttttttgtcgtttggccctgttatcaagatctggtcgttacgtgggcccttgggtatttttttggggtcgcccgtgtttgtcttttgcaacgtatgtccggttttattcaacagcggccacactatgaagtggcaacgtgcggaatgtctcgttgattatgagtaatctcatgttttcgcgtcatcgccttgtagtctccagacttaggaatactacgattagttttgcgacatgaaagtttgcctttttggaaaatggtctacattcagaatgtcttagtacaacgcattttaaattactaatcatcatcatatatccagatacatttacattatattacagtacatcatcgctcctagaaaattcaccatacaagacgatcctttcaaaggttcataaataaaagtcttcttgactcgaaatcgtttcctgcatcgtgatgaaaagtatgcagaaaactaagaagaatcgcaagttttcagtagggtgatgtccaaactacttgatctggtgcggggcggagagactgttttgcttttgatccaagtgaagacaatagaaatgtgctcgtcccacttcctcaagtcctcaaaaccttgtcttgcccgggagctgcccctttcaggcagagttggaggtgctgcggagaagccggtgcccgtgcggctgcgagtgcggctgtgggtgtgggtgcggtatttggtgcggatgcgggtgcgggtgagggtgtgggtgcgagtgaggatgagagtgtggatgtggatgtggatgcggatacgggtggagctnnnnnnnnnnnnnnnnnnnnnnnnnnnnnnnnnnnnnnnnnnnnnnnnnnnnnnnnnncnnnnnnnnnnnnnnnnnnnnnnnnnnnnnnnnnnnnnnnnnnnnnnnnnnnnnnnnnnnnnnnnnnnnnnnnnnnnnnnnnnnnnnnnnnnnnngcgtggatttgaccgccaggatggcctgacgattcttgtactgcaccatctgcagcgtgatctcggcgttccagccctggtcttgcgggcaccgaaagtcgatctccttgccctctgccatcaccacagtgaagtacatgtacttgcccttgcgctccacacagtccacggtcttcatgttggagaagtgcagttccttgagcttgaccggcggctcgaggctgtgcgacagcggggccaactggtgttgggacggctcggccggcccctgcccgggctgttgttnnnnnnnnnnnnnnnnnnnnnnnnnnnnnnnnnnnnnnnnnnnnnnnnnnntgggcgggataagcagcagcccttcctcggtgaggatgcaacactttttcttccagagctgcaacaacccgtcgctgcgcttctccagcacgccctctttcagcgctttgcagccgctactctccagcatcctcccagcataagaggggccgccgcttggctcggcctctccgtttccagccgcgcgggccgggggcagcagcagcagcctcgcgccgtcctcgccccagcggctcccacggccgcctgcccggagcgcgcagaggaggctaacacgcaggaggcagagcggcggcggcggctctgggtcccggcagagggacagccgcgtcctgatgcgccacaaggtcccggagctccgagctgccgggcctctgccgtcctccgacgcgtggcgacgcgtgggtcgacgatatcccaagattccggaccgtaca

SEQ ID NO: 316493 - DNA, 703 bp, Homo Sapiens
  misc_feature (113)..(113): n is a, c, g, or t
gggtaaagtctagttattctgactgcttatcattattactgttgattctggtagtgaaaaaaaacttttgaattccattgagatagtaatgaccacagaattgtaaccatagnacagatggaagtaatataaaaacactgttgaatttgaatatttcttgcttttttgctttcacagaaacacattattttacatttactttatataagtgaggtattttatggtgttttctaaattctattaagaacattctaaaaagaaaaggtgactgtgacagacagattaaaatccaatccacaggcagtcccctttggcaaaccactctgattaagtggctctattttatttcaagaatatatatctcttgcccctttaggaaatatgtgaatgttttccaaaagcaagtaaagagtgccacatcttaagcactagaaagcctatgagctttatctgggatctttgctttcataggcttgtgaagaaaatctgaacatgcagacaggcagtcactgtcacatattgaagtttaacagtgactagaggaactataaaagcccaaaactctatattcattctgcagtcatacaaagagcagagggtgaataatttaacttccaaaacaattagtccagtcctttacttcaaattcttcaataatcctccttttcctatagcagtcatcagacatgtacataatacctct

SEQ ID NO: 316494 - DNA, 864 bp, Homo Sapiens
  misc_feature (16)..(16): n is a, c, g, or t
  misc_feature (62)..(63): n is a, c, g, or t
  misc_feature (795)..(795): n is a, c, g, or t
agcattgtgcgacacncgctatccattcagcgctggatacttttaatccagcacacatgttnnccttctgtatgactgctggttagtaacactgaagaaatcacttttgaagcattgaagaaagcattgataccagtggaatggaagaacaggaaaaggaaaagaggcgtcttgtgatagagaaatttcagaaagcaccttttgaagaaatagcagcacagtgtgaatccaaagcaaatttgcttcatgatagacttgcccaaatattggaactcaccatacgtcctcctcccagtccatcaggaacactgaccattacttctgggcatgcccaataccaatctgtcccagtctatgagatgaagtttccagatctgtgtgtgtactgatcggcgcatgaagacctcagcatatgatttgtaaagcctaaaaattaaggccaagctgagctttcagggtttacttaatgtgtattaacatacttcttgaaaataatgatggaacatatctttaaccaaatgtttggcataccatattagaagttttggagctatatataatttcgagtactttcaaagatagatttatgccatgttaatttgctttgaggttcctgttgcctttttaagttgaacatgttttggtttcactttattccactgttaagtagtatgttttaaaacttttcacaaatgtaatgttttttactacacagccgcttagatgtagaatttttgttgttgttttctgcaaaggcagatacatttaaatatattcctagtcctggggctgcanaactgttcggtggctttttgtccccatgctttagataagctgggataggcaccttgctattcagttact

SEQ ID NO: 316495 - DNA, 608 bp, Homo Sapiens
  misc_feature (583)..(583): n is a, c, g, or t
tgactactcagttgccagcttacgtggcaattttgcttttctatgtctcaagagccagctgccaggacactttcactgcagctgtttatgagcatgcagcgatattgcccaatgccaccctaacaccagtgtctcgtgaggaggctttggcattaatgaatcggaatctggacattttggaaggagcgatcacatcagcagcagatcagggtgcgcatattattgtgactccagaagatgctatttatggctggaacttcaacagggactctctctacccatatttggaggacatcccagaccctgaagtaaactggatcccctgtaataatcgtaacagatttggccagaccccagtacaagaaagactcagctgcctggccaagaacagctctatctatgttgtggcaaatattggggacaagaagccatgcgataccagtgatcctcagtgtccccctgatggccgttaccaatacaacactgatgtggtatttgattctcaaggaaaactggtggcacgcttaccataagcaaaaaccttttcatgggtgttgggaagttttggcattttcacatgctntgatatactcttccatgatcctgct

SEQ ID NO: 316496 - DNA, 397 bp, Homo Sapiens
  misc_feature (308)..(308): n is a, c, g, or t
  misc_feature (312)..(312): n is a, c, g, or t
  misc_feature (334)..(334): n is a, c, g, or t
  misc_feature (373)..(373): n is a, c, g, or t
tgagccaccgtgcccagccttatatattttccctggttgactcattacaataacaaatgaagagattgtggcttatcagttttaataagttatccaggccataactcaaattcaaacttagcttttaagtctatctgactgtaaatctgttgcttttcactaaactacagtctcttggactctcaataagagtaatttgataatgtctcaaggtctttttctttataagtcatagattgattaccaacctgaacacctttggagccaaaattcaccagtgtaatgggtcaatgaattaattttttttnttgnctctagttccttaaagggactncttttattttatagcatcagtgtacttagtaacaagttnttttcttttttgcttctttcatgg

SEQ ID NO: 316497 - DNA, 1022 bp, Homo Sapiens
  misc_feature (48)..(48): n is a, c, g, or t
  misc_feature (55)..(55): n is a, c, g, or t
  misc_feature (949)..(949): n is a, c, g, or t
  misc_feature (956)..(956): n is a, c, g, or t
cacaagccgcactcacaaatccggtgttttctcaagccgcactcaggntgtcatngtaactcgtgtgagataccagtccacaggtctttgagcactggaccatgaagttgtttgaacaaatacatttctggccttgtaaagggttgtataggatgcgaggctccattccaaaaacagggagccgcttcagtgagctgccttttccaactgcaatcaattcattgtttctcgtcaactccacctcggaggcatcgaatcccagctccttgccaaggaggccgtcctggtcctccatggggtccttgatactatcctcgtcacagacccactcctcgcagcactgcccggtaactttgaccagccgagggttgggacagcccaagttggggagagatagttcttggggacacagaggaatgcagcccacggcgccatcaatacatgtgcactgatgtttacagttgggctggaaactttccccgttttggtagattctggagttatattcacaggttctgccctctaactgagctctgcagatccccttcagagcggtggactggcgccgaagttgcattccagccccttggtgtggtcgcagggctgcgttttgctgcagtcctcgttgagctgcttggcgcagaccttacagcagccgcagccgtcccggaccagcccgactcccggcgcgcacttgggcgcctccagggggcagtggcaggcagcggggcaggtggagagcgccagcctggtcaagtggagaagggtgacgactaaggcgagcgccctggcgatgcgggagctcattgtggcgcgcaggagtagcccggggcgagcgcggcgacgaagacgccaacaagctggtgtgcagcgaacaggccgtgcgcagcggggtcggggtggcggcgcggtgtgcccggtgggcagggaggcgagggctgggcggcgngcgggcntctttcgctcgaggtcccggcggagaaggcgcggagggcgcgggcgctgctcgggggcgcatcccg

SEQ ID NO: 316498 - DNA, 2048 bp, Homo Sapiens
  misc_feature (301)..(384): n is a, c, g, or t
cgttggtgcggcatacaccccccttgatggtggtccgtctcccccgtccctttatttcgcccaagaccgcttctcctttcagtttgacattgtcctcattggggcgcgagccgccccctcaagacctttttttaagaacacattttttacttcgcgccgcgcggccgcctccccccacggcgcctccccccattgcaaggaagtttttttaccgaagatgtctcttagtccagggggcggcggaagaatcatcgattcctctgtagtatcgctggctccgttggccgtccttctcccttgnnnnnnnnnnnnnnnnnnnnnnnnnnnnnnnnnnnnnnnnnnnnnnnnnnnnnnnnnnnnnnnnnnnnnnnnnnnnnnnnnnnnccttattaggtaaatatttctttattaaatggttaattccataaataaaatcttttcactgaatataaaattaaaatcatttacaaattattccagtattacatttcccctccctccccaaaagctacattttgataaataaaacattcagtcttaaaacacctgatttctgtttgcagtttagagtgcagatagctgcctctcacagacactcatggagtgtcccccttcaggaagggatggaatgccctcccatttacttttgtcaaaggacgaataaaagctttaaactgtccaactaatcttattatctcttttacgactgtagaaccccaaaaggaaaaaagcctagagaaaatatgcttagcaaataatttacaaacagaaaacagaaagtcatcaactccacaagctccaaaatgaagcagtaacatgtgctccaatactatgaagcaaagtattctccaatcgtggctgcattagtgtccatccgcaccagcacccttggcagtttcgaaataccttaatgctcctcaagaatgagcaaggcttcctttctacaatgagtcccatcacccacaccacccccgcccattttctccatgattctgattctgacactcttctcccttgtttgtctaggtgtgccctggaaacccaggtagcatttagtccctaaatttgtgaatgtcattgaacagcctgtagaagggaaacgctgcttcattggcatgcgggcagttgtagttgcatttgcaggactggatcatcatgacgttcttggaaaatgtctccccatcttcgcagcggaaccgcatcttcacagtcctggtcagctggggcgtgcagcatcggccgtccacgcaggaaccgcagtacttgggccggtatttcttcacactcaaacatccagcgtaagtaaacctgactggttcgggggatttcttggtcttgctgcatttcttgccctttttcaggctgctgtacactggctgtccacaaggccgcacctcacaaatccgggtttctttcacaaggcggcactcagggttgtcattggtaactcgtgtggagataccagttccacaggtctttgagcactgggaccatgaagttgtttgaacaatacatttctggccttgtaaagggttgtataggatgcgaggctccattccaaaaacagggagccgcttcagtgagctgccttttccaactgcaatcaattcattgtttctcgtcaactccacctcggaggcatcgaatcccagctccttgccaaggaggccgtcctggtcctccatggggtccttgatactatcctcgtcacagacccactcctcgcagcactgcccggtaactttgaccagccgagggttgggacagcccaagttggggagagatagttcttggggacacagaggaatgcagcccacggcgccatcaatacatgtgcactgatgtttacagttgggctggaaactttccccgttttggtagattctggagttatattcacagggtctgccctctgactgagctctgcagatccccttcagagcggtggagctggcgccgaagttgcattccagccccttggtgtggcctcgtgccgaattcgccacccaggcctcgctcccttaattagttagggggagtttgaagaa

SEQ ID NO: 316499 - DNA, 392 bp, Homo Sapiens
ctcgtgccgtattcggcatgagtcagaagtgaccatcccaactttggtgcgggcacaataaatcagcctaaatgtccctaatttaacccagctcgttataatgtcattaaacatgacattagcattgtggttttagcacccccatgggttttgcttaggcactcatgggtaataaccaagatggagtccctttggcaaaacttaggcatgcacagctgtagtaccccaagaagaaaatgttacttctctcatctgggcaaaacccacagaagacttcccagcttctgccacataaaagacacagaacacagacgccttactggcaacctgctttcaagacccctgtctttgctgagagctttcctttttcccaataaattctactctgccct

SEQ ID NO: 316500 - DNA, 777 bp, Homo Sapiens
  misc_feature (15)..(15): n is a, c, g, or t
  misc_feature (577)..(587): n is a, c, g, or t
gcccaggaaggagantgccactggatgtccaccatcatggcctgggcaaccctggatgtccagcggcaggcccagaagggtgctgtagatgtcacactgggtgatgcctgtgctgtgtgtggcacattccatccagaggcccttggagaagccaactgctgtcacaatgctggcaccgacataagaacttgttttccagctggggagcagcatggcaaccagtgtgcccaaaagccccagaaggcctaggatgtagcccacaagttggaggcccagagaggcccatggcagacctctcagtagaagcgtcttcagggactgctcccttgtcttcaggctgaagctcttgctccttgaacacctctaatccctcatttcagagtctctctgccaggctgacttctctcctccttacaagtgtctgtgggtggccacaagcagcctcaagaaggcatctagaagacctaaaaaaaatccataaaccagattaaatattgaccagaagcttatgagaaaccagaaaacgctggatgccttttgacctttgttatctttagaaataacacatgagaaaggnnnnnnnnnnncaactttgaacgtggagccaaaatgtcatcgcctcctgcgtaggcacatgccttaggttggcagctggacaaagccaggagccagacaggtggctgctttccgggaaggtgatgatggcagtggtggttgtggtggctgtgataactcaagtgctagtctccaaggcctgctgtttaatacattgccaag

SEQ ID NO: 316501 - DNA, 652 bp, Homo Sapiens
  misc_feature (14)..(14): n is a, c, g, or t
  misc_feature (30)..(30): n is a, c, g, or t
  misc_feature (70)..(71): n is a, c, g, or t
  misc_feature (78)..(79): n is a, c, g, or t
  misc_feature (104)..(104): n is a, c, g, or t
  misc_feature (116)..(116): n is a, c, g, or t
  misc_feature (154)..(155): n is a, c, g, or t
taaccaagactacnaggtacatggtaattnggcacgtattatctagtatcagagttagggctatcagtanntgtgcannttaagaaagcaattccaatttcacnatcattaatatntcccatacactttcctctggctcgctggggcccactgnnacatgcttgtacattgcacctggtcacctgagtagtgtctccgggacaggcacctcctccacaggaggcagagcactggctccaactatgccagcttccccaacttccatccacaggacacatgtcagtgttgcacctctggatctgggagtctggtcccccacaagctcttcccccattggagggaggagggttatcacatgtgcggtaccgccgcatctgccctccgttacacgtccggctgcatgttccccagccactccaaggactccagttaccatgggttgggcaagggtcactgttgcaaaaatcactctggacatcactcccttcgcatttccttcctccatactggggcacagggtcggagcagccccttgttctctgtctggcacctcctccacatgacacagaacaggcactccaactggcccaagtcgcccacttgccatgaattggacaatttctttcattgcaaacttgcatctgtgtttctg

SEQ ID NO: 316502 - DNA, 788 bp, Homo Sapiens
  misc_feature (50)..(50): n is a, c, g, or t
  misc_feature (470)..(470): n is a, c, g, or t
  misc_feature (472)..(472): n is a, c, g, or t
  misc_feature (483)..(483): n is a, c, g, or t
  misc_feature (489)..(489): n is a, c, g, or t
  misc_feature (493)..(493): n is a, c, g, or t
  misc_feature (565)..(565): n is a, c, g, or t
  misc_feature (720)..(720): n is a, c, g, or t
catgaatacagcatccctttctcaacagcaggatcagaagcctatttttnatgtcattccaccaattcccgttggttccgaaaattggaataggtgccaaggatctggagatgacaacttgacttctctggggactctgaacttccctggtcgaacagttttttctaatggctattcaagccccagcatgagaccagatgtaagctctcctccatccagctcctcaacagcaacaacaggaccacctcccaaactctgcctggtgtgctctgatgaagcttcaggatgtcattatggagtcttaacttgtggaagctgtaaagttttcttcaaaagagcagtggaaggacagcacaattacctatgtgctggaaggaatgattgcatcatcgataaaattcgaagaaaaaactgcccagcatgccgctatcgaaaatgtcttcaggctggaatgaacctggaagctcgananacaaagaaaangataanaggnattcagcaggccactacaggagtctcacaagaaacctctgaaaatcctggtaacaaaacaatagttcctgcnacgttaccacaactcacccctaccctggtgtcactgttggaggttattgaacctgaagtgttatatgcaggatatgatagctctgttccagactcaacttggaggatcatgactacgctcaacatgttaggagggcggcaagtgattgcagcagngaaatgggcaaaggcaataccaggtttcaggaacttacacctgggatgaccaaatgaccctactgcag

SEQ ID NO: 316503 - DNA, 319 bp, Homo Sapiens
gctgttttataatctccttttaaacttttattgagcaatatgtcatggatgtctttcctggtcagtaaatacaggtttgtattatcgttttttaaatgagtctttagcagttcatcatatgaagactcctactttagtctgtcctctgttgatgaatttccaggttttctcttggtggtgggggtgaggagagttggaataaacaagagtgaagggaacacatctgtacatacattttgtactcatttggttttttctcatgataaatttctataagaggaactgttgaaatcagacgggaccccaggagcctttgctg

SEQ ID NO: 316504 - DNA, 585 bp, Homo Sapiens
  misc_feature (12)..(12): n is a, c, g, or t
  misc_feature (26)..(26): n is a, c, g, or t
  misc_feature (39)..(39): n is a, c, g, or t
  misc_feature (65)..(65): n is a, c, g, or t
  misc_feature (79)..(79): n is a, c, g, or t
  misc_feature (105)..(105): n is a, c, g, or t
  misc_feature (111)..(111): n is a, c, g, or t
  misc_feature (132)..(132): n is a, c, g, or t
  misc_feature (141)..(141): n is a, c, g, or t
ccaaatttgacnattctctcattaanaagtactcccagnaatattaagaatccatctcatctacnccagaaagagacanctgagattaggctgaactgccttcanataatnttaaacaatttggcacacaanttagtattntgaagaagaggccattgccatcgcagtgcaagcacgtggactgagatccaacaaggcaatattcttcttagttaattagagtgcaagtctccacatgggaagcccaccagatcaagatgcacatttaaatatgtaaacatatagaattctcaaattctaactgacactcaggtattgctaacctttccatcttcgtctgacactgtgggcacttagttccagcaatgggaagagttcatgcttgtctgttttaggactctgatagatttaccatttgcttatatgcaaaatcaagtgcacctgattcttacagtctccaacaatcagcattattctgaaaccacaattttatcttcaaaaactttacttaggtatttttaacttgcatgaacagttacttcacccttgcccaaattctgaatcctttcttccactgttttctct

SEQ ID NO: 316505 - DNA, 437 bp, Homo Sapiens
gtaaaatgagtaggttagaccagctaatcactctggtaccttccaacttgaaaaaagttttttccccattctttggtaaattttagatgtggcctgaacattctcctggaagtcagaggtcaaattatctttccattttcttttattttagtaagaatttcgcaaatgacaagtgataacaaaggcagcaggatttttcatttctctgtaaataatgtataaaatatgtgaacagaactatatctttcatctaaggccagttcaatttattaaaaataaaactaatgccttttaaaattgatcagacctttgatacttgaactaaattttgcattagagactttttacagtccctctctgcttaatgcagttatgggtcctttcgtttatggcaaatgacttacctgacaagagttaattttgcctccattgtatca

SEQ ID NO: 316506 - DNA, 907 bp, Homo Sapiens
  misc_feature (804)..(804): n is a, c, g, or t
  misc_feature (810)..(819): n is a, c, g, or t
  misc_feature (842)..(842): n is a, c, g, or t
  misc_feature (849)..(850): n is a, c, g, or t
  misc_feature (853)..(863): n is a, c, g, or t
taagaaattatgtattaatacatatggctcatcgttgaatacagcattcctaacattatcccacattcccccactcccaccgcgcccggccatatctcagttttctaatctgtaaaatgagtaggttagaccagctaatcactctggtaccttccaacttgaaaaaagttttttccccattctttggtaaattttagatgtggcctgaacattctcctggaagtcagaggtcaaattatctttccattttcttttattttagtaagaatttcgcaaatgacaagtgataacaaaggcagcaggatttttcatttctctgtaaataatgtataaaatatgtgaacagaactatatctttcatctaaggccagttcaatttattaaaaataaaactaatgccttttaaaattgatcagacctttgatacttgaactaaattttgcattagagactttttaaaaattgttcgcttttgctgaataaattgcaaatagagaagcttcattgacagtcagtccctctctgcttaatgcagttatgggtcctttcgtttatggcaaatgacttacctgacaagagttaattttgcctccattgtatcaagtttgaatattttccaagaaatctgatttatttggcagactctgagagagagaacagattaagtgccgttttaaaactctgtattttcatttataataataaaatatttgccaaaatacagctgttttgtaaaattatctgcaccctcatccaagctttatatttaatagccttaatcacattttatgaagaatgttaaangaaaannnnnnnnnnactacatccgaaatgagataatnaatttcnnttnnnnnnnnnnnggaaatggagtctccctctgtcgcccaggctgggagtgcagtgg

SEQ ID NO: 316507 - DNA, 588 bp, Homo Sapiens
  misc_feature (71)..(81): n is a, c, g, or t
  misc_feature (122)..(122): n is a, c, g, or t
ttaaaccaccgaatcgtacacgttaaggggctaaattgtatgtgaattacatctcagtatagctgttaccnnnnnnnnnnncccaccaccaaatatacatatttctgtctatagtcccgggnaactgggaacagctcggccctggcgccacgaggaccactgtcccatcctctgcaagacacagcgagtacccacaacaaggcacaaggcagcttccggaaaaccctccagacacaggaatgacttccagagctacatgcattccatgctaggagactgggagcgcccacgggcctttgctcagactgcgttcagaacttgcctttcatcctgaggggcagccaggctgagctgggttaagcccactggcgttaagcgcgaggcttccctgcaggagtgagctgcagctgaaaaccatgctgtctttggcctcccagtctttgaaacgggcaagtccaggttcctagggcaatggctatgtggtgtgggtgggtgtcctggcatggggctcctggcccctcacaccactgtggccatattcatccaatgcctcagaagcgcctagagaatgttctttcctgaaatccc

SEQ ID NO: 316508 - DNA, 574 bp, Homo Sapiens
atttaaaggtaagtttggcaaaggccaataaaagctcccaatctccataagctgaatcaatcagtgtatgagtgtccattatcattatgtataagacactggtactaagtatggcaggagtgggagtagttaaagaggtataagaaattgttccaggattaagtatacaaattattcatgacctttcaaggtcatggggaaaacaatttcttaccaatttcatatcaagccattcccttttggttagaaactaatttctgtcatccatttttcatgtgcacttctgcagattttgtcccgattcattttcctgttgttaatgtgaatattgtcttgctgacctatctgatacacagtagagttttagcatttagaaggctttgggctttaagataataaatatttgaatacaaggtaactgaaattttctgtttcaaatatttcacaatccttagagaacttttccataagaaaaaagatttctcaaattatttgcttcagtcttcttggaataccacatactgttgttttgctattccaaaatcgtgtgaatgatgatgtggtggaggaacag

SEQ ID NO: 316509 - DNA, 699 bp, Homo Sapiens
  misc_feature (13)..(13): n is a, c, g, or t
ctgcaaagttttngagctgtgaacctcagttctccatcgaacatgcttcctgtccggccccaaactaatgctttgatagggggacccatgcctatgagcatgcccaatgtgatgactggcaccatgggaatggcccctcttggaaatactccgatgatgaaccagagcatgatgggcatgaacatgaacatagggatgtccgctgctgggatgggcttgacaggcacaatgggaatgggcatgcccaacatagccatgacttctggaactgtgcaacccaagcaagatgcctttgcaaatttcgccaattttagcaaataagagattgtaaaagaagcagattgaatgaagaatttttagctgtgcagataggtgatgttgggatggaaaatgctaatcaactaccctttcttttatcaagtaattaaaataaatctacataaagaaccaaaaaggctgttttataaaagtgaaatatccagtatttcagagggccaggcaagagcacttcagatgaggcagtcaagcctttatcaactgaagagtccatttaacagcataatttgtgggaagactggaatagggctgaataaatgtgtttgaatctctaatattatactctcttttcctgaggaacttgatttttctgtccctggatcgccttgtcataattgggtctgttccttttactaccactct

SEQ ID NO: 316510 - DNA, 984 bp, Homo Sapiens
  misc_feature (429)..(438): n is a, c, g, or t
tgtccctccgcccccatctcgtattttgaccacctggggacctctatctgacaacgtttgaggtgtgtcctccaacccccaaagataaaaaatttttccgccgtgtccgacctaaagaatgctacgggataacccgaaaggacctttcccaagttaagtcccgccaattgtaaatgatggccgctaaaacaccagaagttgtttttcttttaaaaaggaaccctagagcagtcctgcgaaaaatttcttcctagttctgcacaggataattacacagaagacatggggaaagtcccatggcatcaccaattgcttaaagagttttgttacaataaaaattttggatagtataatacagtttgctggaacattagcaaagtatatacattccagttacctttgatttagccataatcacatatgtatgcnnnnnnnnnncttggacaaaatatatatttttataaaaaactggtcatccaactttaatgatttcatatatggactcaagagtggtagtaaaaggaacagacccaattatgacaaggcgatccagggacagaaaaatcaagttcctcaggaaaagaaagtataaaattagagattcaaacacatttattcagccctattccagtcttcccacaaattatgctgttaaatggactcttcagttgataaaggctttcaatggtctcaccacccacttgtggtctatcctcactggaaaaaaatgattttgactgcctcatctgaagtgctcttgcctggccctctgaaatactggatatttcacttttataaaacagcctttttggttctttatgtagatttattttaattacttgataaaaggaaagggtagttgattagcattttccatcccacatcacctatctgcacagctaaaaatcgacgcgtgggtcgacgatatcccgagaattccggaccgtaccagcccttgcttttaaaccagctgttatgtcccca

SEQ ID NO: 316511 - DNA, 741 bp, Homo Sapiens
  misc_feature (36)..(36): n is a, c, g, or t
  misc_feature (93)..(93): n is a, c, g, or t
  misc_feature (729)..(729): n is a, c, g, or t
aatgccactctttattgggggctgaacaccctcaanttaagaaaaccacccgcttttgggttttgtttaaataaaagcagctgacgccgaatnccgggatatgcgaccacgctcggatacgtttcaggtggtcagaacagttgtaggcactggaggaatagaccagaagcctcgaacattacccaggaacaggacgttcccaattagaggctttcagatttatgatgggcccattcatctcacaaggagcactttcaaaaaatatgtgccaactccagataggtacagcagtgcaattggcttcctcatgaagaattcctggcagaataacccccaggaataatatctccctcgtgaagtttggtccacatgtctctctgaatgtcttttttggaaagcctggtccctggtttgaagattgtgagatggatggtgataagaactccatattccatgacattgatggctctgtgacaggatacaaggatgcttatgtgggaagaatggacaactacctgatccgccatccaagctgtgtaaatgtgtctaagtggaatgcagtgatctgcagtgggacctatgcacaggtctatgtacagacatggagcactcagaatctttctatgaccgttacacgagatgagtatccgtccaaccctatggtgctccgaggtattaatcagaaggctgccttttcacaagtccagtctgtcgtcatgctggacctcngtaactttcaca

SEQ ID NO: 316512 - DNA, 597 bp, Homo Sapiens
agaaggtggccacaacaaccatggcttgttatcatgcaagccatgatgcctcagaaagaaaatgtctcctgagttcagtaaacggcttttgattaaagaattttaattgctcaaaatccatagtgcagagaatcatgcaacttcaaatgatctggttgagcccatagccggtgtggctgctgggagacaagccatcctcttgggttcctcttcctcttcctccagggcgctggcggcaggccccttctctgctgaccgagctgcagcttccttgaaggagtccacttggaagagggaaaagccccttgggtgcaagttggacgcgtgggagcatcgtgcgcagggagactccgcacccaagggcaggcctcttctcgggctcatcagagccgctgccaacaccagtctagagccagccttcggtggagagcctgcactggattggctgaagatgccgctgtccctgcaccaaagcgcttggacagcagaggagaagtcttagtcacttaccctcagaggctacccatgaggtctggaccaggtgttggttacgctcacactctaacacctgaaggtacataacgattatcttatgag

SEQ ID NO: 316513 - DNA, 1672 bp, Homo Sapiens
  misc_feature (762)..(762): n is a, c, g, or t
  misc_feature (959)..(967): n is a, c, g, or t
  misc_feature (1376)..(1376): n is a, c, g, or t
  misc_feature (1453)..(1453): n is a, c, g, or t
  misc_feature (1656)..(1656): n is a, c, g, or t
ggcggcggcggcggctggtgctgcagggtcggcagctcccgcggcagcggccggcgccccgggatctgggggcgcaccctcagggtcgcagggggtgctgatcggggacaggctgtactccggggtgctcatcaccttggagaactgcctcctgcctgacgacaagctccgtttcacgccgtccatgtcgagcggcctcgacaccgacacagagaccgacctccgcgtggtgggctgcgagctcatccaggcggccggtatcctgctccgcctgccgcaggtggccatggctaccgggcaggtgttgttccagcggttcttttataccaagtccttcgtgaagcactccatggagcatgtgtcaatggcctgtgtccacctggcttccaagatagaagaggccccaagacgcatacgggacgtcatcaatgtgtttcaccggcttcgacagctgagagacaacaagaagcccgtgcctctactactggatcaagattatgttaatttacagaaccaaattatacaaggcggaaagacgagttctcaaagagttgggtttctgcgtccatgtgaagcatcctcattcagataatcgttatgtaccttcaggtgttagagtgtgagcgtaaccaacacctggtccagacctcatgggtagcctctgagggtaagtgactaagacttctcctctgctgtccaagcgctttggtgcagggacagcggcatcttcagccaatccagtgcaggctctccaccgaagcntggctctagactggtggtacgcacatagcatagccatggccgactcctgctgtggttctctgacgattgtgcttcttgttaatcctctgtcgtgctttggtaatcgtattgattagagttggtaactgtcttgacttgaattttgtccctttaaaactgctgtacctgtatgataaagatgcagtacctttctcttnnnnnnnnntgctatggaaagctgtgagaattgaagagacaaattggctgtgtcagtgtggggttatgtcatgatttctagaagccctgaagttgctcttttgagcagctttgcatgacacgctctggtaaaaggtgtgcatctttaaattatttcatggatactttgaaaaatattgtatcacttcaaatacagcaataagtttatatgttctcaagatttcatttgtttttaagaattttaagttcgtggattaatatcactacttgaatactgacagttgttgattagacaccgaaaggttactgattgttgaatgtatctgtgttagagctgtgcactggcacgcttgcatcaggggctggggccacacggccgccacacagattcccccgtgatgcctggagctgcttccagnagccgggtgtctccaagaggcacctgtaggacttcccatttagaaatctcttgagtgggtttgtatgttaccttctncaggtttatttaggacagagatattgctggaaggtcatgggtcagattccctcacaaaccacctcgtctgcgggtgcagccccactccaaggctccccgttattggggtatgtgaggagcagtaaatataaaacagttcaactgtcctcatggaatcaccctttctgtttttgcagtattcataaagctagtgtagggtctgnttttagtctattaaat

SEQ ID NO: 316514 - DNA, 784 bp, Homo Sapiens
ttttgcagaataaaaaatgcgatttttatttgttgaacataatttgaaactgtaaaaagatttctctgtccatcaccagaaatccagaagacacctgaagaggactgactgtttctttgccacggggaaggtgtgatgaaacaattaaaatcccatgcatccgtggcccttcctccacgttgcccctcagaatgcctgcagctgcagcaggcaggaggcagcaggagaacccgggctgtggaaggcccctctgcctctctgggaaagctgctggggaagccagaggtcacagtgcattggaggcctggctttcagccactggccaggccaaaatgaaacatctgctcaagtctccccaggcaccttgctgggggtgagtgggagaaagaagtggagaaaactgatgctggaccacaagttatcaccctgtaccttggctttgaagtggcccctgctggtacaggagcagggtgagagtaaaagtaaataaataaaagcaacatgcttcaaggagagagggtgacagacccactgaagcaccccgtgtcctggctcgaccagggataagccagggcgtgatgatttaaaacactctgatctgaggccaatggcatcaaaatacaaattgctgaagtgggagaggaagtgaagggctgtttgttagggggacctttgtgtaacaaccagagtaagcattaggatgcccaggctgccctctactggcagtttctgggaaggaccacaacagcagcacccaacctgcaacccacaacagccgagacag

SEQ ID NO: 316515 - DNA, 984 bp, Homo Sapiens
gcaaacaccaagatcaaaggaatatttattacaacatttatggacctagctcctccataaataaatctgtacagagttggaaagtaagaccatggtatatacagaaggaaagagcacagtgttaaggctcaggaatcagtacaagtcatcagggtcagcattctcccactttcaagtgcactaacaaggctgctgggatttccactggagtgtcaacagcagtattcttgttgcaggaactctcagaatttgggggtccataacaggttcagcctatgacccaggtccaaaagttccagccttctctgccacctccagagctagcttcaggttctggtcaaagagctcacacctgataggcatttctaaggaatagaatggattcttgagggcaaagtctgagtaaatctcataaatctttcggagaagagaatctattccagcttgcctaggatctgctagaaccacaaacttgatccctgtcagtgtctggtagcagtgcaatttgaatgtgtctgtctccagcatctcaatgcctgagcttccctgttcaggagacagctgggagccgatggcaaagagcgagtggaacatggaggccagcataagcttctcattagaagtgaggcggggccggccaaatcgaatggacaccgggtaattagcagggttacccagatactccagcacctctttcccgtcggccgtgtacctgccattcacgtccatgccattgatggccagcactgcatgacccactcggatgccgtcccgctggccgaaagcaaccaacacacgctcatcgtgtagcttgagcagcagatccagcggataactgaaagttttctcagcctcagcccgtggcgcgtagctgtccaactggtaaatcaagccgccagctttgttcaccacatacacactaaaaatcgccatcgctgccttgccgctcggaaactggtattcagcctctacccgacggccccc

SEQ ID NO: 316516 - DNA, 419 bp, Homo Sapiens
  misc_feature (122)..(122): n is a, c, g, or t
  misc_feature (316)..(316): n is a, c, g, or t
tcaaaggaatatttattacaacatttatggacctagctcctccataaataaatctgtacagagttggaaagtaagaccatggtatatacagaaggaaagagcacagtgttaaggctcaggantcagtacaagtcatcagggtgagcattctcccactttcaagtgcactaacaaggctgctgggatttccactggagtgtcaacaggcagtattcttgttgcagggaactctcaggattttggggggtccataacagggttcagcctatggacccaggggtccaaaagtttccagccttctctggccacctccagnggctaggcttcagggttctggggtcaaaggggctcacacctggataggggcttttcttagggggataggaatggggttttttttagggggcaaagtcttgagg

SEQ ID NO: 316517 - DNA, 1239 bp, Homo Sapiens
  misc_feature (402)..(434): n is a, c, g, or t
gagcgatgggcgagccgcctgtcgtggcgaattcggcacgaggtgggatcaggagttagcttaagaaaaaggaaaacacagctccccagactggaggctggtcagagggaggagacccctggtcctctgctgtggaaggagaggggttcagccccagataactcctttgtggcctgggcaggatgcagagaatgacaaggctgaaaggagggggactggaggctgcctggctccagcgagagctccttctgggaccagagggtgggacggccaggtatcactttgccccttcctgccccaaaaggctttcacatacccgactcaggccagagccaagacaccctggcaaatcattataggtctcaattcatgacataccagatgccagtcgccacttcaccnnnnnnnnnnnnnnnnnnnnnnnnnnnnnnnnntctgagtgagtggtaaaggccccgttttaactctggcccaccgcaaacaaaaggtttccctctgtgggggagaaaaagaaatccaggagctcctccctggattaaaaccaacgaggtgcagaccaaactttaacacctttagccttatgtggaaaccaaaaaccaactgctgggaaactgtgaaaagcccttttacccacaaggggaggggtcaaagttgctgccctttggggacacccgagacccctaattagcctatctgaatgaggaccaaaggttagagccctctttctccccgaagaaagagcccggaaaaacatggcagagcaaagagcaaaatcctttctcccccgaatgctttaccagtttctcagcaacatttattcaagatgatttttaccaggaaccttatcaaaggcaaaaccacagctgcttgggttgaagtccccatcctggcctcctctcagccgccagacatggccaggaaccctgtggttcccaagaacaatttaaagatcactctttgatttgaaagaccaccattatcattttactaaattcttatatatacttgtgccttttccaactttcagttctcttaagaaaaacatccactgtagctttataaaataccttagtatcagctaggtccaagtctccaggcaggactatcaaaatgggactccttcttcctatcagctctaggaacccccagagggacttggcccagtaggccagtttgaggcactttaccagggcaggcattttccctgggcctttccacagttcttgtcctgtttggtgt

SEQ ID NO: 316518 - DNA, 450 bp, Homo Sapiens
tttattcatgaagaccagtttattttacatgcttgctttcacattctttactgggaatttaaggccttttttcagccttaacttgtataccaacctcaaggattttgtttgatacagaaaaggatagggctgggccttcctgccaaggactgataacctgcctgccaaaaggaagagggaatgaaagccttttgtccttctaggccccttacagtacctcaaaatctaaaggccttaaaggggaaaaaaactgtatctgttctttctccttatctcctacccttctctttaaggcatattgaaggatgggacttttttccaaatgtttatttgtaggggaggagggtgatgaggtgcagggccagcaggctgaggaacttacaggctttggatggcaccgggggactgtatttcaagtcgagggggcaaaggcttcccgggggaggggag

SEQ ID NO: 316519 - DNA, 742 bp, Homo Sapiens
  misc_feature (695)..(695): n is a, c, g, or t
tttcatgaagaccagtttattttacatgcttgctttcacattctttactgggaatttaaggccttttttcagccttaacttgtataccaacctcaaggattttgtttgatacagaaaaggatagggctgggccttctgccaaggactgataacctgcctgccaaaaggaagagggaatgaaagccttttgtccttctaggccccttacagtacctcaaaatctaaaggccttaaaggggaaaaaaactgtatctgttctttctccttatctcctacccttctctttaagcatattgaagatggacttttttccaaatgtttatttgtaggaagaggtgatgagtgcaggccagcagctgagaacttacagctttgatgcaccaggaactgtattcaagctgagggcaaaagcctcctagggagggagccaggtccaccaaggccagagacagacaggcgagactgtggaaggccagggagatgctgcctggtaagtgctcagctggcctactgggcaagtcctctggggttctagagctgataggaagaaggagtccattttgatagtcctgcctggagacttggacctagctgatactaaggtattttataaagctacagtggatgtttttcttaagagaacttaaagttggaaaaggcacaagtatatataagaatttagtaaaatgataatnggtggtctttcaaatcaaagagtgatctttaaattgttcttgggacc

SEQ ID NO: 316520 - DNA, 1254 bp, Homo Sapiens
  misc_feature (9)..(9): n is a, c, g, or t
  misc_feature (11)..(11): n is a, c, g, or t
  misc_feature (15)..(17): n is a, c, g, or t
  misc_feature (474)..(474): n is a, c, g, or t
  misc_feature (647)..(647): n is a, c, g, or t
  misc_feature (751)..(751): n is a, c, g, or t
tctttttcnantacnnnatcttatttacattaatacagaatcattttacattcctaaatcagacactaatagatgctttattttagtgaattataaaggaaaacaaaaaggaaactgttgagaagtgttcttcattaacctgtctaacgacagcccgaagatcctgaaacacatggaaactgcgacatgctaccagcagaggctggggaatgggggttctgctctcactgaatggtggggaaccttcaactgcttagcctgtgctttccttttctgaatcaacatttacaaaggaaaaaacaatgattagcactgaagtaatttaaacacacttcagaaaatagatgtcaacagtgtaagtgggagaaccaagcccctgactagcaacagtggcagggcttcagttcccaaggcagtctgaagtctggccagtcacagtgctgcaatgggctgtggctcagcagaagggcaggngccctccatgcctggcttacaacaacaggactcaatagtcagggacaggcggccatcctggatggggtgggagccaggactgtacatcctgacaaggatcaccacccacacggtcagagcagaacccccagggactctctgggcctctacgtgcctcccaggcaccgactgtncagctgcttggtaccccgggaataaaaactaactgagcagagcagctgatgcctcggcagggcccctcattaggggaggacggtgctggtggggcctgggggcnccacgctcccagtgaagacaacctgtcaggaagaactcattctggaacctcccggaggtttgctgagaaggaaattaatcacttcgtaacttgatgcagcttaaggcttcatttctaagctgtagccctgcaagagtctaaccatctccctctgcctgagccaggggccgtcacctaccaatggacaggaaactgccaccagcctctggggctgcatcctactgcccgggctgtccactgtgacctttccgtggagagaggtgttgtcccatgattttgctgttgccaaggccgtccagaggctctgcgggtgggagctcagtgctgctgttctggaatcctcccgtctcccaggtgccctggcccttggaggggctgctgcttcccggcctagtttccagtggatctttttcctcggctgggatatcatgaggtaaacattttcttaagtttggaaaggaatccctcctcgtcctccccagcctcacgcctagccttgcttc

SEQ ID NO: 316521 - DNA, 996 bp, Homo Sapiens
tttttcccccactatgtgcgctctttctacccatttgtttacccccgaacccctttttccatgtgacccactcccttactcctcctctttctctttaccccatctcttttcactccaatatagatcctttggtcttttcccaagcctcccatattcaaccgcaactccctttctcgcagaagaacccttagtttccagttctgactttcccttttacaagattgccttccaagagggtccctttcttatcacttaatctgttccctcccaggaccctgatactttcccaggataacgcagagcaaatgtgaaaaagcacagcatgcactgagaccgatttctaagaaactgcatggactccatcatctaagaacaattacaatgtggtctcctatacattcattagcaagcaagcattactcagaatagtctgagagttaggtaagctgcataatagtatgcaaggtttgtatgcagcagcctgatccataaataatacaccatctatcttgccagacctcctcaggctcttatatactataaccagaggactgacacacaagtagtttttagactagctattgcagacccagctcttcataaattattttgattattatgactcacccatatgtctcacttcatattccttggaacaaaactctcaatggggaaatacgaggcttttatttgtgctttaggaaatgtcttaaagtctccaaagcaaggacagaaccagagagtcttaattgtgtgtctcctaaaaggaaaattccactgcatacagcttgcctaatggaaattctccttcctcccacaagcctatgggcttaatatacagtagaggggcaaagtagaggtgtaagagattcattcttaaacaactcctgggaggtccagaatgatggacatcacactaaacttaactcgattatgggattaaattatacttatgctcgacgctgggtcgacatatcccgtcttccggccgtaccc

SEQ ID NO: 316522 - DNA, 352 bp, Homo Sapiens
ctcttacatcggtgtgttgaactgattctgcctctttgctgcaaaagggaattggaaagtcttattaaaagcctccagatgttttcatactcttttaaaatgtatgtaaatgcatactaatcatatctaatgtgaaagagttttaaagtatatagagagcaaaaactggcaggatcgtaagtgaaggtgactagtaatctaatttaaatcacctgcagctaagcatgattgaccctgccagaggaaaacatgcctatttgaccatttcctttaaagcagttgccattattcaaatacagagaaatagccacagggctagtgtttttcaaatgcattttaaagaacatgggga

SEQ ID NO: 316523 - DNA, 917 bp, Homo Sapiens
  misc_feature (801)..(801): n is a, c, g, or t
tacatttcagaacgtctgcttcagctacccctgccgccccggcttcgaggtgctgaaagacttcaccctgacgctgccccctggcaagatcgtggccctcgtgggccagtctggcggaggaaagaccaccgtggcttccctgctggagcgcttctacgaccccacggcaggcgtggtgatgctggatgggcgggacctgcgcacccttgacccctcctggctccggggccaggttgtcggcttcatcagccaagagcccgtcctgtttgggacgaccatcatggaaaacatccgctttgggaagctggaagcttccgatgaagaggtgtacacagccgcccgggaagcgaatgctcacgagttcatcaccagcttccccgagggctacaacacggtcgtcggtgaacggggcactaccctgtctgggggccagaagcagcgcctggccatcgcccgagcccttatcaagcagcccacggtgctgatactggatgaagctaccagcgcgctggatgcagagtccgagcgggttgtacaggaggccctggaccgggccagtgcaggccgcacggtgctggtaattgcccaccggctcagcactgtccgtggggcccactgcattgtcgtcatggccgatggccgtgtctgggaggctgggacacatgaagagctcctgaagaaaggcgggctatacgccgagctcatccggaggcaggccctggatgccccgaggacagcggccccaccgcccaaggtgtggtcgctgccaagcatcagtgttagggctggggctcagcctgngggagcctactggggactgagcccccaggagggccagcatgtggagagtcgctgcggctgctcctggctcacaataaagccgggccgagcagctggcaggggaggccaatccctcc

SEQ ID NO: 316524 - DNA, 586 bp, Homo Sapiens
  misc_feature (363)..(363): n is a, c, g, or t
  misc_feature (365)..(365): n is a, c, g, or t
aaaggactgccactttctttgtattgccagatagcctggagctgaggctgtaagtttatagtttcccaggtataagcaatctccagtaatcaccatcctttgcggatgtaacatcgtggtctattccttccacggagatggtggcattcgcaattgggttaccttgaaggtctcggacaaatcctttaactcctcggtgtatctgctcaaggtagctaatgagggagtttttgttatcctcccagtaggtcttcagagtctcttcaggtgggaacttctcacagctaagctccacggtgatctcaaaacagttgctgctaaggtaattgaagtcttgcatccctcccaggtacgctgtaccanangcaccgttggtggttccatctacaaagctgctgtcatcatcattcttgcgacatggtggccgattggggtcagacatggccgggttgaaagaagagtatgcccgggccaagctttggaaaatggcgtcatctggggaggagctgtattcgtgagcactaccactccgcgtctcatcatatggataattggccacaaggtctcctccatggagattggcaga

SEQ ID NO: 316525 - DNA, 422 bp, Homo Sapiens
tggctacacttccaaggcagtgcaaattgggttaaagctgaaaaggctgtccaccctcaagcatgactgcaagattaagagttgtatctcaaaaccatgagccaagtgtgcgtttgggccacagctccgaccagctcagctgccaagaagttatcagtgcagatgaagtgcctaataacgggaagtgcctcttaatggcccttcaaatcatttcattaaaagttgccgtgatgtctccagctgaatccgagtcgtgctgggaaggccattaggttaatcgaaatacaaggacagctcaccatctactcttaattaacaaattaggtcctactgccaactcagcaaaacagagagctggccagcgacccttggggcagtcggaatgatcagaacacccttccatcactgactgccaatcaatc

SEQ ID NO: 316526 - DNA, 367 bp, Homo Sapiens
gtgacctaagtccagtcacacatttcccaaagtttctctttgtcataaccctggtctggctggttttgagggcttgagaatgggtcagggactccaggccaagtccaacagagaccccaaacccaccacacaccagcagccacaacctcaccaccaacaaagaggacttttgtggggccacaagtaagaggtcatttctggaatggactcagacctttaaacaggagagttgagcacttccagtcagtttttaagcaaggcatggggaacagggaatagaacctttcaaagaggttgcccagaggccatcaggtgctcaatcatcttctcctggccaaggctctgaccatgcttagtactggaatag

SEQ ID NO: 316527 - DNA, 705 bp, Homo Sapiens
tctccagagtctgactttgaaagccgcaggaaaaaaatggaggaacgggtgaaggcctgtggcccctccttggaggccagtgaggctgctgatgtggctcaggacccgcaggtttctaggagcccttttaaacctggctttcaggagaatgtttgctgtcctcagaatcggctttcagagggggatgaaggcgagtctgacaagggttttgcagaggacagaggcagcagaaacgacatggcagcagatattgctgggcagctcagccacgctgctgacttgggcacagcctcccacggtgcaggaggaacgggagggaggaggctggaggccactagaggtttgtatgtgaaggctgcggaaggacctgtgctggagcctgttgcccccaggtgtgtccagcggggccctggcctcgtggctggtgcgaatatcccctgtggggatgacaacaagaaggccaacttcaggactgaaggagacattccccgaaatgaaagctcagatagcgccctgggagacagtgacgacgaagcctgcgcttcagccatgctagatctgggtcacggtggtgacaggactggagggtccttggaagtggagctgcctctgccaaggtctcagagcatcagcacccagaatgtaaggaactttggccagctcacttctggcgggctactgccccacataccatgcctgatcttg

SEQ ID NO: 316528 - DNA, 488 bp, Homo Sapiens
ctaaacctttattgccattcccagaactgcttgcgcctttcagaaacccattattttataattataatcaagactattaggacaggacaatttgtgccaaaaagcgcatttacactcagaattgtcacttagcactgtcacaggagggatcatctttatttctgtagaaatcaaggagagttgcagactctgccttttaaacttttaatttctagatggcatgggagttactgaccttgtctaaattattctccattcactccactaaccacccctggcagagtagcccaggacatcacagcaagcaattatgttatggaaagaatgcagccccaagaatcaggccaacccaagttcatatcctgattctgctccttcctattgaacaattcagtcctttcatctgtttcttcatctgtggaatggcaaagctacaaatacctgcatcagaaggtcattttaacaattaaatgaaataatatacaact

SEQ ID NO: 316529 - DNA, 368 bp, Homo Sapiens
tggatcaaaaaatacaattgcctttaaacaagcatactcattgtcatcaatctggatttcttgaaatggtctaaccagctcatctagaacacgattggccacacggctaatctcaacttcacagctgttgcggtgaataacatagttgtttcccaaaagcaaaatatctttatacatcatggatctctttgtagctccaagcagtaagtgctcccctgcgtgagctctcaacagtgccacctgatcatccaatggtaattcacagaaggcaggaatatatttagcccattccaccaacttaacgtttatgtcagtgcttgacccagggcttgagactgagatctggcgagaccgaacttcagcttgtg

SEQ ID NO: 316530 - DNA, 401 bp, Homo Sapiens
gtttcatatagtttcatatagttcatttttattaatatttaggtttaacttatagttctgcaattatttaaaaaacaagtacagagcgtttgattaaaaaaagtcaacaaatgtttcaaaacagctttgtacaaatgttataaaacatatttaatgattaagaaatgtactagactctatcatttacttttaaaacatttaattagaaaaacaggtgatatttaagactatttataaacttattggccaaattgccaaaaagtttctttttctctaactttggtattctaaataattgattattgctcccattgtaaactgaaccatgtatgcactctcttttctgaccaaactacaatggtatattggtaaattatttaacaacacactgtccagggggg

SEQ ID NO: 316531 - DNA, 1111 bp, Homo Sapiens
ctcacaatgcaggcgctccagctctgacacgtgcacttctttattggaaaagaataaagcagtcactgatgttgcaggggcaggacacgagcagctgccgtcctcctcccagcgtgcctggcatggtcgcaggggagcgggtgcctggagtcccggtgacaccacggggcacactgagggagctgaggagccggggccgcgcacctctctggatgctcagcggatcgtgtacttgtcccacttcttttcagggtcgtagggttcccagcggctggcgggaaagatgtgcttgttcttctcgtaccagctcctcagcaccaccttgcctgcatgggactcatccttctccacagtggcgtcactgagcaaccgcacatcgtcatgaacatcaaagttgaagagtggtccactcttcccccgtgccttggtgacgatgaagtcgtagaagctgttatggtgagggatgatcaagtcctcccttgatgtacatgagctgctccacccctgcggacctcagctcactgaagtctttccgaaggatctcgagcgccttctgcaggaactgctgcatggtgttgccctttctcatcttgactgttcgccggtgcccagagccatcccagtagctgaaggtgatctcgatctcctcactcttgatcttctcctgcttggcttcccactcctgccgcagctcttcccgaagccgattctcctcctcctcacggtctcgatcaggcaagaagcttgtgtcaacgtctgggttcttccccagttttctcttcttcgtggtgatctcttccctttccatctcctcctcatacatggccgcctcctcttcctcctcgcctccctcttcttcctcctccagggtgaaggacaggctggagatcttccgcttggcttccttcttacgatcattctctcgaagcttctccagcttcatctgcagctccttggataaaatcattcttggccagctgcttctcccgctccttcaccagagcctcctgcttggccttcatgtcattcagggtcacgagacccacggtgctggacttgagctctgcctccaccgcgtcgtagtgcgcagagaacttcttgtcaatgttgg

SEQ ID NO: 316532 - DNA, 1025 bp, Homo Sapiens
cttctcctgacttgactttccaagccagactgcctgagtatcacttaaacctagagtgactgtacaatttatcatccaaagtaggacacttcttagcatgaaaagggcactaaacataattaacgtaagtataatccaggcccgtctgagcaaaccaagatttatgtccttctttcagctcgttcctgcctatcacctagagggcttgacttctctctgctcctcttggcattcatactcagcaaagccgatggtatatttcagttcaatcttcaggctcttttgcagtgagtgcctctggagcatgtgacctaactgagcagacttttgtgccgcctactgtgtgctgtgcagccctcctcagatcccattccgtctccctcttcctacaccacttccttgaacctacactacttgcacttttcagctgttcattttttgtctgtcctggactccgtcttgggaactgactgcccatgccagtggctcaggtggggccatcacacacagggcctgtcctcctcactcagaacagggcttgctctacagcctgctctatcacctagaggatgcttccccagaacccagcttgcaggctctgggagcaggcaccacccaggccaggcacatcagaatccttcctggtagcttccggtcagggccatgcttttgcatgggctgggctgccgctctcatttttgtgtaattatctgacttctcttttatcactcagctcagctaatcatcagtctaggaagctttggccctctgtcccctatccactatcttgcttaccccaggtttctggaataatctgttcactcgtcagtctcccccagcagacagagggccggtgtgctgctctctttcttcataacaagcactcaatagatatgggtagaagggatttttggggagggagctatgaagggggcttcccatctaagcctgctttcttctttttgtggtttggcctggcgtgggctgactccgtttctgtcaggctcttttgttgtgctgcatca

SEQ ID NO: 316533 - DNA, 770 bp, Homo Sapiens
tttattttattttgctaatagcaacatcaacagacttcctgtggttagaggattataaaaacaagagttccttggagctgcatttgcaccacttgtgtaagatgctgtagaaccctggcgtatgctggggctggcccttcctgcagaggctctaacagagactagccagaaactaagaaagtcaaggctgatcactggaatagggaggcaggggaacatcacagatgagtagctgaagtagaaccgagagctaaacaggaaagaatcaagagactgaaaatcagaacaagtgaggttagaggctgtagcttgagttacattataccagtgttggcctctttgtagctaaaggacacattacagagaggagtctggcatctgctttgaggtcctgttccttccacggcacagctaagctcctgagtgggtcacgtggctgcttccttctatcttagtatgctccaggtcttggaagacaagtttggtccttcagagttaggacaggtactgaggtagggctaaaacagtacaaaaacagtcagagagatgttatggttcagtgagaaagcactcacatttgcaaaccagtcagatctgggtttttatcttgttctagcttttcctatctatgtggtattaggcaagatacttaaacccaccatttcatcaatgaagatatcaagtagaaatttcataatattgtggcaagagttaagtaaaaataatttagaagatgcctcctacttcataggtggttatttctattcaat

SEQ ID NO: 316534 - DNA, 1135 bp, Homo Sapiens
  misc_feature (866)..(866): n is a, c, g, or t
  misc_feature (984)..(984): n is a, c, g, or t
ggggagggcggtggctcaggctcctggaaaggaccgtccacccctccgcgctggcggtgtggacgcggaactcagcggagaaacgcgattgagtagaaatggaaaagaaaatgaaataaatcagcagttatgaggcagagcctaagagaactatggcaacatcaggtgactgtcccagaagtgaatcgcagggagaagagcctgctgagtgcagtgaggcgggtctcctgcaggagggagtacagccagaggagtttgtggccatcgcggactacgctgccaccgatgagacccagctcagttttttgagaggagaaaaaattcttatcctgagacaaaccactgcagattggtggtggggtgagcgtgcgggctgctgtgggtacattccggcaaaccatgtggggaagcacgtggatgagtacgaccccgaggacacgtggcaggatgaagagtacttcggcagctatggaactctgaaactccacttggagatgttggcagaccagccacgaacaactaaataccacagtgtcatcctgcagaataaagaatccctgacggataaagtcatcctggacgtgggctgtgggactgggatcatcagtctcttctgtgcacactatgcgcggcctagagcggtgtacgcggtggaggccagtgagatggcacagcacacggggcagctggtcctgcagaacggctttgctgacatcatcaccgtgtaccagcagaaggtggaggatgtggtgctgcccgagaaggtggacgtgctggtgtctgagtggatggggacctgcctgctgtttgagttcatgatcgagtccatcctgtatgcccgggatgcctggctgaaggaggacggngtcatttggcccaccatggctgcgttgcaccttgtgccctgcagtgctgataaggattatcgtagcaaggtgctcttctgggacaacgcgtacgagttcaacctcagcgctctgaagntagtgtccacagctgtgacttgcaccgacttgtggggcctactggttcacagtcttgaagtgggcccaagggcctgggagatcccataccacgggtggataaatgagggtaccctgtgcaccccgaataggacaatctgttgtagcattgg

SEQ ID NO: 316535 - DNA, 429 bp, Homo Sapiens
aagattgtaattgtgtttcatgtattctgtgattccaactggatgaataataagcaagaaatgtacagagctgtctaaaaattaaatttttcaaaaatttccttaatgtggctgcctgtggtttgaatgtccccctctaaaagtcatgttgaaatttaatcccccaatgcggcagtattgagaggcagagtctttaaaaggtagttgggtcatgagagccctcatgaattaatggattaatgagtgaatgaatgaatgggtcatcatgggagtgggactggtggttttataaagagaagagagaccccagtgaacacacttagccgcctcaccatgtgattccctttgccgcctcaggacggcaagaggccccaccagtaagaaggcactcgtcagatgtccccctgacattgaactctacagcctcca

SEQ ID NO: 316536 - DNA, 485 bp, Homo Sapiens
ttgatttgaagggattgctttatttaacgtgaaaagcgtgatagaggaactgtttaagataaacaacttataaatactcccaattgtagaagtgaaagattgattctatgaaaatctacaagtgattaaatttagacatgaatatcaaagactttatagagtcatagcatcttatcaaagatcatttagcagaagttatgcttagtctgtaggttagaagcaatgattagtgagacagattggtttgtgggatgactcaggataggatgattatcagtaaaaaccttcccaggtaaaaattacaagaaaaagaatagaggatagttgcaaaagatttatggaattagtttaaccactaagcataaaatagtactgctctgggttgtgaaaaagtatagtaaaatgttgctaaagttatatttcaaagtgtagctcccagagatgaaaccagttaaagcaattctacaaacaaagctaaaaacatt

SEQ ID NO: 316537 - DNA, 722 bp, Homo Sapiens
  misc_feature (36)..(36): n is a, c, g, or t
  misc_feature (55)..(55): n is a, c, g, or t
cctctaccccagcccatttcccccctatgtaacaantctttgacttacacccttnctttgaaacttactgtgtaaatattagagcacaagattcaggctactctttatcaaataatcttgcagtccttgaaaagaattcaaagaatttaagcccactgacgtcctaatcttggtaaataacactaaaaacaaattcttgagccaacttcggtagcaaattctctacagagcatctttctctgtgaacatctttatacatgtgtattaaagttaggctggttagtcactcttaccaacctcctggtcttacagaatgatcaagaaagtatttgttcatctatgatagagcaagaactgtgactgttttaaagctaagacaacacaacacatttctcccttgccagccaaggtggcagtggaggccctgggtggtccagacctccccaaaggcgggaatcttcactatgttctctttcctccggtgagcctccttctcttccctttatatcagtgcctttttctgctttcagagagaaaggtgtttgagcaagaaaacataggatatttcccaccacgaaacagacataattttgagggctcagcacaaaatgaaatcatggggcccttcttcaaacattattaagaatttccgctatagcagagccttgaaccaagtgtggggtccttctaagtgtgggccctgtgctgctacacaagttgtg

SEQ ID NO: 316538 - DNA, 1952 bp, Homo Sapiens
  misc_feature (235)..(235): n is a, c, g, or t
  misc_feature (237)..(237): n is a, c, g, or t
ttttgcacaacaagttgcatttattgtttctgacaagtgcatagtaattttcagtttgctcatgttcctagcatcacaaatctgagttacaattttgcttctcaatgaaaaacatatactctgaaaagtgattaggaagttctaaaaattttaatcatttatagagtatcttaaaaatccttatcaagtaagatattaactttacctttataaatctttgtgtgaaatgaaaaananatcaaggcatacaaatttcattgtgttctacatttttaaataccatcctttgtctccgttaaaagattttcatccatttattcaaaaaccttttaagttcaactgtccaatttaagacagagtgaagacatttttgagtatctgaactaagcattgtcttgactgaaacgaagtaagaactcaatgagagtccttgtgggcctcccagtcatgcctttccgtagatagggaacttcatctttgttggtcatcacgcctgctatgtctaaatgtgcccacttaggatgagttacgaattctttcaggaatgctgcagctgtacatgctcctgcagatctgtattttccaatgttgttaacatcagcaagctggcaatctacaacctgtcttgtataatgttcgaagagaggcatcctccagacacggtcccctgtttcaatgctggcctcgaagagtttgttccagagccaggatgaattggtaaagaccccagtggcacctgatcccaaagctacatccatggcacctgttaaggtggcggcattgaggatgaccttcgggttaaacgtgtgtgcgtaacagagcgcatcagccagtatgagcctcccctcagcatcagtgttatcaacctggatggtcttcccgtttttggctctaacaacatcccccggcttgttggccttgccgctgggcatattttcacaaagaggggccagacctataatattaatgggcaaattaagctttgcagcagacacgatggctgagcatatagttgcagctcctcccatgtcagccctcatgaggtccatatttgcagaagccttgatggagataccaccactgtcaaaggtaattcctttcccaacaaacaccaggggtggttcgtttgcattggggctgcctttgtagtgaatttccaagaagactgggggctcgtcagatcctttggccacactgaggaatgatcccattgcctgttcctcaatccaagacttgggtctgatatggacctcggttttactactagcacttttgagattcttctcaataatttcggcaaatctggttggcgtcatctcattggctggcgtctccatcaattggcgtgccaagttctgcccagaagcaaacaggactcctttctgccaggcctcctgatccccacttccatagagctttgccgacacagccatcttctttttttgctttaggtcatcgtattcatagagaccaagcaccgctccctccgcagcagcctgagcgtctccacagggatccacctccacagacgagagctccaggtcttgaatctgcctgcaccccgctgcaacagcagctctgatgttttctttgccttcatgccagttttcctgttcgtcgattccagctgcctttttgccgaggccaactagcaccacgctggggaagtcctgatgcagaccataaaaggttcgagtcttccctgccttcagaggtggtccagatatgttcaaagtctctctcagctttccagctaacaatttatcaaaattctctcctgcacttgtgaactgtggcacatcatcttctttttctttggaatagattcctaaaacaaggcccttcgtcatgtctgcggtggagagactccggctcccgaaacgtctcacggccagacgtcggacgactactcgccccgcagccggaagaggcagcaagaacatcttgtcggc

SEQ ID NO: 316539 - DNA, 781 bp, Homo Sapiens
ggggcgagtagtcgtccgacgtctggccgtgagacgtttcgggagccggagtctctccaccgcagacatgacgaagggccttgttttaggaatctattccaaagaaaaagaagatgatgtgccacagttcacaagtgcaggagagaattttgataaattgttagctggaaagctgagagagactttgaacatatctggaccacctctgaaggcagggaagactcgaaccttttatggtctgcatcaggacttccccagcgtggtgctagttggcctcggcaaaaaggcagctggaatcgacgaacaggaaaactggcatgaaggcaaagaaaacatcagagctgctgttgcagcggggtgcaggcagattcaagacctggagctctcgtctgtggaggtggatccctgtggagacgctcaggctgctgcggagggagcggtgcttggtctctatgaatacgatgacctaaagcaaaaaaagaagatggctgtgtcggcaaagctctatggaagtggggatcaggaggcctggcagaaaggagtcctgtttgcttctgggcagaacttggcacgccaattgatggagacgccagccaatgagatgacgccaaccagatttgccgaaattattgagaagaatctcaaaagtgctagtagtaaaaccgaggtccatatcagaaccccagtctttggattgagggacagggcaatggggatcatttcctcaatgttggcccaaaggatctggacgaggccccccgtcttcttgggaaattccctt

SEQ ID NO: 316540 - DNA, 447 bp, Homo Sapiens
  misc_feature (207)..(207): n is a, c, g, or t
agctctcttagaaattttattggtcctggagaaaggaaggcaaactctgcctcccgctcagagtccccccaaccctcactgtttcccgttgccattgatggggaggttcacgtactcaggggaggccaggaaggcttggagcttgggccgggcgctgaggccaacgatatgctgagagcagggggaacgcatccaggcagccagggntaggacctcatggatcagcagcaagtccagcaggttgtagtcagcgaaggagatacctgtgtccatctggaagcagagggtggcgaggaaggaacagcatggggccagatgctcacctgggtctcccacaatgaaggtcttgcctccctggttctgggacagcagggtctcaaaaggcttcagttgcccggcagtgccttcacatagtcatccttgcccgcctcatagttggtgtagatc

SEQ ID NO: 316541 - DNA, 1134 bp, Homo Sapiens
  misc_feature (1085)..(1085): n is a, c, g, or t
  misc_feature (1096)..(1096): n is a, c, g, or t
  misc_feature (1112)..(1112): n is a, c, g, or t
acagagaagcaggaggggagggcgggtgacatgatctcgtggttccttctctttttacacgcagcaatataatacagcacattaccggcgcagctggttacctaaccgcagttattccttagcttaattcgaggtggtggccattagcccgcggataggtctgcccagtcccagcagcggttcccgtcccacgttgtaaccgccagtcttgcttaaaatcgactccatagggagcctttgaacagaactgggtacgctaactggccctccgagggataactctagacggcccccttttgtttgttttagctctcttagaaattttattggtcctggagaaaggaaggcaaactctgcctcccgctcagagtccccccaaccctcactgtttcccgttgccattgatggggaggttcacgtactcaggggaggccaggaaggccttgagcttgggccgggcactgaggcgccccacatatgctgagagcagggggaacgcatccaggcagccaggggctaggacctcatggatcagcagcaagtccagcaggttgtagtcagcgaaggagatctggtctcccacaatgaaggtcttgcctccctggttctgggacagcagggtctcaaaaggcttcagttgcccgggcagtgccttcacatagtcatccttgcccgcctcatagttggtgtagatgagggagatgtatttgcagcggaggtcctccacgccgtcattcaccatgtccaccagggctgcctcctgctggtccttcccatagagcccaagggtgcggcccaggtgacgcaggatggtattggactggtacagggtgaggtctccgtcctggaacttggggagctgcccgtataggcaggaggctttgagtgagccctcctgccacgtctccacggtcaccacctcctccttccagctctggccctgatctgccagcagcatgcgcagggccgcgcagcggcctcgaactgggaaatagaccacggtgtagggcggcatggtggcgaagactgcggcggcgaaactccagcctgacgtctgcggcctacgagccttataagggtggtcncgcccctccgncccagtgctgagctcnaggcgccggtcgctcttctgga

SEQ ID NO: 316542 - DNA, 681 bp, Homo Sapiens
  misc_feature (657)..(657): n is a, c, g, or t
gtattttggaaaaatggtaaagaagtgcagagtcaagtcatagcgactaataatgggttattttcttaaattgtatgcttatgttaattctcacagtctttttgtttgggtctgtgacagatcttacaaaagatcttttagacctatgattcttaacaaaattaaagaattaagtcggaaccaattttccacaatgtctcatctaagaaaggactcacagcccagcagcccaggagatgacgcaatggacaggagtgggctccctgaccttcaaggaagatttgagctatctgggaaaaacagacagtatccactggatgcattggaaccccaacccagcattggggatattaaggacattaagaccccaagtttagtattcttgtgtttcatatttgatgggttacaccaggcattactgagtgttggtgtgagcaagaggtctaatactgtggttgggaatgagaacgaggaaaggggtactccttatgctagcagattcaaagatatgcctaactttattgcccttgagaagtcatcagttcttcgccactgctgtgaccttttgataggcattgccgctggatcaagtgataagatttgcaccagcagtctccaagttcagagacgattcagggcaatgatggcatctatggnaagacttttacatggtgagagtgc

SEQ ID NO: 316543 - DNA, 513 bp, Homo Sapiens
cacgtagtaacttatagatatatttggaaaactgattatcttttaaaaaatgactactaaacagattaaaatgcagagttcattaaaatacagaggatgcctctggttctctggtattgactctttttgtctactaagataagaagtctgggctaggctgaaaaactcagaatccaggtctggggtttcccagtactatgctcccatttccgagtactgtgctcctatttcccagtactgtgaactcccctttcccagtactgtgggctcccatttcccagtactgtgtgctcccatttctcagtactgtatgcccatttcccagtactgtgctcccatttctcagtagtgtactcccatttctcagtactgtgctcccacttctcagtactgtgctcccacttcccagtactgtgctcccatttcccaatactgtgctcccattttgcagtgctgtgagcccccatttcccagtactgtgctcccatttcccagtactgtgctcccatttcc

SEQ ID NO: 316544 - DNA, 618 bp, Homo Sapiens
  misc_feature (398)..(398): n is a, c, g, or t
  misc_feature (417)..(417): n is a, c, g, or t
  misc_feature (557)..(557): n is a, c, g, or t
  misc_feature (585)..(585): n is a, c, g, or t
ctcgtgccgctcgtgccgaatagtgggactttatcctatacttttatctaaagctctaagagatgtttaataagaataaagggttggaatttagttcttttttataagaatataggtaggctaggaaaaatagaatatgaaattttgcagttttgaaatagatatgttttaattcaggacagaatggtcaaagtgctaaactcttaacaatttgagaggtaacataagcataaaaagcataaatcaaggtatataactggactttggtatttatcacatttctagctcaggtgacaagagccctgatttaaagcagtgggttatacatttctccatcttcagtgaaagcaactgatgggaggcctgaatagcgatggtttatttatagtttacttctnctcttccttcagaaatatntaacctactctagatgagattactatgagcccaacctgcaggggagtctcttctctagattccatccaaattatgatgtctgacattccgaggtgggagtaggtgtggatcttggtcaggtaatcaaggggttgtctggngttttcagagatacactcttaaggtctncagccatgcacagagcttgctcaaactggagaa

SEQ ID NO: 316545 - DNA, 514 bp, Homo Sapiens
aatttgagaggtaacataagcataaaaagcataaatcaaggtatataactggaaaatatattctctatatatttttaactctttcttaaataatcctttttaggatactttggtatttatcacatttctagctcaggtgacaagagccctgatttaaagcagtgggttatacatttctccatcttcagtgaaagcaactgatgggaggcctgaatagcgatggtttatttatagtttacttctcctcttccctcagaaatatttaacctactctagatgagattactatgagcccaacctgcaggggagtctcttctctagattccatcaaatttatgatgtctgacattccgaggtgggagtaggtgtggatcttggtcagtaaatcaaggggtggtctggggttttcagagatacactcttagggtctccagccatgcacagagcttgctcagactggagaaggagaggtgagagttcagagtcatattttggctagatgcagctgccttag

SEQ ID NO: 316546 - DNA, 691 bp, Homo Sapiens
  misc_feature (92)..(92): n is a, c, g, or t
  misc_feature (168)..(168): n is a, c, g, or t
gtgctaaagactcatttgagaatcactttcactctgttagaacaaagagtatttactgtcttctgtcaagtacagaatgtagtagagtcagnttcatgacagagttttacttgctatacattgaaaagactgatttcaactgctgatttaacatatctattaaatgcntactaagtgttaggcactactctagaagatgtgactataccagaaaataagacagccaaggagagacaaaactatataaataagccagaataaatgatcacatggtgacaactgctatgctgagaattaaaatgaatgatgtcatcaacagtgactgggtatctagattgtgcggtcagagatggcctctctaaaatgatggcatttaggctgggatctgactagcaaggaggagccagccatacacagagtggtagaagtacactccagtgtcccagtggggccactaatggatgtaagcattaatgcaaacttgatgtgttggagatacagaagacttgtggagctggagcatagtagggtagcagatagacagtacaaagtggtcttagagaggcaaccacaactccatcatgaagagctgggtgtggtggttcacccctacaatcctagccctttgggaagccaaggtggtcggatagcttcagtctgggagttcctaaagccgaattcctgcagcccg

SEQ ID NO: 316547 - DNA, 605 bp, Homo Sapiens
  misc_feature (546)..(547): n is a, c, g, or t
  misc_feature (580)..(581): n is a, c, g, or t
aatctaggctgaccctgtagattactttgaccaatacaatgtggtgaaaataatgttctgggatttccaagctaaggccccaaaaggacttagcttctactttcctcttcttgaaatgcttatacttgggatgctgcttcttggatcccagccataaatgatagcaagcccagccaccacgactggaagaactccaagtcccatggagaagccacataaactgagatgtggcagctgaattcccagctgatagccaccattaactgccaatcatgtgcatgagtatctcagatgtttcaagcccaatccagcccctagataactgcagctaaagtcaccatcatgtggcgcaaaaccacccagctgattcctatcaactcacagcattgaggcaagtgaaatggttgttattttaagctaattaagtttgagggtagtttgttagtaacagacaaccccacccaaaatttatgttagtgccattaagtaaatgaaatgaagatcaagaaaccccttactcaagaacgaaagtatcactaatatggnnttatggattcatgtgttacaccttgccactatnnctgagtttatgactcctttaaaga

SEQ ID NO: 316548 - DNA, 805 bp, Homo Sapiens
  misc_feature (678)..(678): n is a, c, g, or t
  misc_feature (733)..(733): n is a, c, g, or t
ggggccttagttgccgagcacttgcgtggctggtaccagcgggcctctgggcagaaggatcagggacacagcccgcagaccagctttgactcagacaggggatcacagagatgcctggggtttgcggggctgcaagtaccttgttctccaagcagtcgtgcatccttgtactcttcagtgtcttctacaaatgcttctgggaactggaggacccagttaaccatagggctgtcggattacgagactccagcacattcttcttacaccagctgctatggcaatgtctataatcctttaccctctccaagcagacaatacacagaaatcagtcaactggatggtacagatggaaaccagctggaagacaacctggagagtagtgagcagagactcttttggcatgaagattcaaagcctggaacattagtctgaactgcagttggacctcctgaccaagcactgcgttctcacactagtgtgccttgcaaattgtatttgtcttccgagaggatgttcgttttagaaacctaaagacatcaaaggttgaagagaagacttagttgccctggaagtgaatcagtgaatcacacaccaagccccacaaagcccctaaaggaggatttggcctttcaaactctaggcactaacgtaactgtagggtctgcccacatgttgaangtattgccccagagaggactcagtggtgaagcctttcatcaatagcaagcacttnttaagggagtggcaataagaacaggggaaactcagagcacaatcagcaggatgagagaaggggaccagaagc

SEQ ID NO: 316549 - DNA, 633 bp, Homo Sapiens
  misc_feature (24)..(24): n is a, c, g, or t
  misc_feature (144)..(144): n is a, c, g, or t
  misc_feature (159)..(159): n is a, c, g, or t
tctgtacatgttcctctctctctntcctctctcctaaagaagaaggtcagtagaatatgatgagagatgtggaatgcccagcctattagtacagtgcagggagaaagaggataaaggggattattacaagctgtggaataaggnatggaaccaagaganaatgtgttgaaacttcccaagttcttactgtggacaaaattctcacagcgaacagaatgatcatcatcaggtgcacgtttctgagtcagatgcactgcagtcctcagggacaaaggccccagttgcgggggcagctttctcctcttggaccctctaagtgctgctctgcaggaggactgtggtacaccagtccccgtggtcgtgggcagtgctgtcgggttgagtggctgcaccagcaactgccacctactcttctttaggggcctggcagagtgtgtgagtgttggtggtggggaggtgggaggagtggtggctgaggggatctagactaacataatctttgatccttacagcagacgtccttggtggacggttcccattttggagaagatctgtgcactgctacccttctctcctggtctctctctcttttttctggatgtttgtttccaaactagtgccgaattcctgcag

SEQ ID NO: 316550 - DNA, 617 bp, Homo Sapiens
  misc_feature (58)..(58): n is a, c, g, or t
tgtagtattaagacagggcttattaggttaaatgtgtcttcacataaaaaagagtacntgtggctgagtctttattagcagtggtttgagggatagtttttcgtaaaacatgtttattctgtgataggtagactttccttgacaaggtagcctgtgtcctagatagtatacttatattagatggttatgtcccgcaaaaataactctagatgtctgaaacaaatgtattcctccaggggtcccctgagagcccttaaaagattccccattgaaagactggattagctagccatccagttaaaggcctttctttattgtctagtgtctttctcatagcctgaatttctccagttctccctccctctcagtcatcctccttatctctctacccatccaccctacccagtgctgttccatgccatctttgtcaaccccaaaatgattattcaacctttgaagaattattgttggacaaacaatgcagggaaagcttatgatttgaaaaatcatcaggggcctgcctttaaatgctgactgcaatctaattcacaaatagcattcgtttacagtgacaagagttcttgaaattacaattttgggatgatgctccatttttt

SEQ ID NO: 316551 - DNA, 288 bp, Homo Sapiens
gaaagtcaacaagtaatgtatccccaggcaattttatctgatttttgacatttagattggttttctattacttggcaaagagaatggcgtacagtcactcctctgggggttctgcatgaggaagtatccattatacatgccgttaagcagtgatcaggtagggagggaaaggcttggccacatcaactctcctttgtgaagccaacagctctcaacaaggagaatatagtgctctgtagagcagaaacatgaatagggctgagatccttcctggatgatcccaggcag

SEQ ID NO: 316552 - DNA, 948 bp, Homo Sapiens
aaaattaaaaaagtcaagaagaaaggaagaaaagatgatgatagtgatgatgaatctcaatcatcccacactggaaagaagaagccagagatcagttttatgttccaggatgagattgaagattttttaagaaaacacatacaagatgcccctgaggagtttatttcggaacttgctgagtacttaataaaacctcttaataaaacttatctcgaggtggtacgttcagtattcatgtcttcaacaacttctgcttctgggacgggcagaaaacgcacaatcaaggacttgcaagaagaagtttcaaacctgtacaataacattaggttatttgaaaaagggatgaagttttttgcagatgacacacaggctgctcttaccaaacacttgctgaagtcagtgtgtactgatatcactaacctcattttcaacttcttagcttcggatttaatgatggcagtagacgatcctgcagccattacaagtgaaataagaaagaaaattttaagtaaattatcagaagaaaccaaagtagctcttacaaaactccataactctctgaatgaaaagagcatagaagattttatttcttgtctggattctgcagcagaagcttgtgatattatggtgaaaaggggagacaaaaaaagggaaagacagatactgtttcaacatcgacaagcactggcttgacagctaaaggtcacaggagacccttgctcttattctgcacctcacatcagtccttttggcttcagttttcaacccacagcatgctccatgcacctggaagatgtgttccacagatcattgcttttcttaatagtaaaattccagaggatcagcatgctcttttggtaaagtatcaagggttggctgtaaagcagctagtcagtcaaagtaagaagactgggcagggagattatcccttgaataatgaattagaca

SEQ ID NO: 316553 - DNA, 424 bp, Homo Sapiens
  misc_feature (241)..(249): n is a, c, g, or t
gttgggttaatacttttaattacatgattgtaattatacaatttccactattcgatattttgtataaaaccagttacaacccacaagattttcaaatgtgacaatatgtatcaaactacatacatatgcaaagtttacacgccattaggaagctttatcttaaaaataccttcaggaaaataaacattcattcaaccagttctcttggctttaaaaaatatgattagaaatatacgctgtnnnnnnnnntcaagacaatgattgatcaatactgatcagttacattttaaaacttttaataatctgtacatgagtgcaggttagataaaagtctgcaaattattaatagaaaactgcagtactatcatcggatgaacatgtctgctgacaattctaccaggtaattaaggaggtaatttcctac

SEQ ID NO: 316554 - DNA, 1392 bp, Homo Sapiens
  misc_feature (36)..(36): n is a, c, g, or t
ggcttcattcttgaagtcagcaagaccaagaacccnccaattccggacacattagggtggtaggccaggcatgggggagatcctacattccaggtacccctagcccttcccctaagcaggctaaccttggggattccctggagatcaaccacttccagtgagagggagtggacaaaagcctctggaccagccattccttctctctctccaagtccttcttcctctctagcatcaaaaccaagcctaagtattttgaggttacatgaacatctctccccttcttttctgtggcagagtcccttagcaaatagaggcactggggcctgagtggatagctctccaaggtacactcattgacacagggtatcaggtagggctagccccaggccaagggagtaaggcaaactgtcagaacctgggccatatgggccctggagtgtgaggagagacaaatggctaaaggccctggcaccattcctggatgtaatttagccacccgagcatggctaaaacactgggtactgagattggaggatttaagaggagctgtgtttaaaatacccttaaacctggtattggaaggctgatgatgcagcattgctagatccctgtcattgaaggccaaggtggcgtggctatgtttaagtcctgagtctgaagaacttttagagtgtggttaaagaatcttggatttgggactggagggttaggaaggggacctggtaaaggtgtccctcagattgtagggctggagactgaactctgagtaaaatctaaagttgggtaggagaggaaacagcaaaggctagagatgtagaaaaaaataaagcaggagagtgtcatggaagctaatggaagaacacagttgcagaaggaagtagtcagatgcaagaccattcctccaaggggaccgtcacttgacacctctgctctcagaagttagatctctgtcatcttcacatctaaaggaatgtaaggggtcaaaagactgtccccaagctcttagaacaagagtggggtgggcgtacagtggatagatttgactccaagtatctcttaaggggccacttccagccacaccttactctcactccatgaaggtttctcccgagtgtgtcctctgacacgtgacaagtaatgatgtccacgtacagctctgtccacattaccttacaaacaaggcttctccctaagcatttccgctggtgtggctgatggctgacttgttgctaaaatcacatcctcactccttgcacctctaaagcttttccccgagtgtatcttctggtgtatgatgagctgtgactttctcctaaagctttgcccacactccacgcatgcataaggctcgacgcgtgggtcgacgatatcccggaattccgggccggtacc

SEQ ID NO: 316555 - DNA, 732 bp, Homo Sapiens
  misc_feature (38)..(38): n is a, c, g, or t
  misc_feature (45)..(45): n is a, c, g, or t
  misc_feature (47)..(48): n is a, c, g, or t
  misc_feature (55)..(55): n is a, c, g, or t
  misc_feature (61)..(61): n is a, c, g, or t
tgcagagatttgaaatgaacaccacagaaacgaagcanccctgcncnnagcacanggttcntgaaatgcctgtagagaagtgaggactgcctgcttttctggtctacgcgtgtgtgtgtgctgcactgtgcctggcactgaggctggtggtgactgtgcactcacaggccaccctcaccagacatccagggagtggaagatcctgcccatttgagatcagttcatacctcggcatcgacgaggctgacaggcagctgactcgatgctgacgatgctgaccagacctgcattttcctggctgaccagccctgcattttcccggcctctagagctctgaatcctggagctagagggcaacctaggtcttctctgtcaccttcccaggctgaggtccccaacaggcactatcagcttgacctgaacattcagtgctggggctggtcctgcctccctgtgtacacaatagcgtcatagcgtgcaggcaggctgggcttccctctccacccatgcactgatgagaagcctcggccagcggccgtcctgcccacctggcgtggcctcacaggcatgctctgggggtaggtcttattgcgaacaatgcctacgttgggtcccgggtctttgggcacagcataaccagtgccttggtgagctctgggtagacacggattttcacccttcctcctagggggtgcttcctggctctctggtggttgatagagatcttctcag

SEQ ID NO: 316556 - DNA, 1063 bp, Homo Sapiens
  misc_feature (71)..(71): n is a, c, g, or t
  misc_feature (101)..(101): n is a, c, g, or t
  misc_feature (109)..(109): n is a, c, g, or t
  misc_feature (122)..(122): n is a, c, g, or t
  misc_feature (184)..(184): n is a, c, g, or t
  misc_feature (273)..(273): n is a, c, g, or t
  misc_feature (291)..(291): n is a, c, g, or t
  misc_feature (335)..(335): n is a, c, g, or t
  misc_feature (842)..(851): n is a, c, g, or t
agcagtcaatattgctatatctctaccatcttatgcatttattccaaaatgattgattgagccacccagtnttgaaaaggtagatgttattgttgtttccntgtttggncagttttattggnaattgtatcccctagcctgttctcaaggaggtcacagatgctggggttgggcccagggcagnttgcagcacagtgcattgagtgccatgacaggggaggcagagtgctttgtacactcatcgggagtccctcatgcaaacttagagaagcnccaagtggaggctttggnaagaactaagtgacacctcagctgaaacttgatggctgagtagnaatgtctgacaggtgtgaagaactgacgagagtggggctcagaagagtgatatgggtggaggaaattcctgtaccaaagctgagaggactagagaaggtttcccgtgttccagaaaacattaaaaagattcattgtggctggggagaagagcacaagtaggagagtggccagagtgggagggagacatagacatcctgcggcaatgagaaactgctgcagaggaagaaagtgatcagatttgggtgatttccaaaagttagttgcagtcaagattttagtaaacaaaagaacacaggaggcaagccaggatagcagcccctgctttgcaggatgacattaataaggcatagttattacctttatggcatctatactttggccttggaaatccaaaaaaagaaatgtagataaccattcacctatgccctttgtacttgcaaagggtcattctttctagcaagcagagcctgtcaggacagggacaaggcttgcagagaacactgtgnnnnnnnnnngactaaaaagctccaggctccaaaggcaaagtgggttccaggagtgtgtaagtggtgcaggaaatatatcacccaatctgacttgagaggctttgctgagcccccagccagtgaccctgcagacagggatgataaccagctgagggaacgtctgcggcagactctgagagaggagctctggctgccaggcctgactcatgctgagtcttcca

SEQ ID NO: 316557 - DNA, 1607 bp, Homo Sapiens
  misc_feature (398)..(459): n is a, c, g, or t
  misc_feature (529)..(639): n is a, c, g, or t
tgttttctttgtatttctaagaaatacaactaggccctaacttttggtctgtggtcagaggtcagtgtctgtgctattccaggatctattatttcagtttgcccttttattctctccgtttgtaacagtaccttcctgtcctggtccctgatcactttagctaatatcctttgaattatttatctagttcagagtttccaataccgttcctgacaaaaccccacttggatttggttggctctctcagcccacatcagtacagtggaccaacatttccagggagaaccatatttaatgtccctcatgctctctttttgaatccaagtgctcagagctcttgactgtgaattatttaccccaaattcattatcttgcacttttttttgagatggagtctnnnnnnnnnnnnnnnnnnnnnnnnnnnnnnnnnnnnnnnnnnnnnnnnnnnnnnnnnnnnnnatgttcaagcgattcttgttctcagcctcctgaagagctgggattacaggtgcccaccaccattcctggnnnnnnnnnnnnnnnnnnnnnnnnnnnnnnnnnnnnnnnnnnnnnnnnnnnnnnnnnnnnnnnnnnnnnnnnnnnnnnnnnnnnnnnnnnnnnnnnnnnnnnnnnnnnnnnatgagacaccgcgcctggccttatcttgcactttcaacataatcatccctgcttctcatctgccctgcagtgctcttggacctggaagatctccctgtggtctggcccctttgccttggttgttaacctccagcttctttgcaggagtgtatttccccaaaacttgtggctttcacagtagactccgtttccatcctctctctcacaaaggatgttaagtatgcctggccctcacacagtccatgggaaaccttatttttaacattactccattgagtcaataaatatttaccatctgctgtgtgcaagttactaggcaattttctgtatccttgtccctaaaattcttgtctttaaattcattgtggaatttctttagacttcacactgacttttattactaaggtcacctttataccaactgccttcctcaaaatgcttataatgaaataacagaatcttgagttggaaacagcccaaagaaataatccaatgttgtactcagtgcagaattccctagaatttctaacaggttgtcattcagcttctgctaagccatgttcaaacagcttattccatttggaactgcactgatattacaaaaccattccttatattgagctgaaatctacctatcttctacgtggtcttagttctgctgtaatctctccttccaaaatctttggatctttcgaaaaaagctcctcccaagctcttttataacgtgacatgacttttagaccccttcccatctttggtcaaccaaagtagggtgccagaccagtcacagaacactaaatgccatccatgttgccttcagttgaaaccagcagttcttatacgtctctgagctttaatcactgtggcggccattttggtaaacacacatactggccaacatactgctttgctcatccgaaatacctatggactccaggtaagatgctttttaacctcacggacttact

SEQ ID NO: 316558 - DNA, 1509 bp, Homo Sapiens
  misc_feature (1420)..(1420): n is a, c, g, or t
gaggattctcactttcatttattttcaaggcatatacaaaagtctgacatggtgcaatgatctcatcaagagataacagaacacacaggagagggttgggtttcctccccggcccaaccccctcaggaaggcacagaaaagtgaggcttgggttcgggggccacctgctttggaactaatctgctgctcagaaggccaggccccttctgaagagggatctcttcctcacatccagaatctaggatctggggaaggtaaactgaggccaccagtaagcatgtgctccaggccaaggctgagtctgtgctgcatccatgtcatcagccacccaagaaaaaccagttactccacctagctcatggtggcggcatcctccctgcaatggtgcatggggggcagtcctttcccctgcagggtgtcattgccacccccatcctcatcctggaggccagtccaggctccgatatgagtgactaggggtgaggtaggggtggcagaagggagatcaaactggagcattccagatgcctactactgccctcacacaacggggcaactgtgctctccaactcctccccttggcagagaaactggtcctgcagtttcaggactagacgagcgtggggtagtggcaataaaggggcttgtatgagaagtggctttcgcctctcatccctaggggcaaaaagtgaatcatctaactggtccaagtcactaatggcaatccttcttccccaagaagactgagtttcctttgtcacttcaggaagggaagaagagaggttagctgagccacccagattaggcccagatttagccaccacctagaacagggcaagctggaagtgaaagaacttgaaatactgactttttccttcttaaaaaagacctaacattgtaatggtttagcaaaattgttataatttcttttaaataacccacagacacccatgacacttccaaatttacagagcaaaaaagtgatttgcagctggttcctccagggagttggccccgaaggctggctcagttcacctccaggacctcagtctccgggaggccgaacttggtcttgtgcttgtcgaagagcttcaccagggcctccatgtacatggtgtggtacaggtcgatgtctttctgggttgggtgctccagcttggggatggtgatgggctctcccacgacggtggtgaatgggcttggagtagggcaccagcccccaggtgtcggaggagaagaggcctcgagccatggaagatgcatggggcggaaaccaatgtatttctggaacttcttctggacccatcggccccaggagccctcctcgaagatcacctgcttgtacacttcattctctccaaaggagtaggtgggaaccaggtcagctccatggcgcagggccagtttcacaaagcctttnggttccgcagggtgactgcattcttgccaggcatggagctcagagactcagccgcacccccgaccacgatgatgatagcattgccactc

SEQ ID NO: 316559 - DNA, 699 bp, Homo Sapiens
  misc_feature (158)..(183): n is a, c, g, or t
  misc_feature (464)..(464): n is a, c, g, or t
  misc_feature (662)..(662): n is a, c, g, or t
cctaaagccctctttcattgttcacacactaactcctactgccgacgaaccgaaaaataattaatgcagaggagatttatgtcttagccataactccagttgtacaactcaatcgccccattctcttttacggttcaaaatgtactgctgaccttggnnnnnnnnnnnnnnnnnnnnnnnnnncctgttaggatttatttggggacttttggtagtttaaactctttaaccttttccttgccgtgtatgaggaaagctaaagctgttatcaacttcttattctacgatactaacacgggttttcagtgtttgtttgtttttattattattattaattttgcgtgatgtgaataccctctcccatcaatatttgtattatggtgctatatattggtaatgatcctttaatattgggaagggattttaaaaatactgtgattaaactgggtttcttcctttgattntcatattttaaataaagccacagtcatttatacaaaagaaaagcatctgtccctgggcaaatcttttgaggacagaggtcaaagtaaactgcataaggtttttacatcatttctgtatgtatttgatatatagatcaatatctgtacaaatttaatcttttattttcttggtaactcgtgatcattgagaaagtgttngaaactttctcatgaagtggatatataatggcgtgaa

SEQ ID NO: 316560 - DNA, 2440 bp, Homo Sapiens
  misc_feature (149)..(161): n is a, c, g, or t
  misc_feature (173)..(208): n is a, c, g, or t
  misc_feature (225)..(367): n is a, c, g, or t
gttgtgtggagattacacaaccctgttttttctttttgcgacgtgtttttcttggggggaacacgaaaggagcgcccactttctctttttccttttattgggcccccgcccgcccccacgagaaggttgtttaaaaagttttttttgtnnnnnnnnnnnnncccaacaaaaannnnnnnnnnnnnnnnnnnnnnnnnnnnnnnnnnnngtttagggttcgtgtgnnnnnnnnnnnnnnnnnnnnnnnnnnnnnnnnnnnnnnnnnnnnnnnnnnnnnnnnnnnnnnnnnnnnnnnnnnnnnnnnnnnnnnnnnnnnnnnnnnnnnnnnnnnnnnnnnnnnnnnnnnnnnnnnnnnnnnnnnnnnnnnaaggtccagctgtattatttatttacagcacagttcaaagtcattaaatccggtacaaaagaaatggctctcacttcctggattggcaccagacatcctaccagctgcaattacatcattttttatctatcttctgcttttactttgtgtagggtagggatggggacttacaaatgggccaaagacacttcaacctcaaaaccaaagagaaatctctgcttgcagagatacaaagaaagtaactctccctcttatgaaaagcaaccaggaactctactccagttatgagggccactgatggtgtgggagagctatcaagaagattcttcctagacgtggtgcaaagacagtgagaaccccaggaaatcacattcatgggacacttgctcttaccgtcatcaccctctattctatctcaactttggccccatcaaatctaatgataaacaaaagaaggtaattacatgtagaaaatcaaagtgaatgggaatgtggtggtgtgaacaataaaagaagaaattgaaaacaatcaaaagtttctcaagtgctgctttcccgcactgtcatagaaatctctgatccaattcttcatatgtctaacttccaaggagcggggctaacagcacagacataggatccaaggcattcttggtgcggagatctaagtggtgggccccctctgagatggtgactgcaaccagagtgtctgtgatatccttagttactccacctccctgaccaggggtctagttcaccattgctgaaaacaatgtttgtgtgtgaactaatgtttttgcctccatacatagtagtgatccaggagggccttggtctcacaccccactgttgaaaacagtcatcagaaagttcctttaagttccatgagtgaggttcaaacatgtcatcgacaccattagtacaaaagggcatgactacttctgtgcaggcctgatagctccaacccagtgttcccagactgctagttgctgtctctgaaatattcaggcatttcacctggcccgaataattgtagtatacattcagagcttggaaaatattctgcagcagcagtgaatcagatacattgggatttttcaaatactggcacactaccttgataggccaagcaggcaaaggctgtaaaaagttagaggcataaggatagtccaccattgccagattcacccaggtttcagagatccagtctttcaaatgttggatgtcctgagaagttaatgggctgcataagtgaagggctccagtaagccactgcaaaccactgccagtatttgagagtcgattaatggcatcccaggacctgtggatgctctctgaacaatgtggaccgcttttcctaaaatctgtagttacgatcttcataaatacaccacaaggtactaaatcctcaaactgccagataggggcagaagctgcaagagctccaactaccatatgaggatatttcatcctaaaccaggcggcaagcatgccaccataggagcctcctatggcaatgacaggttgattttcagctcctgggattgttcttttcaagtgtttgattaactctgcaaaatcagccagagcttgttctgatgtcaggaaattcaagtgtctggaatccttgaatgagttgtcaccaaaggggagagactctccatagtatcgatgttcagcaaacaccaacatagctttcagttcctcagccacatcccacatgaaccccgtgttattacaaaaccagataatgtccccttcattaccagtgtagaaaagtattgatccaccatttttcttccagtatttatcagctactaggtaccgctgattaaaagttttcacagtattaaatccaaaatgatcaaccttctgttggaagtagagaaccgaatagttcttggctacagccgggagggatgtggggttggttggcaagtgtaggctgccgagggcccttaaggccggccggagggctatggtggcccagggcgccagaaaagacagaagcaggagcaggagggctcggcggcccatggctcaggctggagtctgcagtgcgggtgggagggcgaa

SEQ ID NO: 316561 - DNA, 645 bp, Homo Sapiens
tttcataaatacaccacaaggtgctaaatcctcaaactgcaagataggggcagaagctgcaagagctccaactaccatatgaggatatttcatcctaaacccagctcctgggattgttcttttcaagtgtttgattaactctgcaaaatcagccagagcttgttctgatgtcaggaaattcaagtgtctggaatccttgaatgagttgtcaccaaaggggagagactctccatagtatcgatgttcagcaaacaccaacatagctttcagttcctcagccacatcccacatgaaccccgtgttattacaaaaccagataatgtccccttcattaccagtgtagaaaagtattgatccaccatttttcttccagtatttatcagctactaggtaccgctgattaaaagttttcacagtattaaatccaaaatgatcaaccttctgttggaagtagagaaccgaatagttcttggctacagccgggagggatgtggggttggttggcaagtgtaggctgccgagggcccttaaggccggccggagggctatggtggcccagggcgccagaaaagacagaagcaggagcaggagggctcggcggcccatggctcaggctggagactgcagtgcgggtgggagggcgaa

SEQ ID NO: 316562 - DNA, 396 bp, Homo Sapiens
cgcactgcagtctccagcctgagccatgggccgccgagccctcctgctcctgcttctgtcttttctggcgccctgggccaccatagccctccggccggccttaagggccctcggcagcctacacttgccaaccaaccccacatccctcccggctgtagccaagaactattcggttctctacttccaacagaaggttgatcattttggatttaatactgtgaaaacttttaatcagcggtacctagtagctgataaatactggaagatttgtaataacacggggttcatgtgggatgtggctgaggaactgaaagctatgttggtgtttgctgaacatcgatactatggagagtctctcccctttggtgacaactcattcaaggattccagacactt

SEQ ID NO: 316563 - DNA, 388 bp, Homo Sapiens
ggcacgcgagaagagcactcccaggagctgaaaatcaacctgtcattgccatatgaggctcctatggtggcatgcttgccgcctgggttaggatgaaatatcctcatatggtagttggagctcttgcagcttctggccctatctggcagtttgaggatttagtaccttgtggtgtatttatgaagatcgtaactaccgattttaggcgactctcaaatactggcagtggtttgcagtggcttactggagcccttcacttatgcaggccattaacttctcaggacattcaacatttgaaagactggatctctgaaacctgtgtgaatctggcaatggtggactattcttatgcctctaactttttacagcctttgcctgcttggcctat

SEQ ID NO: 316564 - DNA, 631 bp, Homo Sapiens
ttgtttaaaatgcgaccccagcagcctgcacccatgtcactatttaaagctgaatgggttccaggataatgagcccctataacatcaaccaccttgaagagttcggcatcaaggagcatggatgcagagatggactcccagagattatcacttgctatgattttcactcgctggagaccttgataattcagcatttttcttaatatcttaatataattggcattatatgacctctcattccaaattccaatataatcaatgtccaaatcatggtaacgcttggcgcccacaatccaggtcacgacataataggcagtcagctgaagattgacataaggccagtcgaaaccttttcccagccatccagggaatgaccatggcaacccaatgagtgtaatattgggattcctcttcttagcttctttcatcaaccaccactcgtatcctcggaaataattctcatctagtgcataatgcatgtgggagggctcagtgccgtctgttgtctgcccatcaccacctatttccacttttaaaatatgcaaagaggcaccaaaattcggcttaaagagataatccaatatctgagaacgatagggctctgggtaatttactagaagtcgggaggttg

SEQ ID NO: 316565 - DNA, 1025 bp, Homo Sapiens
gtgagcatggaaacaatacatggaatctgtttctttgcatgaaaagtagcgtcaaaggaaaaggactcaaattctgttgccacctttcggttaacccgggtaagaatgtgcataaattcaagcttgtcggcatactgtttcagcatggcacaaagcggactggatgaaccaggagccatcctttgaatttcgccaagaataataaccaggtgctgtggagtatgcatacaagaagtcggcctccactggtattttatgacacgccatgtcatcatcaacaccactgtctgtctcaatgccacagtccagttctgtaccacggcaggcctgaataatgaaaagtttgggttttccagttagacttctacaacgatcccctctgaaaaagtttgttatttttttcaggtcaacaggtccatttgttccaaaaattattccttcttcaccatggctcagaagcacacaaacaaaactgctccttttgctgtgatcttctttagaaacatcacgcatcaattccacaatttcttcacgtgtaagatcatttttattcctgacttcatatttcaagtttctgaatgtttccctgaggtttgctgcatcgacatctgtaccagaccgagatgtcattccagtgcttttatgaaaattcttattattaattattatacataaacccatctcaggataatccattttataactgttgtccagggatattccagagtccattgattcgcttccatgtatgatctttggttccaaatttttaatggattttgaatccactgagttttcagtgttctccatggatacctttattaatgagaatgggggaagaggcaggtgcagggcacacccaccgaaaaccagagcgccgagtgtgagcagggctcgctaactcctcacggcctgggatttcaaggcgacgccaaccagctgtggccacggatacacagccacaggtatgagctgcgagcactcacgaaactcttccacaaccgcctcacaatagcacccatccg

SEQ ID NO: 316566 - DNA, 644 bp, Homo Sapiens
atttttcagtagagaccgggtcttgccatgctgcccaggccagtctcaaactcctggcctcatgtgatctgcccacctcagcctcccaaagtacagggattagagttgtgagccaccgctgccagcccagagttaccctctaaagataagaaaaaggctattaatatcatactaagtgaaggacaggaaagggttttattcataaattaaatgtctacatgtgccagaatggaaaggaaacaaggggagacaacttttatagaaatacaaagccattactttattcaatttcagaccctcagaagcaatttactaatttattcttcgactacatactgcagcagaaccagcaatacacttgatttttaaaagcacatttagtgaaatgttttctttggttcatccttctttaacaggctgctgagtcactcagaaatccttcaaacatgattaattatgaagatgaaacactagagtcatataagaaataaaaattgggcaataaaataaaatgattcagtgtttcttttctatattgtcaatgaaaaccttgagttctaataatccatgttcagtttgtagggaaagaaaaaataatttttccttctacccactttaggttccttggctggggcccctattac

SEQ ID NO: 316567 - DNA, 677 bp, Homo Sapiens
  misc_feature (52)..(52): n is a, c, g, or t
  misc_feature (75)..(76): n is a, c, g, or t
  misc_feature (103)..(103): n is a, c, g, or t
  misc_feature (149)..(150): n is a, c, g, or t
  misc_feature (204)..(204): n is a, c, g, or t
  misc_feature (433)..(466): n is a, c, g, or t
cgctctaatatatgaagagtctgtgtgtgtataaagacccatcacttgcttncgagttacttcaggggtaatatnnttgtataccaggcaaaatgctgtagancatttccctgcttcctttctcccatggttcacgtagcgtgacctannagtagatctcgtccaccacctcgtggtaggtcttgagctcgtagagctgtactntgaagtaaggcgacgacaggatgttggtcaggatcatggggttgaggttcatggtcttctcgttgccccagagcgggagcacattgccctgcttgccggagaccgccggcttggtagcgccgccgccgccgcactgctgctgttgctgagccgcagctgcagccgcctggtgctgcggctgcgagttgcctgtcagcgcggggctgttgttagccatgttgcggcggannnnnnnnnnnnnnnnnnnnnnnnnnnnnnnnnnccaagctcgatctcgctcttcgggacaacggtctgggaccctactccatcgaacgtcgtcgggagaaggggccgcctcgctgtgccccagctgggcaagagagggcacccgacgccgacaaaatgaccccgggccaagagcagacagcgaaacccagaccgcgagaactccacgcagaaggcgagccggcagccagggagctcgatctctt

SEQ ID NO: 316568 - DNA, 1152 bp, Homo Sapiens
  misc_feature (908)..(941): n is a, c, g, or t
ttggccgttgcccgatttagggtatttcgcggagattccgccccgttacctttcctcgaggcttagctcggccttcaaaactcattttcgttttcgtgctgccactaacgctatcatcgggcacacatcccaggtctctagaggattttcctgtccaccatttacaattaaccagatacatctcgattacctaaatcttaacgctcagtccgtaaacgcttatccaagttccacgagataatctactacagagttctgacgcataacccccaataattaaagtattacaatatggagataatcagaagaaaacaaattattacccttgttgacatacctcttcatcatcaaggaaggattcaaaccagtcccacagatcctgtagggggctgtgtatatcttatatacataaatccaagcgctctaatatatggagagtctgtgtgtgttataagacccatcacttgctttcgagttaacttcagggtaaataatttgtataacaggcaaaatgctgtagaaacaattcctcctgttccaacacctcgaacccctccgcacatccctgtctggcccgctgttttcctgcttcctttctcccatggttcaacgtgcgtgaccttaaagtagatctcgtccaccacctcgtggtaggtcttgagctcgtagagctgtactttgaagtaaggcgacgacaggatgttggtcaggatcatggggttgaggttcatggtcttctcgttgccccagagcgggagcacattgccctgcttgccggagaccgccggcttggtagcgccgccgccgccgcactgctgctgttgctgagccgcagctgcagccgcctggtgctgcggctgcgagttgcctgtcagcgcggggctgttgttagccatgttgcggcggannnnnnnnnnnnnnnnnnnnnnnnnnnnnnnnnnccaagctcgatctcgctcttcgggacaacggtctgggaccctactccatcgaacgtcgtcgggagaaggggccgcctcgctgtgccccagctgggcaagagagggcacccgacgccgacaaaatgaccccgggccaagagcagacagcgaaacccagaccgcgagaactccacgcagaaggcgagccggcagccagggagctcgatctctt

SEQ ID NO: 316569 - DNA, 374 bp, Homo Sapiens
aaataagatcacagtctttatcttacagtaaatcttcaagacgcatatactctagccattaatcatttctctgaagataggtacaggcctttctcctcgaagacagcttggtagtctccaagtcttaattatgacagatatagcataatttatagtagtccagggcttacagaaaaatgacatcatagtcgaggttctatgattcttgaagtgacctgtcagtagtcagggctctggcagaagtgccccagacaatcaccaccaggcccaaaagagtcaggacagtccctcttcctgcggagacatgccccatgcacagagctactataatacaaacggcaaaatatgtatgtatacagctgatgctcggacag

SEQ ID NO: 316570 - DNA, 387 bp, Homo Sapiens
acaatgtgccacagtaataccccaaagaagtaactgggaaggtgagaggcaaggaagcacaggtattaatttagggaatgaaacactacctgagacaaaatttgcccaaaagggtaggggttaagtgacatgaaccctcacctctttaccctttctctcaaaaagaaaatttctaggtctttcaataacttcaatgatatttggttcaggtttaagaaagataatatcacaggagggaggggtaatctgctaatgtgatctttggtagaacgggctaagagctataaaataatttcaatcacaggaggcatttctttttcaattctctggctttaatataaaacatctagccaggtgtggtggcaagcgcctgtaaacccaggtgca

SEQ ID NO: 316571 - DNA, 636 bp, Homo Sapiens
tgcacctgggtttactttcgcttgccaccacacctggctagatgttttatattaaagccagagaattgaaaaagaaatgcctcctgtgattgaaattattttatagctcttagcccgttctaccaaagatcacattagcagattacccctccctcctgtgatattatctttcttaaacctgaaccaaatatcaaaagatacaagtttcatgattaggatgaaatatatacatagggattttggtttattgaagttattgaaagacctagaaattttctttttgagagaaagggtaaagaggtgagggttcatgtcacttaacccctacccttttgggcaaattttgtctcaggtagtgtttcattccctaaattaatacctgtgcttccttgcctctcaccttcccagttacttctttggggtattactgtggcacattgtacacccagaaaaggcacatacagtgattattttgtgggaaatacttgattcttttgaaatatatttggagggggtagctagctagccactgtcaaaactaatgctgtatttacaggacaaaaacaagtagagttggacacctcagtaagagacagcattaactaaaagtactgactgccttttaaaggaattttt

SEQ ID NO: 316572 - DNA, 398 bp, Homo Sapiens
ctccctctggccttatttaaattcctgggtgctccctccttcacctgattggtgcctctgtctgcatggggctcatacttcatccctcaagagcccagctgcagctctcacacctttgactttcctcctcctatttggtcttctccacagtatgatgaccatcttggagtatactgaattaagaataacagttaacattttcgagctccatgcatatgctagagactgtgcaaaactctttatatcatttagggaacttctgaggtagtacaaacattactgacattccagatgagaaatatgagacaccaagaatttaaaaaacataatctcatcaaggttcccactgaataagtagcaactttaaacagggaactgggcataagcctttattccgg

SEQ ID NO: 316573 - DNA, 451 bp, Homo Sapiens
caactccaaatattttacagaaaataaatgggaaaaaaaccagagtatttatataaatgatccctcataaggataagcctttacatttaaaactttagtcaccaataataactacacataaaggttgataagaatatcttgctactaagaggataatctgccactagaattaaaaaaattcatacttcctagaaacatcaattcaatcagtgatctacacaaagagttagaatataccagttcataattcttgttctaagatttcataaattattatcccaagcaatgtcatctgctagctttaaagccttctagaaagaagacactataatatctccttctgataaaactcttgcattaaattttttccttttatcgcagctgagaagtatatacacttgacccacaggtttgaaatgctctgccacccccaagactgcaacctgcagcc

SEQ ID NO: 316574 - DNA, 938 bp, Homo Sapiens
caagtacaccccaccttgcctggtaaacttttttgtcaaatgtttatactcatgtaaacaccactcccaatcagtatacagaacatttttgccactctagaaaagttccttcctcatgctgtcttgtctgtcttcaccattcaaaggtaatttctattgtgatttttaccaccagaaattttgtcttttctagaactccacattttattttatatctaacttatcttgctcaccatgcttttgagatttatccatgatgtgtgttagaaacatactcctttttcttgctgagtagtattctattgtgtgaatatcacaatttttaaaatctattcttatgctgacaggtatgtaggatgtgtccaggttttggctatttaaaaattgaggatagtttgtagctatgtcataaaccccagtgtgctttcttcctcctttttcctgtctagcagggcttgtgaagcaagcacttgccctgcagttaagggcatgtttccaggcgcttataactaagaccaccacaaagagaacagaaaacaaaactaaagtgagcccgccaagtcccaggcggacgcctcaagagttcagctcttgggcacagaacggcaggcctgcaaattaactgaaaactccctttacagaaagaaaaaaagagctaagcattgagagagctcggggaacccaattagagacccagagagctactaccacattggatcaaatcacagcagttgttttgagaccgagaggttattcaaaacgctgagccttgactatactgagagtgaggcagggcgcttcctctccccagcagccttgcagcaaatttcccaaagtgccttatctgggctcccttttacagaggcttcaggctaaggagtactaggatatactcttaaagtacttccctgactgcttttccaacatgagctacattt

SEQ ID NO: 316575 - DNA, 636 bp, Homo Sapiens
  misc_feature (62)..(62): n is a, c, g, or t
  misc_feature (290)..(306): n is a, c, g, or t
tcttggattcaaggcctgagcacaggcgccgaacaacatacttcacatagataccactgtancacttttgaaactaagagggagagaattaagttttcaaatttgaaattgagaagcttttgaagagtggcagcgttctagaaagttccatgattgaacaagtgaagcaaaaaactaggatagactcaactgaccatctgaactccaggaattaatagccagtgctttgggcatctggctggagccatggtacgcaccagttgtacaagttatttcattttaattttgtnnnnnnnnnnnnnnnnntccttcggctgtcacaactgttttaaataaaaattttgtgaaaaaacagtatgaagacgttgctctagatacagaacaggaactgagaaagtctggttgtgtcaaataaagcaaagtgttgataattctgactactgattaaggttacccagttactattaaatccaagcttttaaggtgctgagcaaaggaacactgtaccagaaacggcttcacatcatagcacgtcaatgggagcaatagcactaacttaactcaggccaagacttgggcttgggtcctctgtggctgctactctcctaccacacctttgcttgggagtgcacttac

SEQ ID NO: 316576 - DNA, 885 bp, Homo Sapiens
  misc_feature (94)..(94): n is a, c, g, or t
  misc_feature (98)..(98): n is a, c, g, or t
  misc_feature (107)..(107): n is a, c, g, or t
  misc_feature (561)..(577): n is a, c, g, or t
tttcagctaccttgaaagtgagctgaatcaccatggaaatgtgcaaatgtgaggtttgcatacttggttttaatccctgagcaccatatgctantcangcaatcagnattctgtgcctccctgcagtcagttgcatttctatttaaaagtgcattttggtttggaagcccctttctggagcctaactaccaaaaggcagcaactttttgtatcattacaaagaaagctgtgtaagtgcactcccaagcaaaggtgtggtaggagagtagcagccacagaggacccaagcccaagtcttggcctgagttaagttagtgctattgctcccattgacgtgctatgatgtgaagccgtttctggtacagtgttcctttgctcagcaccttaaaagcttggatttaatagtaactgggtaaccttaatcagtagtcagaattatcaacactttgctttatttgacacaaccagactttctcagttcctgttctgtatctagagcaacgtcttcatactgttttttcacaaaatttttatttaaaacagttgtgacagccgaaggannnnnnnnnnnnnnnnnacaaaattaaaatgaaataacttgtacaactggtgcgtaccatggctccagccagatgcccaaagcactggctattaattcctggagttcagatggtcagttgagtctatcctagttttttgcttcacttgttcaatcatggaactttctagaacgctgccactcttcaaaggcttttcaatttcaaatttgaagtatgtgggaaggtgggggcttgggattttccttcaggcagatttaggaacagctcttccgggtcgggcgctttggctcaagccttgtattccaagacttttggaagctgaggc

SEQ ID NO: 316577 - DNA, 389 bp, Homo Sapiens
cactactcgagtcactccagtagcaatactctctccagcaatgcgtcaagtgcccatagtgatgagaagtggtacgatggggaccgcacagaatccgaactcaacagctataactatctgcaaggcacctctgctgacagtggcattgacaccacctcttatggccccagccacggcagcacagcctcgctgggggctgccacatcgtcacctcgctcagggccaggcaaggagaaagtggcacccctatggcacagctccagtgaagtaatctccatggcagatcggactttggagacagagagccacggcctggaccggacccctctgacaagggagaacagcaccttcagtataaacgatgctgcttcccacacaagtaccatgag

SEQ ID NO: 316578 - DNA, 846 bp, Homo Sapiens
  misc_feature (18)..(18): n is a, c, g, or t
  misc_feature (55)..(55): n is a, c, g, or t
  misc_feature (73)..(73): n is a, c, g, or t
  misc_feature (82)..(82): n is a, c, g, or t
  misc_feature (102)..(102): n is a, c, g, or t
gaaattggggccttttcnaaagaatcaaattaatttcctttaaaaatcctccttncaaatggtggaacttggnaaggttggnccttaaggaaaatgccccgnaggtcctctggttgaaggcaacgcaaccctggtgtgggctatttcaattgccatcgctctgatgacgctttctcgtgtcccataaatccccacggagttttatggttcttcgggttttttccatccaatcaggtacttgctagtagcgccctggcgagggtaaaaactcctaggaccagaggaggagaaggaagaggaggagaaggatggtgcgagctgtgagggggcagctggatgaagctcttctttaggtgaactccgggcactggtgaaaaccactgggctggcagagtgtcgggagctcatggtacttgtgtgggaagcagcatcgtttatactgaaggtgctgttctcccttgtcagaggggtcgagccggcttggctcttgctgtgtatgtctaagctcagggaagactctgttttccggtccaggccgtggctctctgtctccaaagtccgatctgccatggagattacttcactggagctgtgccataggggtgccactttctccttgcctggccctgagcgaggtgacgatgtggcagcccccagcgaggctgtgctgccgtggctggggccataagaggtggtgtcaatgccactgtcagcagaggtgccttgcagatagttatagctgttgagttcggattctgtgcggtccccatcgtaccacttctcatcactatgggcacttgacgcattgctggagagagtattgctactggagtggctcgagtagtg

SEQ ID NO: 316579 - DNA, 435 bp, Homo Sapiens
  misc_feature (305)..(305): n is a, c, g, or t
  misc_feature (323)..(323): n is a, c, g, or t
  misc_feature (344)..(344): n is a, c, g, or t
  misc_feature (384)..(384): n is a, c, g, or t
  misc_feature (391)..(391): n is a, c, g, or t
  misc_feature (409)..(409): n is a, c, g, or t
aaaaaacccgaagagaccataaactccgtgggatttatggacacgagaaagcgtcatcagagcgatggcaatgaaatagcccacaccaggctgcgtgcctcaaccagagacctccgggcatctcctaagccaacctccaagtccaccattgaagaagatctaaagaaactaattgatcttgaaagcccaactgctgaatcacagaagagttttaagttccacgcactctcctctcctcagtctcctttccccagcacccccaccttcacgggcgggcctttgcacaggaacattgttcgggacgnggagcatttaccaatagnccagaggggagtcactttttncacctccgggggcgttcatttctggggaccaagccctggncccaacnacgttcctatttcagttnggcacgttaccctttttgttccccaa

SEQ ID NO: 316580 - DNA, 708 bp, Homo Sapiens
gtgccaaccaagagtgagaagcatagagcggagtgcttgaaagaacacctctggaagcacaagtctcaagcttggctcctgcttttcaaaaccctggtcaagagactgaaggcaaacctgagtcacttaatttctacccgaacctcagtctcctcatctgaaaatgggggtgcctgcctcatcagactgttgtggaaattaaatgggtcaaaacatataatgaagaatctaggagcaaagtaagctctccacaaacattggctagtattattattttctggaaatcttcaagatttgaaacaaaagagaaaacctactcttaagatgggggtggtgtgtgacctttgcgtgctgaatttgggaggatactttaagcctggcagagacagggtaataacacccccagcagctctctgggtacttcctgtagagggagatctaaaaacctcagggttttgaatgcctcgcccacaaaggcaggatacacaagggggacagaagataacgagctttctgggtctccagaatgacagactagcactgagtggccaccacagtgggcatcacatccaaacttcaatcttgacaggttcaattcatttattcatgaacacttattaagggccactgtcacagggttggtgattttcactctctgggagcttatagtcaaaataattgcaacaggaagacatattgatatccttt

SEQ ID NO: 316581 - DNA, 636 bp, Homo Sapiens
  misc_feature (459)..(459): n is a, c, g, or t
  misc_feature (462)..(462): n is a, c, g, or t
  misc_feature (591)..(591): n is a, c, g, or t
ctgcaggattcggcacgagtagctgttagtttttcatgaatgggctatcgctaccatgtgttttgttcatcacaggtgttgccctgcaacgtaaacccaagtgttgggttccctgccacagaagaataaagtaccttattcttctcattttatagtttatgcttaagcacccgtgtccaagactctgaatagtcgactactgaacaatgaacacctggatctgagactaagccggacgatgactgggttaaagctctcccggctcacccctccagacccgctgcccatccctcttccttgctccatgcccaggggctgacttgtaaaggccaagtcatcaagctttcttgccctttggatgttggtcagtggggagccggagagctggagctggggtcggaggaggtagtaggtggaggtgttcttccctgattcccttgcgggatgcctcgggctggnctnccctgagggtcttagctccgagaggggaccctctttttcacacagccttctccacctctggattttgtaactgctcccttctcatcccttcaggattagtggcctcagtgggagtctggctttactagntctgggcgacttgtggttctacataatgtgctcgcacttttgcaa

SEQ ID NO: 316582 - DNA, 596 bp, Homo Sapiens
atttagtggccttttagattatggtgatcttcacctcatctccacctgtctccccacattagacaggggtcttatgcttgctactgtgagggtaaagggttgactgggaaggggtggtagggacatggtaggggcagagctccagccccacttccccaggttttgctgacagtggccggcttttagatgatggtgatcttcacctcattgttctcatcagtctggtacaaaaaaggaatgcaagggctgctgcccaagcctgggtgctcctggaggttctgcatctcatgaagcagttgcatgatctgctgctcagtggggttgtcacagggagaatgcttccccgcctctccttgtgcagactccccactgctggcaaggctcacctcacaaagatctttggagagagggaggcagggtgctgtgggagccctcccctgctcctgcgtgcccactgtgcctgaggactctactcactaccctgggcttgtcagtagccccaagctactggggggcgggggcccctggagtgggctcatcagcagggttctgggcagctgccaggaatctgctatgccacttgttgcagtcgtcca

SEQ ID NO: 316583 - DNA, 662 bp, Homo Sapiens
  misc_feature (137)..(137): n is a, c, g, or t
  misc_feature (144)..(173): n is a, c, g, or t
  misc_feature (251)..(251): n is a, c, g, or t
  misc_feature (253)..(253): n is a, c, g, or t
  misc_feature (553)..(563): n is a, c, g, or t
tcttaaaacctcccgtttaatatcagatgccacacatacgagatcgatgtgcacgtcgggagaaaccacagcacagccaggagtactggcgcacagtgaatacgcttccgtcctttcaaaagcctttcccgaacggnatcttgnnnnnnnnnnnnnnnnnnnnnnnnnnnnnnctgccaggaaaagagaactggctttcagtgttaacgaaatggattctccagaagtatggaaatcaggactgccacgcngnagaacgcacagacaggtccaaacgcaaacgtgccccctgagccccccatcttcagacacgctcatgcacactggaggcgcttccaccgccaggccccgctgacagcacagccggctgctcccttcctggcttgttattttgagcatgtccccggcgtgatgaaatcacggcctgtgtgctcagcccaagtaacttctccatcagcaccagcaccattctcacaggtcacgggaggctttcatggcaactggaagctgtgatgaactcctaacgggttttgatgtcggcaacccagactcnnnnnnnnnnntcaggatgaaagatttccacagatgggcgtggagcggtgaagaggcttctgagacggagggagaggacaaaccagcaggctgggtccaggtgtcctggc

SEQ ID NO: 316584 - DNA, 1101 bp, Homo Sapiens
  misc_feature (812)..(823): n is a, c, g, or t
  misc_feature (930)..(994): n is a, c, g, or t
ttctctttttctctaaccagaagcttggaagaacacaaggaaaaaaaacagatctgttatacatgataaagttgtcaaaaaatgtcttatttctagaaaagaagcttgtcatctgttgagctcttgaaacaattattcaactacctgtatttactaaagagactgttaaaagttcaataaaagaaacaccacaattctattttcttggttgaaagacagaactagagtacctcgtaacaagataccaggaaagcacagaacacaattttcccctaaatgcaggtggtaaccccaacattcataaccaaaaatagagaaacacggaggacaggtactgtactgcaacattcatgggcagaaaaaaatccaggtgacaccatgtctgcatttttctctgatccgaggaatggactgttctaccattcctttatggttagaggttccccccatttcgggaatcagaggaaagtgagcctgacatcttcctgccgctactagcaactgtaacacaatccttatctatagtgttaagagaattaaaagccatggactgaactaggctttgttacatggtgcattactatattagttcctatatatatcatatttatatttatttgaaaaccaaaacaaacaaaaagttgcaagtttccagagtgtgtgacttgactagtattcatgattcggcacaaaaccatctgctccataaccttgtattgctttaaaatgaaggaaatgaaacataaaattacacccagccctttgcaatgacccgcttttccttaaaaacaaaaacaacttgatttctattnnnnnnnnnnnntcccaaaccgaacttagaagttaacatctgacaaggttttgacctttagtattttcagatatttgattgaacgtcagtcctttagaaagatacattcattagaatannnnnnnnnnnnnnnnnnnnnnnnnnnnnnnnnnnnnnnnnnnnnnnnnnnnnnnnnnnnnnnnnaaatcaagggagctacatggtgctcactgcattggccgggggtttgacggaggcgagcagggtggcgggctgggtcccggcaaaggagtctggttgaaaacgtatcc

SEQ ID NO: 316585 - DNA, 1256 bp, Homo Sapiens
gtattggggaagaatttaatgtgtttataaatacagaaaatcaagcattacagcaaccagttttgctcatgatagcaattttaaagacacttcaacaaatacttttatgtaagaggctaattctgcaaaataacattcactttcctatggaataatttcacagtcccagattttaagccagaaaaatgagactcatgctggtaaagcaacctgcaaatcctgcttgttcttgcaactagtatactttaacattgtaaaaggatctttcaaagggggaaagaaggctcttaacggtacctcccagagtaaatccttgccccaaggggctgccctgctatctgcaagactaaaatggtcatgacaaattcaaagctaaaaaaagaaataacctttatcttcagtgtatttgcctggttcaagtggttatctgcagatttataagtaggtaaatagaacaatattgataagatttctgaaaactaaattgtatttggctctggtactaaggagttgagagaataaaacacctatgttaattatcaaccgcaaatgacaactttttgtgaggtttctattctaaggcttactttattcgtgtattccatttagaatcttaaaattttttgacaacttcctttaaacaagaagtaattcacaaatggttaacacagcactaaactaataagataggtcctcacacccatcttgaattatttaagaaagtattgccattgaaacatctttttcctgagaaattcatattgcagaatggcacaagacaatacacattttctccaattttctgcatgaatacaagataggaaaatcagattacaatatattttgtgaggaaaacatgtttcttaaaattgtgctttcagttactctccaaactacaaatttttagagggtgagagccaaatgtaagttaagaagtgatctttaaggcaagagaatgaatacatatggtaaattttggttggtgtttaaacaatttttataggaaattgtttacgagtggagaaactaaggcacagaaacaaccaagctcaggttcaaggttgagtttaatagtataggtagaaatagaatctagggatctgattctcatattagaggataatatctccccaaaggggaaaaataaaattatttcttttggtagataacattgataaatcatttttgaaatatataatatgaatttccttgaaaatctttggcatttctgagagtctttgtaggctgaggttttt

SEQ ID NO: 316586 - DNA, 1850 bp, Homo Sapiens
ttttaacttttgtatgaagaatttaattatctatacacggaactaattcaaaaggttgtattacagttgttaaagccgcagtttatatatttatatattttacattcatatccgtgaaaatactgaagtgcaactgaacgaggaggagaggtcctcgctctctgcaccatgtgaaaggagaaggacctctacacgaccaccagcacagcctcccgacagcgccgggagaacgcgaggggagtgagcattacagagtctttaggaggacagctagattgtgcttgaggctccccctgccccattttctgtgctgtgagcagcaggcatttttattgagagcttccaactagtgtttaaaagacaaacagggcttcagctacagcatatctaacacacaaacggaccatgagctccatttcatattaatctgtagaaattccacagtctagttaaaaaatgtaaacattggaaattaattgcagggagacttctatacattctttcttgtcaagaaaattacttgttcaaaataggtcattccatgaaaagtaactggaataaaacttcatgtaacagagactaaaaagagactgtggatatcgttgatcgtaacgacctcagtggtgttgtctactgattttatgctatgcaaacacgcaaaattaaaaaccccaaacaaaacaccaactcaaccagataaatctgagaccgaacaaaaacacagagtgctttctcatgtggctacaaggtcactgtgcaaaataaaattaaatgcaatatgattagagcatcgtacaaggtaatagctttgccatggaaagaactaatttcttatgtacaggatgtattacatgctcaacaaggtacagctgatacacacaaacaagcacaaacaccttcgctttaattgggctcattctatacgtctttaaaacagagatactgaactcctctgcacttctatggtaagggggaaaagccccaaactgcacaatttagttggtaacactggacaaaatgaaaaaatacatcaagtctcagatttatggacatttggaacaatttttaatagcacatgcagcattccttgatagtgggtctttttgcaaaaccaaaatagccaaagaagtcatttcatttattttgtttattaaaaagctaaaatatatatttaaaaataattttaaaactattgaaagcacctgtgcaaaggtgggggaaagtcaatttgagtaactaggaaagccacaaaaggactttcaagcctgagggggggatggacaacatatgattcattgctggcttgggtccatgtctgtggtcagcttcacataattggatgggaagagccccacttgtccattgacttctcctttccaccagtcagggtcctccttgttgaggacgttgatgatctggcccttgttgaaggccagctcatcgtcattctgcgcggtgtagtcgtacatcccaatcacctggcacactgccgctaatgctgttgacttaggtggctctgttggagtgattttgctcgtcccagggcttagaagctttacataattagctgggaaccagcctatctggcgctttttcccacgtgcttgcagctctccttcccaccatccacctgggttcttttttcggatcaaaatcagctgaccaggggcgagagtgagctgctcggggccggtggcggtgtatgaggcaataacctgggcaatttcaggtttttttcctaaactccctgttttcccagcagttccagagccctctgaatctttaagcctcacatagttagaagggaagactccggccttgtcgcccactgttcctgtccaccagtcacc

SEQ ID NO: 316587 - DNA, 658 bp, Homo Sapiens
  misc_feature (294)..(349): n is a, c, g, or t
  misc_feature (451)..(451): n is a, c, g, or t
  misc_feature (473)..(473): n is a, c, g, or t
  misc_feature (565)..(565): n is a, c, g, or t
cgcaagactttttccctgctattctctttgtcaggagcatctttctcctgttatttatctgagcatttatcactcattattgtgatgctcagctcaaatatcatggtttctgagagtgcttccttgaccctatgagctaaaggagcccccttcccactcattctttccctattcctttcactcctttattttcttcactgtgcttctgtctaaaattatcttacttgtttacatgcttattgtccatttcctctaatgccagtgagggagatggtatcaagaacagagtatcannnnnnnnnnnnnnnnnnnnnnnnnnnnnnnnnnnnnnnnnnnnnnnnnnnnnnnntattttttcattaagagaacagatggtagaaactatgataggttctagaatatgatagagtatttacttattacctaggtctgctgtgacaaattaccacanacttgatggcttaaggcaacanaagccccttccttgcctcttccagcttctggtgacttgtggcattcactgccttgtggtagcattctctgctctgtcttcaatgaccttctnctctttgggtctggtctctaatattcctctgcctttctcttataagggatcatgtgatggcattttagggcccacccaagattatctctcatt

SEQ ID NO: 316588 - DNA, 695 bp, Homo Sapiens
  misc_feature (294)..(349): n is a, c, g, or t
  misc_feature (488)..(488): n is a, c, g, or t
  misc_feature (563)..(563): n is a, c, g, or t
  misc_feature (567)..(567): n is a, c, g, or t
cgcaagactttttccctgctattctctttgtcaggagcatctttctcctgttatttatctgagcatttatcactcattattgtgatgctcagctcaaatatcatggtttctgagagtgcttccttgaccctatgagctaaaggagcccccttcccactcattctttccctattcctttcactcctttattttcttcactgtgcttctgtctaaaattatcttacttgtttacatgcttattgtccatttcctctaatgccagtgagggagatggtatcaagaacagagtatcannnnnnnnnnnnnnnnnnnnnnnnnnnnnnnnnnnnnnnnnnnnnnnnnnnnnnnntattttttcattaagagaacagatggtagaaactatgataggttctagaatatgatagagtatttacttattacctaggtctgctgtgacaaattaccacatacttgatggcttaaggcaacaaaagcccctttcttgncctcttccagcttcttgtgacttttggcattcactggctttgtgtaagcatctttgctctggcttcaatgacctntctnctctttgtgtctggtcctaatattcctcttgctctctcttatacggattcatgtgatggcatttagggccccaccacgggattatctcttcatctcaaggatcttaagtacattctgccaagactctt

SEQ ID NO: 316589 - DNA, 1533 bp, Homo Sapiens
  misc_feature (270)..(291): n is a, c, g, or t
  misc_feature (540)..(566): n is a, c, g, or t
  misc_feature (704)..(712): n is a, c, g, or t
tatttattaataatttaaggttttacattcttataataaattccagctctaaactttacaccacgaacataatggagaatttaactctcccttcttcacaatcaaatgcatttctcttatcaaatgggtacccatgctcacacacacacacttccagttttatacaaatttttttaaaggaaagaaaccaacccaaagtattgcatttgaggtgacactccctgaagaattttatacagaggtaatatactgtttagcacagctgaaggnnnnnnnnnnnnnnnnnnnnnnaaagtgagcccatgatttggtgtctttcccagattatcccctttgcgacaacacaagcaaaaatatttacaaaggtaaggcatagtcaaactacataaagagaaaaaatcatgaggaaaatacatgaaaaagactaaagacttcgccataacaaggtcttagtgataatagtgtccgtaaagatgtcatcagaattggtaaagtcaagcatgctgcaaatataccctttggattagaaaagagcacaannnnnnnnnnnnnnnnnnnnnnnnnnnaagaagtggcatactgctctttctccctttggataatttcttttaagcccatcaaaggaaaaaacaaacacaattcaaacaaacactgtcaagtgattcaagatcaaatatttacaataatcaaatggagtatcagannnnnnnnnccaaactgataccacaaatacagagctgaaatctctctttggctcctctatatgcaaaattgaattagtcttcattgaagacaattatatagtcagttccagatgcaaaaggaaacagccttacaaggccctaaagaacacatgctcctaccctatcatttggttctaccctatgcgcctggaagtcctcgaatcccagtccctgcatgggtaggctgtacacatgggtacagagcaaacctactgcctgtatctatacagcatgtcctgttattccaaagagaatggagcaaatctctctgttagtattaaccaattccgcacttggtaaccttgtctagtacagacagctggtgtcattttgacacctggggccacacacaaagaaagcagcccagctgatgctgccaagagaaactgctgaagggccagacacattccagcaaggaggggtgtggggtctttcacgtagattgcagagagtccacctggtatacattctggttggaaggggtggtaaaatacagctgctgtgctggaaccctgttgtcacatgggctgctgagtcccagcgtcctctcgaagtccagcagctgacccatgaagttgaagttaggggatatgttggattttttcattttgacaatgtcataggcatcgttcatcgacagattgagcttctgcataaggtaagccacagtcacagtgactgagcggctaatgccagccaagcaatgtaccaagacaccacagttcttgccccgggcttcatctatgaaagaaatggcctcagggaaaaactgggacaggttttggctcca

SEQ ID NO: 316590 - DNA, 484 bp, Homo Sapiens
  misc_feature (401)..(401): n is a, c, g, or t
  misc_feature (425)..(425): n is a, c, g, or t
  misc_feature (434)..(442): n is a, c, g, or t
  misc_feature (450)..(450): n is a, c, g, or t
  misc_feature (463)..(463): n is a, c, g, or t
  misc_feature (468)..(468): n is a, c, g, or t
tggagccaaaacctgtcccagtttttccctgaggccatttctttcatagatgaagcccggggcaagaactgtggtgtcttggtacattgcttggctggcattagcgctcagtcactgtgactgtggcttaccttatgcagaagctcaatctgtcgatgaacgatgcctatgacattgtcaaaatgaaaaaatccaacatatcccctaacttcaacttcatggggtcagctgctgggactttcgaggagggacgctggggactcagcaggcccatgttgacaacagggttccaggcacagcaggctgttatttttacccacccctttccaaccaggaatgttttaccagggtggggcttttcttggcaatcttacgtggaaaaggacccccacacccttccnttggtggggatgtgttttgggccnttcaggcannnnnnnnngggcagcntcagtgggggtgnttttntttgtgtgtggggccc

SEQ ID NO: 316591 - DNA, 400 bp, Homo Sapiens
  misc_feature (150)..(158): n is a, c, g, or t
  misc_feature (335)..(335): n is a, c, g, or t
  misc_feature (370)..(370): n is a, c, g, or t
ttgtggcgttttaagaagtggcatactgctctttctccctttggataatttcttttaagcccatcaaaggaaaaaacaaacacaattcaaacaaacactgtcaagtgattcaagatcaaatatttacaataatcaaatggagtatcagannnnnnnnnccaaactgataccacaaatacagagctgaaatctctctttggctcctctatatgcaaaattgaattagtcttcattgaaggacaattatataggtcagttccaggatgccaaaagggaaacagcctttacaagggcccctaaaggaacacatgctccctacccctatcatttggggnccttcccctatgcgctggggggaggtccctcgganttcccaggtccctgcatgggggagggggct

SEQ ID NO: 316592 - DNA, 737 bp, Homo Sapiens
aatggcagttctagcaaattcaatgaaagatgaatggtaataccttttgggaacagagagactaagcaagaagactgcctaggccattcccacaaagagagacaccaaaagatttgtgaacttgtagaaagaggctcaacctcattagcatcaggaaaatgcaaaggacgaggttatcttgcccatcaggttgccaaaaattaacaggactgatcacactcagcgttgctcaggtggagaagagtggctcttgtgtgtggtggtgtagtaatagggtatttctggagagaaatttgagttcccagcaacatttataatctgcatactcttcccacctccaggaatccattgcagagaagtgcttatttatgtgctcagagatgtgtgagcactgaatataaaaacctgggaagaaccatcaacagggaggctacgcatcctgtccacgatcatcctggccaggagccagcctccaattccagactggtcccctgcctccacctggccctgctatggttaacacagcatctagagcgatcctggtgaaggggcttagcttacgcccggcccgtgctcagacccttgctcagagcacaattctagtgtgcacaagggccaaaggctctgcaagtctagctcctgcaatctcctgggcatgtcctgttaactgcccacccctcagccccagccctgtgtgctctgaccacagagactctgcacttgctgctccctcgtgc

SEQ ID NO: 316593 - DNA, 637 bp, Homo Sapiens
  misc_feature (498)..(498): n is a, c, g, or t
cgcggacggaagcctatttgggaagcgagtgagatctgatgtctgaagcgctttaagtttctaagcggggcagtataatagcggggttagcaaacacacggaggtcatttcactcgcgcagccatcccccaccgccaccagtgccgttcatttgctactggcccgcagtcagataatttaaaggcttggagggacgagtcttgctggagccgacgcctacagtaagttgagcggagtgctgtgagccctaataagggagcctgctttcctcccgaagattcgcttttttgggagtggccagagcgttattacagcacagggcccgcttccaacgtttaatcagggtgtgaggaggcccttcgtggttttctgacctgcgaaaagtctgaactactgagttctttctggcttggaccaggacaaggtgttgaacgcctaacttaggtctactaaggtgtagaaatacgcaaggctgcccctagagaacgtttgtctggngaataatgtaagtttttggagcggctctcctgagcatcgctgagcatactaattgatcattactggtacagttacatttgagtcaacaaataatctttgtggctagcataggtaccacaagtcttgtggaatgtgaagc

SEQ ID NO: 316594 - DNA, 685 bp, Homo Sapiens
  misc_feature (596)..(596): n is a, c, g, or t
  misc_feature (599)..(599): n is a, c, g, or t
ctttgactaaccccattttctcctgtagctgttcctgtaacgttttatataaacatagtgcttatcattttgttttatacataaatgtttgtgttgtctccctcagagtccctaacctcagtctattttttaaaattaattttagatcctcagtgcttaatgtaatcctagtatatagtaggtagttaataaatactgcattaaaatgaataaatttattcaatactttccatggaaattatttattcaatttgtagtatcattttgcattcttgatgtcttaatttcgaatggttctctgttaatttctgagattgtttatttcttcaactacattgtcagctttttaaaaatctttattgcctactccccaacataaaacccagaataataggagtattttggttaaccaaagagaattccatagaaaatgtcatgataactgtagctttacttccttcttactacctctccagtatgttaaggagcagtgtataacttgaataatgtgaatttgtcttcaggatctaccacttattaccttgtgaccatggtcataatatcgaaccttctctgatgatgatgatgattattantanctattaatattaatgtgaagattgagtcttgctcttgtggcaggcttgaatgcaatggcacgattttagctaactgcacccttctc

SEQ ID NO: 316595 - DNA, 1007 bp, Homo Sapiens
  misc_feature (111)..(111): n is a, c, g, or t
actagtgttatttccacgctttttgatcactttgcatacttctcctccaaatatgtttacccctttacagggagtgggaagccagcttattcttagcagctagtttaattngtgcaatccttcagccagaggtatcgacgacttcaagtcggcatttctcatggtatgggcagccatcttcgcttcatcgaatgcagcttcacatatatatgaggctgcatcatatgttttgctcagaatcccaagcgcttggtgggtacgactaggatctgagctaagaatctgtgcagcttgactaatgtctgcctgcatagccttagctacaaaggcagtgtgagttgcaatctgcaatgctgatgctgcagcttcatatgctctacagagtgctaagtccaactgctgattgcaagactcagtggaggctgcttgaatacctcctagtggagtggcttcagaaataaaccctaggatttcatcatctacttttggaactgataatatctgtgttgcctccctggaagaaactggatatttgcatgccagtgaaggcagctgcctgtcaacttgctgccattcttcttcaattacttttaaaatagattcatggaagggaaaagatagttctgaggcatctattttatcatgctgtgattgcttagccacttctagacctaaggtagtgagtgaatgagagacaacagttttggcaaaagaagacatcagttcggatccaggtatgttctgaaatgccacaaaggaacttgaatccctttcctccactgacttctcactcagtctagggacttttcttggaggagacaggaattcagtttcttgaaacttagactggatcaattctcttctgtatgttttctacatccagtgggggcatagagttagaagttccaggcaaactacctaccccaccctggaccaacagagaattgacataatctctgattgcctgggcaagtggcggagaaattagttgtgagctctcagactct

SEQ ID NO: 316596 - DNA, 1665 bp, Homo Sapiens
  misc_feature (386)..(386): n is a, c, g, or t
tagactttaaaaaacatgcactatacaatcttttatttccagtttaaaaacaaaatcttaaattactaggagtatatttacaagattaattacattttaagccagcacaccatggatgtacatgaagggccactcggtgtccctcgctgggacaggttgtgtgacctgcccaaggggctccggctcatttgccaaagtcaagacgacgaccaggtcttctgactgctcagcccaaccaataatgaaaaaagtatcagagatgtgtcatatccattttgctaacaagcaattacatgcctttttagtgtttaagagaagccttaattttcctgggatatctccgtaaaatcattctggaatttgattttgaaaattctttaaggaanaacaaaaaagcttgtcacccccatgagacctgctgtctctcatgtctgcagggacaggccttttagaggcagcaaaagggaatactggtctctggaaagtccagacagaactctagcagctccgatggcttgatctcttccagggagccagtgggctaggcccatgctttggttcaaagcgtttggagaacatcttcttgctccttttccggaaacgagataatggacacagagtcccagacgtcatcctttggtgagctgtccttgtccaaggcctctaagatgggctgagttgggtcttttaaatactcttctatctgtaatgggatgcttggtggagtgtgaaaccagtatttaatcaggcctctatatttcaggaccaggaagaaacaggctcctgccagcaccgacagcaacgaaaatgttcccacggagatcaggatgacttgctgaagctcagtggaggcatctgccattgtttcgtagcaagatatgttgcttaaatgcccgactctaaagatgttacttttgttccaaagcagttgtgcctggacttgtaaacagtacactctggagggttttaagttatccaatgaaatggagttgcttctgaaagggcctttgacctgttggattcctcctttttcccagtaatggacataataacaaaaaaaggccgtggaggtatcagcgatgtcaaagggagaggagaacctgatgatgagggagccttctcctggggtcacctcaatgttttctggaggcccgacagtcacattccgatagtgttgaaaccaaggcattgtcacccaggcagaatggagtgctcccagctcagctcgaaggcgtagagtgacattgaaatccattgggaagcctgctgagggactggcggcagtgaagtcacactctgttgctgtgatctgtgtacaattcacccctatggacatgatgtcggccgtgaaccatttactgtcggtgtatttaaactgcacttggtagacaacaggcctcgtgctattgctcagggccactggctcccaactcaggacctgctctgcgttgtacaggcgaatcttcgggtgctgaggagcgggcagctgggaaagagggtctggcggggccgcggcggcggcggcgaagactccgagcagcagcagcagcgaccacagcagcgtcggtcgcatggccccgggcgctcggcggcggctcaggtcgcggccggggccccgctcggggtccgcggagccgctcacgtcgccgcccaaaccgccatccc

SEQ ID NO: 316597 - DNA, 405 bp, Homo Sapiens
tttgcatctaagttcaagtcaaactgaggaggaggactggggttagaagattcaagcaaggcacggcagtaaaaaaggaggcaaggccgaggcaggatataaagaaagattgttctacaagcaaaactcatagaaagccttatttcagtcaaggtacatatactgaatcacctttggactaagtcatagattacaactaattaaatgcataataaattggtcctgacaattacataataaatgctatcaaatgacatttgaaaggttattcttttcaaaaataaaactgcccctattcagctattggtgcagtacctacaccacacatctgtatttgttcaaatggcatttaggctcagagagtttgttcccatttacaattggagctcgtgccgaatcctgcag

SEQ ID NO: 316598 - DNA, 693 bp, Homo Sapiens
  misc_feature (42)..(42): n is a, c, g, or t
  misc_feature (94)..(95): n is a, c, g, or t
  misc_feature (102)..(102): n is a, c, g, or t
  misc_feature (117)..(117): n is a, c, g, or t
  misc_feature (132)..(132): n is a, c, g, or t
actcgggggtctaaaaagcacacaagtctgcttaatcttaanccgtacaccaagtcaaaccctcatcttcagacccaggaaaagatgatatcannaataacntgcattcatgagacncagtgcagaaattanaactgctgaccccctctaatcccagggactgtcacagaagacatgcgtctgtgaaattataaggccaattttgagagataaacttagttcagagtttccatataaattacacattaatattatagtttgatgaaagaccagcatcagggcccctgcgttagataaacaaggttcttatagcattaacccactttttaatttaaaaaaacattaaaaggttatttaaaggtttatggaaattatagcttatggtcaaaatgattaaaatttaatagatttgtttataagatttgagagacagatttaattggcctcatgcagtctctcttagggctcattgtttgggaaattaagtctcctctctcaaaaaataaagatttttgccttttttaaaaaaactttgagttatcactttgactaaatgaatgatttcttttacaatgacctatgagcctatattatcatattaagtattttaaacttctgacatttgacagactttccaaaattaaattgtaaaattagtactttgacttcatatatttattaataataggtcac

SEQ ID NO: 316599 - DNA, 395 bp, Homo Sapiens
cagcaaccaaaaggtgctttttggttttatttgagatcaagattgtgtttccgcttaattactagtttgtggtctatatcatagaagttatttcccaccccattttatcttgacaaccgtgtttgcatttctgtaaaacttctacaacttctggtgtcagaactgtccagaagatggtactgttaactgttatttcctttgatgttttgattttgaagtttagctctcatgcaaatgtttcaggcgtacatacataggcagaaagcaatttttaggtgatttgtctgtttcttggatgaaatataaagcaagctttaatgttctgacttgttcatttgaaatacaagttgaggaaattgtatggacatgcctttgtgaaaccaggaagtatttta

SEQ ID NO: 316600 - DNA, 594 bp, Homo Sapiens
gggttgtgtttggcaaagctttccccaaactattccattcacggtggcattgttccttttgttggtaaagggagacggaaaaaataattctaaaatggggctccattaaaacacacacaaagcaattaaaacctttttcatttttaacttaaaatacttcctggtttcacaaaggcatgtccatacaatttcctcaacattaatcttcagatttctttagttaatgcaaaacattaaaattcacttacttttttgtatttcaaatgaacaagtcagaacattaaagcttgctttatatttcatccaagaaacagacaaatcacctaaaaattgctttctgcctatgtatgtacgcctgaaacatttgcatgagagctaaacttcaaaatcaaaacatcaaaggaaataacagttaacagtaccatcttctgggacagttctggacaccagaagttgtagaagttttacagaaatgcaaacacggttgtcaagataaaatggggtgggaaataacttctatgatatagaccacaaactagtaattaagcggaaacacaatcttgatctcaaataaaaccaaaaagcaccttttgg

SEQ ID NO: 316601 - DNA, 338 bp, Homo Sapiens
  misc_feature (193)..(240): n is a, c, g, or t
ggtggtgtcattttcttgatgtccccatttgttggagagttaaatgggctcttccccttgtgtatcttacctagtgtttactcctgggcacccttaatcttcaaaggtgctaaaatgtctgcccttacaccagaaggatgcctctgataggagggcaaccctgccaattgtgaaatagttggcccttcatggnnnnnnnnnnnnnnnnnnnnnnnnnnnnnnnnnnnnnnnnnnnnnnnngtgtggtattaaataatggactgaattccttatccccttttatcatcccttcaggttttattaatctactggatccataaaattctggaatttgaatt

SEQ ID NO: 316602 - DNA, 666 bp, Homo Sapiens
atcctctggaagtgctgaaatgaactcaagcccaaagtctatgagcacatggttcagctgttccaggggaggtttcagaagcatgttgaaggtggtgagatcaccatgaatgaggtcttcatcgtgcattcgttcagtctccatagtggactgaatatattctcgaacagtcactgagccttcaatttcttccatatataagcagttggaagcatagtccacaataaagacaactggggcagatattccagcgcggcgacagcggaggagcgcccgggcctcctgcaccgtccgccgtctgccaagccgcgcctccagcgccgggtgccggtagcccttggggaagcggtgcttgatcaccgccgcgcggccctggaagcggccacggaacacgcgcgcctcggcaccctgcttcaccagctccaggccgctcaagaagcggctgctccgctcccgggctgcggccagagcctcagcctccggggcgggctcctcgccatcggccggcgtagtagctctagccgccgccatgactgctcggcgcaagagctccaaccgatcagctgtctctgaaaactgtcgcgatgcttcggctcgcttcggaaatcctgggacttcttcggcaatcctgggacttcttcggctacccgaatgcgtccaccccgg

SEQ ID NO: 316603 - DNA, 969 bp, Homo Sapiens
tcgcgtagtgaggcctgggtggcgaattcggcacgaggagagctactacgccggccgatggcgaggagcccgccccggaggctgaggctctggccgcagcccgggagcggagcagccgcttcttgagcggcctggagctggtgaagcagggtgccgaggcgcgcgtgttccgtggccgcttccagggccgcgcggcggtgatcaagcaccgcttccccaagggctaccggcacccggcgctggaggcgcggcttggcagacggcggacggtgcaggaggcccgggcgctcctccgctgtcgccgcgctggaatatctgccccagttgtcttttttgtggactatgcttccaactgcttatatatggaagaaattgaaggctcagtgactgttcgagattatattcagtccactatggagactgaaaaaactccccagggtctctccaacttagccaagacaattgggcaggttttggctcgaatgcacgatgaagacctcattcatggtgatctcaccacctccaacatgctcctgaaaccccccctggaacagctgaacattgtgctcatagactttgggctgagtttcatttcagcacttccagaggataagggagtagacctctatgtcctggagaaggccttcctcagtacccatcccaacactgaaactgtgtttgaagcctttctgaagagctactccacctcctccaaaaaggccaggccagtgctaaaaaaattagatgaagtgcgcctgagaggaagaaagaggtccatggttgggtagaagaatgtgtatgacaaccacacacagtgaagctctttttttcaaagtaaatttgaagaaatgctacaagtatgagatgagatctaagtaaaggtgttaagatatttttaagtggtatgtgatcgtgtcattatcatctgcacttcactcaagagcttactatgtgtctaagtcatgttct

SEQ ID NO: 316604 - DNA, 939 bp, Homo Sapiens
ttctgagtggaagtgccattgtttaatggccgggatcccctttccgttttaaaaatttttttccccctttacttaggttttcattctcattcttggtagcatttctttcaaattttctttggaaaaaaggagtttcaccggggtgtggttttcataccacatttttcttccccacccatgggcctctttttttcttctcagggggcatttcatttaatttttttagcactggcttggcctttttggaggaggtggagtagcttttcagaaaaggcttcaaacacagtttcagtgttgggatgggtactgaggaaggccttctccaggacatagaggtctactcccttatcctctggaagtgctgaaatgaaactcagcccaaagtctatgagcacaatgttcagctgttccagggggggtttcaggagcatgttggaggtggtgagatcaccatgaatgaggtcttcatcgtgcattcgagccaaaacctgcccaattgtcttggctaagttggagagaccctggggagttttttcagtctccatagtggactgaatataatctcgaacagtcactgagccttcaatttcttccatatataagcagttggaagcatagtccacaaaaaagacaactggggcagatattccagcgcggcgacagcggaggagcgcccgggcctcctgcaccgtccgccgtctgccaagccgcgcctccagcgccgggtgccggtagcccttggggaagcggtgcttgatcaccgccgcgcggccctggaagcggccacggaacacgcgcgcctcggcaccctgcttcaccagctccaggccgctcaagaagcggctgctccgctcccgggctgcggccagagcctcagcctccggggcgggctcctcgccatcggccggcgtagtagtctcctcgtccgaattgccaccc

SEQ ID NO: 316605 - DNA, 503 bp, Homo Sapiens
ttaaatcatctttaatgtatttttaataatttttttgcctcatttaccagataaatcatctaaataaatagatgctatacagtctcttaccaatgtcagtacaaaaataaaaccgcgctctacatccactctgactctcccagcacacacacactcagcaaaggcatgtgcttggaatcaactcgtgcccccgacccctcccagatacattcatttagtctgaacaaagctcgaagctcattctgtgcaaaggaagcgctcttgtgctgagacctggtggccgcagctggccactttcgaaagcaaaagctaaaccacctcacagaagcacagcgcctgcccccagaacaaggggacaggaggagcttggcaacgaggtcatcacccgaacagcagtgacagtcctggcattccaggcggctgtgccaggggtggggggtacctcctccggagcccccaccacaaaagggaaaagtgcccacgggtctctacattcaaagcgg

SEQ ID NO: 316606 - DNA, 348 bp, Homo Sapiens
  misc_feature (88)..(88): n is a, c, g, or t
  misc_feature (248)..(257): n is a, c, g, or t
  misc_feature (300)..(308): n is a, c, g, or t
ttgtttagtaatataatgtctcttttccataaagtctttgaaacagttatagttcattgttgctaagacaaagtagcaagcataatanatgcatgagatgagaatgagtttttttaatggcagactaaactctcagatttggcatcacaaggccaaaactcacaagtcacacccagaaggttgatgcaggcttgattgtgggaggttcatgagggattttttttctctattttagcatagcaatgctnnnnnnnnnncccgatggaactcggcacgctgcaagtctataacatttcacannnnnnnnncctttgcaagctcaatctcacatgaagaactcaggagaag

SEQ ID NO: 316607 - DNA, 680 bp, Homo Sapiens
  misc_feature (20)..(20): n is a, c, g, or t
aaaaattaaagaaaaagccnacatcctaccttaagaccttaagaggtttcacatcctaaaagcaatatcctgtactagagccttgactatgagagccaggataataaagacctccattaaataaatccagtaaaacaaaccaaaaccttggtatatagataccttaatcgtgtgttttccttttatgagatcacattgctgaacatatactctagaaagtagggctaactggaggctttttgttgtaaaacattttagtctagtgaactgaaaaatttcttagacatccacttatgctagtccactgccacagaactagttcgcagcctcagtatctagaaatgattattctttcctctttttcatcagtcagatgagcactggtataatgatggggtgaaaagttactgcagctgtgtccaatttaatttttagtgcagtgaggactgtgaatctgtctgaattccaataagtgatggtggctgttgaccaccaaccgtggacaacaccggtcttgggtttagacggggtggcatggaattagcagggcgaataagaggtggtggaggctgatttaaagttggccggggctggatgaaccgagcctgctgctggagtggaggaggctgccggtgaagagccggggcagcaggcagtgttggacgaagaagtggtctcgt

SEQ ID NO: 316608 - DNA, 670 bp, Homo Sapiens
  misc_feature (169)..(185): n is a, c, g, or t
  misc_feature (451)..(468): n is a, c, g, or t
  misc_feature (655)..(655): n is a, c, g, or t
cttttaccactgacagctagacacctagaaaggaactgcaataatatcaaaacaagtactggttgactttctaattagagagcatctgcaacaaaaagtcatttttctggagtggaaaagcttaaaaaaattactgtgaattgtttttgtacagttatcatgaaaagcnnnnnnnnnnnnnnnnngccaaccattgccaatgtcaatcaatcacagtattagcctctgttaatctatttactgttgcttccatatacattcttcaatgcatatgttgctcaaaggtggcaagttgtcctgggttctgtgagtcctgagatggatttaattcttgatgctggtgctagaagtaggtcttcaaatatgggattgttgtcccaaccctgtactgtactcccagtggccaaacttatttatgctgctaaatgaaagaaagaaaaaagcaaattannnnnnnnnnnnnnnnnnctgctgtgacgttttagtcccagactgaattccaaatttgctctattttggttatggaaaaaagactttttgccacttgaacttgagccctctgtgcctctaagaggctgagaatggaagagtttcagataataaagagtgaagttgcctgcaagtaaagaattgagagtgtgtgcaaagcttaatntcttttatctgggcc

SEQ ID NO: 316609 - DNA, 1137 bp, Homo Sapiens
  misc_feature (1)..(1): n is a, c, g, or t
  misc_feature (65)..(65): n is a, c, g, or t
ngtcacaatgcttacactgttttcagcaaacacccttacaagtctatccgcaacctgatcacgcnataaaggattcatcacacagtcgccagaggagaaggaaaaaaaattaacaggcttgtttctgtctctgtttttcgtaagaagatttcgctcgatgccttccatcaggttctcaaaacacaggtgcatggcctgctgcttctccggtggctggctgttcacaatactgtttcttaggtcagaaaaatacttttcattaagcaatatcaagccaagtagtggtcgggacatagaccactggttcctacagtcttcaaagatgatgatgttcagcaccgtggacagcatctgctggatcatctctggatgctgcctgcatgatgtgccagaaagcggtcgctctcctggttccaggggtgtggtcctcttcttggtgctacgtgacagctgcttgaagaggtatgtcacaatgtggtccaggcaggagcagcagcctgtgcataccatggtgtcaagtgcagtaagtccttcagaaatggaagagagaatatacatgatgacgtgaggttccaggcttgcaataaagttcatatggtcctgggtcaggacttccagtagtgaataataagactggctgagcttggggtaatccaagagatcactgtgaggaatagagaggagcagcttgatgaaggtctgcagagcattgtccagggcatcgtctccatagagacgaaagactccgaaattgacgtaactcccactgagagcagccttcagcatggagaagcagatggagatgcccttgagcttcagagcatagacctgatcctttgggacctctcctagtgtcaggatgcgattgccatacattgttatcatcttgctggtttctcggaagagtaagatgccattgggggaagagacatcaaactggagtcgctgggacctattatgaaccaattcagccatcaacttgagtacaggtgtagtacaggctggatcatggtaccagagctcaattgcccgttggagaattggcatataggatggatatatccattcaaagagcatcatgaagctggtcttggcattgaaagcgaaagcgatccctctcaggtctcttactagccc

SEQ ID NO: 316610 - DNA, 447 bp, Homo Sapiens
  misc_feature (45)..(45): n is a, c, g, or t
  misc_feature (423)..(423): n is a, c, g, or t
  misc_feature (437)..(437): n is a, c, g, or t
cattggtaagtgaagttcaaaccaattttaagaacaagaaagganatgaatatcttagaagaaaaggtaaccttgaaatagaagactcagatgaagcttcacaaactatttgtctgatttaccctatacagaaaaggccttcagcctaatatactcctgtatttggaatctgtcgttttatcttgggtagcaatacattaggtcactgcctgaaattctccattccattttcagatgctgtccacggtgctgaacatcatcatctttgaagactgtaggaaccagtggtctatgtcccgaccactacttggcttgatattgcttaatgaaaagtatttttctgacctaagaaacagtattgtgaacagccagccaccggagaagcagcaggccatgcacctgtgttttgagaacctgatgggnaggcatcgtgcganatcttcttga

SEQ ID NO: 316611 - DNA, 756 bp, Homo Sapiens
tttcagtagaaaccattgaagtttattggcggtcacaatgcttacactgtatgcagcaaacacccttacaagtctatccgcaacctgatcacgcaagaaaggattcatcacacagtcgccagaggagaaggaaaaaaatttaacaggcttgtttctgggggtagaggaaagaattaaaattaaaacctatttgatgagtgtcccgtgggcaagagctgaactagagatgtgtacaactagcagcaacatttgtggaaaaagtacaaggcaaatagctgtctccattaattttcctctgtagggttattattttttttaatattcaaaacatttattatggttttcattttataaaaatgtatattttttaagggatgggagaatgttaaatacttcatgctaggtagaccttgttattaagaacccttccactgtagtaacttcctccagttcatacattcatgagtgcagggtacatatataaatatccacacgcatacatccacacacactgcctcgagggctggggaagactaaaatttattggccacacacagcagggcctctgggtgggactcacccacattgctcccagggagagcagtggggctcacttccttctctctgggtctctgccttcacacaggaccaaggaaccctacaacacggtcgttaaatccaacttttaaaaggcaagagggcatctgtctgaggggtgaggggtaaggcaaagtaggggaagaggggtgggagata

SEQ ID NO: 316612 - DNA, 1111 bp, Homo Sapiens
  misc_feature (633)..(633): n is a, c, g, or t
  misc_feature (1000)..(1001): n is a, c, g, or t
  misc_feature (1070)..(1070): n is a, c, g, or t
  misc_feature (1077)..(1077): n is a, c, g, or t
  misc_feature (1084)..(1084): n is a, c, g, or t
ttaatattcaaaacatttattatggttttcattttataaaaatgtatattttttaagggatgggagaatgttaaatacttcatgctaggtagaccttgttattaagaacccttccactgtagtaacttcctccagttcatacattcatgagtgcagggtacatatataaatatccacacgcatacatccacacacactgcctcgagggctggggaagactaaaatttattggccacacacagcagggcctctggtggactcacccacattgctcccaggagagcagtgggctcacttccttctctctggtctctgccttcacacagaccaagaaccctacaacacgtcgttaaatccaacttttaaaagcaagaggcatctgtctgaggatgagggtaagcaaagtaggaaagagggtggagataagaacaccaaacacttttagctggagttatttatcactgcaaggggctagggacccagggcagaatctatacggtccaaggggagggacggtgttctggcatggcttagagttcctaataacaagggttaatacagtaacaggaattgatcatttctgggtgaggacagggcaatacgaaaaaatatacatttggaattttagctttntttttgcctctctactgtgtcactaaatatatctctgcactctcacacatccttgtccagtaaagcttcaggccaccagaatacacattttcttcactcgcatacacaacccctcacatcagcattggtgcactagactctgtaaaaatttttcagtcacactttttgtttttaaacttgagtcaatataaaccttgttcaaaatgttatgaaaaaatgtacatgtttatacaaggcaggttgtggcaggacactaggggttctccccactttggtggccccaggaggagaggctggagtctcagtttgtatctcttatctcctcccaacacccttcccacccagtcccccaggaaccagcagagcnncgccccctagtgagtagtactcaccaccctattccctggggaagcagctagttgacctttgctgccttncccacanccctggngaaaagagccaggatcagccaaggcgg

SEQ ID NO: 316613 - DNA, 694 bp, Homo Sapiens
  misc_feature (27)..(27): n is a, c, g, or t
aaggaaaagggttaaaacatgtattgntcttgtagaaacaaacccctgaatttagtcctataaacaaaatggaccataattgggcctcaaaagatggagttttggattgggaccacctgtgtacacacaacagtgacttccactcgcggtggagtggccattagagtactgaggaaggacagctgttggaaactgtactttaaccagtgcaatttaagctttttttgcttttgttctttagtaataaaatacttctggagggataaaattttcttgcaatggtgtctcatacaaaacacgagtctaaaagggtaagaaaagacggttctaaagcaacaccattagcgtcgtccccactctaggctggtttccacccagagatgtggatgtgggtgtgttcacacgtgggcgtctgggtgagagatgtctgtcaagtccatatgctccatgccacactggacgtatgggaaaaaggttaacagtcaaatattcagttcctgaaatggattacgttgttacttggtcagtgtaatttaaatacaaactccgagccttgagtagtagtattttagaaaacagtagttgtactgattataaacctgcatagagagaaagactattgagatacagtcagaaaagccatctcataaggcacacaagaaaatagacagtaaatgtgaatgtgttactccta

SEQ ID NO: 316614 - DNA, 921 bp, Homo Sapiens
  misc_feature (367)..(367): n is a, c, g, or t
  misc_feature (564)..(564): n is a, c, g, or t
caagatatattgttgggtagcctatttagattttcggcttctggtagggacattttattttttggtaaagccacaatagatagaaatgccataaaaacaaacatgtaaacaaggtatcagaactttggttcactgaaacatctcacacctaaaacacctgaggtacaaaggcaccttgctaggcgctagacagctaactctgctgcagccactttgatcctagccttggggccagggatggcacaggctgaatggaagggctgggacttcagtcacacaggagtcgccctagtatggtctccgtctgctccagacaaacattcatttctccaaaaatcagcctgataggaacatacaaaggaacatnacaaaggtgtctgtcacgttgacatgggctgaaggaccaggaaggggaaggacagaaaaggatgttcagtcaactttctgttgatccacaagggtctcaagaactcctgtcctcgttcatggaaccacttattggagacccacttgcagcccacaagcacagggcaggcagcatgtcttgttcggtagtcaccttcnccgctccgcaagaggttgtaccagaacacagctgtacccttcttaggccaaattgcagcccccagatcagggaagacggtggcaccaccagcttctacatcactcatctggaaatataagacatagagcttgaccctcctacccaaggctctcagagcaattgagccacaaaggacatgacaaggtatatagattgccctcctctcagcatgagtgacactacttggtgtctgctccatggccagccctttagccaagaaaggctcttcccatgcctacttaaccagtgtgattcattagaacagtctccatgtcatgagtgttcaagagttgaggcccacaggagacccacatccg

SEQ ID NO: 316615 - DNA, 650 bp, Homo Sapiens
  misc_feature (500)..(500): n is a, c, g, or t
  misc_feature (576)..(576): n is a, c, g, or t
cagatacccacctcctcatttacacccttgagtgtagttaaactagcagcctaacccaggttctctgaggcttttactaaatgcacttctgtttcaggggatatactttgctctctctgaagccatatggagaaaccagcctgagtgtttgaatgtgtgtgtaaatactttacagtccccataaacttgtttaaagacaggtgggggtaaaagcataaaccgggacagccttgtgggagggcaatttggaagtagctattaaaatttttaatgtgcctaccactaagacccagcagttccacttttagttgtcacgggtaagaaatatattcatatgtttgtgcacaaagaaccaggatgctcatacaatgcttgtttctgcattgctcgaaacagtgaaaaatgggcagcagtcttgatgtccatccacagggggaacaaccagactatgggatctccgatagagcttgtgacagacactctctgagctttcgggagtnctccaagactctggtactcactggtctcagcacatgtcttctcccaacctcatttctattaacttcttttccttcntcctttccttctcacccgtgaaacacagtttacttgaattcggtctttaattcttatgcctattagccagtgac

SEQ ID NO: 316616 - DNA, 685 bp, Homo Sapiens
  misc_feature (44)..(44): n is a, c, g, or t
  misc_feature (102)..(102): n is a, c, g, or t
caaccctctaggttctctgaaactgattgtcttaatctgattcnccatactttaaaaacaaataagcaaaccattccctgaaagatcacccatataagtatntgtgtgcttgtgattagatccagagaaacctagtacaaatgtgcattaccattcaagtgacgtagctgtggatctctggatggctatgtaagctgtgagaaagtccccacttggctttgcaacttgctgcgcaccagaggtgaccatccaggcagtatcaacctgaagagggggtgaatcccagcagctgctcgatgggcttaaaccgccactcgtcagcctccagctcttctaccaaaccagctagtttttccatccgagcaacttgctgatcatgtttcacctgtttaagcgtggatgccacttgatagctaaaaacagattcgcagaggaatctctcagagccatcttctaacatctctccagctcctttggggtaggtgaaaagggctttccgtggtggggcaaggtctgagacactgaaaccagatccagtgacagaacttccactgaccccaccagctgaggaggatgatgatgaagcagccatttcctctctagcagagttcttacttcactcagcggctttagcactttcccctacagccccacccccaggaccagcctgagtggctgcgctcac

SEQ ID NO: 316617 - DNA, 982 bp, Homo Sapiens
  misc_feature (206)..(236): n is a, c, g, or t
tatggagctctttcaaaggatttatttgctacagaattgcttgagtccaccaatgagaagaactcaggatttctgtgtttaaaaggattttgcttactgctttatttttacaagtgctgccatatccaaaaagcacttctttttgccagcatttggcatgtctataagaggttagaaaaagtcagaatctatagaattgatgtctnnnnnnnnnnnnnnnnnnnnnnnnnnnnnnnttcctcatttggataggtcctgagttgaaaacacattcatctgcaaaataacttttttaggtcagaatgctatatttttaaccacagatgctgacattgaccttgactggtaaatatttccaggcaccatatggatgacaggacagacgccattcagttggccaaatctgatatatgccctacttggcttgtgaaaatttttgagtatctcttaaccccaaacctcctggttctctgaaactgattgtcttaatctgattcccaatacttttaaaaacaaataaacaaaacattccctgaaagatcacacatataagtatttgttgcctgtgaatagatacagagaaaccaagtacaaatgtgcattaacaattcagtgacgtagctgtggatctctggatggctatgtaagctgtgagaaagtcccccactggctttgcaacttgctgcgcaccagaggtgaccatccaggcagtatcaacctgaagagggggtgaatcccagcagctgctcgatgggcttaaaccgccactcgtcagcctccagctcttctaccaaaccagctagtttttccatccgagcaacttgctgatcatgtttcacctgtttaagcgtggatgccacttgatagctaaaaacagattcgcagaggaatctctcagagccatctcagcggctttagcactttcccctacagccccacccccaggaccagcctgagtggctgcgctcaccacgacgagccc

SEQ ID NO: 316618 - DNA, 1163 bp, Homo Sapiens
  misc_feature (801)..(1092): n is a, c, g, or t
taccccttggactggtaaaaatattttcccaaggcaaccattatggaatgaccaggaccaagacgcccattccagttggcccaaatctgaatatattgcccctacttgggcttgtgaaaaatttttgagttatcttcttacccccaaaacctcctgggttctctgaaactgattgtcttaatctgattcccaatacttttaaaagcaaataaacaaaacattccctgaaagatcacacatataagtatttgttgcctgtgaatagatacagagaaaccaagtacaaatgtgcattaacaattcagtgacgtagctgtggatctctggatggctatgtaagctgtgagaaagtcccccactggctttgcacttgctgcgcaccagaggtgaccatccaggcagtatcaacctgaagagggggtgaatcccagcagctgctcgatgggcttaaaccgccactcgtcagcctccagctcttctaccaaaccagctagtttttccatccgagcaacttgctgatcatgtttcacctgtttaagcgtggatgccacttgatagctaaaaacagattcgcagaggaatctctcagagccatcttctaacatctctccagctcctttggggtaggtgaaaagggctttccgtggtggggcaaggtctgagacactgaaaccagatccagtgacagaacttccactgaccccaccagctgaggaggatgatgatgaagcagccatttcctctctagcagagttcttacttcacatgcctggctgaaacttatgttttcttttctcttcnnnnnnnnnnnnnnnnnnnnnnnnnnnnnnnnnnnnnnnnnnnnnnnnnnnnnnnnnnnnnnnnnnnnnnnnnnnnnnnnnnnnnnnnnnnnnnnnnnnnnnnnnnnnnnnnnnnnnnnnnnnnnnnnnnnnnnnnnnnnnnnnnnnnnnnnnnnnnnnnnnnnnnnnnnnnnnnnnnnnnnnnnnnnnnnnnnnnnnnnnnnnnnnnnnnnnnnnnnnnnnnnnnnnnnnnnnnnnnnnnnnnnnnnnnnnnnnnnnnnnnnnnnnnnnnnnnnnnnnnnnnnnnnnnnnnacgacgaggaccgcggcgtgttcgcccccggacgcgtgggtcgacgatatcccgaaattccggccggtacc

SEQ ID NO: 316619 - DNA, 645 bp, Homo Sapiens
ataaaaaagatcacacatataagtatttgttgcctgtgaatagatacagagaaaccaagtacaaatgtgcattaacaattcagtgacgtagctgtggatctctggatggctatgtaagctgtgagaaagtcccccactggctttgcacttgctgcgcaccagaggtgaccatccaggcagtatcaacctgaagagggggtgaatcccagcagctgctcgatgggcttaaaccgccactcgtcagcctccagctcttctaccaaaccagctagtttttccatccgagcaacttgctgatcatgtttcacctgtttaagcgtggatgccacttgatagctaaaaacagattcgcagaggaatctctcagagccatcttctaacatctctccagctcctttggggtaggtgaaaagggctttccgtggtggggcaaggtctgagacactgaaaccagatccagtgacagaacttccactgaccccaccagctgaggaggatgatgatgaagcagccatttcctctctagcagagttcttacttcactacagagaaagaaaaacagcaattggcaagtttatggaagtgagagtgacaacatttcattctagctgctgtaagggccagcatacagttttgtaaagactt

SEQ ID NO: 316620 - DNA, 622 bp, Homo Sapiens
  misc_feature (528)..(528): n is a, c, g, or t
  misc_feature (610)..(610): n is a, c, g, or t
ctcagtgggcactggacaacattttgattggtggagcagaaatcaatcccagccaattggtggacacttttgatgatgaaggcacttcccatgaagaaaactggagtttttaccctaatgctgtaaggacagcaggattttgtggcaatccatcctttcacctctattggccaaataaaaagaaggacaagactcacaatgctctctcctcccgagaactcattatacagccaggatacatgatgcagtttaaaattgtggtgggttgtgaagccacttcttgtggtgaccttcattccgtaatgctggaatacactaaggatgcaagatcggattcctggcagctcgtacagacccagtgccttccttcctcttctaacagcattggctgctcccctttccagttccatgaagccaccatctacaactctgtcaacagctcaagctggcgctggatccagaagggagaagaaactgagaagcaaagctgggcaattgaccacgtgtacattggagaagcttgccccnagctctgcagcgggcacggatactgcacgaccggtgccatctgcatctgcgacgagagctttcaaggtgatgactgctctgnttcagtcacgaa

SEQ ID NO: 316621 - DNA, 978 bp, Homo Sapiens
tcaagttattcattattcacaagtatacgggttagtccttgcaaagtatgccatggtcaaatttatcatctttcccgtaggaactaaatctattgcagcagggttcaattttctatcgcctatactttatttgggtaattggtttggctacggttgtctggtagtaagttgaagtgggtttgggctcgtaccgaattcggctcgaggtcaagctgctagttctattgtccacttcttaagccatcaatgattatttattgaagtctgaccagttgtacagaagaggaaatatggcattatcatgcctctcttaatagtactgtggatatgcctatttttccctttctaatcacagtttttcccacttgtatgcttcttcctctgatatcccatcccaacacccaacaggcaaatccacagacctggcaatatgccaggattttgggtcttacaaaatatttactgattgatttataaaatgtttggtgtacatgacatgttagttagaaacaacaaatccaagagctgaagcatgagagttaatacaataaagcaatttgggaggtaagcaatctcagtgtttttatactgataagaatatcttaattcacggttttcaaactagccttagttacctctaagtgtacatcacctcctctcctgtcctatcccatgccctccatctgtgtagtgtttatggcagttcttggctgccttgtatgatgactctgaactccccatggtcctacacaggctgcagtcacagccctggcatggagccaatgtttggatggtcgtgcgtgtaattctgagaaactggtaggaagcccagtgaggccgtgtgatgtggcggaaaggcagggaacaaaagcagaggcaaacctgaccaccgcagatccaggaagacatttctcatgaagcaccccaggccacccctctctaacctaggagagaacagaaaatgtaccttcatttttg

SEQ ID NO: 316622 - DNA, 898 bp, Homo Sapiens
gttcggagagcatagaagtgagcccaggggatatctaagtgcttatgtgaccccgcacctctcgctccttttgatgagccatgttcgcattttggaaggagaaaggcggtgcataagaggcgtctgatgcatgccctgctgacaggcagtcaagggcatccgtcaagtcgatgtagtcaagggccagagctgcaggatcccgggctcggataatgcatctgagatcaacgaaggataccaaaggcaggtgctttttactcatctgctcccactgactccttcgtgcccctacttcctgcttcggacctacttctgatacagtgagggagaaagacaagagtggcaagacagtgtattttctctggaacatagtccatcctcccctcctcacggtctctgcctgagctcagagccccatctgctttcccccagaccctcttgactcggggttgtctgagagcctgcaacattggcatcacctggggcttgttggacatgctgactcttggattccacccaggcctgctgtagcatatcttctactgtaacggaatcgccaggtgatgaatatacacatccaagtgttggtgtgctgccctagaaggtcaggattaacagttggtattttcccgttgtcccaagcacctattctcctttaatccattctgaacatcaactgggttctagtttgaaaacaaaattcagctgtgtctgttctttggcctaaaatccttgcttgggtttcacattgcttttttcctatatatcaacaataaacaagtggaatttgaaatttaaagcacaaaaccatttataatagcatgcaagaaattaaatacttaggtaaatctaacaaaatatgcatgagatttatatgaggaaaacgacaaaactgatt

SEQ ID NO: 316623 - DNA, 640 bp, Homo Sapiens
atacaccagaagaatcagaaaactatgaagatgaggtcaggcagataaaattattaatcctaaaagaatagtggactgttttgtaaatggaactggaagaaaatgatattgaaagagaggttacagaagtgtaagacagacaattcaaaaactgggtcaaataaaattcataaagatgcttaaactatagcagaataaaccagaagccaggggcagagtaatgatgatcctctactatggagatttctgagacattctgtagagactgagagggacaggaggcacagaaattgtacacagaaaaagggcagggtccctggccaagacccactctcaagcccaaagtgagaactttacattcctgttttcctgctcaaatattgccttttccaaaaccacccctggcctaccccaccccgtatcctgtacccataaaaatcccaggctccactggcacagagcagagaagaggagaagcagctgcacgtcggagactgcagtctgagtcggagagcagcagcttgactttagcgggactgcttgatggcagtacttcaggggaagaatacgttcccactccatccccattttccagctctctccctcccgctgagagccactttcaatggcaataaaatcc

SEQ ID NO: 316624 - DNA, 1407 bp, Homo Sapiens
  misc_feature (1031)..(1050): n is a, c, g, or t
attgccctgtggtaggccagaatttgaaaaatgccccctccccactttcaatgaacctaaatctcccagaaccccgtgaatatgatgaagatgagacagtactcctgcaattatgttctatcgcacaatcaaccttaaaatatatctgtgggcttgagctaatatatgcccctaaaacaggaggacgggagagagatatgaagcatgagaaagagcaggaaggctggtttgaagctggaggggaccacataagaaggaatgcaggcagccttgaggtgagagaggggcctccagctgagagccagcaaagaactgaattccgccaacaacctgaatgaacttagaagcagattcttccccagagcctccatgaaggaatgttgtcctgccaacccttatttcagcctttaagaccctgagcagagaatccagccacactgtgccagactcatgagctacagaactgctatgggtattgttttttaaactgctaaatttggggtaatttgtcacacagcaatagaaaactaatacactgcccaagggtaacttttcttaacctaattacatttggcagtttctgcttgggttctgaatgcatttttttcctgctgactagtagtaatattctcctttgcaggcaacctttggaaacctttaatataaatcatactgttttgtattcagtatccagtattgtttgtttggcctaagtcctgttttctaatgtactttctgtctattgacctggcaaacaactgaccaccttaccctgttttcataccttctttgggtgatagttttaatacattcaagggcaccctccctccaccaagggttgtcagctccctccaactgagggctcttttccacttcccaaatacaccagacaaggcctgtggtagggtggtgctgagctctacatcaggcaaccaatatgaatttcttctgcataactggattaaactggcactaaggtgattaagtacacttggggaacaaattcaaagtaaagattaaaaaaaaaaacnnnnnnnnnnnnnnnnnnnngtagacttgagtggccaatatctcttactgccaatcctgcctgctccaggggaccccaacccacatctgtacttgagagaagccccccaaatagtcaaagtgaagacagctcagaataaaccatttttggtgccagtgattttgtctgaatttcatttttatggtattttaatatatgatatataagagtaatgcttaaagacgcaccaaaaattaccaagcaccaaagcatgaagtagaattgtttttataacctaaacttctgatcggtattgattaaaaagaacataaaatagtaagtcctcagagacagtgcaggtatttatagttaaggctgattgattcttcctaaccttg

SEQ ID NO: 316625 - DNA, 413 bp, Homo Sapiens
  misc_feature (79)..(89): n is a, c, g, or t
  misc_feature (91)..(110): n is a, c, g, or t
aatttcttctgcataactggattaaactggcactaaggtgattaagtacacttggggaacaaattcacagtaaagattnnnnnnnnnnncnnnnnnnnnnnnnnnnnnnngtagacttgagtggccaatatctcttactgccaatcctgcctgctccaggggaccccaacccacatctgtacttggtgccagtgattttgtctgaatttcatttttatggtattttaatatatgatatataagagtaatgcttaaagacgcaccaaaaattaccaagcaccaaagcatgaagtagaattgtttttataacctaaacttctgatcggtattgattaaaaagaacataaaatagtaagtcctcagagacagtgcaggtatttatagttaaggctgattgattcttcctaaccttg

SEQ ID NO: 316626 - DNA, 811 bp, Homo Sapiens
  misc_feature (26)..(26): n is a, c, g, or t
  misc_feature (32)..(32): n is a, c, g, or t
ttcccccctgtctcttgcaccctggntcaagntcacgcaaggcttttgagtcagcttgcagggtcacagtggaaataggaaaaacatgctggttacaacagttcagctgctgttgtggtaatatcctgtacttgaaagacttgaaaggaaagccctgcaaaatgtctccaggatggtggcagttagatttttgatgttacttttgaagtccatttttcactcttccagaggcacacacacacagtagacttgagtggccaatatctcttactgccattcctgcttgttccaggggaccccaacccacatctgtatttgagagaagccccccaaatagtcaaagtgaagacagctcagaataaaccatttttggtgccagtgattttgtctgaatttcatttttatggtattttaatatatgatatataagagtaatgcttaaagacgcaccaaaaattaccaagcaccaaagcatgaagtagaattgtttttataacctaaacttctgatcggtattgattaaaaagaacataaaatagtaagtcctcagagacagtgcaggtatttatagttaaggctgattgattcttcctaaccttgcccacaagcttgaagtaatacagactgtgtgggatgtatgatgaccactttcctaatcctgtgaagtatcaaagaagttaggaatgaattaagaaccccagagccactgccttatactcctggttaccaacagtatcaattctgggtggtttgtttttagagcacatatgtacaagactctatgtaatcagtatataaatatttggccgcc

SEQ ID NO: 316627 - DNA, 795 bp, Homo Sapiens
ttaagttacctctcccggcaacgatgaaacatactacacaaaaatattattattgcttctctgaatcaaatttactattttatcaagctgcctgagtgtagagcttcaagactttacccactgatctgatgcgagaaacaaaggcaaaaagaagtcacagaagtctttagggttttaagcttgagtcattgggatccagggagtccatactactaattaagaaaaggaagtcaggatattctgtggagtggataaaagtttaattgaaaatgtatggtgggtgagatgattaacaagttatcttacaatagcagttctcaatcaggggtgattttgcctcgcagtggacattgggcagtgtctggagacgtttttggttgtcacagcacaggggagggattgccactggtgtctagtggataaaggctgagatgttgctaaacagctcacggccttatgacaaagaattatcccatccaaaatgtcaacagtggtgaggctgagaaacccagtattacagtatggggtgaaaaaagatacttttaggatgtttatattaagtccgcattggactttaataatctaagtttactctctgtttagcaagtatttaatcagcatccaatatgtagcaggctgtttaccaggaacacgaagaggaataagatatagtatgagctttctaaaaactcagcctatcaggggaaatgaatgcgtaaaagtttctgaataaaagcttgcggccaggcgcggtggctcacgcctgctcgtgcgaatcctgcagaccgggggatc

SEQ ID NO: 316628 - DNA, 637 bp, Homo Sapiens
  misc_feature (270)..(523): n is a, c, g, or t
ctttgactatacagtcatcttagtgtgaagtggtatctcactggagttttgttctgcatttcctgatgaatgatgatattgagtatctttttgtatgcctgttggccatgttaggagttttaatgtattgtatttacatccaaaaatcgtgatttttaaatgtcatgctacaacatgaaaggatacaattgagatttgctttaaaatatgaagcaaaaaaataagtaaatttattattatcattactattactattacttggaaatagannnnnnnnnnnnnnnnnnnnnnnnnnnnnnnnnnnnnnnnnnnnnnnnnnnnnnnnnnnnnnnnnnnnnnnnnnnnnnnnnnnnnnnnnnnnnnnnnnnnnnnnnnnnnnnnnnnnnnnnnnnnnnnnnnnnnnnnnnnnnnnnnnnnnnnnnnnnnnnnnnnnnnnnnnnnnnnnnnnnnnnnnnnnnnnnnnnnnnnnnnnnnnnnnnnnnnnnnnnnnnnnnnnnnnnnnnnnnnnnnnnnnnnnnnnnnntgggccaccacacccagccagtaaattttttaaaagggaaaaaaagaggatagaagaaaggaatggggcaaaatcttaaccacttgaacttgatgatggatattatggggtgtc

SEQ ID NO: 316629 - DNA, 733 bp, Homo Sapiens
  misc_feature (565)..(565): n is a, c, g, or t
aagatactgaatttctgtaagtttgttattgagtttttaaatttttcatagctctcattctccagtgcttattcctttcatgttctcttctcgatattcaatttttttgaattgatgtttaaagttaagtcattcaaattgaatatgtaagtaaaacacattttattagtctgagctatataataatattttactctgaagctcactctttctttctttgatactttctttattctttttctctattacctgttaatttcagttggaattccaaggcaccttagaaacaagacatgcctagaaaatttgactatgtgtccacaaggctggaactgaatcaataataattgcttctttcaatctgaacatgaaacaacgtggatcaatggctgagaaaactgcagaagttatggatctctggccaggctcaactctcagaatgaaatggttagatttcttctttgcaatattaaactcatttaatagctactaaaagacaggcacacttctagggtgtaatacattagcataccaaagtatcagagatctttgcccgtcgtcgagntgacatgcctagagaagagataagcaatgaacaagtatcttactaattatgaatttatcaaatgcgatagcagttggaacgtgtatgcattggcagcatttaagcaagttgttgagccttcaaaggcctattttagagtgaactttcacgcatggaaatgccttgggc

SEQ ID NO: 316630 - DNA, 940 bp, Homo Sapiens
  misc_feature (105)..(105): n is a, c, g, or t
ggcagccccagaacgccacaggtccacagtggctcctgggccctctggcccacgagacaatgcccagctcacgtgcgttggtcacttggctcctggctctgaganggcgggtgtcttctgccacttgggatttgcctgcaagcacctgctggaccctgtgcatccccaggcaaagccggtggacctggtctgagaagacagagcgaaaccaccgaggctctttacactcgaaggccttgccaaaggacagcagcaccttgttgtccaaaaagcggcgccagagcagcatttcctcctcaaaggtgcccttgggcaggtactttctcaagtcaacccagatgaagaagccagccccacgactcaagaaggggatccccaatgccttaagctcttctgagacataggtgtggacagccttgagccgggcatggttttgagtggggtagtatctggtcctcattttcctcatcacggtcccggagcagctgtgccatctggtactggaccaagccactgaggccgtggtagcggcagagggaagccacggcagtggccacatcctggttttctgtgtacagcgtgccaaagcggagcccagacatcccgaagtccttgctggttgcccacatcacatgggtcctctgggggtcagggagcctttccaggcttaggacactgtggtacccaacagacttctcaaacacggacagcatgtagacctcatccacaatcacatgcagcctgtgcctggagtgaggcaggggtggggaggagagacttagtgtgtagggcagatgcgtcccacagggtggggaggtaatacatcagaaatccagaggggccggggtctagcccggggttaccaaacttgtttttccaagaacaccattctttcttctgtttttttcaaacagaaagccacacatacagagcaggtgac

SEQ ID NO: 316631 - DNA, 1109 bp, Homo Sapiens
  misc_feature (33)..(33): n is a, c, g, or t
  misc_feature (186)..(199): n is a, c, g, or t
  misc_feature (476)..(493): n is a, c, g, or t
gaaaagaatggcggtggggtctctggagaaccncgggaaaaaacaaaagtctccccccccttttggtaacgcggtggtggttctttttctgttttttccacaaggctagctcaggattttcttgcgcgcgggaaaagaaaaaggcgatttcttcaaacgagagagttgctcgtggtggctcccacnnnnnnnnnnnnnnggccccggctcccttttgggggcggggtttaaaattttcccccggggtttactggcacagcgcggattccacttaaattcccaagggtttagcccctgggcctttattggggaaaattaaattggggacccccccctaatagggggaggacccgggccagattcctcccccccttttgttacaagaaaaagccggggtccaggaaaccaggctatggcccatgggcccatttccattcccttctttctcgcgcacccgccaatagatgccttcgagnnnnnnnnnnnnnnnnnngaaggtgatctaaaaatactgtttatttacagtacatccctcttaggggcaagtctctgactggttctggacctgccacagttcacttggccatgtcgatcaggctctgcagtgaggtgggcacccacgtcttctcgccctggacaaagaccactccccggtcgatgtagatcacaatgcggccaaaggtgtagagctgcttcccttcgtgtcgcttcccaatgacgggcatgaagacaatgttgtgctcctcagccttggtctcaatgaggtccttaaagttcatgggcacagagctagcggccacgccaatgcccctctgagccatgttctcagcctcccgcctctcctgcatggcctcgtactggaagtccttcctccgctccgtgtgggtgagataggcaatgttctcccgtgctcctggctgcatgtaggcaccaacgttggaggacaccgcccggttcatgatatcaagtgcctcattaaatttgtccttgacagatggatgtgccagcacttggtctgagaacatcgacttccaacccaggtaccacttggtgatctcctcataatttgggctgttactgagcctcgtgccgaattcgccacccaggcc

SEQ ID NO: 316632 - DNA, 644 bp, Homo Sapiens
gaagctgttccaagcactttatttgctttatctcagctcctctcagcaaccctatggggtaggggatatggtatccctgttgtgtagacatggaagctgaggctcagagagtttacatgcaagggcactttagctaccaggctgactccaaaatccatattcataagtgctagactgtttagctactataaatccctgtaaagtagtgtcactagcctgtaggaccaggatcaaaacaaaacaaatggccacttcagaaatcttgccttcatttgttgccacgatggatgcaagtaatttttctttttggcaggtgctgtgctcttggctcagtaacagcccaaattatgaggagatcaccaagtggtacctgggttggaagtcgatgttctcagaccaagtgctggcacatccatctgtcaaggacaaatttaatgaggcacttgatatcatgaaccgggcggtgtcctccaacgttggtaagtgaggattcccattttggatgtcctggccccaagtttcagattttacacatgtaaatgacacagaatcagagttttctggttcctgtaggcagcctaaaccttaggtcacacttttgcacatagcaacagactctcaccctgctgactggggtacatggt

SEQ ID NO: 316633 - DNA, 358 bp, Homo Sapiens
ggacagagcacagccatgagcatcatcctagaaatccttctgcttctgatcaccatcatctactcctacttggagtcgttggtgaagtttttcattcctcagaggagaaaatctgtggctgtggagattgttctcattactggagctgggcatggaataggcaggcagactacttatgaatttgcaaaacgacagagcatattggttctgtgggatattaataagcgcggtgtggaggaaactgcagctgagtgccggatctatcgctctctaaatcaggtgaagaaagaagtgggtgatgtaacaatcgtggtgaataatgctgggacagtatatccagccgatcttctcagcacca

SEQ ID NO: 316634 - DNA, 726 bp, Homo Sapiens
aatattttcagttttatttgttaccatcgatttccttgtagaaagcatagaatttctaccacttaacaatattgtaataggaataatgtatcaaatcacagatatgtttgttaaacgaaaatgctgtcatgcagatgcattcatgaacaggcctaaactgcaagtgctaatgtccatttattatgggtggatttcgcattttacaaacaaaaccttttatttatgggaagaggttcagcgtttcgcaatgtctttagtatgtatttcccgataccggaggggcagaattccccctctgtccatcaagtgacatctgcttgcagctgtagggaattttgcagggtactcttttccagagataaataatataaagatataacacataagaggtaattccctggtaaccatatatgtcccccaatcttgtcttgtcaaactataatttgcttatggttcctcataacattcattgtttcttgtccctttactacttcccctctccttcttttcagttgctcttatcaggaatcctacacaagcatctacctaaacactactatttcaagggccaggccacctcctatctctttactaaaggacaaagtcttcccttactattctactctacagtaatatatgctctggccttctttagcctttatcatgcatttggcactaatgtttgtgttgcttaatactgctaattagcttttcacaggttttgac

SEQ ID NO: 316635 - DNA, 748 bp, Homo Sapiens
  misc_feature (83)..(83): n is a, c, g, or t
  misc_feature (140)..(140): n is a, c, g, or t
  misc_feature (152)..(153): n is a, c, g, or t
  misc_feature (164)..(172): n is a, c, g, or t
aaggttccactggggacatgaggttggcctttcatggcaagctgacaatgaaagcatagccttcttaaatttctcttcacttntgttagagagtcctgtgaaagcaggtcatattttgaatttgcaataaaaaatcaaancaaagatcatcnnagtattctgtnnnnnnnnnccctcagtcctaaacttagactatatttcttagagcaaatggatcagaagaagaaacacatggcaatttcaaatgcatggaaatcccccttttcaatttggtcaaattctcattgctcagaaaattcactattaaaagcaatggacacactcattagaacaaacgagataccagtatggaaagggatgtggtcacagaggcagtagagtctctggccccactcagtagctggggaatccccccagcacagcgtcctagggctgggtgtcaggctgttcaacagatttctgaagaatcactcgaggcgtgtgaccagcccttgtgaaagagccagtgtgtgatggctgagataattacatagggccacaagccagtgactgccaaccagccctactctggcttatgaaccaggaaaggagcagtagtgagttcagatttttgactcataggaaaatggcaggcagatctcactgggtaggtcctggaaagacaaaggtcattccctttgaaggacagtccagagaaagaggcctgtaaaatacgcatggcgatgccctcacgtgcctcacacccttg

SEQ ID NO: 316636 - DNA, 420 bp, Homo Sapiens
caaagtctcattgctcagaaatttcactattaaaagcaatggacacactcattagaccaaacgagataccagtatggaaagggatgtggtcacagaggcagtagagtctctggccccactcagtagctggggaatccccccagcacagcgtcctagggctgggtgtcaggctgttcaacagatttctgaagaatcactcgaggcgtgtgaccagcccttgtgaaagagccagtgtgtgatggctgagataattacatagggccacaagccagtgactgccaactgactcataggaaaatggcaggcagatctcactgggtaggtcctggaaagacaaaggtcattccctttgaaggacagtccagagaaagaggcctgtaaaatacgcatggcgatgccctcacgtgcctcacacccttg

SEQ ID NO: 316637 - DNA, 775 bp, Homo Sapiens
  misc_feature (122)..(148): n is a, c, g, or t
  misc_feature (160)..(410): n is a, c, g, or t
gaaaggtcttgaagtgttgggaaactattgtgctcatgatggcaaactgaagtcttacacaggatgaatttttgcttgaaagcttgaattgaatcactggcaacaaatactgatatagctgnnnnnnnnnnnnnnnnnnnnnnnnnnngaggtggagttnnnnnnnnnnnnnnnnnnnnnnnnnnnnnnnnnnnnnnnnnnnnnnnnnnnnnnnnnnnnnnnnnnnnnnnnnnnnnnnnnnnnnnnnnnnnnnnnnnnnnnnnnnnnnnnnnnnnnnnnnnnnnnnnnnnnnnnnnnnnnnnnnnnnnnnnnnnnnnnnnnnnnnnnnnnnnnnnnnnnnnnnnnnnnnnnnnnnnnnnnnnnnnnnnnnnnnnnnnnnnnnnnnnnnnnnnnnnnnnnnnnnnnnnnnngagtgagccactgtgcccagccaatagctgatttctttaaagtgactaagtctcttgatttattttctagagaatgttaaatagactagtctgtatggccacagttgtctttcagagattattttagataaaaataatgttccataaaaaaagtgatggttcagctcagaactaaaacaatcatacaaatacttttcctcaaggcaactatgatactttggtttccaaactaaaatgctttatgcatacttcccatttgatcacaaagaatatattttttaaatgtactcaagggccaagatttaataaaattaataatttttactgcttcgccaaaagcatttttcagtgaaaatagaattttt

SEQ ID NO: 316638 - DNA, 716 bp, Homo Sapiens
  misc_feature (306)..(339): n is a, c, g, or t
  misc_feature (388)..(554): n is a, c, g, or t
  misc_feature (574)..(593): n is a, c, g, or t
gggaacataaaaatattaatttattaatcgtggccttaggcattaaagatatatccttgtgtcatgtgaagtagcataagcatttagttggaaacaaagtatcatagtgcttgagaaaagtattgtaagatgtttaagtctgagctgaaccatcacttttttatggatcattatttttatctagaataatctctgaaagcaacttgtggccatacagactagtctatttagcattctctagatattattcaagaggcttagtcactttaaagaatcaagctattggctgggcacagtggctcactnnnnnnnnnnnnnnnnnnnnnnnnnnnnnnnnnntcagatcacctgaggtcagaagtgcaagacaggcctggccacattggtnnnnnnnnnnnnnnnnnnnnnnnnnnnnnnnnnnnnnnnnnnnnnnnnnnnnnnnnnnnnnnnnnnnnnnnnnnnnnnnnnnnnnnnnnnnnnnnnnnnnnnnnnnnnnnnnnnnnnnnnnnnnnnnnnnnnnnnnnnnnnnnnnnnnnnnnnnnnnnnnnnnnnnntgaaactccacctcaaagcnnnnnnnnnnnnnnnnnnnntccagctatatcagtatttgttgccagtgattcaattcaagctttcaagcaaaaattcatcctgtgtaagacttcagtttgccatcatgagcacaatagtttcccaacacttcaagacctttc

SEQ ID NO: 316639 - DNA, 737 bp, Homo Sapiens
  misc_feature (26)..(26): n is a, c, g, or t
  misc_feature (38)..(38): n is a, c, g, or t
  misc_feature (79)..(79): n is a, c, g, or t
  misc_feature (142)..(142): n is a, c, g, or t
  misc_feature (181)..(182): n is a, c, g, or t
  misc_feature (211)..(211): n is a, c, g, or t
  misc_feature (328)..(578): n is a, c, g, or t
  misc_feature (590)..(616): n is a, c, g, or t
gcgaagcagtaaaatttataatttanttaaatcttggnccttgaggacatttaaaaaatatattcttgtgatcaaaatnggaagtatgcataaagcattttagttggaaaccaaagtatcatagttgcttgagaaaagtatntgtatgattgtttagttctgagctgaaccatcacttttnntatggaacattatttttatctaaataatnctctgaaagacaactgtggccatacagactagtctatttacattctctagaaattaaatcaagagacttagtcactttaaagaatccagctattggctgggcacagtggctcactcnnnnnnnnnnnnnnnnnnnnnnnnnnnnnnnnnnnnnnnnnnnnnnnnnnnnnnnnnnnnnnnnnnnnnnnnnnnnnnnnnnnnnnnnnnnnnnnnnnnnnnnnnnnnnnnnnnnnnnnnnnnnnnnnnnnnnnnnnnnnnnnnnnnnnnnnnnnnnnnnnnnnnnnnnnnnnnnnnnnnnnnnnnnnnnnnnnnnnnnnnnnnnnnnnnnnnnnnnnnnnnnnnnnnnnnnnnnnnnnnnnnnnnnnnnnaactccacctcnnnnnnnnnnnnnnnnnnnnnnnnnnncagctatatcagtatttgttgccagtgattcaattcaagctttcaagcaaaaattcatcctgtgtaagacttcagtttgccatcatgagcacaatagtttcccaacacttcaagacctttc

SEQ ID NO: 316640 - DNA, 696 bp, Homo Sapiens
gggccagagccaggtaaaggccaatctggccaatgtcaggcatggggagtcatccggaatctgtgagccaaagaggtggtggccctgctttcaggggaggccttcatctgtgcctggagtgacttctggattgtagcctttcagattaaagattcctcaaccctatcatgggctgctttgaggaccctccttcagccgcttccagtatagccgcagtatccactgcttggggaagtcagattggtggtcagctggaggggtggcttacatgctgcaggaggagggtgtccgacaggggcacgtccgctcgccacggaaatgtggggaccctcactccctggcagcgtcttccccattcagaatgcacctgtacctcagcaaaaagaatcgctgcgcgtgttctggcgaatccccaaacccccattgccccttggatgtccacccttgagtggagtataaggcgtgcgggtgacctacatcagaaacagggtgtgatcatttcagttcatcacatctggggcctctggtcctggcacaagctcaatagctagtgcctgacagcattcaagtagatcacatgacacccaggaggggttgtgaggactctggggaagaaaagccatctccagtggggcagggaagccttgaggtctgagaggtaggtatgaggatgctaggggtatgacccaccttgtg

SEQ ID NO: 316641 - DNA, 718 bp, Homo Sapiens
  misc_feature (115)..(115): n is a, c, g, or t
  misc_feature (119)..(119): n is a, c, g, or t
  misc_feature (121)..(121): n is a, c, g, or t
  misc_feature (132)..(132): n is a, c, g, or t
  misc_feature (182)..(182): n is a, c, g, or t
  misc_feature (184)..(184): n is a, c, g, or t
  misc_feature (199)..(200): n is a, c, g, or t
  misc_feature (211)..(211): n is a, c, g, or t
  misc_feature (239)..(239): n is a, c, g, or t
ccttagaaaggaaaaagcatctacccatcaatcttccttccccagggaaaaaaattacccacgtacttaatgagcctttaaccaaaggctttccaattattggacagattcactnttcntnccaaggccttnctggaccattgtcaaggcttggccttagccaccagaattagagggtcaangngggtcaagagtacgnnaaggtcagcangggaccctcaatactgattcttctctgnctgaagtagggcagaaagcagacatagctcaaatactgagcagccaaaaaaagaagaagatggcgagaaccagaaagagggaatcctgccagctggaggctgggtgaccctgtcccagatccacacctgtaccccggcggaaaggctcatgggcattgaagacggtggtgaaaaagccaaagggaaaagcaccaacaccaaatgagaagtggaagcccccggtatcaccaaatggctggaataatctgggatcctggggcttctggctccctcgcccataaagcgggacaaccttctctctgctgatcccagctttacatactggacactcttgccgttctggccgtgtctccagccactgatgaagacatggccaacagtacaggtggccacacacactgaccacagcttcccgagcagtctccaaacatatattacattcgaaggtcgcgcccgccccgcaccgctcgcgatttggc

SEQ ID NO: 316642 - DNA, 1520 bp, Homo Sapiens
  misc_feature (72)..(81): n is a, c, g, or t
  misc_feature (318)..(346): n is a, c, g, or t
  misc_feature (351)..(352): n is a, c, g, or t
  misc_feature (354)..(390): n is a, c, g, or t
gtttccacagcccgcaggattccttgccgagaaaaagaaggattttctaagaagggaccctttggggcgccnnnnnnnnnngcccccctcattttaggggggggtaaaatttcccggggacttgccacgcgggtttcattttaaagccggggtgagcgccggggtttttggaaaattaaattcggcctcccctatttggggggcccggcaagttttttcccctttggtaccagaaaaacggggttccgggaaaccactatgaccctggggccctttcaatagcttttttttcgcgccccggcaaagatccttgagggnnnnnnnnnnnnnnnnnnnnnnnnnnnnnttttnntnnnnnnnnnnnnnnnnnnnnnnnnnnnnnnnnnnnnntatatttcaccttttttattgaatttgtattaaaggaggtagtgagggggcggaagcacttaagagtcagaatccatattagactctggggagtgaaaaattaaattaaatcagtaagatggggagtgggggaagagtcagagggaactttgcccacctttgaagatcaaatcaagaaatcagggaaagcaaagacttaggagaggagaaagacattctctcaatccatcctccttccccagggcagagaattaaacaacgttactgagtgagcctctgagcagaaggctctcccatctatgcacagacttcactcctcctccccaggccttcctggacaatgtccagggctggccttagccaacagaaatagaggggtcaagggggtccaggagtacggaagggtcagcagggaccctcaatactgattcttctctggctggaggtgggcaggaagcagacatagctcaaatactgagcagccaaaaaaagaagaagatggcgagaaacaggaagagggaatcctgccagctggaggctgggtgaccctgtcccagatccacacctgtaccccggcggaaaggctcatgggcattgaagacggtggtgaaaaagccaaagggaaaagcaccaacaccaaatgagaagtggaagcccccggtatcaccaaatggctggaatccccctctgctctccggagctggtctctggccctgggggcggggtggagtttttaatctgggatcctggggcttctggctccctcgcccataaagcgggacaaccttctctctgctgatcccagctttacatactggacactcttgccgttctggccgtgtctccagccactgatgaagacatggccaacagtacaggtggccacacacactgaccacagcttcccgagcagtctccaaacatatattacattcgaaggtcgcgcccgccccgccccgctcgcgatttggcccttcggggcccccgtcctcctcctccgctgctgccatggccggttttgtttcgccccacgtacccttcagtccccccaaatacacatacacacgccccaacaaaccagaaaccacctcctgcccacgatcgttgggcaggcttcaaggtttcctccc

SEQ ID NO: 316643 - DNA, 703 bp, Homo Sapiens
  misc_feature (517)..(517): n is a, c, g, or t
  misc_feature (566)..(566): n is a, c, g, or t
  misc_feature (586)..(586): n is a, c, g, or t
  misc_feature (599)..(599): n is a, c, g, or t
  misc_feature (655)..(655): n is a, c, g, or t
  misc_feature (663)..(663): n is a, c, g, or t
ttcaggcttttatagttgtaatacagaaattatgcccggtataaataattggacctctgaaatacagatgttcacttcagtaagagtaatcagattaagcagcctcaacctgactaatcaagctctcaataagaactttaatgatctctgtgaaaatttgctcaagagcctgtactttaaactacgatctatgatcccctgctgcctttgccatgtaaattttacagtatctctgcctgaagatgaattaattcaggttacagtcacggcagtcgcaatcacttttgacaaaaatcaggctttacaaaccacataaacccctgttgaaaagtcattgcaaagagcctcaacagataatgaagaacttttacaatttccactggaactgtgttcagattcacttccttctcatccttttccaccagctaaagccatgacagttgaaaaagcaagtccagtgggtgatggaaatttccggaatcgttctgcttcaccttgtgcaaattccacagttggngttgttaagatgacacctctttcttttattcctggagcatctcttcggnaggaaggaggagtcagtggntttctccatgctntaattgctgaagtgtttgcaatggtgagagctcatgttgctgcattagggaggaantgcctgtngcttctacataatgaagcaatgtgcttcatggagaatcca

SEQ ID NO: 316644 - DNA, 1418 bp, Homo Sapiens
  misc_feature (84)..(84): n is a, c, g, or t
  misc_feature (90)..(90): n is a, c, g, or t
  misc_feature (107)..(108): n is a, c, g, or t
  misc_feature (129)..(129): n is a, c, g, or t
  misc_feature (184)..(184): n is a, c, g, or t
  misc_feature (195)..(195): n is a, c, g, or t
  misc_feature (734)..(745): n is a, c, g, or t
  misc_feature (1379)..(1379): n is a, c, g, or t
gattttacaaggggggggcacccccaccaggcccccaagaagaaaaatttttgggtaatttaagccaggacatgggggtttccnctgtanttagcccagggatgttnntcaaatttccttgacctttgngattttaccctgccttgggccttcccaaagagcctgggaattacaaggcacgaancccaccggcanccttggccaatcagcaataaatttctttctctatttacccccatttctttattaattcacactttcaaaaaaagcatttcctggaagtatttctaagtgtgatggtttgtaatatataacaaatgaaaagatgtaattagattataagaaaagcatctgcctgtaaaatatgaaggaagaaaggaagtaatggactcctcatggggcccacagggaaccaggaaggacccagaaagggtgccgggcccttcccctgtgctgcagctacagggccccatttcttcagaaggagcgttctgggtattccatcgtcccctggaagtctggcaggtacaaaccccctcaacactccagggagggagggaatccacaggaagccatgaactgctggtttcagcggggagaggtagtgctgacagctctgataatctacctgaagccctttgtgaggaatactgtaaaactgcagtaagctgtcaatattcgacattaagtcatcatttcagaagagaagcctgtttgaagtaggaaaggtttgnnnnnnnnnnnngatgccgtggttcttgcaagtctgccttgtttggtaccagcacagagcatcactgtcactaagtgtgccgggggagaatgctgagctgcttggcggtgtgtgcgcgcctgtgcgaggccaggtctcacagtcccagagacttctggacgatctgcttggcaatcttatagaactgctcccggtcatcgcgccacattttggacgcatccacgttagctccactttcgtcattgggctctgccagcatgctcaccaccgacagcaggatcttctccacactctgcacaggactccaccgctccgcgctgctctcgtagcccatggggtcatcgcctggcgcgtggaggatggaaatgcagactctcccatcagggtagatgttgggatgaaacatctcacaggtaaatctcatctttgggggacttaacgggtaatcaagtgggaaactcaggatggcaggaaaaacaccaaactcaaagcaggtgtcttctgggcccatgatcaatgcctcccattcaaaaaagttctcttcattcatggggcctgctacaattccttccggaggattcagtgttaattgttatgtactcggccatcagcctcttgagcgcggtccccgcaatggccccgcaancagtgcgccgagcgacctcgcctcagccgcgcgcatccc

SEQ ID NO: 316645 - DNA, 304 bp, Homo Sapiens
cggggttccactgaagtatatattcttctaggtatttgggggactgtgtcattaaggctcagtttcttggcagaacacaatagagaggaaaagtgatttgactttttagctccaattgctttcaatttcttaggtaaggtcaatgttgtaaaatctgctgagactttttttatagaacctgagtgaataaaatgcagaggtaaatcactactttctatttaaagcaaactagctttttacaaagcttatgaccatttttaaagaaaaagaaaggaggccaggtgcagtggcacacgcctataaa

SEQ ID NO: 316646 - DNA, 722 bp, Homo Sapiens
tttataggcgtgtgccactgcacctggcctcctttctttttctttaaaaatggtcataagctttgtaaaaagctagtttgctttaaatagaaagtagtgatttacctctgcattttattcactcaggttctataaaaaaagtctcagcagattttacaacattgaccttacctaagaaattgaaagcaattggagctaaaaagtcaaatcacttttcctctctattgtgttctgccaagaaactgaaaaatattccttggtatgcatgtatttttttcctcttagattaaaccaccattagccttaatgacacagtcccccaaatacctagaagaatatatacttcagtggaaccccgagagaggtgtaagtaaagcatatatatgttatttaaataaccagtcctcacctagaacatatttgaattgtatatctatttttaaacataaacacaaaaagaatttcaaagaacagaaggcagatgtgaatattaagaaaatctaagacaatatgtattactgtgcagctgtcatagactgtactggaagagtttttgaagattgaatattgatacttaaattatttctgaagctcttcaataaagttttctaattataaaaactccacataatttggttcaagccaagaaacaaagtcattttactctaagatttattctctaaatatagtaatgagatctgtaaagtctgtgttttgctaat

SEQ ID NO: 316647 - DNA, 419 bp, Homo Sapiens
  misc_feature (23)..(23): n is a, c, g, or t
atttattaatcccaataataaanaattaacatggttgagagcaggtgttatttcagcctattaaaacaatttataccacagctctgggcaagtggcagggtggcgccagtgacaggaatcagttctgcgtatttcttgattcctagctcatcttccctcaattcttaaacacaagaggtagctggcggaaagaagagactgttaggaaagacagaaacctttcagaaaggaagcttaaggtagattaagaaaagttagggaagctgagaagcatacaatcttccagatggagtattacatgacatctgtcatcatcttactaaacttgatatcatatttgttgactgaattaaggaaagatgaactagttaccaagaaatatactcagcagattgattcatggcaaacctagctcagcc

SEQ ID NO: 316648 - DNA, 1158 bp, Homo Sapiens
  misc_feature (722)..(722): n is a, c, g, or t
  misc_feature (765)..(765): n is a, c, g, or t
  misc_feature (767)..(767): n is a, c, g, or t
ttttggacccgctgcagctggcgaggggagctgtccaggaggccggcctgggaatgagcacaggcctgcggctggcagagagccgggtcgagccagccctggagaagcaggcccagctggaggagcagctgcgggacaaggtgctccacgagaaggacctgtcccagcagcagatgcaaagcgacctggacaaggctgacctcagtgccaggagggtccctggtgggtgctgcatgaggcaggcgtcactgcagaagagtgacagagctgggcctggcagtgaagcgtcttcagaagcagaatctggagaaggatcaggtcgacaaggacctcaccgagaagcttgaggccctggaatccctgcggctacaggagcaggcggccctggagacagaggacggagaggggctacagcggacctaagggacctggcacagccgtcctgtctgacgctgagagcggcagcctgcgtccaacagcgtccgaccgcagcctgcgggggctctcgggccagcggaccccgtctccaccgcggcgctcctcgccgggccgaggccgttcgccccgcagaggcccctccccggcctgctcagacgactccacgctcgcttgccctgattctctccgccctgcacttttgccagctgaaggtccagggagaagagcaacctggtccacagcctgcaggtggcccagcagcaggccgaggagctgccgcagangcgggagaagctgcaggttgcccaggaggagctgcagcgccangnggaccggctggaggaagagcaggaagaggcggtgcagaatggcgcacgggttcgccgggagcttgagcgcagccataagacaactagagcagctggaagggaagcgctcagtcctggccaaggagctggtggaggtgagggaggcgctgagccgcgccacgctgcaacgggacatgctgcaggccaagaagaccgaggtggccgaggcgctgaccaaggctgaggctggccgcatggagctcgagctctccgtgaccaagctgagggcagaggaggcctacctgcaggactccctgtccaagctgagcgccctcaacgagagccttgctcaggacaagttggatctgaactgccttgtcacccagctggaggaagcgccggcagagcagga

SEQ ID NO: 316649 - DNA, 421 bp, Homo Sapiens
ggaaaatgattttctttgtaaatatatagcatcgtgtttggtttgggatgtagagtctatacctggctgctgattgcgtcgtttactacagctttttttaaataagatttttgctttaccatttatcataatgtagtaatgaagcaaaatggtcaaaactgggtgtgtgtgaacagagatacacccatattcgtgtatatacacatccacctacatgttttggtctgtggtttaagagactatttcaaggttccatttttataagcttttatgtgtattttaaccagagtttctgatagtactgtatctggctacctatatttccagatctaaagcaagaactactctaagtactgcatttggaatccttctccattaggaatggccaggacaagtggagctagccattttcattacacgg

SEQ ID NO: 316650 - DNA, 503 bp, Homo Sapiens
  misc_feature (98)..(98): n is a, c, g, or t
tcctttttatctattaagatgaagacagtaatataatattttggtacaaaaacagctgcaggaagaggtggaggggggcctgtcattatgtttccccnccaccccccaacgaaaggaaaactaagactcccaacataaacagggccttgaggggggggattacaggcacttgggcatggagtcttcggctgcaggaagcactccgcttattcttcaggaatgggaaaggcgtgacccaacgagagcatctgtctcagagctccactcagggtcacccctctccagaggccggtatggggtggcttcagacttccactgcacgacctggagcaccaagaccacacaccacaataccaaattcacccaagaagaggtttcagcattgtgtaggttggagtaaaactgcagagcagttccagggggtgtccatggaattttctgggcttcagaacagctaattgtagtgttcaaggagatgatggagttgcagagagacctggtgc

SEQ ID NO: 316651 - DNA, 1218 bp, Homo Sapiens
  misc_feature (219)..(219): n is a, c, g, or t
gtataccttggatgcattcccttctttcctggggaggcaagcaaaaagtgtatcaaagagccaatttactccctgtggtcaggaacttgcccacagcctgactcaaagcaaggatgttctctcaggagaacactgtggcattttccccagagctgaagagatatcttcacttaaataatcttgaagtttgtaataaaataaataaagtgaattacacanaaaggactagagctccctttaaaaaggcagctggttgagtttatgcaagcagtgtatacacaagctcatgccccaacaacaaccagaaaacaggttattattatttagccttcctattgtacttctagggcagcatttcaatataatttaaaaaaatccctcatacataatgtaagggtatattatatatgtacacacttttactcctcagttcaagctaacttctttagaagtaaagacagtaataacccaaagagttacacgtcttcccagtaaaatattctaattttttaaaaggtgcatattataaagagcagcttgtttttctgtcaatgtgaacatgttcagtctcagcagcctcagaatcacagtccatggatggttctgcatttctgccgggtcctcaggaaaggaaccgggcaggtagggaaaaaccatgaactacaaacactctctgaatacgtccattttccctgagcttccttgagcttcttgcagagggcctcgctgccatgaggatctggcttcacatctctgagagatgctgggggaggggaggtggaatggctctggcttctccaacccacgcgacttgtgtgtcttttccctttctcagccaagacgatgaagcagtcctgatgcgcagggtgcaggggcctcggccagtccccgcacaccttccaagtccaaagaagttcctggcctcctgcttggtaggagaggaggaaccttgggctgaatctgacatcatcccttgccagttacaagctttgctttctaaggccacctgggaacactcccgggttaccaaacctgagcatcgtgggcaccacgaagagcttatctttcctctcctgctcagacacccttaagcccactgttgcagtggcagctgaggggttcagaggatagcaccatgatgactgacagctcgaggccccacttcttgcaggaggtgacccacctgtttccggttagccatacatctgcttgaactcc

SEQ ID NO: 316652 - DNA, 1080 bp, Homo Sapiens
  misc_feature (34)..(34): n is a, c, g, or t
agactcaaggcatcttagggcctgctgagcaganttggatgcagggaatgtacaattggtgctgttgggtggccagtgcataattggacacagactttcaggacctgtttgaaattgagatggggaaggggcaacctcgaaggggctagatgacagttatagtctcagataggcctcaggtagggagggtcaggaatagagaagagaggacttaaaggtggggctttggaggggtgtgggctggagaacgtagactggggaggaagggatggggtacaagggtaggctgggccagaggaagggaggggcgtctccaggatatgcttagcacccgcatggatgtttggtgtagccggagccaggtcgccagcctgtcaccacaatcaccaggtctccaacacggaggaagcccacggagctttccactttcaatgccaaattgcacccggcgatctacatcatctgcccagatggcttctggaggttcacggtaaagcaaggggaagactcctcggcataagtggacctggcgggcagcctgggcagagcgggtgacagcaatgactgctgcccgaggtcggtaccgagacagaagctgggctgagcggccagttgtggtcagcacaatgatggcagcagcacagcacttgaaggcagcctccacagcaccaatggcggtgacctcagtgggatcacggcttagtggcgctgcccgacgtagctcctcaaacagctgccggtggtacactgcggcctctgcctcccgggcaatcgcatgctgcatcttcaccgcttccacagggaagttgcccttggcagtctcccctgacagcatgatgcagtcagccccatccagcacagcattggcgacatcgcttgtctctgccctcgttggccggggcttggtaatcatgctctccagcatctgtgtggcacagacaacaggcttgcccgccaagttgcagcgcccaatcatcatcttctgagccaggaaaaccttctctgctgggatctcgatgcctaggtccccccgtgccaccatgatgccgtcgctgatgatcttaatgccgtgtccttccg

SEQ ID NO: 316653 - DNA, 1066 bp, Homo Sapiens
  misc_feature (987)..(987): n is a, c, g, or t
  misc_feature (991)..(991): n is a, c, g, or t
  misc_feature (993)..(993): n is a, c, g, or t
  misc_feature (1041)..(1041): n is a, c, g, or t
agtaactgtctgatctttttcaactttggagatggaataagttaaaaatttgctatttttcctgtaacatctgctgaacgggcccacccacacgttgtatattcagagagagagagggagtcaaggtgtgaccgtcgaccatagccagtgtcaggcctctgcctctgggcctttgctttgtggcctcactgcaacacaaagctccaccaggaggctggttcacgtcccctaccacggaagcgaggtcccagaaggccagcggtggttccaggagcaacagctcccaaaccctgagcaaggcaaccgatcgccaggaccaggaagcatcacccaggagatttggcgcccacttccacctcttctctcagttttggacaagtgacaaaccattttgccccctcactcttcttttttaactgttaaaccaaaggaaagcacaaatgaaggaaatcctgtgtaaagcattgagaaggaaagaagcctggagcagcctctcctgtccacagccaggggttaggtctgcaggcccgtctgcggtccccatcgagcatcaaggggacgctgtgtgtgctgcaagtgaccccgaaaacaaccacagccgtcacatggtcctcctgaagttggggcaccctcctctcagcaccaaaatggcccccactccttcgtgtcctcccgctatctccaaatcggacgttctttctagctgagatttttatttttccacatctgtagtgccatgaagcgattctgtctttgacttccaatggcaaacctgggtgatcgggaacaagcacgttgtacccttggctggacatggccaagacacaaggcattccacggcggcaagctgaccgcacagcagtctggcttgattttcagccgtcatcattgggttctgttttgacagctctgctgtcccatagggactgcgactgggaccaggtcaaccacgccaggggggtgtcaccagccttgtctttttttctntttntntttttcctccttaagctgctgtcaatccaaaccattggcatcatcgtntcttttgaattaaaaccaacatatt

SEQ ID NO: 316654 - DNA, 601 bp, Homo Sapiens
  misc_feature (176)..(206): n is a, c, g, or t
tttttgatggactttaagatgagctttaatttgtttgttttccttaagtgcatttatcgatgtaaacagagcatgttagagattcccggggagagcagactattgctgatatgttggttttaattcaaaagaaacgatgatgccaatggtttggattgacagcagcttaaggaggnnnnnnnnnnnnnnnnnnnnnnnnnnnnnnngctggtgacacccccctggcgtggctgacctggtcccagtcgcagtccctatgggacagcagagctgtcaaaacagaacccaatgatgacggctgaaaatcaagccagactgctgtgcggtcagcttgccgccgtggaatgccttgtgtcttggccatgtccagccaagggtacaacgtgcttgttcccgatcacccaggtttgccattggaagtcaaagacagaatcgcttcatggcactacagatgtggaaaaataaaaatctcagctagaaagaacgtccgatttggagatagcgggaggacacgaaggagtgggggccattttggtgctgagaggagggtgccccaacttcaggaggaccatgtgacggctgtggttgttttcggggtccc

SEQ ID NO: 316655 - DNA, 713 bp, Homo Sapiens
tgacctggcaagtcactcatgggatcttccccaggggacattggcaatgtctgaatgcattttttgttgtcatgactggtcaggagattgttaccagcatctagtgggtgtcaagccaggaatgctgctaagcattgacaatgcataggtcaagcgcctacaccaaagaattatctaccctcaaagtcaatagtgctgaagttgagaaatcatggtttagggagtcttgattaaaccttttcatctggggtaccctgagatggtgatatatactagtatgctttgcttcacagtgtcaactttactcgcatctgcagcaggtgagttataatcttcacaggagcaagctcctggggaaagactgatcatagaagaaattctcattggctttgaccaaatccttctccttgccaattaggaaatattgactttctaatcttttagcaaaagctccctctgtatttgaatatatgtttggttataacaaataacttgtttccacaaatggaaaaaagtatcgtaaatggcaacagatatagtttagtgctgactttagatggtggctggacctcctataggacaggcaaagctaagtactttctactcaaagccatcaaacaaaatgcttacaaattagaatgtaatggccattgctttacttgttttgataaaccagaaaaacaggcttcagcttattgaatctattattgaac

SEQ ID NO: 316656 - DNA, 426 bp, Homo Sapiens
  misc_feature (24)..(24): n is a, c, g, or t
acagagcaaaaaataattatgcanggatattttgctcatcaacctcattatagaacatatgatttgtgatacagatcctgaacttggaggagcagtccagcttatgggcctgcttcgaactttagttgacccagagaacatgctagccactgccaataaaacagctcctttactagcaaatacaacagaagacaaacctagtaaagatgattttcagactgtccaactattggcacttgtattggaattgttaacattttgtgtggagcaccatacctaccacataaagaactacattattaatacggatatcctccggagagtgctagctcttatggcctcgaagcatgctttcttggcattataaaccgtgtcagcatggttgcctggctacctgctcatgaaggacttgattaatagcaaatt

SEQ ID NO: 316657 - DNA, 644 bp, Homo Sapiens
gtatcagacatacttccagttatacaattttgattaaactgagaaagaatctgagaatttttcatcgtggtaaatgtaaactttgaaaatccaactgttgtgttaaggttgctctgagcttcatctgttacagtcttatggcatggctgattagtactcaatttcttcttataagtagtaatttctgtattcatatgatctgaagttacattcaaacttgaacttcctggaagaaccaatttggaactattcacttgtattggaacatcagtgttagtataagacacatgcagattatttatctgacagtttgagatcttagaatacatagtcaaatttgtggcacctaaaaatcttggagaatttccatacatttcccctttctccatcttcattggcttatctatttgtgagctatttgtcaaagatgtctgcactgaaatgctgcctggattcaaatgctttgattgtaccaaattacttccttgtttagatatagcaaacatgtttttggctccatgtttggaattattattgatctcacatatactttctgatgtcttactgtcctttctaatgtcttgttgctgagttagtttggctccatgttcggaattattattgatctcacatatactttctga

SEQ ID NO: 316658 - DNA, 1034 bp, Homo Sapiens
  misc_feature (88)..(158): n is a, c, g, or t
  misc_feature (343)..(343): n is a, c, g, or t
  misc_feature (376)..(376): n is a, c, g, or t
tttttttggttccaaaccaaaagaggggccccaaggggttttcttttttccccgggggttttttggggttccaaaccaaaaagggccnnnnnnnnnnnnnnnnnnnnnnnnnnnnnnnnnnnnnnnnnnnnnnnnnnnnnnnnnnnnnnnnnnnnnnnacccctttttccctcaaggttttttaaagggaacaaggttttttcccagggcccccaagcccctttcacaattccatgttttccccgggcagggaaaaaaaggccaaaagggggaaaggggtccctcaattggggcaagttgagttcccctttcacaagggaggctttccctgcaaagttttttnccaagcacccaacccaccttccaggccacaagnttgcacacccccggctggcaaggggagccccgggacatggctctcgtctgccggctattggaactgggcagaggcaccggggttctgttagtacggaggaaagagaaatggacgctgggttagcaccttgcagagtccccaccacagccaggactcgggcaggagtgatccccactaaaaggcaaagatttcatgccaggctgcaatggggaagtgcttgggctggggtcccaccttctcctaacaaacatgaggctcttgttaaagatttaaccttgtgagagtggtctgtggcccacatgcacccagatcagctgcctggtgtgcctcggcccacccacactccttgctgattttttcttctataatttctaaaattaacactgtgcttgctagatgggatgaaaaggcaaatacgtatcaagaaagttcccctccctaggtcctgccctaggctgacccccccttacagcctttcctgctgcaagggcttctggggtcctcaaggtccttgagaaactctccagtcctggaccagtgctggaaccaactccgggggggtcccctcagcgggctgagccttgaccgctggaccccaaggacgccggcggcactgacgccactatgggctcggccgctgccctgggtggtagtcagc

SEQ ID NO: 316659 - DNA, 506 bp, Homo Sapiens
  misc_feature (85)..(108): n is a, c, g, or t
  misc_feature (467)..(467): n is a, c, g, or t
caaaatatattagatttggtttttattgtagagcacacatatcagggcgaagtgctgcacacacaactacaaatcatttttgggnnnnnnnnnnnnnnnnnnnnnnnnctgcaactgctttaattatgcagtcccgacttgagaaatccacgctggcaaaggagttctggcccctgagaggggcttcttgatggtggctgccccagatttctgcagcctatgaggtctcagacccggacctctgtacacaaagcccccaaagtggtggtatcctggttgctgggagggcctctgctcttggcaagcccgggtcctggcctggctgacaagaagacattcctaatgaatctagatccacaaaaccttgctgccttccaggatctgagtggatagaagctaccaaagactttacctttttttccttattattttttgaaagccccttcaccaactcccataccctgaangccggaggaggcaccagcccagtctgcaggcctgagcta

SEQ ID NO: 316660 - DNA, 757 bp, Homo Sapiens
attaacaaattcttacaaaaaaggtctgtctctggggtaaggtgcacagggcctggaccgacatttagggcttggtctgtgtggggcaagggccaggggttggccacagcctcatgaggtttccagggtcttcacaaggttccagggcttccccaaaggcctgtgccagccttgaggattggttatggcttatgtgcaaaaataaaatctgtggggctggcagggtgtgggctgaagacttgtcagagtggtctgcagggctggtcccccagtggccaaggcagaccgatgaaccctgagccagcacctgcttagtctgcagacgctagtggcccaccagcaccagggttctggtgtcggggcaggtcagaatgcctggaagcgccccaggagccatggcttctgggatgtccttcctgcagctgagctcagggctgctgggcaggggtaggagctgtggcctcagccttggggctcatgaaagcctctggcagagaggatggcctggcagcgggcggggtttccctgctgggagggaggcagggcccgactcctgctgcagtggctctggggacgggcagctggcggccagcggggcgggcttagtggcaggccctggtcctcgcgctggcgctcagggctaagctggggctcctgccctctgctgcagccgactcctctctgtagcccccctctgggctgtcctgggacttcgcctcccacgcagtcagtctgcaaggtgctggctgtctcgctc

SEQ ID NO: 316661 - DNA, 806 bp, Homo Sapiens
  misc_feature (561)..(589): n is a, c, g, or t
ttgtaaacattaaatttgtctttctcaaagaaagaatttatcagaaaaaaaatcagcatctctaactgtcatacaccatagaaaaaaagcaagtgactcatatcatgtgccatactagaaatatccaaataaaaatactacagaatagacataaaaaaaattcaaagtgctcagttatttccagggagttatgtatattataagcactctggaaacagtcaaaagctgctgcatgcaagttttgtttagctttagacaacaaaataatcaagatataaactttctttttatcaacatcaacggtacatacaacacttacaaacaaggaatgttggacggtgttacaaacactatgtgtcccttttgtcaggattttctgatgtgtaatacttgtgcccacctattttacaattgagaaaatgtttaagctcagataactaccaatctttataaaatctaacagactacatagtgtctgaaatactatttatataatatagacattactgaagtagcaagtgcctataacattttcaacctagaatcaacatgcttgtcccnnnnnnnnnnnnnnnnnnnnnnnnnnnnngcaaacacacttatcttttagaatttgtaatatttattcataaataggcacaaaataatttaaaaagccaaactgcattgggtaaatttacaagcctttgccttcttcaactcatgccacccacgcaacatttagttttattatatattacagctttctttacagcagaaaactttgaagtcttgttaaagggcaatacttgtgggtccccttaaga

SEQ ID NO: 316662 - DNA, 1122 bp, Homo Sapiens
caattcactatagaatgtgaaaggaaaatgacagacccaatatacaaatttttgtaggaataattttgcatatataccacaagatcattatcacatattaaaaataaatacactgtttgttaggtaattctgaaattgtcatttctattttggagttacaaataataagccctgagacagaagacactggtcctcacacagcagctgccattgctctgttctcagttgcggtgctttatatagaccaataggtatacaaaagcgtttgagccattccggtattcccactgctctgatagatgagagacaagttgtaggcaatatctccttcgtaagtctaactggtcaagttctataccctcctaaccacaagtggagggagctcccgggccttctgataatagtggattgcaagatgaatcagccccaactgatgaaagccacggcccaaattgtagaatgatttctggcagggcccacgtaaactgaggtatcgattaagaaaggaaaagccctgtacaataagagcatgtctccgtaacacatacttctgagatgccatatgaataaaggttaggcctatacagaagctatagagaggttcgtcagggtgagtgcgaaaggcttgcacatactgtccaagcgcatgcttaaaactaccagatacaaatgcattgtgtccatttaagacacatagggcatgattttctgggtttttcagcatcaaacggagacagaagcgatgatgtcgtacatcttgggagtgcatggtaacttgattgaaaatgttccagagctggggtttattgacattttccattaccattatcctgatatagttgtatgcctttctgaaatttttgtccagaattgcagcagacagaccaaagtattctagttctttgcgtttttgcctgtcatcataaaatgagtaatattccaatgaggaatctacaagcaactcagcctcttgaaatcgggataggtcacataaggagtatatggccttcaacagaagattccaccagtcatcctttgtcaagacgcttgtgagcacagcaaatattgcttttgcatcacaatttgctgactcttggtcattgctgtctgatattttgtctc

SEQ ID NO: 316663 - DNA, 302 bp, Homo Sapiens
  misc_feature (72)..(72): n is a, c, g, or t
  misc_feature (75)..(75): n is a, c, g, or t
  misc_feature (78)..(78): n is a, c, g, or t
  misc_feature (86)..(86): n is a, c, g, or t
  misc_feature (89)..(89): n is a, c, g, or t
  misc_feature (93)..(93): n is a, c, g, or t
  misc_feature (96)..(96): n is a, c, g, or t
  misc_feature (136)..(136): n is a, c, g, or t
  misc_feature (143)..(143): n is a, c, g, or t
  misc_feature (155)..(156): n is a, c, g, or t
  misc_feature (177)..(177): n is a, c, g, or t
  misc_feature (180)..(180): n is a, c, g, or t
  misc_feature (192)..(192): n is a, c, g, or t
aaagcccccgcaacctgagaacagagcaatggcagctgctgtgtgaggcccagtgtcttctgtctcagggcntantanttgtaacnccnaaanagnaatgacaatttcagaattccctaacaaacagtgtatttanttttaanatgtgataatgnncttgtggtatatatgcaaaantantcctacaaaaanttgtatattggtctgtcattttcctttcacattctatagtgaattgttcccaatgttgaaatggacgtgtaagcctttgagctagcttggggtcgaatacactatttttc

SEQ ID NO: 316664 - DNA, 451 bp, Homo Sapiens
ctaaggtgagaggatcacttgagcttaggagttcaaatccagcctgagccaacataacaagactttgtctctaaacaacacagttattgtttaaagaccctgaaatcttcatctttaattcaggtagcaatgaatcgagcccaagtttgtttgatatccagttccaagtctggagagaggcatctttatcttattaaagtatcgagagacaaaatatcagacagcaatgaccaagagtcagcaaattgtgatgcaaaaggtaataacttcatttgcattatgttatataaaatttggctgaattgaaaaagactcatgaagtaacactggacagcaatctaattgaaaatatacttttcaaataaaatgaaattttccaatctaaatctctcaagtgtaataaactcattcgatgttaaaaaggaaaggctaaatgtccatactttaaatt

SEQ ID NO: 316665 - DNA, 963 bp, Homo Sapiens
  misc_feature (896)..(896): n is a, c, g, or t
  misc_feature (899)..(899): n is a, c, g, or t
gggacatttctccgtcactgttggataatcagagaaaaaaaggacgttcagaacaccaaggtgcttggtacaattatgccaagtgccctgtctttaaagggagtagcctaattctcagcatttgggagtttttgactaaatgtgtggatatgatttgtatttcctatttcttaatatatatgtgaagatacaatactgacaagtacttagatttggaggttttgcggtactgaggggagttgggggaagaatggaaataccattgacctcctaaaaagttgttacttgcaaagtttgggaggtgacatcaaaaactcaactgcccttacaatagtcattccatccatctgttgcttatttgaattctcatttatttttactttatggcattaaaatacaataaatctgtcaattatgtattttatattagtagtagcttaagattgggtcacttcatttcggtagatataattgttagtattatccttcaggacaaaaagcatctgctaacaacctgtggtttaaaaatataggccaactttatgttcaaacattatgttgataatatttttagcagtattacacagtggaggtccaaattggattagacttttgcattgaattccaaagtattggtaagtctagcacatactataaagtcttgctaaattcttgtgggtacattatttttaaaacctgtctgtctgtcggtatcacacagaggtcacttcttgagtgatgctttcacatgaggccgcgtcacaccaccatcgtttggaaatcagcaccccagccgtttacccttagatacagtgcagcacttagtgtggttgaatgtgtcatgtgggaattgattttggtcaccttttcacgtcattggtaagtccttttatgtntgngtgcatctatgttccgctggtggttggtaaatatgaaatgatagatgacttcttattttatgtt

SEQ ID NO: 316666 - DNA, 917 bp, Homo Sapiens
aaaaatattaaaatctgttgaaataactcttaggaaattatcaactaattttttcagatcagtatcttctagattccagacagaaaaaaattacacttcagaaaagacatcaaaggcaacatatgacaacaagtaatttatgaatctgggtagtagcgttggtaatctgagttctttaagggttaacaggacaacgaagtgcatgtggcagtgtgctggcagtggccttgaggctttggaccattggttacaaaacagacacagccaagataagatccacacacacattattaacaaggaagtgatttgctgcaccttgagttgagagggctacatgtagaaaagtcttaaaatagagctaaacaccacagtggtcaacaaagccatcataatgttggtgtttgtttccctccaatgtatgtatgtttagtttttatccaacctgaggaatgaaaacttaactggatctctcttgcatccttaaagggcctgagtctcaacatggctgctgatccatacttacacatcttactgtcaatcttgcctacattgattatagaaccactattacgtgaaaaggcttgaaacaaccaacatatacaaataaaaccctgccttgtaaaatagtaaaagagaagccatatattggcttttcttcttaacttgggagatatattgaaacaaggtgctttataagattattgtacttaagactttaatagtgttacttggatagcttatatgaattttgagaattttatatgaattttgagaaagcaagttcaaaagaactctggtaattttcctgtatgtacaatttaaagagtgaataagattattagaattcagcaatagagatatatctattttcaattcaactacagaaatatattttattggccgggtgcggtgctcat

SEQ ID NO: 316667 - DNA, 628 bp, Homo Sapiens
cggctctgctgctgcgtgggccaagcgggtggtctggggctgtgacggcttctcagtgtgtgatgaagtttcagcgccctccacagtggcagtgccagcttggaatcccgcttccggttgtgttgttcattctggctagctgagtttcagttagttcatgatctgtttaaaccagagtgagtacctggagaccttggtgacaaggaccatgtgagcctgccctcctactggctgcgagcccaggacccccgtgagaaaccaggagcctctgtgttctctggtgaccacacttccatccatccagtgcatggccgccacgctgcttctctcacagtaggtcctgggcactggatgggccactccagctccagcagtgacaggtcattctcccccgcgtccgcgtcataccgcatgtgcacatggactacagtaatattcctgtgtaacagtgaacattttgctgttgtcagtacaaaattttcccgtattataacaccaccacagaagtcttttccttcggaatttgttaactttacaaggggggcccctgaggctgtgccatccacacggcagccacactcgggtacggagcattgtggacacgagggctgcacctcagtgtaaattc

SEQ ID NO: 316668 - DNA, 913 bp, Homo Sapiens
  misc_feature (640)..(640): n is a, c, g, or t
atgactgacagattatcttattttattatttaacgtatctcatgttttcttttaaggtctctattgagataaagagttccagggaaagaaaggtcacagtgctcggtaaacaacccagcaaacggcggctctgctgctgcgtgggccaagcgggtggtctggggctgtgacggcctctcagtgtgtgatgaagtttcagcgccctccacagtggcagtgcgagcttggaatcccgcttccggttgtgttgttcattctggctagctgagtttcagttagttcatgatctgtttaaaccagagtgagtacctggagaccttggtgacaaggaccatgtgagcctgccctcctactggctgcgagcccaggacccccgtgagaaaccaggagcctctgtgttctctggtgaccacacttccatccatccagtgcatggccgccacgctgcttctctcacagtaggtcctggtggtgacagtcacattcaggacctgcccgcactcctccccctccacaagtgtgacaggccgcgtggtcagcgagttgcccaggtcagtgccattgcgtgcccagccgctgaggaggcccctggtgcgtgggatgaggaggtgctcagcgaagtctttctcaggggtgcacnacggggagccccgcacctgggcactggatgggccactccagctccagcagtgacaggtcattctcccccgcgtccgcgtcataccgcatgtgcacatggacgtgcgttatcttgatcatcagcgggtcttggctcgttctgttaaaatatgtttttacagtaatattcctgtgtaacagtgaacattttgctgttgtcagtacaaaattttcccgtattataacaccaccacagaagtcttttccttcggaatttgttaactttacctttaaa

SEQ ID NO: 316669 - DNA, 938 bp, Homo Sapiens
  misc_feature (250)..(250): n is a, c, g, or t
ttctctggtgaccacacttccatccatccagtgcatggccgccacgctgcttctctcacagtaggtcctgggcactggatgggccactccagctccagcagtgacaggtcattctcccccgcgtccgcgtcataccgcatgtgcacatggacgtgcgttatcttgatcatcagcgggtcttggctcgttctgttaaaatatgtttttacagtaatattcctgtgtaacagtgcaacattttgctgttgtncagtaacaaaattttcccgtattaataacaccacccacaagaagtcttttccttcggaatttgttaaactttacaaggggggcccctgaggctgtgccatccacacggcagccacactcgggtaacggagcattgtggacacgagggctgcacctcaactcaggcaggagataattgtgttagaggcctgccacgggaggtcctgtagatccggtgcacgcttctcagaggtcagcaccccgcaggcacactggtcgtggggcacacactgtttgtggtcctcaccaagcctgtagccctgagcacagctgcacgtgtaggattcctgtcctgggaggcagaagtgttgacacccatcagtccgctctgggtgacattcatttttagccagctcgcagttgctgccctcatagccgggggagcaggtgcaggtgtagccccagatgctgtcctggcaagagccgttgtggaggcagggctgggagatgcacggggagccgcctggtccttggggagagtcggagctgcccttccctggagagacaccgtgggtcctggagccagaggcttggcatccgctgagctggggtcgtgaagcgtcctaagcccacccacgcacctcatcccgaggaattaataagtgactacttcattttcaaacacttctcttgcttcttcatagacacag

SEQ ID NO: 316670 - DNA, 395 bp, Homo Sapiens
gaatgaattcaccatgataaccactttcaacccagatactccttaatagaaaataaaacaactgtatttccctgtctttgtaatttatgcaaataaatgtgcagaaccaaggctgaaaatgatgtcatggagcacagtgatcttccatagcttctttatcatttgtcctattaaagggcatgtagctaaatagtaattctaataggaatttcagacatgaatctggaattgtatgttgtcactttctgtacaggtctgatattttttaaatgtgagcatacaaaagagacaattgtccatcattgttctaaacttaggatgctagaagtggcctggaattattactataacttaaataagaaaaatgatctcaatgataaacctgagcagggctc

SEQ ID NO: 316671 - DNA, 402 bp, Homo Sapiens
ggcagaggaaaagtagaccgttttaatggtgtttcagaagctgaacttctgaccaagactctccccgatattttgaccttcaatctggacattgtcattattggcataaacccgggactaatggctgcttacaaagggcatcattaccctggacctggaaaccatttttggaagtgtttgtttatgtcagggctcagtgaggtccagctgaaccatatggatgatcacactctaccagggaagtatggtattggatttaccaacatggtggaaaggaccacgcccggcagcaaagatctctccagtaaagaatttcgtgaaggaggacgtattctagtacagaaattacagaaatatcagccacgaatagcagtgtttaatggcttggaatttgggcttcag

SEQ ID NO: 316672 - DNA, 382 bp, Homo Sapiens
  misc_feature (346)..(346): n is a, c, g, or t
agatgatgtgccctgttaaaaggaggaggcaaaatagtcaaacccagggtagtttacacttaatgctagggaggctcttaaaacattattagattttgaggaaagactctagatatattttctaatgttcagtacaataaatataaggaagctaaaacaccaatgtggaattcctgtttccagataacatgtatattcttctatagagtgacaggatcaattgcataagcgcaaagccttaaattgctggtttagagaagacccttttttcattcagattctttgttcgtagagcagttatttgaaaaacagttatggaacacttcacaccactggttatactttnttttttccttttttattgattgggcctgaatacagg

SEQ ID NO: 316673 - DNA, 1078 bp, Homo Sapiens
  misc_feature (928)..(928): n is a, c, g, or t
  misc_feature (1025)..(1025): n is a, c, g, or t
gaatgttcatgctaattcttcttacattacaaaaggcctttgaggatgcctacgtctgaaatgctcttacgaactttaataaaatagttagctaatagaaaaacaggtaagaataaagcaatgtgccttaatttcaaaagctgctattttagaatttgaataagtactcctaaagtgaccattattagggaccagaaaattatatcttggctaagtaatagaggaccatttgggtttttgtacttgagaatatttttggtgaattactttgttgtagtgaggaaaaaacctaagaaatttccccttttttaaaaaaatggaaatattcaattgagacttgaggggaataatagaaaattaaggtagatccccaatatttcggaataccaaaattgccttaaaaattcccttctgtttcttacatgggatcaaatacttgagattagtacttcagagtactgggccttgttcaatttagtacttcaattagtattaaacttcactaaaaagtaaaccatactccaaattgtatattggattgcattttggggtcctaggtcatacgttcttcaaaattattatgattgtactattgtacttgaaattacagatgttattataattacagtcaaatgtagactatcaggccaaattaaaggggagcatggcagataaccataaagtcatttatatttgattttgaaatgtatttttgtactttattttgaatatcatccatatgtctgacattattggaatttgtaacattgttaatgcactaagtgatttaaattcaattgatgaagatgtgattttacagaagcagaagtttcattttcttgaggcttgttttctaagcttactatcttgtgtttggttatttgcttttaatgaagtattttgtgtagaaggttaaattaggatgcanaacagatctgccattcctttttcccttatatctttcttttggtcttcatggacgagatgattgaggattctgctgccctgagggagttcattggaanacctgcgttctcctacctctttcaacccttcattagctcaattttgagatatt

SEQ ID NO: 316674 - DNA, 686 bp, Homo Sapiens
tttttgattatgcagcaatcttttattactgtcccagatcttgtttaatgaagatctctgtcatcaaatcaagtacggtatttcatgactataagaatgataatcactagcaaaaggatagcagcaaccaaagccatgatggcttttattttgcatccacgccaccacatttgccttcgaagttgtttggatctgttgctaaaagctgttgcattatccgataagctttctgatttgtcctgtagttcatctagtctctcccctctctcaattacctttgtaatattttcttgcatgacatcaataacttcatccacttgattctgaacatgcttaattttatcatttctaggtccaaatcttggtccagatggtccccttagaaaaaagtcctcttcttcatctgaatcatcttccaaaagatttctcctttcacttttcacagaacctgtgacatcatcatcattgaggtggcgcttaaacttgggaggcatattttttacttgcaaagtatcttttgcttctcaacaggatagtcaccacctgaggctcccggggaactcccggcagctctcccgggctggcggtgctgggcgggcgggggaaggagtaggaagccgaggtaagaagctgggagggggagacagttggtgcggacccggcgtcggccgcagcgccgcagcccc

SEQ ID NO: 316675 - DNA, 953 bp, Homo Sapiens
tttggcaaattggtaagtcacacgaaccttgtgcctacatttaaaaccggcttttccaacttaggaagggttctttcttcctctggtagactgtagttcctcaaccctaaatttccagaatcttaggaaggaagcttcaggcaagcttagcttaaattacagcctgtcgattcctccgtgtaaatacacctgcttctatgcactagtcatttatttcctgaaaaccagtattttttaaaagctgatatttacagaaggaaactgatgctccactgctggggctgggcaaacaaaggaatcccttgcacagagctcatttttgtggactcctccctatgagcaggtcttctcatgaggctgggggcaaaggcttcacatatgtattttgaagaggttttagtacagacaaagcagactaatgtgttgatgaccgcctgtgctgcagtaattcccatgggcaaggagatgggcttttgtaatgttaagaatgataatatgttaggaaaaatctgtcactattttgagtgaatggtatacttttgtctcttatttataatataccaattgatcatgataaaaataagtgctcagtccacccctgtagaagcaggaacgcaacctttgagtggtacagtggcacagcatggctttcactgaggacagatggtagaaggctgctgaggctggggtagaactcagtatggtactctaggtccttctcaggtgaccgtttgcctgtcctctgccttgcctccccttgtcctccactgtctggttggcccatctttttagggagggtgctagtcctctggcggctccccttgccattctgcaggtctggcagagttgcaggttgctaactgtacggcccctggcctgcatccttttggtgctttcctgctttgctgttttctggttcacttgtccctcaccactcagcacacctgcatgcc

SEQ ID NO: 316676 - DNA, 353 bp, Homo Sapiens
  misc_feature (72)..(81): n is a, c, g, or t
gcgcccagcctcatgagggtctattctttacattcaccatggtctgatggttgctacatgtttgtctatgannnnnnnnnnctattatcaggtgtcttggccggttcatgccccacgatgaaagggccagaggttttcatatgagtaaaagaaaaaagcagaaatgtgaaacctacaattaggctaaacaaaaatcaactggaaaagtacaggctgaggggagaagagttggctacatgtttatgttaggggaggagggagtacattttagctatgtattcaaacagctaatagtttaatgttgctgcttataaacttaattttaggctgcattaataaaagtgtagtctacc

SEQ ID NO: 316677 - DNA, 1033 bp, Homo Sapiens
  misc_feature (680)..(714): n is a, c, g, or t
  misc_feature (773)..(773): n is a, c, g, or t
  misc_feature (847)..(847): n is a, c, g, or t
  misc_feature (861)..(861): n is a, c, g, or t
  misc_feature (885)..(885): n is a, c, g, or t
  misc_feature (893)..(893): n is a, c, g, or t
  misc_feature (919)..(919): n is a, c, g, or t
aaagggggaaccaggccaagggctcagaggcttacagggcccccctggaaagttggggcctccaggaaatccagggccttctgggtcaccaggaccaaagggccaaaaaggagaccctggaaaaagtccggatggtgatagtagcctggctgcctcagaaagaaaagctctgcaaacagaaatggcacgtatcaaaaagtggctgaccttctctctgggcaaacaagttgggaacaagttcttcctgaccaatggtgaaataatgacctttgatgctgcagagaatggagccattcagaatctcatcaaggaggaagccttcctgggcatcactgatgagaagacagaagggcagtttgtggatctgacaggaaatagactgacctacacaaactggaacgagggtgaacccaacaatgctggttctgatgaagattgtgtattgctactgaaaaatggccagtggaatgacgtcccctgctccacctgccatctggccgtctgtgagttccctatctgaagggtcatatcactcaggccctccttgtctttttactgcaacccacaggcccacagtatgcttgaaaagataaattatatcaatttcctcatatccagtattgttccttttgtgggcaatcactaaaaatgatcactaacagcaccaacaaagcaataannnnnnnnnnnnnnnnnnnnnnnnnnnnnnnnnnncatgctaattatataatatttttaatatatactatgaggcccctatctttgatcctacnataatatctagtttaataatctgtaagctttcgatagtgtaacttgctgagtatgaaaataagacgggattatnttccattacaacanacacctgtgctcttgtgagccttnctttctgnttgggtagaggggctccctaatgacnataccacaagtaaataccacagctttttacctaagttcaggtattaagaaaatctattttggaactttctctatgaactctgttttctttctaatgagatattaaaccatgtaa

SEQ ID NO: 316678 - DNA, 722 bp, Homo Sapiens
  misc_feature (315)..(331): n is a, c, g, or t
  misc_feature (540)..(540): n is a, c, g, or t
gtaaagtcaagagtcaccacagtaataatctgatgtctggcatgcagagatggtgaacatccaacatggatacagaatgctaccatattaagctgcttctcttctaggtttcatacatttagaaatcagaccacactaaattaattacatgttctctttgatttatacagtctcacatttgtaaaattagtctttagtaacaaaatttttaaggtgaaagaagttttaaatgttaatggaagatggcagcacacagacgtcagacttgggagagtacagcttcagaaggaaggagttaatactgtcctgtttcannnnnnnnnnnnnnnnncacattgtaacaccaaaggatatttgctatttctttcttttggttttgtattattcatacttctttgcaagtagcttaaattagtaggatttaggaacttgctcaaattcgaggtacagattatctggtcttaatccctatcatactattacaaagactgttgaaaaaggaacctcatgtagaacctgagacatagtaggcattcaaantaattggtgactaggtggtgatttatggaaatgcccatcagccctctgttctgagagaatgccgtattatatatcagaatcttatatattagtcaatgttttattcaacagcaggtatatttttaaatttatggtaattccgggtttctaactcaagtataatggctgatgataccttgacc

SEQ ID NO: 316679 - DNA, 1675 bp, Homo Sapiens
  misc_feature (538)..(538): n is a, c, g, or t
  misc_feature (1160)..(1160): n is a, c, g, or t
ccaaggccaggcatccagtgtgcttagtgctgagcagggtttcagagctcacccccaggagggtgcagacctcagccaaggtcgcagagcagaggagacccgtgggctgggattccacctgtgcccaccctggcagcatcccacctcctgagtcctctcggcacccagcaaggttgaagttcatgagttcgcccagcctcagtgacctgggcaagagagagccggccgccgccgcggacgagcggggcacgcagcagcgccgggcctgcgccaacgccacctggaacagcagctgttgaagacagagctggggtccttcttcacggagtacctgcagaaccagctgctgacaaaaggcatggtgatccttcgggacaagattcgcttctatgagggacagaagctgctggactcactggcagagacctgggacttcttcttcagtgacgtgctgcccatgctgcaggccatcttctacccggtgcagggcaaggagccatcggtgcgccagctggccctgctgcacttccggaatgcnatcaccctcagtgtgaagctagaggatgcgctggcccgggctcatgcccgcgtgccccctgccatcgtgcagatgctgctggtgctgcagggggtacatgagtccaggggcgtgactgaggactacctgcgcctggagacgctggtccagaaggtggtgtcgccatacctgggcacctacggcctccactccagcgaggggcccttcacccattcctgcatcctggaaaagcgcctcctcccgccgctcccgctcgggggacgtgctggccaagaaccctgtggtgcgctccaagagctacaacacgcctctgctgaaccccgtgcaggagcacgagggcggagggcgcggcggccggcggtaccagcatccgcaggcactctgtgtcggagatgacgtcctgccccgagcctcagggcttctccgacccgcccggccagggccccaccgggaccttcaggtcctccccggcgccccactcaggccctgccccagcagactgtaccccacgacccagccccctgagcagggcttggatcccacccgcagctccctgccccgctccagcccggagaacctggtggaccagatcctggagtccgtggactcggattctgaaggnattttcattgactttggccggggccggggctctggcatgtccgacttggagggctctgggggccggcagagtgtcgtgtgaggcctcacagctggccttgagtttttactgacacgtccctgtgtgcgggggtgtccatgtggcgtgtgtgtgagtgagacttttttactgcgtcccgtcccgccagccctgtcggcctcgtcactggccttggtcactttgtatttctgtcttggttggaaataccatcagccttccttgctcggcccaggtctgtttcaggcatctgagtcagcgtttacccaggggccgggccagagacgggggtcggccgctcgctcccacgctcctcctgccccagccctctggtgtccacacctgcccacagagaatgtaaacccagtgggctctgcccacgccaggccccaaagtgaccagactccagcacacctgtctcctcctgcctggggtggccatggggatggaagggggtggaataaaacctgtcaacctgg

SEQ ID NO: 316680 - DNA, 1211 bp, Homo Sapiens
  misc_feature (10)..(10): n is a, c, g, or t
  misc_feature (16)..(16): n is a, c, g, or t
attcttaacntttacnattgtacaaagattggtagcttttatatttttttaaaaatgctatactaagagacaaaacaaaagaccacaacaatattccaaattataggttgagagaatgtgactatgaagaaagtattctaaccaactaaaaaaaatattgaaaccacttttgattgaagcaaaatgaataatgctagatttaaaaacagtgtgaaatcacactttggtctgtaaacatatttagctttgcttttcattcagatgtatacataaacttatttaaaatgtcatttaagtgaaccattccaaggcataataaaaaaagaggtagcaaatgaaaattaaagcatttattttggtagttcttcaataatgatgcgagaaactgaattccatccagtagaagcatctccttttgggtaatctgaacaagtgccaacccagatagcaacatccactaatccagcaccaattccttcacaaagtccttccacagaagaagtgcgatgaatattaattgttgaattcatttcagggcttccttggtccaaataaattatagcttcaatgggaagaggtcctgaacattcagctccattgaatgtgaaataccaacgctgacagcatgcatttctgcattttagccgaagtgagccactgaacaaaactcttagagcactatttgaacgcatctttgtaaatgtacactccgcaattttcccaagatctatgccataattcaatgaactccatgaacactgcttgtagttgggtgtccaggactcctcaaagctttccctcagacattcccccttttctcctttgaatccatcccgacctgggatcccaggtgtacccggaatgccattggccccagggctcccgtctcgaccaggcactcctgctggcccttgtaagcacattccattatacaggtccaccacctccctctgccggagctgcgccttttgcttccccttggggatctcagaggcgctcgacggcgcgggcagctgcagcagcaggagcagcaggaggccgcggagccgctgcggggaggcggcggggccctggggtcgcatggctcccggctgccgggcagcgcggagctggaggcggaggagaccgaggagaggaacgtggtcagcgtctggctccgccgcgctccgaggccgccgcaggctcctcgtgccgaattcgccacccaggcc

SEQ ID NO: 316681 - DNA, 779 bp, Homo Sapiens
  misc_feature (72)..(72): n is a, c, g, or t
tttctactgcatttctctggtttggtgtagaaattataagcctgtcttgccccttgacacttatttctgttntgttaccaattccctttgttgaataaacaaattgatcgataaatttcccatcccctgtagcattctgaagagcaaacacttgttcaattttcacaactggagacatgttacacttctgcaaatccaggctccctttgtgcatcgtaatggaagctggtaaggatttccttgctgccgcagttttccaggctattttaacaggcggtggctcttcctcttccgcacttgtgtgccgcctctggctatgtctccgaatttcagtacttgagagtgaggaggccacctcccctgcattggtctgttctggctgagtattcagcacagatcttggtcgtcgggtttttttaacttcggttttggaggcaacactcttttttgcttgggataaagcctcttcaggctgtttatcaatgtaaataaaagtatactgttctattctttcttctcgagtcattttcaatgctttctctgcatgggcaatgccaatatcccactgagcacgttctctctgaggtcggggtttccgaatcttttgtttctcagagtgattgctggcttgtttggttgcctcagccagtaattcttcatactgtttatgacctttatactctcgtacccgtttttcatgaacccacgccctctctggctggttgctaaaaaactggacatgatattctcgggcacctcttgtgttaattttagtatcc

SEQ ID NO: 316682 - DNA, 406 bp, Homo Sapiens
gggcggctaaaaaataccttttatttttactcaacttgttataggggcagataaagactttggcaaatttgattaactgcacaaaataatgttatccaaactgagtaatttattgctggtctgaggcttgccttgtttacacttaagtagaatttacgttgtttccacaaatggcagatatcaacatttaaaggaatttaatagtgacctattcaataaggcaatcatcttggtagcaaacttttatttaaatcttacataactcaagctttataaaaagccaacataattgaaaattgggttctccctctaaagccttaagtattcaaagctcaaaacagttaatttaaaaataagcaaacaaatatatcaaaaaaaccctgccagcagatcctgctgaaatact

SEQ ID NO: 316683 - DNA, 1128 bp, Homo Sapiens
atattcataagtcagaatttatttcataccatctcacttatagcattttcaagtacaacattctgctcaacatcatttacacttgaaaacagaaaagcacaacttggtaaggcaccaggttacgatagtctggagagaaggccttgctcccattttggcttgtgtaatacctgggtagtttctcttgagtctgtcaagcagagaacaaggttataaaaggtccatttatacatacatggtaacaagagataacaaacagttttgaagtatgctgtatttataaattataatggtggcctacacttgtagttcagccaaagtggcattctctaaagcaaaattcttataaaatcttctctgcaataccaagctgcaagtttaacaattttttagctttgaagtgaaccaactttatatttaactcaaacacatactttaaaaacattttcggcccccaaactctatgttcacgaagaaataaaaagggaggaaaatctcaagtataatcgtacctttactattctataaaatgcagcaatatattttaaaaactgttgcatttaaaggtcaacccactagatttttaacactaacagtccaaggtgttatcaaccccacttaaaattcaactgtataaagctttcagaactgggccacacaggtgtacttcactgagcactttccacccatggcctaaaggcaggaggtgtggaagtcccctccagggagaccaactgcagccccatacactgtcacacgcataaaacttctttcaagttttgtgttctatcttaaaaatgaatttgcactatactccatgccatttactttaatataaaaatagtgtttcaaatcgcttaccagttaaataactcatcttccctcccacacctccaggcaccagacaggcagagcccagcctgggaagcctagctttccacagataggtaagccaggcgcggcaagatgagactgtattcagttaggtctattttaagcatttccacaaatcattttattccttcaggttgtaactaaatgcttcaggaaactatgaccgacatcaattccaatgtgttgaataatcaatcagtctatgtattttagtggtttaaagattaatctttt

SEQ ID NO: 316684 - DNA, 447 bp, Homo Sapiens
aaaatattcataagtcagaatttatttcataccatctcacttatagcattttcaagtacaacattctgctcaacatcatttacacttgaaaacagaaaagcacaacttggtaaggcaccaggttacgatagtctggagagaaggccttgctcccattttggcttgtgtaatacctgggtagtttctcttgagtctgtcaagcagagaacaaggttataaaaggtccatttatacatacatggtaacaagagataacaaacagttttgaagtatgctgtatttataaattataatgggtgggcctacacttgtaggttcaggccaaagtgggcattctcttaaaggcaaaattctttattaaaatcttctctggcaatacccaggctgccaggtttaaccaattttttaggctttggaggtggacccactttattattttactccaac

SEQ ID NO: 316685 - DNA, 605 bp, Homo Sapiens
tgagaggcaaagatgcactaaactgcctacacatacccaggtatgtctttctcctcatggacaattattgaagtgtttcgttacatgtcttaggcagcctgaagaaggtaggaaagccttagtagagggaaaatcaaaccaaatgagattaagtcaaaagaccagataactatcgtctgcttatctacttaaaggtgtgtggcatttaccacagtgaggagctaacaggagcctcccacactacatgcagggcccaaaggggccagcgatggtgtgatacccagtcaccgatgatgagttgcagttggaccaagtacagatggagggtctggcccatgcagggcctcggggtgaggttcactaggactagctgcagggggacctggctacactctgtggcacaacagggcttcacaaaatggacactacacgtgacgtgggctgaaaggtggagcagagactgggtgggagtgtcagttgcacgttgtggggtaaggggtagagggagcagggcaagtgtattatgtaaaacaggtctcttattccgtcattcttgaaagacttctccttacaccatctcatactgattggccgtgatgaaccgg

SEQ ID NO: 316686 - DNA, 1684 bp, Homo Sapiens
  misc_feature (614)..(614): n is a, c, g, or t
  misc_feature (1287)..(1287): n is a, c, g, or t
  misc_feature (1296)..(1296): n is a, c, g, or t
  misc_feature (1300)..(1300): n is a, c, g, or t
gcttgtaattgctctatttattaatacatatatcacaaatgttcacaatatcaatgcattcttgttggcatgctagacagaggcattatttttgaagatcttttaaaaatattttgacttgttcccccttcacactcatttttaaattgtttggatgaggtcctcaatgtctataatgtcaatgcaagaaaaaatacagagagaagtagtaaaataacacaatagcaattaattggggaaaaacaaaatatcatggccttcacaagaagcaacaacacagctttgtaacagggttatacaggtttcaactgagaggcaaagatgcactaaactgcctacacatacccaggtatgttaacaggcaaggaggccacctcaagttcagtttcccttcatgcatgacacatgctttttttctcctcatggacaattattgaagtgtttcgttacatgtcttaggcagcctgaagaaggtaggaaagccttagtagagggaaaatcaaaccaaatgagattaagtcaaaagaacagataactatcgtctgcttatctacttaaaggtgtgtggcatttaccacagtgaggagctaacaggagcctcccacactacatgncaaggccaaaggggccagcgatggtgtgataaccagtcaccgatgatgagttgcagttggaccaagtacagatggaggggcctgcccatgcagggcctcggggtgaggttcactaggactagctgcagggggacctggctacactctgtggcacaacagggcttcacaaaatggacactacacgtgacgtgggctgaaaggtggagcagagactgggtgggagtgtcagttgcacgttgtggggtaaggggtagagggagcagggcaagtgtattatgtactgtgctctaacattctttggaagtctttcaaagattgctgcagttcctttttaaaacaggtctcttattccgtcattcttgaaagacttctccttacaccatctcatactgattggccgtgatgaaccgggacagacagcaggccagcagcatgccaattaactgggagaatgcgattccaaacgccactccagcgatgattcccatgttagtctccatgaaactagttaccagatcataacaacccttctggttaactttggtggcggccacagtcagattgtgtagatcctggggattacaatcagtttcgttcatgcagcagctgggggggatgccatgctccaggaagtaggggctggtgctccagttggtgtagttctgcacaccancagcagctncagntgcgctgcacatggtccactgcccggctcctctcatcattgctattgtaagtctgcatagcgtccgtgtaagtcctcaggaaggtgtccttgatctcatgacgaaacacaaaccctgaaatgccagctacgagctcagccaggaacaccagggacagaaacatggcatacagtttcagcatccatgggctaccacgacatgtagcaaagcatccaaacaggccaaagacaacaatagtggtgccagttccgatgagcacatagggagcatttgtggagttctcggcaataagggagatataggtgcccagagtaagtttgccccagactccaacagccagcaggatcaccccagtgatccagaagacgaaggagtagatgatga

SEQ ID NO: 316687 - DNA, 1556 bp, Homo Sapiens
  misc_feature (35)..(36): n is a, c, g, or t
ttcttttgactgccagccactggtaaccggtaatnnggatattatactgtggaggaccccatatatttgagggtgcagattgtgggcccacttgtggggccctcttataatatttgggctcttcgggattatgatttgaatcaaacttgaaaaattgcctttgttcctgatattaaatcagaagatgaggaagaaccagtaaataccctgcaatggttgatcatacaacagtgtggcagacttgctcctgactatattttttccatcaacagccagatgtgattttaacggttgtacttggctgctgaggtccattatcactaagaatatcatagatttttagccctccaatctccatattagttatgctatgagatttcacaacagatccaactggaccacttttctgaggggagagatcttcagtgcttttggaaatacctaagtcaacagaacaatcactgtcatgtggttcagtcctattaggagactgggaagtttcctcagaatgtccatttacccttatttacggattccaaattaggatacttgtttccagttttccaagtgctcagtttcctctttagaattaatgcttaaaaagcttgttccaagcacaatatcctgtgtttttgatctttccatgatctctggttgaaatgtatcattagttataagtttattaagattcatattgatatgatctaatttgtgagtgtcatcagctgtggctgttgagtcaacacttttctcaattagaactaatcgctcttcaacattcaaatcatattcaggtaaagttaaaatcttttttatcatgagctttgaacttttcctctgttgaactgtttaaaatatctccattttgtaaaaggctgttaaaattttcatcttcttgcctgattttggaattaatatcaatatgagtttgtttcactggagagcagagtgaggtgtcttgactactatcagtattaagagaaactgaatcagacatccgagatggagaagaacaattgctgttattctgattgctattgtgtgtaacttcatctgataaagaatctgtttcctttgtatcatcttttttgttattactaagtgctacgacttttggctggcttaatagaggtttcaattaatggtggtcgcatctccgccattttcatctcttcatcagaagaaagttcttcagattcctcaaaaacatcatcatggttaacaatatgcttcaagttctcagaggctttcatatttgcagtcactggtaaactcccaggactaatctcagcttcaggttcactgatcttctgtacagagtttcctatcatatatttttctcctttcatcaactttgctttttactgtagtagtactttctgaggtcttcacacccacatctttatttatatcttgttgatcttcatgtggtttcaaatctcttcctgagtcttcattggtctcttcatcttttaatctatgtacaatggtttgaacagttttgaccatattcttaagctcatctgggtatggtgttggatatctttttaaatttc

SEQ ID NO: 316688 - DNA, 1270 bp, Homo Sapiens
ggatactgtttttgctttagcaactctgttttccggactgttattaggactctgtatgatatttgtggcagattgcctttgtccttcaaaaaggcgcagaccacagccatacccatacccttcaaaaaaattattatcagaatctgcacaacctttgaaaaaagtggaggaggaacaagaggcggatgaagaagatgtttcagaagaagaagctgaaagtaaagaaggaacaaacaaagactttccacagaatgccataagacaacgctctctgggtccatcattggccacagataaatcctagttaaattttatagttatcttaatattatgattttgataaaaacagaagattgatcattttgtttggtttgaagtgaactgtgacttttttgaatattgcagggttcagtctagattgtcattaaattgaagagtctacattcagaacataaaagcactaggtatacaagtttgaaatatgatttaagcacagtatgatggtttaaatagttctctaatttttgaaaaatcgtgccaagcaataagatttatgtatatttgtttaataataacctatttcaagtctgagttttgaaaatttacatttcccaagtattgcattattgaggtatttaagaagattattttagagaaaaatatttctcatttgatataatttttctctgtttcactgtgtgaaaaaaagaagatatttcccataaatgggaagtttgcccattgtctcaagaaatgtgtatttcagtgacaatttcgtggtctttttagaggtatattccaaaatttccttgtatttttaggttatgcaactaataaaaactaccttacattaattaattacagttttctacacatggtaatacaggatatgctactgatttaggaagtttttaagttcatggtattctcttgattccaacaaagtttgattttctcttgtatttttcttacttactatgggttacatttttttattttctccattggctgcttaatttccctggcaaacctgctttatgttttagctaaacagcgtttttcttgttgcttccaacctgcaggttgtcgcgagattcctcccatgagcaacctgttgtctttaatttgcgccctttttcgagtttcactcatcttgctggactcaccgggaaggtgtttttccttctgggggaaggagacacccggttgttgtgttgacaccgcgctttcttttgacacacattaatggtcttcccacacctcttttttt

SEQ ID NO: 316689 - DNA, 936 bp, Homo Sapiens
  misc_feature (587)..(595): n is a, c, g, or t
  misc_feature (919)..(919): n is a, c, g, or t
ataccctatgtaagtgaaaaaaattggaaatagaatctggaattgggaggttattcaattgtcaatacggaaaaaaaggaggctcttcatatagcctttgaagacatgtggccatatattactgtattcagacaagactataggtaaacagaaggtatccccagtaatgactggcgtcacagtttcgatataaatattgaattaaatgcatgagttatggaagggtttcatagactgtaatgatattaatgttgatacaccttgggtatatcaagctaaacaagtcttagagaataatgaaaatgatccagcagatacaatagcatgtcataagagaattagctgtctttatttttatttgagaaggattagcataatatagaaagactatgtatatgagttccttaagacatggcaggacccttgccttttaatacatatttgaaaattataaccatgttgttcaaatcccaaaatactctgggaggagataggggccaaaataagaaaataaatcctttttcatggatggcagaattaggatgtttccagaaccagcactgtgcccatcgtagtaggcactgaannnnnnnnngttcttctggtgctgctgtgagacctccaactccagtaggccactgatgtgattgagctgttctgaatattctcttctgcccagggagcaggaggctcttttagcattgacagtgaggagtatgaagcgatgcctgtggaggtgaaactgctccccaggaagctgcagttcttctgtgatcctggagaaagtttgtccagaccgtggcttctagaaggacaggtagcagctccccaatctcctccatcatcactgtaagtgaagtcaggttcagcccgcacaggctctgctcatggagtaggccaccattcctttctaccacanaccacatttctcggact

SEQ ID NO: 316690 - DNA, 1253 bp, Homo Sapiens
  misc_feature (430)..(430): n is a, c, g, or t
  misc_feature (604)..(604): n is a, c, g, or t
  misc_feature (1044)..(1131): n is a, c, g, or t
  misc_feature (1145)..(1145): n is a, c, g, or t
  misc_feature (1147)..(1147): n is a, c, g, or t
  misc_feature (1159)..(1185): n is a, c, g, or t
ggggctcgggagatggacggccgccgtgttttgggccggttctggagtggctggcggcggggcctgggtgtccgcccagtgcccgaggacgcaggctttggcaccgaagcccggcatcagaggcaaccccgcggctcctgccaacggtcggggcccctcggggaccagcccttcgcggggctgctgccaaaaaacctccagtcgggaggagctggttgatgcgctgcgggcagccgtggtggaccggaaaggacctctagtgacgttgaacaagccacagggtctaccagtgacaggagggctcagggagcaggagcttcaggttgtccgagcatctgggaaagaaagctctgggcttgtactcctctccagctgtccccagacagctagtcgcctccagaagtacttcacccatgcacggagagcccanaggcccacagccacctactgtgctgtcactgatgggatcccagctgcttctgaggggaagatccaggctgccctgaaactggaacacattgatggggtcaatctcacagttccagtgaaggccccatcccgaaaggacatccttgaatgtgtcaagaagactctcagtcacttntcgtgtggtagccacaggcttctggctgtgccctggtccagctgcagccactgacagtgttctccagtcaactacaggtgcacatggtactacagctctgccctgtgcttggggaccacatgtactctgcccgtgtgggcactgtcctgggccagcgatttctgctgccagctgagaacaacaagccccaaagacaggtcctggatgaagccctcctcagacgcctccacctgaccccctcccaggctgcccagctgcccttgcacctccacctacatcggctccttctcccaggcaccagggccagggacacccctgttgagctcctggcaccactgcccccttatttctccaggaccctacagtgcctggggctccgcttacaatagtcctccctctgttcctgaccccctcacacacactggaaagtgagggtgggnnnnnnnnnnnnnnnnnnnnnnnnnnnnnnnnnnnnnnnnnnnnnnnnnnnnnnnnnnnnnnnnnnnnnnnnnnnnnnnnnnnnnnnngacttgtgataatnanagttcctccctnnnnnnnnnnnnnnnnnnnnnnnnnnnaacatgtccgggcgcccttcggccctccgagaagcttttctagaacccatttcgtttggccggcccgg

SEQ ID NO: 316691 - DNA, 2089 bp, Homo Sapiens
  misc_feature (316)..(316): n is a, c, g, or t
  misc_feature (350)..(350): n is a, c, g, or t
  misc_feature (1662)..(1662): n is a, c, g, or t
cagattttgtctacattttattctttcactcaacagaatagaagttttgcatttcagagtaggtatgagatggccactacctcgttccggccctggcacccagacagcaggactccaaagagggtcggcctcctaggctgccccggactaggggcagcagtaggcagtcatttggcaaggacattgcagggagagggagaggggacccctgacctgcctctggccgccgaacccggggccctcccctggctctctttggtatctcagaaaacaaaggctgtccctgtctttgtcagccctagaccaggtctgtggnccatcttcaccagctcccctggagggtggggccncctcacaaggccttttagcagcccgggaccagctcacaggggcctaccaccagccaggcaggtggggcgcgccacccgggacagtgaaggccagctgcgggtgggccctgggctcatttcttgtagtgattgggggcgtcggcaaaagcaaacttgaggcggttggcctcggccagcaacaggctgatgtcctcatcatcccagtgggctgtgggcaggttctggaggaagagcagcagctcttgaaaatctttttcttctagtatttccttcctccatctcacgagaaaagcagcgcacacgtacaagtggaaatgagaaaagccgtccggttcagactggtaggtgtcccacaggcggatggtacaacgcaggggcacctccctcatcagcaggttgttcatccagcggaaggcaaactgcaggtatctcacttcgtgttggtccaggtgccggtgcacttgctcatcaatccggctcacgagttcttctaacattttcactttcatttgaatcccaggttgggcaaaggtgtagttgtcctgaatgccatccagcagcttgctcatgcaccagtaggtgtcggcctcgatgttgcacagcacctctgcgggcacgccggagacgtccaccgtgtccacctcctctgcctctatgttttcacaaatgaagaccacaaagaaaggagtgacgagatcatttataccctgaacgtatccactggctgggtggcggatcgcccatatgaacaagatcctttcaaaaatctccgtcaccttgggctgcaggatcaacgcttcagggctcatgcgagggatgtctatgtggatctgcctgtatgtgttctggtgaacttcgtcgttcctagaatcgtaatagtgctcaataaatgcaaaatattctttttgttttctctggagagtggctggtctccggtctacattggcgggaaggtaacctgagaggagcttccacgtcattggacgcactggcttagggattccggaccagctcaacctccgtaattcctcaaggtccgtgttggggccggcaagcagctgcttgaacttgtcgagccgggaggtttttctttggctcagcggtgagctgctgagagtgctggggtcagatgtgccacccagcgtgacggtggctgagtgtgggagagactgggacctctgcagaggggcggcatcgctggcactttctgcaggacaggacgtgtggttctcactgaccgacttcaccagccggaggtcgccgctggggggtgagggcgggtttgccttgggcctggggttttggtgaaacncctggccccttcttgcagcgtgggccgcccctgccgctggctgtggttacgcagcacacggttggccgtctccatgaccacctcggagttcaggctctccgccgccatggccaggagctcatcgtcgtcctccccagcgtcccaggcatcgctggtattgctctcaaactcctggaaggtgctgaccctcttggccttcactggtgtggtcggcatcttggccgtggacctgagcaaagtgccatgtaacagtggatcaaagggggggtgctgggcaccatacacgtgctggatgctgcccgggagcttgctgttgctgcgcttccagaattgcttcctggccccgtcgctggccatggcccctcctcatccctcagacccgcggcccagacaccccgagtgcaccgccacccaggcctcgctactt

SEQ ID NO: 316692 - DNA, 481 bp, Homo Sapiens
  misc_feature (376)..(376): n is a, c, g, or t
  misc_feature (463)..(463): n is a, c, g, or t
gatccctcgcatgagccctgaagcgttgatcctgcagcccaaggtgacggagatttttgaaaggatcttgttcatatgggcgatccgcagcccagccagtggatacgttcagggtataaatgatctcgtcactcctttctttgtggtcttcatttgtgaatacataggtaagatttcttgcaaacattaaacgtgaactttagtggacttgctgtgtgttactatgtataattataacaatattgaaaattgctactaagtgtaatgttattaatgataggtaatattagagaataatagttttctcatcaacaacagctttccaaaatgtctttaatctacatgctcaactactgaagacattaaattgcagttnttatggatggaatatccttctttttaacaatatttggaggataggtaatatatttgggggagtgtagtttattctaaaggcctcccngtatggccttatgggttc

SEQ ID NO: 316693 - DNA, 620 bp, Homo Sapiens
tggattgagatggtttacagggttagatgttttgagtcaatcccattataattaccaatgctatctacctatttagttaacgttttattgccctgctgttttctccaggataattggaacagcatgtattggttgggtggaaaagatagaacttgagcagggagattgccaaagagtgaagatgtggctgagtgattgatgatggtctgaactgggtattcagggaagagaactagaagccaaccatgtagaatctatgcaggtgctcttaagacattggtttgactggaattatcttcttgttaggtcttaggaatctccttccaggtaactttttctatgattagacaattgatttgttcagggtcacagagcaaagtccacatttaattccacatggccaataaaagtgaggggctacaaggtgagatccaggggccagagttatcaaagtgatacagcacttttaggaataggacagggaatggaggaattggaattccagtattactttcaaaagcagaactggccaaaggaattggaattccagtattattttctgacagaagcagcatggagggataagagcacttggaattcaagcttgaggaactgttgaa

SEQ ID NO: 316694 - DNA, 719 bp, Homo Sapiens
gtgaaatagactctgctttattcaggtagcaaaaggttaggaatcaaacatggtttttaaaacctcctttcatctttgaaaatagaggagagaacatccctgggccagtcacagttactgtatttggctaagcacacacctgtatgagggacccgcccctccacactgttctgataggtacttagcaccctagaaactcatcctctgcaggagagagaagcaagggtctggagcgcggtcacatactctaaggtatcttccaggacagggggctgggctccctcactcccacctggagtcgctatggctattgggatcaaactaccagttacatactggttacttggaatgtcagacccggtgggtatcagtcatcagggagagggaggggaaatgccaggacacgtacatacggatgctgtcaagactacaggcaaggaggagggtggcgacaagcgctgggactccagccaaagcgggagtgcatgcttcttcccctcccagagccctgtggtttttcttcttgtgaggcataaacaggaagcctctccaacaagggggtctccagcactaggggctgaaactcagccagcctctccaaacaaagcaaaggggccagcctggccagggcctctgataaggatgctcactgtgtttccacgggggtcctgaatgaggaagttcaggaataagatggcagtcatcttctgtgccgaact

SEQ ID NO: 316695 - DNA, 424 bp, Homo Sapiens
tttttcaataagcttcagtttgaggaactgaatagtagaaacagatcttaagatttgagtcatggtaaaaccagtaattctttgaaatctgggaggtgcaaaacgacagccacagccaaccctcaccaaaatcctggagaaaaacattttattaatttaggggaacaagatagaacactggtgaagatacggcttgttgaggtctaaagccacctgagaagctggcccaaggaatgaagagaaccaatggtatgtactggtggcagataacaagctttgcactgggctgaccaactgtgttttattaaatggctttgaataaaaaaaagtgaagtgcttcattgtgttttctcagaaactaatcaaaagattacagagtcctacacaatttctcgtgccgaatcctgcagcccgggggatccac

SEQ ID NO: 316696 - DNA, 804 bp, Homo Sapiens
ataacaagctttgcactgggctgacccaactgtgttttattaaatggctttgaataaaaaaaagtgaaagtgcttcattgtgttttctcagaaactaatcaaaagattacagagtcctacacaatttggagacacaaagtggatgctgagcgactagaggtcactccaggtgtggaattttagaaagtgagtccttggagtaaatggcaccgtggctctggcagcagatagaaaggaatgatgctctggagaggaggtagggacactctgcggtcggccagtggatacatgaggggcccggctggaagtgggatctttaattcttcggtttatcttccactgctcatgcctctgtcttcataaatggtaatttcaataactcgcagtcctcgctcaatagggtctgtcaggaggaggccttgtggagcatagatcttctcattctgctcttgaatgtatttggagactttcttcagaaccttctcataatgagtttccatgcataggaagatggtatatgctgttaaacaagccaaacaaccttcgagatatgactggccgccgagcttctctgcttctgcataaaggttatttagagttcgaactgtttcttcaaactgctgcctatcaatccggttctccagctccgcagggaacttggtctggaactggcagcgtgtgccactgctgtagtctcgctgaatgaacacctttccggacaccggcgcctgctgcggcctcatggcgaggacaggacaccccgcgccgcctcctctgccctccagctgctgtcgcaccgccccc

SEQ ID NO: 316697 - DNA, 444 bp, Homo Sapiens
  misc_feature (26)..(26): n is a, c, g, or t
  misc_feature (31)..(31): n is a, c, g, or t
  misc_feature (91)..(91): n is a, c, g, or t
  misc_feature (297)..(297): n is a, c, g, or t
ccaacctaaaaaactcgaaatccctnggctnaaatagggtctgttcaggaagaaggcccttgtggaggcataagatcttcctcaattctgnctccttgaaatgtatttggagactttcttcaagaaccttctcaataatgagtttcccatgccataggaagatggtatatgctgttaaacaagccaaacaaccttcgagatatgactggccgccgagcttctctgcttctgcataaaggttatttagagttcgaactgtttcttcaaactgctgcctatcaatccggttccttccantccgcagggaacttggtctggaactggcagcgtgtgccactgctgtagtctcgctgaatgaacacctttcggacaaccgggcctgctgcggcctcatggcgaggacaggacaccccgcgccgcctcctctgccctccagctgctgca

SEQ ID NO: 316698 - DNA, 419 bp, Homo Sapiens
tttttctgctacagtatttattgagagaactgcatagcaaaacaaatagtagcatatgtgtaagttcacctttgcccactgaattctgaaataacaaaaaaggatctaatgggactgaacatcaaactccagccattggattgtagggcttttaagctacctaatgagggaaacaccaaactactctggtatgatcacagaggcatccaactgtagtaattatgtcatggccaaaattgatcttcagtcctcttccaccacgttggcatccttcagttaaaggaacaacagcctttcacctggtgtggtcagtggattcgcatacaaggtttgtagttcttatttatgatgtgacagaccagtgatctacttcgccatttcagcatcctggtataacttccttccttccttcctttctc

SEQ ID NO: 316699 - DNA, 670 bp, Homo Sapiens
  misc_feature (578)..(578): n is a, c, g, or t
  misc_feature (628)..(628): n is a, c, g, or t
  misc_feature (642)..(642): n is a, c, g, or t
gcacgagcagccctgatgttttctcacagtgcttccttgtccttctcttaacttctcattcctctataagaatgatttagactgacctgtccttttttatctgcgcatgcgagaacatcaccttcctctgtacacttggaaatgcctctggcttgttgcagccctcctttaacccaaaggaggaaaggactgcttcagaaactcccaattccaaaaagctgagtctgggtccattattttggcagaactcctaagaatttatgggagcctatataaacatatctagcttttaaaaagttcttgagggaatagcaactttcccatggctgtgcctatttcctagaccttttaaaagatgtgcagagcagcttagcattcgttgcagctgagcctaattttttcttgctcatccttgtccctttgacaataaggttaattgatagacccaccacctcttgcactctcgcttttggagcaagttgcattaactattttgagtctctatattgtccaagccattatctccttcctcccttcccttattttctccttttcgtaccctgcgtcctccctgattntcctttcgtttcttctttattttatcccattctctggtacttggactcangtgctccttcctcntcctctcctctagtggatgcatgcagcc

SEQ ID NO: 316700 - DNA, 728 bp, Homo Sapiens
  misc_feature (596)..(677): n is a, c, g, or t
  misc_feature (680)..(680): n is a, c, g, or t
gcgccaggtcccttgagtttgtttccccattatccttagcatgtagtgtttcagtccaaaatggttgcctgagtgccagctatcacacccacattccatttggcagggatggggaagcaagggcagaaggctatgctccaaccttcaaagacagacacaacacttccacttacctttcgttggcctgaacttagtcacatggccacatccagctgcaagggaggctgggaaatgtctttacaccaggtgcccataagtgcagctagaaaagacaccggggcagacaatagtctcccctacagatagggaagactgagcccagccaggtaagaacttcttccagattcctgagcctggcatctggagctgctgtgtcccacactgtagggactgaagacgtcatggctgagcgcctactgtaaaccacgtgctgctgagggctgaggtggctcaggccctcaagatgctcctggggaagggagagggggcagctgagctgggaatagagctagtggtcaccccaggaagctggggacagcgtcaacacattggttaccagtgcaggtcttgaagttatacagatcctgcttgcagcnnnnnnnnnnnnnnnnnnnnnnnnnnnnnnnnnnnnnnnnnnnnnnnnnnnnnnnnnnnnnnnnnnnnnnnnnnnnnnnnnnctnggcacctaacactttctcaagaagtactcaggggcgctggtactagca

SEQ ID NO: 316701 - DNA, 1212 bp, Homo Sapiens
aatgctgatcctgtttttatttaaaagtaggctattttgttcatcatggattttttgcattaattttgactttaaaataatattgcattaaagtcctatcttgattaataaattgttcaccacccccttaaaatttagtccccccaggtgaatgactcactttgctttaccccagtcctagccctggagactaagctgtaattgggaaggaggttagatctgggggtcggggatgtgtgggggagacaccagaaggcctccttagattctccttagatgaaggtctcctcaagtcaaaggtgggataacttccatgggttgctcaggaagccctcaagctcagatttacagtcccccaggcagtccttttcagactttctcctctagggttcctatttcagggacctcttaccctcataggagggggtcataaactgagcaaacacagacatcacgtttaccaaagaacacatgggttttgcgcaaactcggccttgggctgcagacattatcgacctcatggttcaggactgtccagccaaagggaggatatgtgggggaggacgggcaaaggtctaaaaaggacccagtctcagagcaaatgccaccctctcctcatccaggccttcctcttctccctgtcccactccagcagcccttgcccattccagcttccaggcaggactcctgggtggagcactgggggtgggtgaaaggaaggcaagtcagaggtcctggcagccagctctgagcatgcctctgcctcccacacttgcgtgcgaggggttggtgagtgtactggttgagcctaggtttttattagccatgagacctcaaagatggttctggaaggatggagggacggggtgcctaagaaagaagaggcataaagtgtgagatggatacaatagttcagttctgaggagaccatgtgaagagacagcagagtaggcagactacagcataagcaggcaggctctgtgtcatctggggtgccagttagggcccttgtaggagatagaggacttttcagctgtctgtttttgcttcatcaagagaacttagtgaaggaattatttacagaggtataggcagagttaagggaaccagtatgagatgttgaggccccagggactagcaagatagaaagcctttaggaccccctagtgttgaagcagttatatcagaatgtaggcagagctggggctcgtg

SEQ ID NO: 316702 - DNA, 905 bp, Homo Sapiens
  misc_feature (456)..(470): n is a, c, g, or t
ttttttctaaaaactgtaggcttttttattcagttaagaggtagacaaatgaacatggaaggctgtcccatttaacttgcccaaagttcacattccacttcattcatccatcccacactgccagaaatcttaaagaaataaccaagattgccaacaggctttttctttcttacttcttcttagcaataacagtcaataaactgcttgcaaaaaagttactaatttaaattttcactgtgttcaaagaacctcatccctctaagaagctcccgaatatgccaatagatcctgccactactgacaggagggcagagtaccaaggactctacttatataagagactacaagggaagttgtagttatatttttgttgttaaatccctgtgcatgtgagggcagaagctggtgaaaccaacaacgcagagcatgctctgtcaaacggctcttcatggtttnnnnnnnnnnnnnnngaatcacaagtcatcttcagagacaacattaaaacataatggaattgaagcctgatacaaaaagtagagaaatatgtacaggaattcacagcccagaaggaaaggggacctcagcaggagccagtggaacccgggctattttacacagctaattttgagacaattcatatttagcacaaaagcagttatagcacaagtaacacttccctcctctggctcccaaataaaaagactcttgtcagtcttctgttaacactgtaatcattcttcaggggagcaggaatacctaagatggtcccaaacattgacacaaattttaatctcaaacagcttcacattctgaggatgacatatctgaagattgccatgatggcagcactgataactccagaaatggggactgtgacaaaccaggccataaaaatgttacgaaag

SEQ ID NO: 316703 - DNA, 377 bp, Homo Sapiens
ctttcgtaacatttttatggcctggtttgtcacagtccccatttctggagttatcagtgctgccatcatggcaatcttcagatatgtcatcctcagaatgtgaagctgtttgagattaaaatttgtgtcaatgtttgggaccatcttaggtattcctgctcccctgaagaatgattacagtgttaacagaagactgacaagagtctttttatttgggagccagaggagggaagtgttacttgtgctataactgcttttgtgctaaatatgaattgtctcaaaattagctgtgttgaattcctgtacatatttctctactttttgtatcaggcttcaattccattatgttttaatgttgtctctgaagatgacttgtg

SEQ ID NO: 316704 - DNA, 2116 bp, Homo Sapiens
  misc_feature (51)..(51): n is a, c, g, or t
  misc_feature (220)..(237): n is a, c, g, or t
tcccttttaaggaagctcccgaataatgccaaataggttcctgcccactanttgacaggaggggcagagtaccaagggactcttacttatataagaggactacaagggaaagttgtagttatatttttgttgttaaaatcccctgtgcatgtgagggcagaaagctggtgaaaccaaacaacgccaggagcatgctctgtcaaacggctcttcatgtttnnnnnnnnnnnnnnnnnntcacaagtcatcttcagagacaacattaaaacataatggaattgaagcctgatacaaaaagtagagaaatatgtacaggaattcacagcccagaaggaaaggggacctcagcaggagccagtggaacccgggctattttacacagctaattttgagacaattcatatttagcacaaaagcagttatagcacaagtaacacttccctcctctggctcccaaataaaaagactcttgtcagtcttctgttaacactgtaatcattcttcaggggagcaggaatacctaagatggtcccaaacattgacacaaattttaatctcaaacagcttcacattctgaggatgacatatctgaagattgccatgatggcagcactgataactccagaaatggggactgtgacaaaccaggccataaaaatgttacgaaagagacgccagtcaacagccttcttggaccggagccagccaacagacacaacagagcccactttacaatgtgttgtactgatgggaaggccaatatttgatgcaatcaccacagtgagggcagatgccagttcaatactgaagccactagagggtgtgatcggtgtcagatccttccccatggtctggataactcttcttccccaaacccacagaccaacacagataccaacaccaccatagagtagaagccatattggtgttgccacttttgaagaaacatctcctgtgtcataaaccaaatataaagcaaccagaggcccaatggcattgcttacgtcattgccaccatgggcgaatgacccaaagcaggctgtaaggatctgcaggaactggaagaggagagagacttcaggcttatcctggtcataccattcttctagagagccattactttccttttctgtcacctagacccatctctgccttgacactcatgtctatctcagatgctgagtgaaggtcagacacagcattgcagtaactggtgtaactgtccattcgaattcgcttcttggagtctgcattaggccatgtcagcttctccatttcttcgcccttctgttcaccttctttggcacggaatgaatccagaggcatgccacatattgccatggtataggaagtatagctattattgcgccttaagggtttgtcaccggagtctcccatgcaatctcccaccttggcaagatgtaatttatggagtagctctttgtacaggccggaatccttatgcacggtgtgatactggtagtggccactggagtttatttggttgctgacggcttgactgaactggacaaggttcccattaggcaactgcactgcaccattcacggtgctatctatgctggtttcctctttcaagtccacgctgggaagcctctctctctctggagcttcttccaaatctccaagtttgaatgagactgttctctcctccaccacagcctggaggggcacagtggcaggccttacctcagaaacaggatgcttgttttcaatatcaccaacagacaactttgtttcttcatggtcttctttcaagctattctttttttccattaaggggctttcagaaggactacactttatttctcgttcaatttttctcttcatcctgggacatacaaagaaccagacgataagggcacagaaaactgcacatcccaccgagatgaggatggtaccccacagaggaagtttgtcaaagcccagcaacggtgctccagtatacatgatggaaaaaaagaatattccaactgtgcaggcatagaaaactggcaaagctcgcaaaccattaggaactggatctgccttatggaggatgaatgcacgaaccaggaagaataaaattccagacataattccagaaagcagtggggac

SEQ ID NO: 316705 - DNA, 687 bp, Homo Sapiens
  misc_feature (623)..(623): n is a, c, g, or t
  misc_feature (656)..(656): n is a, c, g, or t
gtccatcttcaatggaaaggagaagggaaaaccttttttaaaaagaagaaagaaaactgaagtttttgatttgactagagaaatattcagaagactccttattttcacctagtctaatcacaaaattgagaaacaaacattatcccttgaccatgtaaattttacaccacattatgtcaacagcatgtaccttccacattgagtattcagaaagaagtgatctgaactctgaccattctttatggatacattaagtcaaatataagagtctgactacttgacacactggctcggtgagttctgctttttctttttaatataaatttattatgttggtaaatttagcttttggcttttcactttgctctcatgatataagaaaatgtaggttttctctttcagtttgaattttcctattcagtaaaacaacatgctagaaaacaaacttttggaaaggcattgtaactattttttcaaatagaaccataataacaagtcttgtcttaccctaaagtcaaatgctgaagattctttactgctgtcatcagcatctacaagtagcatattttggatggtgtttgtgtgctacttcaaagtaactaggaatttccagttgtatcagntgttgattcatttcattacttcctacagagcanacatgaaccgtggagttgcccacagtgaagt

SEQ ID NO: 316706 - DNA, 384 bp, Homo Sapiens
  misc_feature (292)..(292): n is a, c, g, or t
  misc_feature (356)..(356): n is a, c, g, or t
gaaaactgaagtttttgatttgactagagaaatattcagaagactccttattttcacctagtctaatcacaaaattgagaaacaaacattatcccttgaccatgtaaattttacaccacattatgtcaacagcatgtaccttccacattgagtattcagaaagaagtgatctgaactctgaccattctttatgggatacattaaggtcaaatataagagtctgactacttgacacactgggctcggtgagttctgctttttcttttttaatataaattttattatgttgggntaaatttaggcttttgggcctttttcacttttggctcttcatggatataaggaaaatgtagggntttcctctttcagtttggaattttcccc

SEQ ID NO: 316707 - DNA, 650 bp, Homo Sapiens
gctgcaggaattcggcacgagggcggaccccagtgtctttatccctcttttgcacagtcagcttctgcagctctcccgggctagcatggcagcgtggaagagttggacggccctgcggctctgcgccacagttgttgtacttgatatggtcgtctgtaaaggatttgtagaagatttagatgaatcgtttaaagaaaatcgaaatgatgacatttggcttgtagatttttatgcgccatggtgtggccattgtaaaaagctggaaccaatttggaatgaagttggtcttgagatgaaaagcattggttctccagttaaggttggaaagatggatgctacttcctattctagcattgcttcagagtttggagttcgaggttatccaacaattaagcttagattccctggaggattgaagattggggtttggccattcttcataggtgaaattaaaaggggacttggcatataattatagaggaccacgaacacttccaagtcaacaaatgtttgaacatatgcagaagagacaccgtgtatttttcgtttatgtaggtggagaatcacctttgaagagaaatacatagatgctgcttcagaattgatggatatacatacttcttttctgcctcagaagaagtggttcctga

SEQ ID NO: 316708 - DNA, 661 bp, Homo Sapiens
  misc_feature (17)..(17): n is a, c, g, or t
  misc_feature (30)..(30): n is a, c, g, or t
  misc_feature (40)..(40): n is a, c, g, or t
  misc_feature (52)..(52): n is a, c, g, or t
  misc_feature (58)..(58): n is a, c, g, or t
  misc_feature (61)..(61): n is a, c, g, or t
  misc_feature (106)..(106): n is a, c, g, or t
atcttgcacaggcttcnatatcctaaaccntgtcatatcntatttccaaatnacactnacntttgactacatgtccattcttataccttgaatgatgcaatatacnccaattacatcttggacacgaagagcaagaagggacaggcaccactgaagtcctttaggagcttggacatttactaatatctgctagtgtgcaaatcccctgacatcctggatattagtgatggttttgttgctcttcaaattcaaggataaggatgcacaagttaccatccttccaccaatggaaacatttttcctggaaacaattttgccagatgctggtcgcatttaaaaactcactggcttaactgaagcatataaaaactggatcacaatgaaataatgctgaattaatcattactgaatgaaaacttttccatattaaagaaccattatttacaaaagtgattcctattacaagaaatggagaatctaagcacacttgaaacattttttggtgtcttaatccaacaagtattccagatatataacaatctttttatcagcaataacatgcattttctctactttaccttgtaatggaaattttcatcttcaaatttttcaccataaatactttctccacctgtcccattctgatttgagaagtcctcgt

SEQ ID NO: 316709 - DNA, 1168 bp, Homo Sapiens
aaatgcaaaatgagttttatttgctagtcctttttattctcaaatatgttaaaagcacatgattatattgtcttatgttgtttcagttatgatcctcttctgaaatcaggaatacgaccccaagaaatgagtgagtcatatttgcttttatatcttatgcattgcaagaattcagtctcacaaacagttgaaccataaattaaaaatggtagactcacatttgaatagcagctagttatatataaaaaaatccaaattttttaaaaagtgacttgtattaataaaaactggtgaataaatcaccaatgatttgtttcctcatgctgtcatattattcttcagatacaaccataaaggcaaataagccataaagacaaacaagatgacatattaagaatgtttaaaattgcttcttccgaattttccggattctactggcaaagcgaagctttggcatcttctttttctttttcaaagcttttgcacatgcacgtttgcaatcctccctgctaacaaagttattgtcattccctccacagccagtataggtgaaagcatcacaggttctgtatcttggattaaaataatagcgagtcacattggcagagcacagtccctcatcttttggactgtagcaaaatgatggaattttctttggtgcgcagaagcccatacaagtagcttcatctggaaacctgttctcaatccggttccggtgacacccaccggaaaagaatttttcacatgtcatggaacttagattaaagaaatacttttctgtggacccctcacactggtcgtccacactcacttgcagccggcaaactttgggaactttttctatcctccagcaagcatcgtcgcaagcctcccaggtgtagaaattgttggcgttgccctcgcagcccccgtacaggaactggcggcagctctgcgtgtacctgtcgtagtagtaacggagaagtagggcccggcagggtccgtagtctaggggcaggagacagatctccgcgttatttcctgttggctcctgagcagcatcgcccagtgcagcctccgtcaggaaaagcagcagaatcgacagccccagggggcgagcggggtccatggtgcagggggtcgggcggcccgctgggcaaggcgtccgagaaagcgcctggcgggagga

SEQ ID NO: 316710 - DNA, 1506 bp, Homo Sapiens
  misc_feature (23)..(23): n is a, c, g, or t
  misc_feature (45)..(45): n is a, c, g, or t
  misc_feature (59)..(115): n is a, c, g, or t
  misc_feature (161)..(161): n is a, c, g, or t
  misc_feature (278)..(278): n is a, c, g, or t
tgtaattccccagcttacttggnaagcttgaggccaggaggaatngctttgaaccccgnnnnnnnnnnnnnnnnnnnnnnnnnnnnnnnnnnnnnnnnnnnnnnnnnnnnnnnnntgaccagagcaagactccatctcaaagaaaccaaacaaaacccacntttacttactgtattgtgacatgtttattaagcatgaacccctatcagtactcctaaactgtaaacagtaaggaactaaggtgtcaaaagaaacacattagggatcatattcattgnccaaaaccctttacattttcttattgcatttatacaatcaacacacaataagcaaaacttgaatccttttctaagcaaacatttttgcatatactgccttctctttatctttctgtgcctttatcttttgtttgactttcagcaattctgcctggatagctttatcttctggtgctatcccctgagctttcttaagatcagccaatgcttgatcatattcttttaatccttgccatccttgagctctgcggtacaatgctttggtatttgatgggtctagttcaagagcctctaaacaactgtcaattgctccctgccaatttgacatcttcagtttacaagcaccaatattcagtacacagcttaaagctataggttgcagcttggctctatctgctgtctcaataacagcctttgaactgtccacgtatcttaaaacttctgcatattttttaatagccatctcccagttctgggatttgaaaaaagtatttccaatgttttttaagtcttctgttattaataaaattttatctacatcttttaaatctatatccgcatcctcagggaaatctggatgactgtcgccagagccatcttttgggaatattcccccgtcatctccttccttcaattctccacattctgcaataacgcacaatttagcaggtttttcacctttcacttccacattttccaatatccttgccactcctattcctttaattacttggccaaacaccacatgtttcccatccaaatgaggagttggaactgttgtgataaaaaactgagaaccgtttgtgttgcggcctgcatttgccatgctcagtaaaccctcccgatcatgcttgtaatggaaattttcatcttcaaatttttcaccataaatactttctccacctttcccattctgatttgagaattctccacccttaatcataaatttcttaataattcgatgaaaagggcatcctttgaaatggagaggtttcccagtcgtgtgtccaatgcctttttctcctgtacacagtgcacgaaaattttccgcagttttgggtacgatatctgcaaacaattctaagacaattcgaccaactcgctcccctccgatgtccacgtcaaagaagactcgaggtttactggggttggagggcttggcttggggggacgggtgcgacatcttgacttgcagacgtgtttagtacggaatatcagagtacctccc

SEQ ID NO: 316711 - DNA, 501 bp, Homo Sapiens
  misc_feature (108)..(416): n is a, c, g, or t
ttttacaaacttaagctctcatctctttattcaataagatgtgtctttacaagtttaaaaagactggacaccattattttttatgaataatgcacataaccattttannnnnnnnnnnnnnnnnnnnnnnnnnnnnnnnnnnnnnnnnnnnnnnnnnnnnnnnnnnnnnnnnnnnnnnnnnnnnnnnnnnnnnnnnnnnnnnnnnnnnnnnnnnnnnnnnnnnnnnnnnnnnnnnnnnnnnnnnnnnnnnnnnnnnnnnnnnnnnnnnnnnnnnnnnnnnnnnnnnnnnnnnnnnnnnnnnnnnnnnnnnnnnnnnnnnnnnnnnnnnnnnnnnnnnnnnnnnnnnnnnnnnnnnnnnnnnnnnnnnnnnnnnnnnnnnnnnnnnnnnnnnnnnnnnnnnnnnnnnnnnnnnnnnncaaacaaaaccactttacttactgtattgtgacatgtttattaaggctgaacccctatcagtactcctaaactgtaaacagtaag

SEQ ID NO: 316712 - DNA, 612 bp, Homo Sapiens
  misc_feature (595)..(595): n is a, c, g, or t
tgttggtggtagaaaatcacctgagggccacagtgttccctagccctggtgtttaggggcaggattatgggtgagatttttgagtctctaagttgacccctacggctctgaagtgtatgttgagaaattcagctgttatcatcctaggtggacttgctccctcctatcctcctacttcaaatgcagaacttcaatcgtttacaaaagaagactgaatcgtataatagaacacacccttattcattggctggcttcaccaatctcatggctgaacttgtaacatgaatttgcttctgagattatggaggctgaaattcccaagatggaaggaaagctggatacccaggaaagcatttgtttcccattaggcctcttaattctctcctggcccttgattgattgcatgaggcccacccctattaaggagggcaatctgcttcacttagtctgcccatcccaatgttaatcgtatctgaaagactctctggaacacaaccagaatcatgtttggccaaatgtcctggcaccctgggtgctcgtcacagtgacaagtacaagtaactatcacacatgcccttttgtcatatggtgattnccactgtttttcttcaa

SEQ ID NO: 316713 - DNA, 793 bp, Homo Sapiens
tttttaggcaaagtgttctttattatcaataaacacaaaccattaaagaaaacattgataaattcgactttataaaaattaaaagtttttgctcaacagtattaagagaacaaatataagctgcagtttgggagaaaaacagtggaaatcaccaatatgacaaagggcatgtgtgatagttacttgtacttgtcactgtgaccgagcacccagggtgccaggacatttggccaaacatgattctggttgtgttccagagagtctttcagatacgattacacattgggatgggcagactaagtgaagcagattgccctccttaataggggtgggcctcatgcaatccatcaagggccaggagagaattaagaggcctaatgggaaacaaatgctttcctgggtatccagctttccttccatcttgggaatttcagcctccataatctcagaagcaaattcatgtatatatatacacacacatatacatttcataggtatgtggctaagattgtatttttacaagttcagccatgagattggtgaagccagccaatgaataagggtgtgttctattatacgattcagtcttcttttgtaaacgattgaagttctgcatttgaagtaggaggataggagggagcaagtccacctaggatgataacagctgaatttctcaacatacacttcagagccgtaggggtcaacttagagactcaaaaatctcacccataatcctgcccctaaacaccagggctagggaacactgtggccctcaggtgattttctctcgtgc

SEQ ID NO: 316714 - DNA, 609 bp, Homo Sapiens
  misc_feature (68)..(68): n is a, c, g, or t
actatgcatatcttatttattctcatcaagttactcctcattccgactctccctgctgagtcagaagnatggaaggctagggaataacatttacatccacacactgtatactgtgctctctgcttgatgctttgcccacagtgatatttcttcatatagtgcaatgtagtttgtaagctggttttaaatccatgagatctcaagtactctctgccttataggacagatgtagatacggttttggtctttctgtttttacagttttataagagtacaagtgatgctgttttatttgaagcctgagagcttctggttccataaccagaaattgctacctggctcttctaatggaatggagggcttttccattcttagaccatccaactctgaacttgctccgaatctcaaacctttctgttcacagaacaaacgctcaagggctttcaagagtgtttctgtagattaggcttattagcatcaacttcatgacttctaaaatgtgactgctttcatgtccagatagcttgaatacaggtatctaccagtgatatggggtggagaattaataatgcttggttacataaagtcagtgttgcttatttctcgtgc

SEQ ID NO: 316715 - DNA, 387 bp, Homo Sapiens
gcgacgcggctggcaagactgtttgtgttgcgggggccggacttcaaggtgattttacaacgagatgctgctctccatagggatgctcatgctgtcagccacacaagtctacaccatcttgactgtccagctctttgcattcttaaacctactgcctgtagaagcagacattttagcatataactttgaaaatgcatctcagacatttgatgacctccctgcaagatttggttatagacttccagctgaaggtttaaagggttttttgattaactcaaaaccagagaatgcctgtgaacccatagtgcctccaccagtttttgatataaaggttttaaatgcacagagagcaggatacaaggcagccatagttcacaatgttgattc

SEQ ID NO: 316716 - DNA, 806 bp, Homo Sapiens
  misc_feature (659)..(659): n is a, c, g, or t
  misc_feature (661)..(662): n is a, c, g, or t
  misc_feature (671)..(671): n is a, c, g, or t
  misc_feature (679)..(680): n is a, c, g, or t
  misc_feature (685)..(685): n is a, c, g, or t
  misc_feature (689)..(689): n is a, c, g, or t
  misc_feature (706)..(706): n is a, c, g, or t
  misc_feature (708)..(709): n is a, c, g, or t
  misc_feature (719)..(719): n is a, c, g, or t
  misc_feature (726)..(726): n is a, c, g, or t
  misc_feature (746)..(746): n is a, c, g, or t
  misc_feature (762)..(762): n is a, c, g, or t
  misc_feature (767)..(767): n is a, c, g, or t
  misc_feature (771)..(771): n is a, c, g, or t
gggggtgttgtcgtccctgctagtactccgggctgtgggggtcggtgcggatattcagtcatgaaatcagggtagggacttctcccgcagcgacgcggctggcaagactgtttgtgttgcgggggccggacttcaaggtgattttacaacgagatgctgctctccatagggatgctcatgctgtcagccacacaagtctacaccatcttgactgtccagctctttgcattcttaaacctactgcctgtagaagcagacattttagcatataactttgaaaatgcatctcagacatttgatgacctccctgcaagatttggttatagacttccagctgaaggtttaaagggttttttgattaactcaaaaccagagaatgcctgtgaacccatagtgcctccaccagtaaaagacaattcatctggcactttcatcgtgttaattagaagacttgattgtaattttgatataaaggttttaaatgcacagagagcaggatacaaggcagccatagttcacaatgttgattctgatgacctcattagcatgggatccaacgacattgaggtactaaagaaaattgacattccatctgtctttattggtgaatcatcagctaattctctgaaagatgaattcacatatgaaaaagggggcancnntatctagtncagaattnnagctncttngggatactactaatccntnnctatcatagnggcatcntgctcatctggatagcattntcatgatcacaaaatngtcangatngacatgacttgagaacagactcgtaagatcactag

SEQ ID NO: 316717 - DNA, 708 bp, Homo Sapiens
  misc_feature (45)..(45): n is a, c, g, or t
  misc_feature (120)..(120): n is a, c, g, or t
cctgatttcccgatgagctctgtccttgcgtctgaacctaggcanggcaagcaaactggtaagagccacattgagttgacttctgatttcctttccatgcaaacaatggctagctgttanaattatgagctcagaaagagcttcaaacacatttttttctccactttctccccaactctcaaagtattcctttgtttctttttcaattatagaaacatgctgtttaaagtgggctatgttaaggccactttttaacattttcttctgctccaagaaaactggattaggcacatcgtatgcaactcccttcccaaacacaggtgttgtcaggcgactgtagacatcttctgcattcaggtcttcatttttactattaaaaagcagtgcagcagcatcactccccagaaggtaagtaaatgtcttgcctaccatggtaaaactaaatacaggtccatacttctcatatgcattttctagaaattcaattggacttttcccaaatgctatggcatgcccaaggaatggaattggggagaaaatgtatggaggacttttcacccctgcgggcagctggaccaggtggccggcggccagacggatcaggtagaccaggctgagggtgaaggcgcaggcgatcagcagcatggacaagaggttgccgtgcccccagtcgtcagatccttcacgcgcttccctcccaatcccgac

SEQ ID NO: 316718 - DNA, 542 bp, Homo Sapiens
ccaagtgatcatttttataggttaaaatgataggtgaaatgaatatagacactttcatatggttcaacctaatgacttggtaaattattgccttggtgtattaataatatgttgcattctgaacaaataaccatggcttccaaagggccctaacctaaaatcggagagtaatttatgctttggagaatttgactcaaatatatacttgaccaagcaccatgatccctaggggcatgagaaaagcacataatggatgtggatgtgataggtggtcttttcctgttaacaagctggcagcaaagcttcagaaaatatatatgcaagcacaacttgaagctgaattcatttctgtattatattctcaactcgttatctaaagcatcagaacatgtgttttcagagatgagtcctttactataaggttaatatttattttcattttctgtattatatatgtgtaaatattccttagaggagcaaatggattgtttaataccatagtctcagtaatctagcttatataaggtcattacattttttaa

SEQ ID NO: 316719 - DNA, 765 bp, Homo Sapiens
gacattctcttaggtatacatatatttacttccatttaacgctaacttactgaattttctccttggcccagtttcatatttagtgatagatgagactgtggctgtaaacagcagcaactcccaagaagagtactcagggcgagagatttaaaaacatatctgataaccccattagaggtaggttagaaaaaggccttttatttgggactgtgtagttatcaaggcatcctgcagatgcaaccttttctctcccttctttctctgacatgctcctaggtaaataagatatgaggaaaatcaaacgtatatcctgttaaagcacttaaagggggtaaaaagtacagccctcaacaaaacgtgttttcacattgaaattcatctttcctctttgaaccgacaagcttttcaagaaaccctttcttggtttcataatactgtactgccgatttataaactatattttagtctacccttgaaagaatgaaaactgtagtacttcattaggacctcatatgaccatgatctcaagaaaagatgctttttcaatgtctttaggcctgaatatggtaggaaatcatgaagcacccaaagactcaggatctcacttcgtatttggagtgggccattctcctatgcacacacacccttgttttgttgccctctccaaaatcaagtcttcaccccttcagttcatatcgccttcgttccactcttcaaaacaccatgggaaactcccacagtgtttccactgtttacagattcctt

SEQ ID NO: 316720 - DNA, 1694 bp, Homo Sapiens
  misc_feature (843)..(843): n is a, c, g, or t
  misc_feature (868)..(868): n is a, c, g, or t
  misc_feature (1266)..(1266): n is a, c, g, or t
  misc_feature (1576)..(1576): n is a, c, g, or t
  misc_feature (1578)..(1580): n is a, c, g, or t
  misc_feature (1592)..(1592): n is a, c, g, or t
  misc_feature (1601)..(1603): n is a, c, g, or t
  misc_feature (1610)..(1613): n is a, c, g, or t
  misc_feature (1643)..(1644): n is a, c, g, or t
  misc_feature (1681)..(1682): n is a, c, g, or t
  misc_feature (1685)..(1685): n is a, c, g, or t
tgcggggcgggcggacagactgcgggacggacggtggacgctgggacgcgtttgtagctccggccccgccgttccgacccccgccgccgtcgccgccatgacggggctagcactgctctactccggggtcttcgtggccttctgggcctgcgcgctggccgtgggagtctgctacaccatttttgatttgggcttccgctttgatgtggcatggttcctgacggagacttcgcccttcatgtggtccaacctgggcattggcctagctatctccctgtctgtggttggggcagcctggggcatctatattaccggctcctccatcattggtggaggagtgaaggcccccaggatcaagaccaagaacctggtcagcatcatcttctgtgaggctgtggccatctacggcatcatcatggcaattgtcattagcaacatggctgagcctttcagtgccacagaccccaaggccatcggcatcggaactaccatgcaggctactccatgtttggggctggcctcaccgtagcctgtctaacctcttctgtggagtctgcgtgggcatcgtgggcagtggggctgccctggccgatgctcagaaccccagcctctttgtaaagattctcatcgtggagatctttggcagcgcattggcctctttggggtcatcgtcgcaattcttcaggtgatgactccccttgggaagcctttgtgtccttgtccccaacctagccttaccctccttctggagaagctgaagtgctctccttctctacctataactatagattcccccaaacagcttccacctcctcatttccatcttctggttttctcctacanggggctctctatttttgtctctgantttggtgtcactgacaacagccctgttctttttcccccctttctaatgcgttgtatctgtatagcacttagtcctccctctttctgttctctcattttatctgccatgcttttcatgtctccagtctgtatttgtgatctagactagaatggaattttgtctgtctatatcagtctgtcatggtgtgtttgactgtctctcggagctatgtgtatctccctctcacatgcctgtcagtagggacaccattgttctaaattgtgtgtgtacatagtctgtctgagcgagtgtgtgagtttgtggactaagggatcagcctgagggtctgagtgtgactgtgggtgcttgactgagttgattcttagtgactagctttatccatatgccacttctctccntctgtcccacagcgtaactctgtggttgtctgtccctgtctgccttgtctgtcacagtgtgtccatcctggttagtcatatatctcttgtggtctgtccatccaaccatgtgctagatgtcatcttctatcatttgtcactgccttacctattcctctgtccctgcctgatttctcctgttctttttttgcagacctccagagtgaagatcgggtgactagatgatatgtgtgggtggggccgtgcctcacttttatttattgctggttttcctgggacagctggagctgtcgtcccttagcctttcaanannnttggtgttcagngccctcccnnnactcccnnnntgctgcgtgttgatttggaggcactgcagnncaggccgatgtcctcagtgcggggagcaggctcgctnntgntgactctgt

SEQ ID NO: 316721 - DNA, 1015 bp, Homo Sapiens
  misc_feature (123)..(123): n is a, c, g, or t
cccagacaaattcccaaggttaatttcccaaaccccttaggaaaaaatggttaaggttggaggtgggggacacaggtgcgcagttgcccggagtcaggcagcagcagcctgtttccccgccantgagggactcggctgggactgcagtgcctcccaaatcaaccacgcaggcaagaggggagtgcagggagggccctgaacaccaagccttctgaaaggctaagggacacagctccagctgtcccaggaaaaccagcaataaataaaagtgaggcacggccccacccacacatatcatctagtcacccatcttcactctggaggtctgaagaattgcgacgatgaccccaaagaggccaatggcgctgccaaagatctccacgatgagaatctttacaaagaggctggggttctgagcatcggccagggcagccccactgcccacgatgcccacgcagactccacagaagaggttagacaggcctacggtgaggccagccccaaacatggagtagcctgcatggtagttccgatggccgatggccttggggtctgtggcactgaaaggctcagccatgttgctaatgacaattgccatgatgatgccgtagatggccacagcctcacagaagatgatgctgaccaggttcttggtcttgatcctgggggccttcactcctccaccaatgatggaggagccggtaatatagatgccccaggctgccccaaccacagacagggagatagctaggccaatgcccaggttggaccacatgaagggcgaagtctccgtcaggaaccatgccacatcaaagcggaagcccaaatcaaaaatggtgtagcagactcccacggccagcgcgcaggcccagaaggccacgaagaccccggagtagagcagtgctagccccgtcatggcggcgacggcggcgggggtcggaacggcggggccggagctacaaacgcgtcccagcgtccaccgtccgtcccgcagtctgtccgcccgccccgcagc

SEQ ID NO: 316722 - DNA, 560 bp, Homo Sapiens
ggttttgacccagacaaataccaagtttatttcacaaacactaggaagatgggttgagggtggaggtgggggacacaggtgcgcagctgcacagagtcagcagcagcagcctgctccccgcactgaggactcggcctggactgcagtgcctccaaatcaacacgcagcaagaggggagtgcagggagggccctgaacaccaagcctctgaaaggctaagggacacagctccagctgtcccaggaaaaccagcaataaataaaagtgaggcacggccccacccacacatatcatctagtcacccatcttcactctggaggtctgaagaattgcgacgatgaccccaaagaggccaatggcgctgccaaagatctccacgatgagaatctttacaaagaggctggggttctgagcatcggccaggggagcacaaatgccaccgatgcccaagcagactccacagaagaggtttagacaggcctacggttgaggccagccccaaacattggagtagcttgcatggtagtttcgatgggcgatcgtttgcgggtctgtgggact

SEQ ID NO: 316723 - DNA, 1086 bp, Homo Sapiens
ttctctattcaaagtgtttggaatctttattctgtttaaaacactgatgacatttgccaatttttgagtgttcttcatgttactgatttgtaggagctctttatatattgcagatttagtctcttactggttatgtatgctgcacctgaggagtagcagcactgccaaggacactgagtgtcttgtctgtgcagagcttcacatgaagctggagagaagggactggggcaagagggaaagataaaaaggggcaagtaagtaacagaatgaatccttgttgctaatctcctggcccccatcccagacccttcaggggatcctggcgattcgaagcagcatagcctgataggcctctggtgagggtgttgggagggttttcttggccgcctgttccaggatgctcaagatgatgctgtgggcctcctggcatagctcagcacccaggaaagcctccactcgtccacgccatgctgccagtcgtggccgtccctcaaacagttcatagccgagagccaccggctgcatcagctcctccagggccatgagatcagccagtgtcacctgctggccagcgaggaagggcctgtcccccaggaacttgtcctccagccattgcagggcctggtccatggcagtcctgttgcgttccaccttctcctcgggcacctggaccccaatgagtggccccaacacctggacccacaggggtataccaaaggtgccacggatgcagtcggcatgccagcccaggtactcatgaacacgggcacgagcctgcaggtcagatggataccagtggtccggcgtctggtacttacagctcaggtaaatcaggatggccaagctttcggtcaagatgaaatcaccatccttgagcgtcggcagtttccccaggctgttgatctgcaagaactccttgctcttgtgctgccctttgaccaaatccacggtgcgcagctctaaggggatgccattcttcttggcgaagatgtagacggcgcggctgggctgggacaccaggtcaagaaacagctctaggcccatggcgggggcggcaaggacagcggggatggcagtgaaggcgct

SEQ ID NO: 316724 - DNA, 695 bp, Homo Sapiens
attacatatcttccattttagaataacagcagactttaagcatgtattatttttccagtgttcagcttagtctaagactgtgtgagtctggtttgatccattgccgtgaagaatacacagacagcagctgtaatgagcaggtgcattccctcgtagagaagttttggagaaaatacactccatataaataaatgataacgcagagatgtcaccaaaacgatgtacgtggaaactggaatagaacaaatcagtgcgtagcagaagcaagcatgactcagtgctgaaccactgcgtgtttctgagctcaggaagtgcactaagtggctggcccacagcacaggccctgcgtacgtcccaaacgctgtcaggagcacggctggggtttccacgtaggtgtctaagcccacgaagcctgcggagatgtccacggtggcaatgttgttggagttgccctggaatacaggagaagagctgacaaaggcctcacaacacgtggcatcaacagccacgatgttagcgtgagctacgatgttagcgtgaactgtgtaggcagcccagataaccacgccggcacggacacacgtgtggtcagaggtggctgcccagccgttccttcagactgccgagctggccttgcctgggtggcaccccctccccctgcctgcagtgcccagctcgtgccgaatcctgcagcc

SEQ ID NO: 316725 - DNA, 661 bp, Homo Sapiens
  misc_feature (576)..(576): n is a, c, g, or t
  misc_feature (634)..(635): n is a, c, g, or t
accaaacttcactagtgcattaatcagcattactgaccaaaatgaatgcaccaagagtggattcaatttttgttcaaaataatccaaccagcttcctgccaccactttctgagaagccactagaaaaaaatcaatgtgtctggggttgggcaggcttctactgcacataaactaaatggggtttaaaacaacaatgaaaaataggtgcccatttgtacttaagtatacttctctctttttcttgctatcttttacaatttctggataatctcagaaatactcaggttttaaactaaaacaatacagagaaataatgctttagatagtagctaatatgctctcttcttcaaaagtgaatgctcatccactagacacaatgctaacatgaaagcgcatagattatttttttaattctcagatactttggttctctgaggcggagaaccagcatcaaggcctctgaatacaacaagcacaggcttgatgaggggcttgggaggtaagaaggtgcttttgccattcatagttacatgtaaatatggacaggttaggcatttgcttttaaggtattatggnaaagcacacttaacccttacagtatttctcctactgatctcctagtctttacacatcnntctgggtaccagtccccacagatccc

SEQ ID NO: 316726 - DNA, 643 bp, Homo Sapiens
ctaaaatgtgtttttctgctttgttcgctcttacttctgaggaaggtttccagtcaggactcgctgtaccaatatccatggaggaatatgggagcgtttcgctctccttgtaggctgaagtcagtctgacttgaaggggcctggtttggatctaagcaaacacccagatggggttctctggtctcagcaaggcttttcctgttgggagtcacagtaaacagaaacccaaaaatctcatcttgggtgttttcagggcttgttttgagttttgctgaatagggagcgcaagacgccctgagcctccctctcactggtggtgataagaggagccgtctggtgtgtcagggtcacgaacccgttacatttcaggacgatcctttttccttcagcagcatttcttactggctgtggctggaatctgccttttatcacagctgtcaccattctcacgtgattcttgtgagactctttttggttataattactatttaatatttaggactattttactgaggcagactttataaatgaggatatctacaagggcacttaaagtgttacagatgttttaccttaagaattatttaagttttgttggggttaaggacagtttttcaggtgtacccgtaaaggttgtgttttc

SEQ ID NO: 316727 - DNA, 905 bp, Homo Sapiens
ttcccttttaaaaattaaaactctttatttaaacctcttaatagcatcttatcaatttggtggcagcagcagaagcactaccaaagacagatattttgaaaagcatttacaaaaatacattgcacaaagtcctatcttgcatctttaaaaataaattaatattcaaaatatttccaccccaaatcccaaatcagttttatataggaaattttgatttatatatgtaacctgtaatatatgaaacatctgtacattttatctgccttaactgcatagttcccattctaaggagagtgaaaaaaatgctgcttgatgtatgaatagtttcatacatcagtgtatttgaggactgttgtgcaatatacagaaaaccagtcagcaccatcgttttgtctttttctgaaaacacaacatttacggtacactgaaaactgtcttaacccatcacaacttaaataattcttaaggtaagtgccttgtagatatctcatttataaagtctgctcagtaaaatagtctaaatattaaatagtaattataaccaaaagagtctcacaagaatcacgtgagaatggtgacagctgtgataaaaggcagattccagccacagccagtaagaaatgctgctgaaggaaaaaggatcgtcctgaaatgtaacgggttcgtgaccctgacacaccagacggctcctcttatcaccaccagtgagagggaggctcagggcgtcttgcgctccctattcagcaaactcaaacacagatgaaattatctgccctccaaagtcctttagaagagccagtgcaaggctgaagaccaagcgtcaagaacacgccagactctcagcttcctctgctcggacgcgtgggtcgacgatatcccgtaattccggacctgtaccagcctgc

SEQ ID NO: 316728 - DNA, 1297 bp, Homo Sapiens
  misc_feature (165)..(165): n is a, c, g, or t
  misc_feature (177)..(177): n is a, c, g, or t
  misc_feature (190)..(190): n is a, c, g, or t
  misc_feature (235)..(235): n is a, c, g, or t
gcaatgacgctataagtcacgagcctagatgttccatgtgctacttcattcatagatcatctcatcatcatcttcctcagacgcagcattgatgatcacagagatcatcgaaatcctcatcaaatgcggcattgtattaacagtctactgcatgtattccatacnaagtctcgtgcnaatagccttatcnatcctcagaaagagatttctatagtttctttcaaaataggaagtnaaaccaccatggtgattatcttcatcggataagccatccattgcattactgaatacttcttcaaccatctttttttcttcatctgtgttgaaatctaatttggtcatttgaagtgcataggcttcacaatctttcttactaaaactgaaaataatcacaggttggaaatttctttccataatcatcttcacaattttgaaaacatttgatggtccttttgttcctcctttccgccctttctggtctcctttggccaaatcacctgcatctcgaagcacttgcattgcagtattaaaattatcttctctgaagtcaccattttcatcaaccacaagatgcaggccatctccccctgctggaaaaatgtagtgttgcaatggagtgggccgataatctgtgtaaataacatgacaaggctgtttatgtaaatggcaaatccattcagcaaactgtcgggcatttggaatagtagccgaaagaaagacatagtggacgttatcaggaagcagataatagtttcgttcccatactacaccacgttctgaatctctcatataatgaatttcatcgaatataacccaagcaacttctctcatgaacttcggaacctctgtaaagcatacttctcaaaatctctgtggtcataacaagacaagatgccgtaggattaatagtaacatcaccagtcatcaaaccaacatcttgagattcttcatacatttcacggtatttttggttactcagagccttaattgggctggtaaatattacacgctgcttttcccttaaggccatgcaatggcatacctcatgtgtacacccttcaacagtttcaactgattgtaccttgactctgggcatcaggtctgccgaacttaagtcttcagttattgactcttctatcctgggcttctttccaaaaatgggttcatctgtaccttcgaaatctacatctctcttattttttccattattagttgattctgattgtaatttaccatcaagacgtttcctgcccggacgcgtgggtcgacgatagcccgtaattccgggcctgtacca

SEQ ID NO: 316729 - DNA, 934 bp, Homo Sapiens
  misc_feature (12)..(12): n is a, c, g, or t
  misc_feature (36)..(36): n is a, c, g, or t
  misc_feature (600)..(601): n is a, c, g, or t
  misc_feature (626)..(626): n is a, c, g, or t
  misc_feature (670)..(670): n is a, c, g, or t
  misc_feature (680)..(680): n is a, c, g, or t
  misc_feature (689)..(690): n is a, c, g, or t
  misc_feature (705)..(705): n is a, c, g, or t
  misc_feature (760)..(760): n is a, c, g, or t
  misc_feature (769)..(769): n is a, c, g, or t
  misc_feature (811)..(811): n is a, c, g, or t
  misc_feature (822)..(822): n is a, c, g, or t
  misc_feature (832)..(832): n is a, c, g, or t
  misc_feature (840)..(840): n is a, c, g, or t
  misc_feature (885)..(885): n is a, c, g, or t
  misc_feature (915)..(915): n is a, c, g, or t
acagctgagaanctcaagccaagtggtgaagatganatgataacaatggataatgcagaagaatatgtggatttgatgtttgacttttgtatgcatacgggtattcagaaacaaatggaagcctttagagatgggtttaataaagtttttccaatggagaaattaagttccttcagccatgaagaagtccaaatgattctttgtggaaaccagtcaccatcctgggcagcagaggatattatcaattacactgaacctaagctgggttatacacgtgacagccctggtttcctgaggtttgtgagggttttatgtggcatgtcttctgatgaaaggaaagcattcttgcagtttaccactggttgttcaactctacccccaggtggactggctaacctgcatcccaggctcacggttgtacgcaaggttgatgctactgatgcaagctatccatcagtcaatacatgtgtgcattaccttaagttgcctgaatattcttccgaggagatcatgagagagcgcctgctagctgctacaatggagaaaggctttcatctcaattgagctttgaagtgcaatgggagacatcagagactttannaatactagtgaagcctcttgtgttngtgtcagagaagatatgatcacccatgctatgacacttgctttntttcaccatnaggctttanngacatgtgataagtnttagctgctatgacaaacaatctgtactaccagcagaagttaagacagacactgngtcctacanggctatgtactggataggggtccactgactgtcaaagcagtntcagacttagngtactggaantctacagngattggtaagttgcatctactctacatcagtgtgactgacctgtngtggttaagtactgcaatctgtcttaactngatatggactagcttcttc

SEQ ID NO: 316730 - DNA, 456 bp, Homo Sapiens
attcggcacaagaaagttggaaagaggcttgagtatgtggaagagatggttaatagaaatcaaccccaaggagacccttcaaagtcagatgataaatcaggtccatacttaggaagatcttttccaagtttcccagaaaagtaaatcaaacctcaccaggcctctagatggttttaattacctttttgtagggctgctgaacagggtattagtcatatacttgacaataaggacttgtggatttttctcagagatattaatggatgggagtaaatttgcatttgaaattttatttttaaattacgaaaataacatattaccaaagttagagaaataagaaaagaaaaactcttatgttcccactatcctaccagccctattggtctattttgtatatttcttgaagactaggtctcactctgtcacccactgcactccagcctagttgacaagagt

SEQ ID NO: 316731 - DNA, 752 bp, Homo Sapiens
  misc_feature (20)..(20): n is a, c, g, or t
  misc_feature (40)..(40): n is a, c, g, or t
  misc_feature (61)..(61): n is a, c, g, or t
  misc_feature (71)..(71): n is a, c, g, or t
  misc_feature (78)..(78): n is a, c, g, or t
  misc_feature (100)..(100): n is a, c, g, or t
  misc_feature (102)..(102): n is a, c, g, or t
  misc_feature (106)..(106): n is a, c, g, or t
  misc_feature (113)..(113): n is a, c, g, or t
ggtctgggttgactctgtcntcgaagctgaatcggttggntgattacagattagaccagtncagacatcgnaagacgnatgcatctcaatggcggtcctntntagntgtgtgnaactatgacatttcttcagatacactttgtgcacattttcagattcacttcgcgatgtctgggaatctactggttttccttttgctatctttcctgtagatactgttgcctcattcttgtccttcaaactctgcactctatcttgttccagaacccctgacaaagccttctgcacatcaaacttgttcttcagaactgcttcaattaatatttcatctggcacagcatctccaagtacctctctcatgtgatcaaggcatgaataaagacgagcttgatcaaatccactgagctgatggtttgaaacagaattggaagattctttcagatcttcataatcatattcttccacaggctcaacggaaggtttgtcacgccgtgaataaataaactgagcagctgttgacggcgaaatacaataatcatcctctacagactggccgtagagatcatcatcttcaaaatcttcatcgtagttatagcctcgaacattccgatgccgggccatgacggcggagagggcgtttgccacagccccttaactccttccaaaacactccgcttagatactgataaggcgccaactgcagcctggagaacccctatgcgccatcttggcttcccgcaggcctctgcccc

SEQ ID NO: 316732 - DNA, 710 bp, Homo Sapiens
  misc_feature (15)..(15): n is a, c, g, or t
  misc_feature (45)..(45): n is a, c, g, or t
  misc_feature (90)..(90): n is a, c, g, or t
  misc_feature (109)..(109): n is a, c, g, or t
aatgtgattgtcagnaataggtcatgcagatatagtagttagatnagccattagggtggccctgatccaatgcctggtgaccctctaganagatggtatttagacacgnatgcatgagaaaagcccatgtcagcccaaggagaaggcgccatctataagccaaggagagaggcctcagaatgcgatcgaccctgccagcaccttgatcttggactcccatctccagaactgtgaggaaatacatttctgttatttagccactcagtccggaatatgctcagtaaaagcaagccaaaagcctagttgatttcatctgccaaaccaacgggctagataaacactttttataagacaggaagaatgttgtcgaatcatatctggcattgcgtggaggtgtgaggaaatggtgtcacgactcttcacatcacagccttgtgccgcagtcactcacatgtgcagccagtgggggacatctatttccctgcatgctcagatgtgggcacaagcccttgagcccgatactgagagccttttttcggaaacaccctagtttgtcagtttctcccttgtctctttctatggtttccttttctaacaaagagctaaacctacgaggtcatgacataaatgctagtattctatacaatttcatgatgaattattttctttccttctctttctttctctcgtgccgaattcctgcagcccgg

SEQ ID NO: 316733 - DNA, 1074 bp, Homo Sapiens
  misc_feature (899)..(937): n is a, c, g, or t
tgcaaagaaattgcagacaagctattactttgaatgagtctactggaccattattaagaacgtcaattcatcagaattctggaggacagaagtcacaaaacacaggattaacaaccaagaagttttatggcaacaatgtggaaaaggttccaattgatattattgtgaattgtgatgacagtaaacacacttatttacagactaatggaaaagtcattttacctggggcaaaaatacccaaaatcacaaacttgaaagaaaggaaaacaagtttgtcagacctaaatgatccaatcattttgtccagtgatgatgatgatgacaacgacagaactaacagaagagaaagcatatctcctcagcctgctgattcagcatgttcttcccctgcaccatccactggaaaagtagaagcagcgctaaatgaaaatacttgcagagcagagcgtgaactacgaagcattccagaagactcagagttaaatacagttacattgccaagataagcaagaatgaaagaccagtttggcaattctattatcaacacacctctgaaacgtcgtaaagtgttttctcaagaacctccagatgctttagctttaagctgccaaagttcctttgacagtgtcattttaaactgtcgaagtatacgagtaggaacactcttccggctgttaatagagcctgtaattttttgtttagattttatcaagatacagctagacgaaccagaccatgatcctgtagagattatattaaatacctctgatctaactaaatgtgaatggtgtaatgtccgaaaattacctgtagtgtttcttcaagcaattccagcagtttatcaaaagctgagcatccaactgcaaatgaataaggaggataaagtttggaatgattgnnnnnnnnnnnnnnnnnnnnnnnnnnnnnnnnnnnnnnntataattttaatttttcaaaatggccttgatcctccggcaaatatggtatttgaaagtatcattaatgaaattggtataaagaataacatctccaatttttttgcgaaaattccctttgaagatgctaatggcagac

SEQ ID NO: 316734 - DNA, 641 bp, Homo Sapiens
attttaaagaagcaggattgaattgagatttctagccattggcactaggaggagtacccctaatagaaaaagggaaattggaagcagttgggagagtggagttgggggtaggagagataaagatgtgagtgatattttggtgaacattcactcagtcttttagttgataatgaaaagacttgggtttgattagatgttttatatttgtgaagtatattcaggagtttgaggcagacagatatataaaacagtgctgtattacttaacatgtcttatataaactgttttatttggatggaaattttggagattgttgacgttttgaggaaagttgaaattctttgggaaaaaaatttggttttgagcagggcattttaaattttgtttgtatttttatagactttctttattgaataacgtctataaattgtacttaaggccatcataaagcactgtgtcctaatggataatgaaacgtaagtaactctatataacgttcctggatttacatttcaagttttattttgaaatagtgtaattcctaaagtcctttgaggagtgctttcaattacctcacattacctctatttctgttttggtgttttgatttctttatttctttgttattggcagttccttat

SEQ ID NO: 316735 - DNA, 567 bp, Homo Sapiens
gggcatgccccctcctttaaaggagcttaaagtttactggtgtgttaggggatgggtgggttaaaataaaataggggaaagaaaacaggcaatggccctactgggatttgtgttacaattggaacatcctgggtccagggtgcataggggggtccggaaagacccccttagaaagagctctttgagggagacttttagagcagtgttaaagcaaaagcttttcaagcattgactaaatgatttgtttgaacaaagcactactttaggtcctggggatccaaacatagataaagcccgacagagtctttatatacaccatgggagggtaaagagacaataatcaatactgcaatttaaggttgcaactgagagtagggccccccacaagggggaagttcttaatgcaaagagatgcaatgagatggaaactgaccaagacaggactcttccatatggttgggcaggctgtacactgcacaactctagggggagccagtcacatcatagacattataaatttgaatatttattatgacagttttctggaatgtggcatcccaaatgtct

SEQ ID NO: 316736 - DNA, 788 bp, Homo Sapiens
  misc_feature (270)..(270): n is a, c, g, or t
  misc_feature (775)..(775): n is a, c, g, or t
gaaaggaaaactatttatttctttatacacatcttgcttaaacaatcaccaaaaagactttcattttctgtcacccacgctgtccaccagttatgttggccttcaatatgtggcgttaaaccatatataaatctatatcatatatttatacacacaaacacattctaccagcactgtgaagacccagactaggctttactaggcttggggcctctcccatgccacttaaaaatgagcacaggtttgctctatgcaagaatttcaacagangttggtctggccatcagtctgccatttccccgagataagatagggtgacaaaatgggccagcaactttgaagtgaggtcagtccaatttggatatcatagaagaaaagaaataggatgtgctaggttaagcctgagatggtatctgggaaatcaccacattcatgatgtgaactcaaagaacacaggtgctacagtgcagaccaaagcccagcctgactcgacccaacagggtcaggtgtggatctgtgagtagtgctcacagaacctgccagaggagctccagcattgggaccacgtgcccctttcatcggaatcagggtcctatatccactgagttttccatctcaggacagctgatgaggcaagaaatgtgctcttgctagttcccaagctgctggggctgttgagaggcagtatcacaaaaccttctgtgcaaactacgcatcttttgcttagtgctgggccaagtggaccttggctaacggtattccatagccgtcaganaagctttcctgct

SEQ ID NO: 316737 - DNA, 1919 bp, Homo Sapiens
ggggcagaacataggttgccttagagaggttccccggtgtcccgacggcggctcaagtcagagttgctgggttttgctcagattggtgtgggaagagcctgcctgtggggagcggccactccatactgctgaggcctcaggactgctgctcagcttgcccgttacctgaagaggcggcggagccgggcccctgaccggtcaccatgtgggccttctcggaattgcccatgccgctgctgatcaatttgatcgtctcgctgctgggatttgtggccacagtcaccctcatcccggccttccggggccacttcattgctgcgcgcctctgtggtcaggacctcaacaaaaccagccgacagcagatcccagaatcccggggagtgatcagcggtgctgttttccttatcatcctcttctgcttcatccctttccccttcctgaactgctttgtgaaaggagcagtgtaaggcattccccccccatggaatttgtgggccctgataggtgccctccttgccatctgctgcatgatcttcctgggctttgcggatgatgtactgaatctgcgctggcgccataagctgctgctacctacagctgcctcactacctctcctcatggtctatttcaccaactttggcaacacgaccattgtggtgcccaagcccttccgcccgatacttggcctgcatctggacttgggaatcctgtactatgtctacatggggctgctggcagtgttctgtaccaatgccatcaatatcctagcaggaattaacggcctagaggctggccagtcactagtcatttctgcttccatcattgtcttcaacctggtagagttggaaggtgattgtcgggatgatcatgtcttttccctctacttcatgatacccttttttttcaccactttgggattgctctaccacaactggtacccatcacgggtgtttgtgggagataccttctgttactttgctggcatgacctttgccgtggtgggcatcttgggacacttcagcaagaccatgctactattcttcatgccccaggtgttcaacttcctctactcactgcctcagctcctgcatatcatcccctgccctcgccaccgcatacccagactcaatatcaagacaggcaaactggagatgagctattccaagttcaagaccaagagcctctctttcttgggcacctttattttaaaggtggcagagagcctccagctggtgacagtacaccagagtgagactgaagatggtgaattcactgaatgtaacaacatgaccctcatcaacttgctacttaaagtccttgggcccatacatgagagaaacctcacattgctcctgctgctgctgcagatcctgggcagtgccatcaccttctccattcgatatcagctcgttcgactcttctatgatgtctgagtcccttgatcattgtcctttacctcacagtctctaggattcctgactcaggctgacctctctctctggtcccagactgcctccttgcccaggcctctctcactcttcatactcctccagattttgttctcagcattttcctttctctgtgatcattggcatcctgggcgtttcttgccctctactgactactgattggattttacctatggctttctgcaacttgctactctctccctctccatcccatctttgcagcctcatagggtgggatacagcagctttttttgcagttatccacactcacatttcagagtcctgactctcaaggaaccactggtttttgggatagaacttgggccagggctaggaacacaggctccacggtgacatgtcatttgattgtaaattaagtgctctgattagtaagaactaagcagggggccacatgctctcaatggagacaataaagtgttgtctttttac

SEQ ID NO: 316738 - DNA, 1230 bp, Homo Sapiens
  misc_feature (931)..(931): n is a, c, g, or t
  misc_feature (1074)..(1074): n is a, c, g, or t
tctgttttaatcagtgacatttattaacatgcttcaaaagtgaccaaagtgtccagccagcacaatagccgaggcaatcaacgttctcttagtgtgtgatctcctccaaaacaccaaataaataggtttaggaataacctcaaataaattgtaatttaacttcgcccaaaattatacatcctctactgctcttccctgctcctgtaaagatactagcgggaggggagaaagctcaaatgactctgtaatttagaattacaaccagagaagaaatacttcaagcacaataaagacgttccattgaagagcgacattcattctggaatgtttgttttgaaaacaactcttctgggggaattcaaaaggtactgaacaaagcaacgtaaagtaagttttgggttgttttgcaaaataaaaatatacaattgagtggaccagatggcaaaaacataccaattacaatctgaatgctatatttaaaacccttaaattctgaaggcctgaatatcaacaaacctatttatgtttatgatcctaaaaagacattaaatattattaaacccccaatcttcctaaactatagagacccagcaatactgggtctagtggtatctctagtacacatgtcacacatgactagactagatctagacttagactagactagagatctgaggtttgcaaccaagtacaagaggtctttaggagctcaggctaagggaggcactttattcataatgcatggcctgagagaagagggaaagtaccttgtaatcttaaactatgtggtccatcatatattctacctcaaagacatatctagactgacggtatctcgctcttcgacggccagttcagaacgaaatatacctctatattggaaggctaaatcatcttcgctctacacctgcaacgtgacaggagactgaantgtctgagctacgcgtagcaggcaaggaacaacacagctcccgtcgtttataatccatagggacaaatgacgatagaatgacgagtgtgtaatacgtatcgtacccgtggcgcgaaataccaccgcccgtaatgtccgaattncccgggcatatgtccggtaccgtcgacatgataacattcgtagtaatgtatgctatatcgaatgttatcacggccgcttccttctgctcactatctcgatgcgttcgtaccttcaggtaacaacatactagcgccctatatgatatcaatggtttt

SEQ ID NO: 316739 - DNA, 1137 bp, Homo Sapiens
  misc_feature (22)..(22): n is a, c, g, or t
gcgctaaattagcagaggctgnttttattttcacagatgtcttcgaccccacataagcaaggacactgtatgttgtggcacacaggtttctctccaactagacggagctcttagaagttagtgtcctttggctcccctccaggccttacacacactggatattcaataactatggaattaaaactgcagttgcctttaagcttatttattaatgggatctggtttcactgtgggtggcacttccactttaacgcaacgatcaaaaacattaagatctacgacaggatggatattgggacaataagcatgacaatgtcattgttgccaagccaaattttacaagaggtgaagggaagcaaagggtaactagaatgcagaggttcttcatcatcatcttcaatcagctgtcacagaattccccactactgaacctcccttacaattcttacttctccccacccctccaggtatcatctttaaataaaaacaatttgcattttccaatcggaagctgctggggcattaggactcatgtgctttctgctcccacaggtttcagatgccactgcactactaactccccggtgcttttgaggcacgtgttagacatgttctcctctgttggaagtccttgtggcaacttcaagggcttgattcttatcaaatgcttaactactttcaattttgcattcactgaagggatattcttgtgaacttgaggggtatgtgctttttctaatccaagcatctttattatatctttttcccaatatggacgtcttcttgtactttttattctggtaacaatatgcagtttatgagggttctgtggatccccaccgtatttttcatgatcttcaggtgaggcctgaaacactttttctggaattcttgatctggtgaatttgtgacgaatccaatctgtacaaataagagactccacaccttttgtcacggtctgtagtctgcctgggggccattgaactactaagcgcaaaatcccagccataagtgtagtgattgctctctttagaggcggcacccgctaaaccttcagcctgaaattttcctccgaagggaagcagagcagaggaagaactaccaagtgctacactcaaagcctgccgtcgcagtccc

SEQ ID NO: 316740 - DNA, 1647 bp, Homo Sapiens
  misc_feature (867)..(867): n is a, c, g, or t
  misc_feature (918)..(987): n is a, c, g, or t
gcctttaagcttatttattaatgggatctggtttccactgtgggtggcacttcccacttttaacgcaacgatcaaaaacattaaagatctacgacaggatggatattgggacaataagcatgacaatgtcattgttgccaagccaaattttacaagaggtgaagggaagcaaagggtaactagaatgcagaggttcttcatcatcatcttcaatcagctgtcacagaattccccactactgaacctcccttacaattcttacttctccccacccctccagggtatctgaaatagaaaagaaaggaaataattctccctgagagatttccgcctccttcttctttcttttcaccagcaacctcaactgttgacagaggttccttagggttcaaagaacaattctgaagctgaaaacagaatagtctgtttttgaataaatcctaaaatattttcatttcacacccttgttccatgaggaaaaaatttacatagaggccaataggttttgttcaggcagtgtgcaataataaagtttaggcccaattagatttataattagatattaaatgctggtttggtactaagtttagggatagaatgaacccatatccacatatgtacttatagacaccaaagcacagaacagataatctagctggcatccagtgtttcttgactttggctgaatctctgttccccagaacagactgtaagctccaaaaggtggggaccatgttttggtcagctttggatttctccaacaccttgcacagtgttcatgcaaagagccactcacagaaattgttgaattcacttaaaaaagaaaacaattttggctgggtacagtggctcatgcctgtaatcccnagcattttgggaggctgaggtgggaggatggcctgaacccaggagtccgannnnnnnnnnnnnnnnnnnnnnnnnnnnnnnnnnnnnnnnnnnnnnnnnnnnnnnnnnnnnnnnnnnnnntgaaaatgtttttgaaaacatattttaatgaaaacactttctcaccatctttaaataaaaacaatttgcatttttccaatcggaagctgctggggcattaggactcatgtgctttctgctccacagggtttcagatgccactgcactactaactcccccagtgcttttgaggcacgtgttagacatgttctcctctgttggaagtccttgtggcaacttcaaagggcttgattcttatcaaaatgcttaactactttcaaattttgcattcactgaagggatattcttgtgaacttgaggggtatgtgctttttctaatccaggcttctttattatatctttttcccaatatggacgtcttcttgtactttttattctggtaacaatatgcagtttatgagggttctgtggatccccaccgtttttttcatgatcttcaggtgaggcctgaaaccctttttctggaattcttgatctggtgaatttgtgccgaatccaatctgtacaaataagagactccaccccttttgtcacggtctgtagtctgcctgggggccattgaactactaagcgcaaaatcccagccataagtgtagtgattgctctctttagaggcggcacccgctaaaccttcagcctgaaattttcctccgaaggccc

SEQ ID NO: 316741 - DNA, 644 bp, Homo Sapiens
tggaaagtgaagagctgtttattaagcatctgctggggcagccttgaactaagtaccacgtgggacacaagagcagcacccagcccagcccctgcctgcaaggagtgcacagtcttgctggagagacaaggcgatccatcaggagggggcagaggggcagccacaggagacggacagcagggtggtcccaccgcatggcagcctcgggagtggtcaaacccctttccttcctcagtctcaggcaggccttgcctctgcttgtccctctcccatcttcctcacctctgaggccctgtcccaccgagccagccctggttccccgttggacagctgacccttgtgccagccactcctctgctccttggagaaggaaaagtcgggagcggcagccggctgcactatgtcggcaggaaagagtccggaacggcccccggcagagccaaactgccagcctggctccagggtggccaccggcagcagcttgatgaggtccccacggtggaagctgaggaggctgcagttgtcagtgatgtagctgcgcagggcgatgacatagccggagtccttcttaagctcattcaggaatagctcaaccagcgcctcgatggcccttgcccgggctgtgtgcagcaccagctgctcgc

SEQ ID NO: 316742 - DNA, 1287 bp, Homo Sapiens
  misc_feature (104)..(112): n is a, c, g, or t
ggccccccttgggggaaaaaggccccccagggggcaaaattcgggccaggaaaggcgccctacagagaggattttctttgggggggaaaagagaaatggagggnnnnnnnnnataaatccgtgggaaaaagacttaaggggtccagggccccaacgccagaaggagggataaaggatggactgttcccaaccttattctgtgcttaaaagaccagaaaatgcccttctctggaattatgagggagaggtctgagggaagggaggcaggccagcttacttcttgccctttcactgacctatagcatctgaggcatctgagagcaaagttaaatagaatgaggctggtcgcaagcactgggaagaggtggcggtctcgggtttaaggagccaaaccctgggcttggaattcagctcccagggccagagcagcatctctcttctgcggaggaggtcacctgagctcacaggactgggaatgtcggctttggaccctccctgatcccctggttgttgagatttccccttgtgtctcaaaagccttggagccagtgaagtatctctccaggattttctttcccaatcagtcagcagtcaactttcctggaagaatgtcctttctacccaatctgcccaggagggcgggaatgtggccggccctcaggaagggcctctgggtggcctctgcatccctggctggagaatgcgcacagtttgcagaggctcagaactcccaatcgtccacctccagctcttccaggtttgttaccaggccaaagattccactgtggtcctgagactggctgccctcaaaattggtgatgggggtgacaggacgaagcaattcgggcaaagcctctgaggcacgtcgcttgatctgcttgaagaaagagtggttcaggagggtgctggcactgggcctggcatccgggttgcgctgaaggcactgctccacaaagtggtggaagtggggggagaaggttcggtggtaggggtgggagggcgagtcaccgttggagggccggggggtgctggtggtcaggctgtcactcaggccagagttggccactgagcgcgaagggctcatggtcagctcctcagcggggatggtgctggtatccaacaggcagggcactgtgccgttcagtttctctagcagcatctgggtggcaggcatatccttaaaggggacatggccgttggccagttcacaggctgtgattcccacactgtagatgtcagacttggcatcataaccctggagattctgctggaggacctcggggctga

SEQ ID NO: 316743 - DNA, 606 bp, Homo Sapiens
  misc_feature (406)..(470): n is a, c, g, or t
  misc_feature (565)..(565): n is a, c, g, or t
atttctaatcttgtagctaatttgttagtccttcaaaggcagactggtccccaagcaagaagggggtctttccgagaaagggctgttaccagttttgtttcagagtcaaaccgtaaactgaattccttcccaaggttatttcgacctacacccagcaatgaacaagaacagcccaaaggttagatacaagatggagtcaattaggtctgatctctttcactgtcataatttcctcagttataatttttgcaaaggtggtttcaccagtctacaaagtgaattcctttggcaggttctatacccttgtagggatctagggctcacaactcactccatgggttttgttaattagctaagcagctcagagaactctggacaggacacttactggctaactgcaaaggcnnnnnnnnnnnnnnnnnnnnnnnnnnnnnnnnnnnnnnnnnnnnnnnnnnnnnnnnnnnnnnnnncataccatgtacaggaacatcaccctacaagataggtattagctatgctgtaactattcaaagtcagtcccatttgggctttatagaagcctcantgcataagcctgactgacttactcattggcactgatgatca

SEQ ID NO: 316744 - DNA, 880 bp, Homo Sapiens
ctttccggtatttatatttttattccactctaacacctcagagtaaagaactgatgggcaggcatcggcttctgctgacaattgccaaccggcatgagattgctgagctgaggtggactctccagacactggaactggaactccaggcccaatggcctctggtaagaatgctgcaacgtgagacccttgagagagactgacttgttgaagatgaagagaaaaccaagagcctccagtccagttgttgaagagcaaccacgagccaacaccaaggagacaaggaagaagaagtccttctctcaaccgatgaccgcaagcacaaagaagagtcccaagatagcgaagaaaggaaaataactcaagggagagccaggaagaaaaatgctccacaaaaatccatggctttaagaatacttgaggaagggagcaggccaacaccctctggccacagtgaccagctgaatgaggaactctaacagaatgagctgcagttggagcaacagaggggacatagctggaacaacagagcgaggggacacagccggagcaacagagtgggaggatgccaaccatttcaactctctccctgagcagcgagtaatttcagggcaagcccagagactaggatccatctgagaagtcttcagaggtctgacccagagaactcaacaacaggatacgtcccatggtgatgaaaataaaatgaatcttgtgttcaccgttgtattcctcacgacttaagttaaaaacctgatgaaaagtggttaatctccataatgggtgttagctccatcgttttccaacgttagagataaccgaatgtgacctcaccccgtttagttccggaggcggcggacgcggcggcggaagtttcggcccc

SEQ ID NO: 316745 - DNA, 476 bp, Homo Sapiens
  misc_feature (18)..(18): n is a, c, g, or t
  misc_feature (33)..(33): n is a, c, g, or t
  misc_feature (38)..(38): n is a, c, g, or t
  misc_feature (53)..(53): n is a, c, g, or t
  misc_feature (64)..(64): n is a, c, g, or t
  misc_feature (115)..(115): n is a, c, g, or t
  misc_feature (260)..(260): n is a, c, g, or t
  misc_feature (262)..(262): n is a, c, g, or t
aaaccccggaagaaaaangcctcccacaaaaanccccnggcctttaaagaaanacttgaggaangggaaccaggcccaacacccctctgggcccacagtgacccagctgaaatgnaggaactcctaaacagaatgagcctgccagttggagccaacagaggggacatagctggaacaacagagcgaaggggacacagccggagcaacagagtgggaggatgccaaccatttcaactctctccctgagcagcgagtaattntncagcaagcccagagactaggatccatctgagaagtcttcagaggtctgacccagagaactcaacaacaggatacgtcccatggtgatgaaaataaaatgaatcttgtgttcaccgttgtattcctcacgacttaagttaaaaacctgatgaaaagtggttaatctccataatgggtgttagctccaatcgttttccaacgttagagataaccga

SEQ ID NO: 316746 - DNA, 1490 bp, Homo Sapiens
  misc_feature (20)..(20): n is a, c, g, or t
  misc_feature (24)..(24): n is a, c, g, or t
  misc_feature (37)..(37): n is a, c, g, or t
  misc_feature (49)..(49): n is a, c, g, or t
  misc_feature (72)..(72): n is a, c, g, or t
  misc_feature (84)..(84): n is a, c, g, or t
  misc_feature (107)..(107): n is a, c, g, or t
  misc_feature (114)..(115): n is a, c, g, or t
  misc_feature (131)..(132): n is a, c, g, or t
  misc_feature (195)..(195): n is a, c, g, or t
  misc_feature (306)..(384): n is a, c, g, or t
ggctttcgtatagcactgcnaaanggatgctcaagcnaatagttggaangcgggtttccaatcagacgttgnacgcggccagtnatgtaatcgcccctataggccanttggacnnggcctccccgatttcnnggccatgtcactgggacaaaatctgtatgtaagtatagactaactatatcgatacttatttantacaccacacagcagcggcaccatacttatatagccagagcttctcgcattggccacggccttcctccagcttttctcatctgcttcacacagctatgtgagatagctgtnnnnnnnnnnnnnnnnnnnnnnnnnnnnnnnnnnnnnnnnnnnnnnnnnnnnnnnnnnnnnnnnnnnnnnnnnnnnnnngccgagggaagggcataggggtccaccggatccagccagggcagagagggggatttcaggtttaggtccagaggagagtgcctccccacagtctggcagtcattagcagggtgatggtgaggctgagatgggcagggccaggctgaggagcagccccactgcggtactggacatccaggtctgggtggttacagccacttttagtacagcaggagacatcaatgtggtttcatgctgaaggcgtcacccaggtgggcatgttggcacattgaggcggttgcacagcctcttacccatatagctttggtttttcggttcgtgagtgccggtggctaccagacattgattcatggggcctcggcagtcaatgaggaaagtctcttcagaggagcatccatgggtgctgttccccttgcagctgtaacactggcggccattctgcggcagattttcaagctccaggattgggccctcgttgcatttggtggtgttgcagcatttcaggaagtggaaggtgtcgttgttgtggaaaccattggagcccgggcagccgggaaggtagccacagccacggaggtggcggtcatcctttggacgcccttcttcaccttcctggatccagtgggtcaccacatccaggcactgttcttcagggctgcggcactgcaggctctggtgccggcccctctcacagctcatgtctgatgagccacaggaaatgcattcgaggtaacggcttcgggaataggtgacagcccggccagagttgccctggttgcacaagtctaacccacacacaacctcggtaaggctggtgatcttcaagccagtccgatagctcagggtcctgttggtcttctctgagtgggtacagcttttctccaccagctccagctcttctccttcttcccacaagcgcacgatcgtggtcctgcagaggtcctgtcccagggcgcactcttccacacggcaatccccgttggtcttacactgcatgcaccgcaggccccaagaggtctagtttcccgcgaagttctgtctccgccctccagctctccaagtaggcctcgtgcggaattcgccacgcagggcggcgggagagtgga

SEQ ID NO: 316747 - DNA, 940 bp, Homo Sapiens
  misc_feature (677)..(700): n is a, c, g, or t
tcggttcgtgagtgccggtggctaccagacattgattcatggggcctcggcagtcaatgaggaaagtctcttcagaggagcatccatcaagctccaggattgggccctcgttgcatttgggtggtgttgcagcatttcagggaagtggaaaggtgtcgttgttggtggaaaccattggagccccgggcagccgggaaggtagcccacagcccacggagggtggcggtcatcctttggacgcccttcttcaccttcctggatccagtgggtcaccacatccaggcactgttcttcagggctgcggcactgcaggctctggtgccggcccctctcacagctcatgtctgatgagccacaggaaatgcattcgaggtaacggcttcgggaataggtgacagcccggccagagttgccctggttgcacaagtctaacccacacacaacctcggtaaggctggtgatcttcaagccagtccgatagctcagggtcctgttggtcttctctgagtgggtacagcttttctccaccagctccagctcttctccttcttcccacaagcgcacgatcgtggtcctgcagaggtcctgtcccagggcgcactcttccacacggcaatccccgttggtcttacactgcatgcaccgcaggccccaagaggctgggacgcaggtgtggnnnnnnnnnnnnnnnnnnnnnnnnggcgggtgacccatgtcgcgagggcagctcctgtgcgcggggtccctgcacgtcttctctccttctggcctcaggaaggaggcagttttgtggccccagggactcctcccagacgttttgcgaaagagcgagtcagccccagatgcgtgggcgcctccccctcctcccgtacgaacctcctccgccacaaacttcccttcccggggcgcggccggctggtggtgaaggggctggctcggc

SEQ ID NO: 316748 - DNA, 527 bp, Homo Sapiens
  misc_feature (54)..(54): n is a, c, g, or t
  misc_feature (70)..(70): n is a, c, g, or t
  misc_feature (81)..(82): n is a, c, g, or t
  misc_feature (89)..(89): n is a, c, g, or t
  misc_feature (135)..(136): n is a, c, g, or t
  misc_feature (138)..(138): n is a, c, g, or t
  misc_feature (289)..(289): n is a, c, g, or t
  misc_feature (383)..(395): n is a, c, g, or t
  misc_feature (398)..(398): n is a, c, g, or t
  misc_feature (405)..(405): n is a, c, g, or t
gaagggatctcagctgtgccagctgagtcagtggtacatcatagtcactcagcntgacttctgggctcanccatcctcacnntaactcnccagtagtggactacacatatgaccactacaccggcttttcttttnntnttctttaatagaaataaaggtctcactatgttgcccaggctgtatgtacccttttttattagttcgttcccttcaaaatacaccattttttgtaccagaactgaaaatcatccatcaaaaccttcacaaaaaggtttgatttcttcatccntgtactaatcaatccaaacataacatgctgttttatatacacacaaatagccaggaagaagtatgcctttgtgttgaaaccaataagtgaaacnnnnnnnnnnnnntanaataaanaatatatgcatacatacatatacacatacatgtagagaaagggacttaactcactggctccagtaagcatctagaggtctgcctccataggctcagcagaggatccagctagagaaaactta

SEQ ID NO: 316749 - DNA, 845 bp, Homo Sapiens
  misc_feature (76)..(76): n is a, c, g, or t
  misc_feature (88)..(88): n is a, c, g, or t
  misc_feature (163)..(163): n is a, c, g, or t
  misc_feature (182)..(182): n is a, c, g, or t
  misc_feature (206)..(206): n is a, c, g, or t
caaatcatttcataatctacctcctgcttaacttgctgcctagaaaaggctgcgtttcccacctgtgactactggnccgtgcatattntacaaaatcatctataggaacgggccaagctctttcttcatcgtagttagacatatcatccgcaatcatgttccnaaagtccagcaggaggttncaggtgtcccttggaattgatctnttgtgatgttccattaagaatgtgttccagagatctaaaaatttaaaccttccagataacactaatttccaatacgcaacagccatttctaagtctaaacctttctgccctgggttcttagcgaaggtgaaggtaaactgataaaaatctttaaacttggctgtgtccttcagctcctgctccagtcttggcagaagagcctttagcttctccatgctgtcacacccaagttctgtcatgccatctagaaattcctttctgctaaattcacactgagttgctgccctgaacttccacgctatgaccaatacactgatactggcaggatccaggctcagatcatcacaaaactgttgaatcccatcgactccaattttgttttcatcttgtggatctttgtacctgccgtacagccgctccagcttcttcttgtccacagcgttccgcatggactccctgtggagcgagtctgggttttggaagaagctgtccgtggcctcgtctagtctccactcattctgcgttaagcagtagatagcagttctctcgccagcctgagtgcacgccataaactggcggaccttgtccttctgagacgatttaagcttatgcatctcccccgcgccgcccgcttctccc

SEQ ID NO: 316750 - DNA, 319 bp, Homo Sapiens
cttagagacctccctccttaagtcccctgtcctcctgccaatctggatggttgcctgtctaggcctgatgtacagctgtcatcctgtaccttccctccaatacccccttggatcctggtctatgtactataacaaaagcccagtatttcatgggattctgttgcctgaatcctccaggaaaaaagcaatctacattacagaaaaatgaaccacatgctgtcacagaatagatttcttctttcctgtatcatctttcttaatttgtttcctaattttgatagaccacacctcctttcagctcgtgccgaattcctgcagc

SEQ ID NO: 316751 - DNA, 1007 bp, Homo Sapiens
  misc_feature (539)..(550): n is a, c, g, or t
  misc_feature (587)..(597): n is a, c, g, or t
ggagatgctttttataataaagttatgccaaaaatacagcaacaaatacagaaaaagtattaacaaacggagaagccccagatacacgtacagtaacaatacaaaaatgtgactggtcaaacagctcaagttcacatttaacactttcaattatttttaattacactatttctgttcaaaagaatgttttccttacattcaaaccatgatcagtcttttagtctcaatcgtaccaaaataaagctatatattaagccctcttgactaggtaaggttgtgaagtacccccgtgagttgctctgtggcttgaggatgggacacatggtcttcaaatgactcttatgcatgctttgctttaagaaagaaaagtaatgttgatggtttaaaaagtaagtactttttgaagcagcagatgaaatgtgtttactaccagcctaaatcaaagaacatggcaagagcaagactgttctcaggaaggaaaccataaatatggcatttatgtaaaatccttgcagcatctgaccatgcttttatctttnnnnnnnnnnnntcctcactttcttaaatataagtaacagtttattaannnnnnnnnnnacagtgagatatggctatgggaagcaggtgatactatttgtttaagaaactgggatgccaactaacacgtggagttccccaagactttgcaatctccatttgtgagtttctgtaaaaaagggaacccagctagaggattcacagagaccttgaatgacaagcgacatactcgaaatctgcagctctcctcccggagggcccagcgtgccaggagacacgctgcagtaaggcacttaccaagctcctttggatagagggaaagaagaaatcaatccaggcaacatgcaagtttcagtgaagtcagacattttatgggaatttaaagtcttgcctgttctcagtgcaccccagtcagttactgacatgtcagcctcagaaaccgcacatggcctcaggaaggtcaggccctc

SEQ ID NO: 316752 - DNA, 411 bp, Homo Sapiens
gagatacctagctgtacgtcggttgtgaatcgcagtctgtggatcatgctgactttgaatgacttgtaatggtggctgctaagcatatcctgtactgtggctatgtcaatttgcgaatcctcctcaaaaaccccgtctgcccttgaactgttctcgcggaccaggcagcactcccatgcgctctggctctccaaagtgctgtccaggtcaccggcgacattgggccttcgcttcactgccttcagtaagatttccttcatggtaacctttgtgttgtccacctgaataagggagaatccatgagcagcatttattcgaacaaagagtgactctttggatgtcagaccaggagatgagtacttttcaaccagggccaaagtactgaagccaaacttatgaatgggtaaggtg

SEQ ID NO: 316753 - DNA, 2263 bp, Homo Sapiens
atatgacttttattttaatatcattttaatatcgaatatgtcacaagatttaatgaccaaattagtcatttacatttttcaaagtatctaaatataaaattgctaaaaattcaaatacagatagcaagctacaaatatttcttttgtttttgggtggggggtaggaatggaagacattagaaaaggacgctcctgttggctgaacaaagatcagaatgaaagaagaattcatcagcatgaccccttgtgcaaagaaatacactcagctttaagatgctgttttagacacatctcttcctgtacaacaatttaaaaaatgtttctaatgcaggtcctcagtgaaacaccggtccccggccctggctggggacagtaaggacatcaccgcaggagggacacttgagaggctgtcgaggactgcagaggcatctggtgtggccagaggcgtggtgtcaggggcatctgatcccttgcctgttcccacccagggagccggacggcacggacacaggtctccctccgctcacccctctccctgaaacgtgagaaacagcagctttccgcctgcttgaaaaaggaggcaggcgctgtaaggagaagaggaatggggaatgtgggcccttccaaggcagcgaagcagagaacatgcaggtggaactgccagctgaaacctacacttgctacttaagaaacggaaagaccatgtctggctgggagtgcagcgtgcctgaggaccagccaccgcccctcctcctggcaccccacactgtccacgcagctcctgggctctgaggtcagaagctggggtgtgctgaaggggaaagtgacacggccttggacacaccactaggtctctgttcctaacttttagtaagacactaccctcgaagcaaatgcactcatttaaacaaatggcatagttaaaactattgactaagacctaaacatttcttctgagaaatcgaaccatagcttttccatctgcctgttcatatgggaacagattttaaagagagtaacataatcaatcctccgccccaaagaatggtccatcataccaaccatgataaagagtacacctgtttattaaaaggaaaaacagaaatgtacatttttgttgtttgctttaagaaatttgatcaagttgcaaggaaatgtgtgggcacggctctgtacatcctcgggcagggtggcaggcattgaaggtggctgggcggcacgtggctcctctagggggtggtctgacccccaagcatcgcttatcaaagccactgccaagcagacttccgtcccatggcaatgtccccagcgctccctcctagggggcccccgacaccttccccgagagcccacctgccctgtgccagtgagccagggctggcctccccccgaggacttcaggacaccgggtgggctctagggcacttggccctggcaggcaggctctgagctacggaacagattgaggctggaggccagtgtcactgctgcccggatttcttctccttctggaagctgaagctcgtacgtctgttcagttttctttgtttttgagcaaagtagtcagcccgggcagtgctagctcgcgattccaggatgtagttaaccttgagcacaatttcattgacggtagcagcgtccgattcaaagtagaggtgtttatagtcgtgattgcttagatacgtgagtttaaatattgcgtgactggggcttttctcttcagcaaggtcacaggcacagagcaggtcggaatcgattgagatgggtttctgcttaatccaaaacttagtgctggctttctgattcgtaacagggtctatctctactttgtctccagagatacctagctgtacgtcggttgtgaatcgcagtctgtggatcatgctgactttgaatgacttgtaatggtggctgctaagcatatcctgtactgtggctatgtcaatttgcgaatcctcctcaaaaaccccgtctgcccttgaactgttctcgcggaccaggcagaactcccatgcgctctggctctccaaagtgctgtccaggtcaacggcgacattgggctcgctctgcttctccaggcggtactgagggcctgaaactttctgggatccttttcttcgcttcactgccttcagtaagatttccttcatggtaacctttgtgttgtccacctgaataagggagaatccatgagcagcatttattcgaacaaagagtgactcttggatcctcgtccgaattcgccacccaggcctcgctcctt

SEQ ID NO: 316754 - DNA, 816 bp, Homo Sapiens
  misc_feature (713)..(713): n is a, c, g, or t
  misc_feature (771)..(771): n is a, c, g, or t
  misc_feature (776)..(776): n is a, c, g, or t
  misc_feature (804)..(804): n is a, c, g, or t
gtacggctgtaaatagcctctctgtgttggatccatgttatatctaagaaggcttgtttcttaataccctctcatatagtttgggggggttccccaccctcaactcacccacccaggaaaccagactatgcaacttgtgtgtgccatttggagtgtccttatgtttgtctcaggaagcccgtggcattccccaaagccctaagaaagagctcacgttcatgcaatttcagatttataaaacaggtcaaatgatttccctgaaatcacttacaccttctacttcttgtgttttcttttgtgtcctcaccttgggcttacaggtatctctggagacaaagtaggagatagaccctgttacggaattcagaaagccagcactaagttttgggtttaaggcaggaaacccatcttcaattcggtttccgacctgctctgtggcctgtggaccttgctggaggagaaaaggcccagtgagtagtcccttttatttatgtctcctttctctctttcccctctcttctcttctgtgtgctgggtgccaggagaatatattgccactgtgtccttttttccttgggtctgttttaattcattaccagaaatttcttttaatcaaacgggattgtattatggtgcccagagcctgatatgtgccccatcctgttcggtcttgatggctgcagagaacttcgcagcccacctcctgacctcancagcccagccccgggagctgggggcacagggccagatttctgctgggaatttgcactnaccanaaccctcattttccctttgggctccctncccttcccattt

SEQ ID NO: 316755 - DNA, 663 bp, Homo Sapiens
  misc_feature (67)..(68): n is a, c, g, or t
  misc_feature (72)..(72): n is a, c, g, or t
  misc_feature (76)..(76): n is a, c, g, or t
  misc_feature (119)..(120): n is a, c, g, or t
  misc_feature (136)..(136): n is a, c, g, or t
  misc_feature (138)..(138): n is a, c, g, or t
  misc_feature (147)..(147): n is a, c, g, or t
  misc_feature (149)..(149): n is a, c, g, or t
  misc_feature (159)..(160): n is a, c, g, or t
  misc_feature (168)..(168): n is a, c, g, or t
  misc_feature (173)..(174): n is a, c, g, or t
  misc_feature (187)..(188): n is a, c, g, or t
  misc_feature (210)..(210): n is a, c, g, or t
  misc_feature (212)..(212): n is a, c, g, or t
  misc_feature (229)..(229): n is a, c, g, or t
  misc_feature (245)..(245): n is a, c, g, or t
  misc_feature (314)..(314): n is a, c, g, or t
  misc_feature (626)..(626): n is a, c, g, or t
  misc_feature (633)..(633): n is a, c, g, or t
cttaagataacattggatatttacaaggtatagctgactctaactcaaccagctgaagattaaaganngaanatgnaagcatctgtgtcatgatgaaagcatatgtcaagtgtcagagnnaatggaagtcactacnanatcatatgnanttaaagggcnncaaatgcntaacnnatcctaagacacnnataaagtggaagacacacttcncnattcaaaacatatacanaagctacagtaatcanaaacagtgtgacattggaatatggacagacatacagaccaacagaatagtgttaagaatacagaaacanaattcatacacccacagcctgttgatttcccacaagcacgccacacctgttcaatgaggcccgcctactctcttcacacaacggtgctggcaatacctggattctccccatgcaaaagaatgcagttgcactcctatccaatacatatccaattaactcgaaattaaaagctaaatgtaagggctaaaaccgtaatactctcaggaaaaaaacaacaggaacataccttcacaaccttgaatttaaattcttatatacgacaacaaaagcacatgcaacagaagaaaaaatacagaaatcagatttaatcanaactaanaacttttcagaacaggtggggacctcgtgc

SEQ ID NO: 316756 - DNA, 979 bp, Homo Sapiens
  misc_feature (147)..(147): n is a, c, g, or t
  misc_feature (212)..(212): n is a, c, g, or t
  misc_feature (316)..(316): n is a, c, g, or t
  misc_feature (371)..(371): n is a, c, g, or t
  misc_feature (406)..(406): n is a, c, g, or t
  misc_feature (415)..(415): n is a, c, g, or t
  misc_feature (430)..(430): n is a, c, g, or t
  misc_feature (554)..(554): n is a, c, g, or t
  misc_feature (632)..(649): n is a, c, g, or t
gagtagtatataaacacgagttaaggtttttacggcagttaaccattgataattctgaaaattagctaattgtatggaccagcgttcagtttttcaacaaatatgcagacactacgacccaaattattaagatattcactgaacacngtgctagagtgagaatagctgatgtcgttctactctgcatgaacaactggctcattctcatgcancatatgtcagctcagttgtgatctgccataagcagctaacagtgaagcttctacgtgcatgagatgacagacctagcactttggctatctgacctcgagatacnacctagtatgatagcagtctctcgtagcagacacaagcatatatgatatgatctnagtaatagaggagaagcagatctgaatggatttcnataatagcnttcctctagttaacntgattttttcccacatatgtatgctttcacagatccagtttgggagcattcaatttagcacaccctggccttaaatactgcacaaaacacatagtagagcattttgcttttatttatgtcatcnatggtttcaaatgggaatgactcatccttcctctttaacactctgttctaatatggtttactataaataatgcagacnnnnnnnnnnnnnnnnnnggagcaccagcgagagcgagcatgtgcagctcagcacaaggcccctgcactgttaggtcacaaaagagccgagtccaacagacaatcctaaggtgaatcttgggctcagtggatgggcgagtgttggttcaatggagaggaaaagcaaacattcctctctccactattcaagtgttcggggcaaggaacattgtcaggaaaggggaaaaaatacatgctgagtatatgccaggtaccaggctaagatttgaacacacaagctcctttaaccttccagagccttccaaagaggcagagtcagaattctaactcaggccactgtgctcgtgc

SEQ ID NO: 316757 - DNA, 974 bp, Homo Sapiens
aatctagtggttctttatttataacgtaggctgaagcaattgttacaatgtaggagggagacacattacacaattgttatttatacaagtttagaacaaaaaactgcacagggagaggtcaactctcagtacaaactagcaactaaagcacaataatttactgttagaaacgatttctttctttttagctgtgacactgcttttacaatatgcaaaaacacaagcagaactacccaaggtgtgttgtcacattctttctacattgaatttggcaacattttatttattcagattatactaacgtttaaaaactaaacaagtgaaaagctgtaccaaggtacagttacatccatttatttcaaaggtttaaaataccacttttatctattgtgattaccttgcagcgatttctgcttttgcaaaaaccatctcaagcatcatatgcacaatgcatcagctacttttagtcatcaagattggtgggctaaaccacaggcactactgttgtttatattctgtaaaaggagcttgtttttcaaagaagaaagcttaaatagtttctaataatcatgcctttgctttaaagccgtaacataaaatgtccttgagcaatcgcagcagtgttcaatgttaatatatagaacgatgaccatacggtacgttactctcacatccaatgcagttatgtgttaaagcataagattaggtaattgagggttagagccaacaaggaattctgtcagggtgtatgaaacccaccaaactcctcctctgccttgagagggttcggtcatgaaatgtgccctcgttatgacctgactggtaagggacttgcttgctttcgttaaacactattgtcttcacatcgatgatccctttaaatctacaaatctctgttggctttaggggatgggcagtataacaaatttcggacgcgtgggtcgacgatatcccgggaattccgggccggtacc

SEQ ID NO: 316758 - DNA, 1150 bp, Homo Sapiens
  misc_feature (44)..(44): n is a, c, g, or t
  misc_feature (92)..(92): n is a, c, g, or t
  misc_feature (176)..(176): n is a, c, g, or t
  misc_feature (319)..(319): n is a, c, g, or t
agttcaagttcctctttggcattactcaggttctttttccagcnctgcaactgtgtccaagtctcctaatgtggatctgggtatgctgacancctctttggcagtcaatgaagtgctatcatctctggaagggatctgcattgaaccttgatcagtctgttttccaagacggccantgggggtaacttcagcttgttggttagagatgggtgcttgggacatcagggagtctctcccctcctaaatattggcgcaggggcctgtaattctgaagtttcttttccattaaggcttgcacctacttctctgcagcagcttnggctttcctgctccctggtgctcacagactgaagcaggccttgaatctccatttcatgttccagcacttgtttatttcgatcacttagaaggtcctgcagcatccttgtcctttcgctgtagacgctggcacagctcctctgctatctcactctgccctggtccaagtttgcagagcagtgttgcactaagatcctccacttctttgttcctatcatgaagagacgtctgtaactgctgaatgatactctcttgttccttctgccaacggctaaatttggtttccatttcttctttcagccactggaggttttgacaggtagtagataactgttccacttccaggcctttggccctcaggagactctccatactttgcatagtagcttcattggaggagaggacatcgcgcagtctctctaagtcatgatctcgctctctcacagcaagacgaagctggcgcagttctttttctttctcttctagagcagagaatttttcatctatagcccgctccagagcaacagctttatcatgtattcgctggcgaagtttctcaagcaacatttcatttgcttcaagggttttgtctgagttatctcgatactgtaggagctcccgaaattcctgaagcaactgctccttgtgactcagactatggtttaggtgctggatgttttgttcctgggttcgaatctcattgtatttttcagcctcccaggcacgaagctgttggctcttattctgcaattcttcttgtagctgctgcaaggcttttcgcaattcctggttatgtttccaagaagcctctttctgctgttcactctcgtgt

SEQ ID NO: 316759 - DNA, 771 bp, Homo Sapiens
  misc_feature (127)..(127): n is a, c, g, or t
  misc_feature (199)..(199): n is a, c, g, or t
  misc_feature (230)..(230): n is a, c, g, or t
  misc_feature (236)..(236): n is a, c, g, or t
  misc_feature (264)..(264): n is a, c, g, or t
  misc_feature (273)..(273): n is a, c, g, or t
  misc_feature (299)..(299): n is a, c, g, or t
  misc_feature (696)..(696): n is a, c, g, or t
  misc_feature (749)..(749): n is a, c, g, or t
agacgattgtgagcagtactagtccgcaaagtagatgagtccttagcaaagtgagctcatgactatgctgaccatgcactcagccgatgcagatagacctgtctccaaaaaaatttttttaccaaanattgaacatttgtagctccaagaccttagcaggtgtcaacacaggacaatgttctcagctagagtacatgcnttcatctcttcttagagagctgcaaacatcnactccntcagtttgaagttagtcctatattttcncaggtcagnagtatcctacactattaggattaagnagaatacctttctcatggctgaatagctcatagttcctctcctgcaccctagcctcacgatagcctacatagaatagactacactttctcattttttgccccggctgagatcagtcactcaccgtacaacggggacagagccattcaccgttggggatctctggaagtgggggattcaggcagtggatgtggtaggaagaaggacaggtatcacagcagagcagttccccaccatccttgcagacccgacagaattccatatggtggtcatcctcctcttcgaggtctcccccaacctcttccaggatctcctcaccctccgaattgtcctctttagcttcccactggatgccttccttctcctgcagtaaaggaccacagattcagattattaccnccacccgccaccgcagtctgaagccagtgcccatcattcctttgaatgcttcncaagcctcacaacacctcgtgc

SEQ ID NO: 316760 - DNA, 1100 bp, Homo Sapiens
  misc_feature (644)..(644): n is a, c, g, or t
  misc_feature (659)..(659): n is a, c, g, or t
  misc_feature (677)..(677): n is a, c, g, or t
  misc_feature (702)..(702): n is a, c, g, or t
  misc_feature (750)..(750): n is a, c, g, or t
  misc_feature (881)..(881): n is a, c, g, or t
  misc_feature (947)..(947): n is a, c, g, or t
  misc_feature (1070)..(1070): n is a, c, g, or t
tgccaccggatgtcctctgcgctggaatcagtcactgtcagcgacagacccctcggggtgtccatcacaaaagccgaggtagcccctgaagaagatgaaaggaaaaagaggcgacgagaaagaaataagattgcagctgcaaagtgccgaaacaagaagaaggagaagacggagtgcctgcagaaagagtcggagaagctggaaagtgtgaatgctgaactgaaggctcagattgaggagctcaagaacgagaagcagcatttgatatacatgctcaaccttcatcggcccacgtgtattgtccgggctcagaatgggaggactccagaagatgagagaaacctctttatccaacagataaaagaaggaacattgcagagctaagcagtcgtggtatgggggcgactggggagtcctcattgaatcctcattttatacccaaaaccctgaagccattggagagctgtcttcctgtgtacctctagaatcccagcagcagagaaccatcaaggcgggagggcctgcagtgattcagcaggcctttcccattctgccccagagtgggtcttggaccagggcaagtgcatctttgcctcaactcaggattaggccttacacactgggccatctatgtcagatgcccncagctgtgtctgccngcttcatctgatctacanaaaccagatgccaccgtaggatcangcagagtgctgacctcggtggaggatgggcatctctcacgtgtacatngactcgaggatgtgatggacagattatgagtgtcacggcaggtgtctttacaaatgctgatgcgaaatgttcagaactagatgctctcgatgtggaacacatgtgacttaattgcttcaacggtctagagntgggcgctgaccatgcgttcagatcgtgcaaactgacaagagcgattcagtacaatctgcgtagcngtttgacatcagcaggagcagctcaggtgctcatgtgcagtgttgacaatcatttctggacacggggttaaccgggggggcctctttataattttttaaaacgcgggagcctcccgctatatntcgatcgcgcctaaatttctcatttggaaa

SEQ ID NO: 316761 - DNA, 808 bp, Homo Sapiens
  misc_feature (11)..(11): n is a, c, g, or t
  misc_feature (46)..(46): n is a, c, g, or t
caagaaaacanccctcaactatcaacaactggcaacctgaattcantttccttcaaagggaggtgtctggtgcctggtaccctgccctgaaagatggtgattccatgatcttcttctccttctccccttatgactcctttcaagctgtgttgtctcccactgagttgtaaatgagcaaaagagtcttccagagaagtgcttgcatcagggaatggtgttgcagggcttgttaactgaccatctactgatgttaggggccttacagaagacactaggggctgaacagaagctccactctgtgctgatacactgtccgctccgtcagcagagctctctcttgctaggtttacggtattagcatcacagtctagcctaagtccagctactcccttctttggtatatgtattatatctcgtttagtcttcctgctactcccttctttggtatatctattatatctccaagatcagcgacatacagaaagccagcaattaacatttcagtgttctttttacctttggaaaaagcatcttccagctctctactagtgcgctcatcgtactgccaccacccatttcttccttcataataccatgcatattcaccatttcctctacttgctgccttgagttcttctggtgacaacaaggttggcttgtcaaggaaatcctcgggaatttcttgtcgacaaagagcacaccgctttccaagccatgaagctccttttacacatagatagcagaaaacgtgcttacagggcagactgactggatgaacacatgtttgcagacaaatggcacattcagg

SEQ ID NO: 316762 - DNA, 686 bp, Homo Sapiens
  misc_feature (443)..(443): n is a, c, g, or t
gccttattaaactaactacaaacatttattttccaatttagttttactttcagtgcatatcaaagttgttgtactcttcagaccaacaaattaacttgagggcaaattacatagctttccatgtacccttttttcctcaggtgctaatcaaaggctctgaaaatggatactgctttagtgatgtctgctttattcttaaaatgcttatttcttttgctagatgtaaagatttggtgttaacaaaagtggttttaatatgtaaatatgaatgaatgcctttagtttaccctgtttgtctattattaatctgttttcatttatccttcatagaggaggatcctttcatgatcttgaatacatttcattagatattgttgcattttaagaatgaaaatacaactgttttctgtcttagattaatcctgctgctatgagaaacctgnaaatcaagaatgtgatgcactttttacatttctatataccatacatataccataggttgctttgataccttttctgtagcacaggcactaactagagtgaatgaattataaaattctttttgggagggaatcataccaagaactcattcttatctgatattgtcctatgaaagacaataacttttgagtataagaaattctggtataagacaactttttgggcttaaaatgtctttactactg

SEQ ID NO: 316763 - DNA, 662 bp, Homo Sapiens
gtgtgagccaccgtgcccggccaagtatctcttttctacagccttattaaactaactacaaacatttattttccaatttagttttactttcagtgcatatcaaagttgttgtactcttcagaccaacaaattaacttgagggcaaattacatagctttccatgtacccttttttcctcaggtgctaatcaaaggctctgaaaatggatactgctttagtgatgtctgctttattcttaaaatgcttatttcttttgctagatgtaaagatttggtgttaacaaaagtggttttaatatgtaaatatgaatgaatgcctttagtttaccctgtttgtctattattaatctgttttcatttatccttcatagaggaggatcctttcatgatcttgaatacatttcattagatattgttgcattttaagaatgaaaatacaactgttttctgtcttagattaatcctgctgctatgagaaactgaaaatcaagaatgtgatgcactttttacattactatataccatacatataccataggttgctttgatacctttcctgtagcacagccactaacaagagtgaatgaattattcctatgaaggacaataacttaggaatataagaattctggtaatagtacactttttgcccttaaatgtctc

SEQ ID NO: 316764 - DNA, 334 bp, Homo Sapiens
  misc_feature (104)..(205): n is a, c, g, or t
aggcatggaacctttttaaaaaccattttttaaccttcctcctccccatattccctgacccatagacctcagcagttccttaactctggctgtgtgttagtctnnnnnnnnnnnnnnnnnnnnnnnnnnnnnnnnnnnnnnnnnnnnnnnnnnnnnnnnnnnnnnnnnnnnnnnnnnnnnnnnnnnnnnnnnnnnnnnnnnnnnntactccttagaggtttctagcatgcgcccggtgttgacaacagctggacaaacttgagaagtcaattcatgtggcctttgaattttcctcattggaaagtactaaataaataaaaattcatgtgaaaag

SEQ ID NO: 316765 - DNA, 647 bp, Homo Sapiens
ttcggcacgaggaacattacaaagcaaagactatttttatgcttccataacctagaattaaaaccaaattatgaccttatgataaatctttaagtattggtgtgaatgttatttaaattctatatttttcttatttaattacaaatactataaatgagcaaggaaaaggaatagactttcttaatatattataacactcattcctagagcttaggggtgactctttaatattaccttatagtagaaactttatgtaatatagctaactccgtatttacagaacaaaaaaacacagttccccctcctgtagtataaattttattttcacatacttagctaatttagcagtaattggcccagttttttccctaatagaaatacttttagatttgattatgtatacatgacacctaaagagggaacaaaagttagttttatttttttaataaacaacagagtttgttttgtgagataagtatcttagtaaacccaatttccagtcttagtctttatttccaatatttctaattcctgagccacgttaaagatgcctttgcaaatttcttcccatttctctacggggctagcaaaaatcttcagctttatcactcaacctctgccatgagatgtgtaagaatcacttacag

SEQ ID NO: 316766 - DNA, 916 bp, Homo Sapiens
ctaggcataaatgtgtatttaaaatttcatagtaaacaaatacttgtaagtgataatttccccattttccaaataagataatgttgaacagacattatgatgaattttatatttgatctctttttttggtaaatgtggttgtgaaaattgagttatatattcctcttttcaaaattctccgctaaacaagcacttgtttttgatattggtcaagacatttggcatactaagtaagggagcaatgctggggaagatacctgagaagacaagcgtgccctcccctcactatctccctcactttttttgctttgaggttttaacatcaagatataaattattttaaggtctcaaaataatcctttcacaaaaataagacagttttatgttgtaaaaacattagttatttgtcaaaggttatgttcttccatcttcatctgtcactagctgtcggcatctcctttaaagatcagttttttcttcataatgacacctgcatgcggctcgttggctgtccagatatggtttacaacctaaatgtataacactgtcaaacaagagctccactgttgtttcacatgcctgaacatgctgagttagtcctagtgttttctgtacatctcggcagatcttggagaggcaatactggaattcttcatcacagtcattcttgcttttgccacaggtctcatagcacctgtcgtgttggttgcaacactttgtcagggaagggataccaatgttaagatgaacaccaaacagtggagagccacatccattcggtggggagggtttataaccataacgtgggaaaggcttagatccgtcactgcatttatactggcagagaccgtcctcgcctcccaggaggtccaaggcggcgttcaggtacgtgtctatcttatgaacgccgttccgg

SEQ ID NO: 316767 - DNA, 918 bp, Homo Sapiens
tattctcccctccccttttttggctttggaggttttaccctccaggattataaaattattttaaggtctccaaaataattctttcacaaaaaataagacagttttatgttgtaaaaacatttagttattggtcaaagggttatgttctcccatcttcatctgtcactagctgtcggcatctcctttaaagatcagtttttctttcataatgacacctgcatgcggctcgttggctgtccagatatggtttacaacctaaatgtataacactgtcaaacaagagctccactgttgtttcacatgcctgaacatgctgagttagtcctagtgttttctgtacatctcggcagatcttggagaggcaatactggaattcttcatcacagtcattcttgcttttgccacaggtttcatagcacctgtcgtgttggttgcaacactttgtcagggaagggataccaatgttaagcgtcactgcatttatactggcagagaccgtcctcgcctcccaggaggtccaaggcggcgttcaggtacgtgtctatctatatgaacgccgttccggatggtcttcagggtgtctctccagtcggtggtctgggcctgctcctggcacctgacaacagcggccatgaggaggagcaggagggtgagcgcggggcgcgagagcagggccatgcgcgcagcgccgggctctacgggtccccgagccgcggcgcggggcgcgtccccacagagtccccaggacgcgttaggcagcggcgcgggccccggacttggcagcagccagctccatatccacgcctccttcccgggtggccctcaggatctcgctgtctttacgtgacccgcctcggacaagagcgccgtcgcgggcacgcgcccgctcacctggaacagcgcgcccgctcacctggg

SEQ ID NO: 316768 - DNA, 709 bp, Homo Sapiens
ttaaaactagttgaaagttttatttttataaaattaacataaaagattgtttaaaaatctgcagttatttacagcagtattgcacaagtaaagtggcaattaccctgtcaaaattcatcagtgcaaaacacaagtaagccagggaaactgcaatacaaatgctacatacgctgggtcctagaaaacaggttagtgatggatcagtatacagccagatcagtgctatttataagtgggtacctgatgagttctgatacagtaactagtggtcacagaatctggacataaaacataagagagcttctatagtctgaaattcccaaataaaagtagtcaagttacttaactgggagcttgaggatgcttcttacacacaatgctgtttagagtagaccccaactgatttagcgtcatctgtagacacgtttcccccaccccacgtgtacgtgagtggacacacacaggcaccaggctaaatcagcagggatggcagaaccacctgcatggaaccaccatgaagtctccttaaagctcccataagctttcacatcttgacacccagtccagtggggccccaacctcccctgaaggagatggagtatcagaaggagggcatcgacctgaagaagcaggctgaccaaatgcagtgaccgtatgggtggggcgtggggagctcgtgccgaatcctgcagcccgggggatccactag

SEQ ID NO: 316769 - DNA, 429 bp, Homo Sapiens
gttttatttttataaaattaacataaaagattgtttaaaaatctgcagttatttacagcagtattgcacaagtaaagtggcaattaccctgtcaaaattcatcagtgcaaaacacaagtaagccagggaaactgcaatacaaatgctacatacgctgggtcctagaaaccaggttagtgatggatcagtatacagccagatcagtgctatttataagtgggtacctgatgagttctgatacagtaactagtggggcgtggggagggctgtacagttaattagctcctgaagacaagttagtccaacctcaaaggcacagggaagttgcacagcagggtggggggaaaacccagctactcacagttgtccacagggggttagtgggcccgaggtggtccctagggcaggggccacctgtcccaccctttc

SEQ ID NO: 316770 - DNA, 1494 bp, Homo Sapiens
  misc_feature (1199)..(1199): n is a, c, g, or t
  misc_feature (1436)..(1436): n is a, c, g, or t
  misc_feature (1457)..(1457): n is a, c, g, or t
  misc_feature (1470)..(1470): n is a, c, g, or t
gggaaattaggagatcccctatgaattggtaggggagtattaaaagcccccaggctgtgggcccccagaaccttaaagcgatgactggatgtctctgtactgtatgtatctggttatcaagatgcctctgtgcagaaagtatgcctcccgtgggtatacgtttttaccttttttaaaaaacatttttgtagaaaaaataattaaatcccctttttggaaacttactgcaggttttgtgccttgacaacctctccctatgtgaggtttgtaaaaagtgtcctgtgacttaacacagaaacgcaataaacacacacaaaatagtttcatgagtgattcttcagatgcccttcctaactggttagttgatcaagaattttgggggtgggggttgcggagaaatcaagtttaaaattccttctgattaaaaaaatatagtggaatacaattgtctgccgtttccccttcttaatgtatatattgtgagtatttattagattcgtaggtcatattacttatcaactgagccaaatgtctgtgtgcaattgtgtttcctttaccttgtaaaattttgtacagcataaataagtaaaaaaatcactgtttttctcaactttttcaaaatcaaggattgtaaatattgtagattctttttctgtgtgatgtgtcctactgtttcataatgctgtaacttgtagaaatattgtatatttattttctgcttatttaatgtcttaatttctgaaaagtattaacatccctgtctcccactcccctgccgtcccatgaagttaactcctgagagttgtcgggggtgactggagagctcattgcagaccacgtggtcctccagggtggctctccaccttcgggtcctggtatttccagtcaagtgggtttcaattcttgggctttgccgcccttatgatgaagtgtgtgtttgatgccagtgagaaactcagtctggcaggctacaaaattctactccaagaaatacccagcaaccttctgtttgttccaaagcaactagcttatcatgcaagcaaattttgctgactccaggctttatctttaggaaaacaaaaaaaccaaagtattatcagcaggtgggaaagatttttctattgaaaatttatccctgacaactcagcgtttagaaaagaaataaaatgtgccacttccagaggtgctgcattgcagtntgttcagggctagggccaggcaggacaagtgaatgggtgggacaggtggctgctgctaaggaccacctcaggccactaaccccttgtggacaactgtgagtagctgggtttttccccccacctgctgtgcaacttcctgtgctttgaggttggacttaacttgtcttcaggagctaatttactgtacaggccctccccacgccccacccatacggtcattgcatttggtcagcctgnttctttcaggttcgatggccntccttcttgatantccatctcctttcagggggaggtt

SEQ ID NO: 316771 - DNA, 641 bp, Homo Sapiens
  misc_feature (496)..(496): n is a, c, g, or t
  misc_feature (543)..(543): n is a, c, g, or t
  misc_feature (546)..(546): n is a, c, g, or t
  misc_feature (558)..(558): n is a, c, g, or t
ctgtggtctactccaacacgagagaacagtcttctgaggccgcgctccggattcagtcctccgacaaggtcacgagcatcagtctgcctgttgcgcctgcgtaccacgtgatcgaatttgaactggaagttctctctttaccttcagccccagcactcggaggggagagtgacatgctggggatggcagagccccacaggaagcataaggacaaacagagaactggccgctgcatggttaccacagaccacaaagtgtcgattgactgcccgtggtccatctactccacagtcatcgcactgaccttcagcgtacccttcaggaccacacacagcctcctgtcctcaggaacacggaaatatgttcaagtttgtgtccagaatttgtcagaacttgactttcagctgtcagatagttatcttgtagataccggtgatagtaccgacctgcaactagtaccactgaacacgcagtcccagcagcccatctacagcangcagtcggtgttcttcgtctgggaactcaaagtgacagaagaggctnccncttctctgcatngccggttctctggtggattttccccagcttctgaggaaacagctgctatctgcataaagccgtatactcatgaatttaagtgg

SEQ ID NO: 316772 - DNA, 787 bp, Homo Sapiens
  misc_feature (70)..(70): n is a, c, g, or t
ggggggaaggcaatacccccaaggttttgttgaacctgtgcttgctatagtgcttgatgtcaaatgaatntgggttaaaggttcaaaacttgtaaactctaatctttgttaaatatcatttgtatttgtttccatttcctgcagcatcatgttgactttcttcctaactttgtataccactattattcttgatcaactgaaggtattttctccataaacttagttagccataaaatttccacagcacactttttacactgcatttaaaaactaaataacctgttcatcatttaaggactattcagctataattatcagtcatgttgtaaacattaatcaatttatcacaagataaaacttgtcctttctagtgttatcagaaacgcctaacaaaatattgtactaccaaaaaagtactgcttagcataaagtatcagtaatcaactctactagccttctttctgaaaactcttcaatgttttaaaaatataattcatacacaaaattacactccatagaattcaaactatatccctttataaagtttcgagatctccataatgggatttattactgcagggggacaaaatagggatagggagattcttcagggttgtaaatcgcagtgcgggcgcagcaaacacggaagctgcgcggctgcctagaggcctccgcagagccgggaatcagcggcgccgacaaggagatacggcccgctcggctcggatcagcccgggcgctcccgaagcccgccgccccatccgggctcactctgacgcacgatccc

SEQ ID NO: 316773 - DNA, 625 bp, Homo Sapiens
gtgagaatggctatcatggctgggtaatcagaaacatgatgaaaggtaggtaatagctctctatcagccgtctctgtgcagctgggataagggtaaaatagatgtcctttctctaacgggtatggaatcattctaaaagtgccttcccatgtacactgtaacagattaagagcaccttctattcgtttccagtgctgaagatgaaagaaagcataggcaattgcttcactatcaccccgtttcagaatgtgttctggaggtaaaattaaacttttcatctctaataaatattttggaacatgaggattaaattccacagctctatgaattgcttccacggcattaatttctgctgtgcttaatcctcttctggaggctgtttctggagagaatttttctgaaacagtccttgtcttcaacagtgctgctgtgtaacagattgctgctgactttggaaggcttatatcatcatattttgctaggactgcctgaacatctggataggcctgtaattctaaaagtgattctaagagattttcatggatgttcaacatggtaagaggaggaaattctttcatcaaatctctcattatttttactgcttctcttattcttcctaattttc

SEQ ID NO: 316774 - DNA, 1801 bp, Homo Sapiens
  misc_feature (59)..(59): n is a, c, g, or t
ttttcaccggtgttcctggagctgcccgctgccctctgccctgtccgtccccggcaganctgggagccggccctcagcatgaccaccgaaactttatttacaacacgaggctggagtaagaggggtgggatggaggacagcagcagggccgacaggaccctacttctgctcccgcctccagacgatgaccatgccgctggcgtcactggaggccagtaggctctcgtcgcagttgaagctgacatcaagcacaggtgcactgtggccctgcagcttgttgacagcagccttggccgcccgctccacatcaaagaagtgcacgcacatgtcctcactgcccgtcaccacgcaggccccctggcggaaggacatgaggggacagaagatgctgcgcacaggatgtgagctctgctcgatggggaagcttctcttcagctgcagggtcccctcgttgtctaccaccctgtagagcagcaacttgttgaggcaagcattgatgagcagtgagggatcccgggcctcgcggctgacccaggaccgggctgagatgctggtcacagggctcccctcatgcaccaccaaacgcttggctttggtcagcttccctgtggccatatcaaagaggaaagagaagacactgccacggtcatcacccgcccagagcagccggccaggggcatcaaaggacagagcaaggacacggcctgtcagcttgctggagccccccttcactttcttgcctgtggagatgttcatgacatgcacgttgtgcttggcgttccccaccacagtgaggttgttgttgacaggctggaaggtgcagcagagcagttcagcgctatcggggtcagggatctctcggatgcagcgaccatcctcagaggcccagatgcgcatggtggcatccagtgaggtggacacgaggatgtcattggagagggaccaggcgaagtcggagacaccacgggtgtggccccgtagcacgcgaagcactgtgggtggggcaggcaccagctggcacagggagatgctgccgtcgagtgagcagcaggccaggcggtgtcggtcatcattggcgaagcgcacccttgggactgcctcatccacgtgctggtcaaaaacatgatacatgcccgcaaaggcatagttctcgctcagtgacgtgtccccggccatggcccgacttgcctctgctgctgacgtgggcaccacgctgccagggggcctgtcctcatagacggcacggttcatctgcgcctgcagctggtaggagcctctgctgacagaacgacggtgcccacgggcccccagggcccgaggatcatcctcaaagtcctccatgcggtcaagagtagtgcggctactgcggacgatgctgttgctataggcacgagcactgcctggctcggagaggggcccgtagcgctggcccagcagctgcccccgaagcctcaggtactgccgacgcagcgctggggggtgcccagccttggcattctcccgcagcagctgctgcgccggcggatatactgcgtccgaaactgtggaaacgttggtgtgcggtacgcgttgtacctcgcgtccactgctaagacttgctgccacaccgcggccattccccggcctcctcctctgcgtgtccgcccgcggcagcctgcaggacaagggcctggaatgtgagcgtcccgagcgaagggatctagttccgtcccttccaccaggcgaccattgccatagacatcgagtccctccgcgccggagatgtcacgaactcccacccgggtgttaccatggtcatcac

SEQ ID NO: 316775 - DNA, 640 bp, Homo Sapiens
ggtacatttcaaatatattttattactttccatcttagaaagaatatgaaacctgcatgcaatgctaatggtttctgacatgtacatagcatataacacagcagtacaatgcggcatatactggggggcagtgtgtggagggggcgttcttaagggtatatgtacagaggaaagggcgcatggtcatcttagctttcgaaagaggactgcactgtttaacattgaagaattacatggggaatcacaaatatattgctttagtactgcatgttctgttgtggtgagggaaagaaacatgctttgaaggttttcccttgtcaacagaatgtgtgtctgtagctgtgtattgcgcatgtattcatatatttttaagttttctcctaaggtttttgctgacagtgttgggaacctcacatgcttctgaagcattaaatattgaacctgtgaacctttcagaaatcctcaggttgggaaagaccccacaccttctttaaggatcatttgtctcgccatcacaggatcttggaaatgtttcctagggtgtgtaaaaattaaccaggggggaatgaagcacatttttctggcaaccaaacttgagttcctcagagaacagatgcagagagacctgctcctgcttgcc

SEQ ID NO: 316776 - DNA, 671 bp, Homo Sapiens
ttcactgtagccctggtcccgggcaaactggaggacagtcctgaccagggcttttgctatcccctgacgacggtgctcactgtccacaaagagatgaaacagctgcaaccgctttctccctcaaggtgggatcatcaacaggcagagctcctaccatgcccaccaccttctcttcagactcagccacccagaagcaggagccacgctcactcaggtaggatttggtaatgtcagacatgtctgtgcacaatgtcatgtccacatactccgtccagggttttttggcaaggaaccacagggcagggaagaggctgatgctgaacacgaagggctagaagccaggatccagagaccaggagtagggcgaggggccccccaagtaagagtatgagggttcgaggcagcttcagcaattgccggaaggtggctggggcatgctcggccatcccccgggagagcaagcccacaacccactggcggtcgctctcctggtatttgcggatgtgacaaggagccatggacagacttctgtgtctgaaatctctaagtccaggagacagagctaggcctccctgcacgcctttacgtcagactgtcaccacaagagccttgagtgtccagggagcttcagctctcagccgctcactggcatccaggagataccgtctggg

SEQ ID NO: 316777 - DNA, 558 bp, Homo Sapiens
ttgaatggacaataagcttttattgcattgaaaggtcattgcagtgaaaggttggggattgcttgctgctacagctgaatggattctattctgaccaatacacacagaaagagatcacagactccctaccttagaagaagggaggtggtagatgaaatgaactgtatgaagagccactagcctggcccacacacagaagaaggactggcccgtcttcttgaagcccatgctctggtagagggccatagcagagagctggatggtgccggtgtccagggataacttcactgtagccctgggtcccgggcaaactgggaggacagtcctgaccagggcttttgctatcccctgacgacggtgctcactgtccacagagagatgaaacagcttgcaaccgtttctccctcaaggtggggatcatcaacagggcagagctcctaccatgcccaccaccttctcttcagactcagcacccagaagcaggagccacgctcactcaggtaggattggtaatgtcagacatgtctgtgcacaatgtcatgtccaaatactccgtcc

SEQ ID NO: 316778 - DNA, 633 bp, Homo Sapiens
  misc_feature (28)..(28): n is a, c, g, or t
gaacacatttcaaagtgtccatgaaaanagagtataatgtcttctaattgaagaggcccccattcctttatgatgtgccaggccaggatccttctttttagtagaggttttctgtgccagccaggctcagccaggtgcctactggtaccagggagtctttctaacccagcgcagtgtaaatccagcatctgttcgaattttgattgaagcagcttcagcttcccgcacagtctccttcacagactgcatgaggttctgggcattgtgaaccagcatctctgtggcctgctcagactcctcatcactgatgttggtccggcccagcatggtggccttcactgtggacaggattttgagctgggtgcttatggttgggattcgctcacatacctgtaagaggttggttctaatccgtttatctgtgcactgcttggcaacctccttggccaaccgagtcacctcatctgaggccttggcgatgtccttggcacactgaatgagtgcccgcttggtaccactgccccctcttaccagccgagacatctcagccatcagcagagccatgcgcttggctgctgcaatgatgtcattgcccttgctggaccatttgcgagcttcatcatggagctgtct

SEQ ID NO: 316779 - DNA, 713 bp, Homo Sapiens
tactaatgaggtgggactttcctggaagatcccagtagacttcacagcaggtaaagtagtgcccaaactgacccgtataggggaagggcttggattgattcgagttcatctgctgggccaggctgttgttgctgtcgttgctcctgggaagttgttgtttaattaggaaggtgagggtgccacacagccttgcttccaggtggcccctctgggcattgtttttcttaaaataacagaccagagagaagctctttctggttttcagtctcctttgtggctcacaggccctgccactccgtggttctgaccttgggtgggttactgagccttggagtcggtttccttatttctgttacaagcagtctcacgagggtggatggaaaggctccctgcctggccagggaatggagaatcatagctgttcattgcctgctctcacccttacctctgaggttggttgggttgggttccatgtaagaagtgcagcttgaagtgggctaaaggcagtgtgtttattgggtattgtggagcctggagacctgtttttctcccaggtactcatttatagagaactgttcaagtcctgccattagtcatttctttcatcaggtggtgactgcattctggtaaacgaatgagctaaatgcataccccagctcaccagttctggggcaccagttccttggagcaggtaccggtccccaccctcctgt

SEQ ID NO: 316780 - DNA, 809 bp, Homo Sapiens
  misc_feature (754)..(754): n is a, c, g, or t
  misc_feature (759)..(759): n is a, c, g, or t
  misc_feature (791)..(791): n is a, c, g, or t
aaaaacgctgtgtccaagtgtaaaaacgggggcaactgtgtgatggatatgtacatgcgaagaaagtgtcaagagtgtcgactaaggaaatgcaaagagctgggaatgttggctgaatgtatgtataccggcttgttaactgaaattcagtgtaaatctaagcgactgagaaaaaatgtgaagcagcatgcagatcagaccgtgaatgaagacagtgaaggtcgtgacttgcgacaagtgacctcgacaacaaagtcatgcagggagaaaactgaactcaccccagatcaacagactcttctacattttattatggattcatataacaaacagaggatgcctcaggaaataacaaataaaattttaaaagaagaattcagtgcagaagaaaattttctcattttgacggaaatggcaaccaatcatgtacaggttcttgtagaattcacaaaaaagctaccaggatttcagactttggaccatgaagaccagattgctttgctgaaagggtctgcggttgaagctatgttccttcgttcagctgagattttcaataagaaacttccgtctgggcattctgacctattggaagaaagaattcgaaatagtggtatctctgatgaatatataacacctatgtttagtttttataaaagtattggggaactgaaaatgactcaagaggagtatgctctgctttacagcaattgttatcctgtctccagatagacataccttaaagggtaggggggcngtagnggaagcttcaggggccacttcttgatgtgctncaaaagttgtgttaggtt

SEQ ID NO: 316781 - DNA, 690 bp, Homo Sapiens
ggcaccagtgaggtcccccacgttcaaaacaacaaccattctgtgtggagatgagggattcaaagttaatatccaacccatcggcatccatgagttcactccggataatggaactccatgtcacattccaagctcccattgaacatgtccaggtccaagtcgttggggaccttctcatggcccatgacgggcaggtttgcactagttgagtacaaggaggagcttgagagagagtccgagagggtttgcatagactggctgacaggagactgctgctggtgtttggctgacccaaggctgctggactcactcaagcccatgttgctgacagaattcgacaaggcacggctgccaccaagagcgccctgggtttggtgctggtggtggagcaagttctgattgaccaaacttccctggttaggctgggcagcaaaggacatcatcggatcattgcgaagcatcacgttccggcgggaattctgggcagacacagcggtgctggcttgagacatcaaggggtccgactgtgtcatcatgacatcgctgtggctaagtgagtccgaagtgagcaggtcctggagtgtctggttaccatagtgtgacatggaagagaaggtagctggcttgttctcttggatggtctgcatgggagactggcgtagggagttcagagatgaaggtccgaacacc

SEQ ID NO: 316782 - DNA, 526 bp, Homo Sapiens
  misc_feature (450)..(450): n is a, c, g, or t
ttatggtgaagtcttgtatgtagaagatcaataaatgttcatcttcattgcttatattcatccggttctctgtatacaaaatgatcttctttttgcaggcatttttttgcttctcaagttttaacttcttacacattttaagactacttcaagattaatttgagtgtaaatgagcagtacttgttaggtaagtgtcttccattcaccgtcaagactgaatcattcttttcattatcaccacatattgcttattgtggaatttggaaacatccatttctcttcttcaggaagatcgtggagtttctccagtcaaggtcccactagagtgagttagggttgcagtaacctgggagtgagcaatccctgattccagggtggtgatgtggggttgagtttcacattttactttatttgaaggaatatgtgcaaaagactcactaaaaataaggnaccaaactagggttttgttgcagctgagttggtctgggcaaatttctgtatagaggggatcatttgggcatgaagg

SEQ ID NO: 316783 - DNA, 740 bp, Homo Sapiens
  misc_feature (243)..(283): n is a, c, g, or t
ctctatggaaaaaatcactattttattcattcaaacaaatattttttgagtacttaccatgcactaacattgttgtaagcattgcgatattgtaaacaatagtaaatgaaaaggctcaaagcccttcatggaacttaaattctggaaggtaggcaccatggggattattggccagttggtcaaggcttgtagcagaattgggatcaggcagtaattgcccaaagccctttagtttctccacannnnnnnnnnnnnnnnnnnnnnnnnnnnnnnnnnnnnnnnntgtttaaaattaaacagaattagtggctgcagcttggacattgcagatggagaacttcagcttgggaggttcccttggggagtgttgttctagacaaatgagaaagaaagcatggggatggggcgaggagagggaatggccttattggatgcttattgtgagctaggttgtcttaattacttttaactatgacctctaagatacttatcaatccctgtttcatttgaggaaaccaaggcacagagacaccctggttcttccccgaactttgatctctgtgtctctctctactgaataaacctccagtggttattctttatagttcttcttcatgagttatgtgagttcctcttgagcatatgcttcattttaaagacttaaagcaaggttttaagcctataggattaaaaacaagttgtattaaagtatactatacaggccaggtgcagtggctcat

SEQ ID NO: 316784 - DNA, 613 bp, Homo Sapiens
  misc_feature (459)..(459): n is a, c, g, or t
  misc_feature (484)..(484): n is a, c, g, or t
ctcgtgccgaattcggcacgagattacccccagaatggggcgtaggtgccagacaacagaaacctccaccacatggtgtagagttgcagaaagtttcccttttttgtttttcccagcttcctttcataaggtttcccccagttaagttgtgtttgtaatacccaaacttctagtctagcgtgtagcatctagtatgttttttgaagagagcacctcatgtctttcaagactgtgtgtgtgtatgtgtttaggtaagataaggtaaggtaaagtagatatttattaagtttctttgaagctaactataaaaggcattagctttttaaccagaaccggagttgaatttgatttctgtccttaccctttgttggctgtgtgaccttggtaataatgtagaccttgcagaattgttgtaagcattagagtgatggtttcagaatccccctgaaggcttgtganaacacagattgccagaaaccacccnctgaagttccaaatcagtaggtctggagtggagcccaaggatttgcatttttacaagctttcaagtgatgccaggaactgctctttgagaccactgagatggattaaagcatctctatttccagccctt

SEQ ID NO: 316785 - DNA, 633 bp, Homo Sapiens
  misc_feature (58)..(58): n is a, c, g, or t
  misc_feature (125)..(408): n is a, c, g, or t
ataataaaagtaagaagtgtgggtgtggggaagttcctccgcagggacaaatgaaganccagatgatggaataaactgaggtcagagagtttcccccattgtttcctctttttttaaataattannnnnnnnnnnnnnnnnnnnnnnnnnnnnnnnnnnnnnnnnnnnnnnnnnnnnnnnnnnnnnnnnnnnnnnnnnnnnnnnnnnnnnnnnnnnnnnnnnnnnnnnnnnnnnnnnnnnnnnnnnnnnnnnnnnnnnnnnnnnnnnnnnnnnnnnnnnnnnnnnnnnnnnnnnnnnnnnnnnnnnnnnnnnnnnnnnnnnnnnnnnnnnnnnnnnnnnnnnnnnnnnnnnnnnnnnnnnnnnnnnnnnnnnnnnnnnnnnnnnnnnnnnnnnnnnnnnnnnnnnnnntgacctgtttcccctttaaacagctccttttaccactccctcaaagtttgttccattgggagggtggagaaaagtagtgtcttttttttatcttaaaggggaggagacagaaaagaagaaaacagatataggattacacgttgtatctctccttgaaaaggcccaatatttattttcaaagtattatgaatgaaaagggaatgtaaaggagtggttaaatatttg

SEQ ID NO: 316786 - DNA, 496 bp, Homo Sapiens
  misc_feature (405)..(440): n is a, c, g, or t
gtgcgcgccaccacgcccggccgtttcttctattgcttttaaaaattcacgttatgtagttatagtttaccacaaagtattggcaggtctctgtccttggagagtttcctataaactatagaccatataatgtagacgtgaagtctgtattacagacctgaagtgcattgggaaaagtggttgcctcccagttttgattaagggtaactgtcattcctgaacagtttcaggtaagtatgtatagtattgcagttaaaaacagcaacaacaaaaaacccttgtgattaattgaccaggagatgatatcctaaaggcacaggaaataacatcagataaaagcaatgctagtcaaaaacatactaagtaaggtgtatgagcaggctactttaatcgggggcggctctnnnnnnnnnnnnnnnnnnnnnnnnnnnnnnnnnnnnaagagttcaagtccagcctgggcaacttattaagactgcatcccgtctctattaag

SEQ ID NO: 316787 - DNA, 1092 bp, Homo Sapiens
  misc_feature (19)..(19): n is a, c, g, or t
  misc_feature (47)..(47): n is a, c, g, or t
  misc_feature (49)..(49): n is a, c, g, or t
  misc_feature (51)..(51): n is a, c, g, or t
  misc_feature (58)..(58): n is a, c, g, or t
  misc_feature (61)..(61): n is a, c, g, or t
  misc_feature (86)..(86): n is a, c, g, or t
  misc_feature (94)..(94): n is a, c, g, or t
acctgtccttgccacttanaacccaagatcgctccagtgtgtcgttnanantgacccnccntgtatctccagaagggatctccaancttaatcnttggggtctgttcaccactcctctgtaaatttatcaagaatttctttctgcacaaatacctcttgtgccattacagcaaacctggcccttgtgtgaggaagttgtctcatcagcgccccctttacaggcattgttcatattcacagtctgagaagatgatgagtggagatttgcctccaagttccaaggtaacaggtttgattcctttagctgacatctccatgatcttcatgccagtgggcacacttccagtgaaggagactttggccacatcgggatgctgacacagaaactggcctgtggcagcccctccctgcaccacattgaagagcccaggaggtacaccagcctcactgtagatttcagccagtagcaatgcagaaacaggtgtaaagggagaaggtttaaagaccatggcattaccacaggctaatgctggagccgacttccaagaggcaatctgaaaggggtagttccatgctcctattcccacacataccccaagtggttctcttctggtataaccaaacgatccacctgggagctggatgtgttcaccagccatggatgcagccaagcccgcataatactccaggcactgccaggaaatgtcgatgtccaagcgggcctcaaagatggacttgccattgttgatgcactccatagtagcaatttcatcctcccgttcccttattatcctggcagcctccaaaaggattcggcaacgctccatgccagatttttgactccatattttaaaagcagcctttgcattttgaacagccaaatttacttccttttctcctgaacatgtgaaagtagctatcactcggccggttgctggctcgaaagctttctcggtaccggaggcgtccgccggctccacgcgggccccgccgcggtaattgagcggctgcgacacgacgaaggtgccagtgctcatggcggcgacaggagagggccgaagactgcgaagaagcggggagagcgcggccagg

SEQ ID NO: 316788 - DNA, 645 bp, Homo Sapiens
  misc_feature (114)..(114): n is a, c, g, or t
  misc_feature (145)..(145): n is a, c, g, or t
  misc_feature (183)..(183): n is a, c, g, or t
  misc_feature (245)..(245): n is a, c, g, or t
catcgttgtagcctcagtatcacctcatgatctccaggaaatagtctctgctcttatagcatatccccatagtctatatactcatgctatactcccagcccatcctatcatccntgtggtagattcataatgatttgaggagccnaatatcagacatagtagcagatagaaaagtgggtacanaatgttacattctgtgtaatataaccagctgccatacttcccctgggaaatcttccataaantatgcagggcttatgaatgcttttggtaaggcagatctgtctttggggagttcaaagaaaagaatgaggggacagaagaccttataaataattaaatgaatgaactttttaaaagtaaataaatctatatcccacgaaacagacggacactaagcaactaagattatcttccctttcacatttagcaggggaaatggtgtcctctcattatagcatttccctgatcagcaggatttaaaggtaatgaataaggtgccactcttttctctgcttagataattcacctaataaaattaatttctgaagttaaaagtaaaacattaaaaaaattaaaccttttacaaataacgtatataaaatgttatcaggtaagtaaactttggttttgtttgtgactcgt

SEQ ID NO: 316789 - DNA, 369 bp, Homo Sapiens
gaaacatcaagagaatgtattccctttccttcttctccctcttcctccttttgccccatccccctctgctctcctgtgctcccctttacttctccctgcatcaggatcctcagctctccccgatcattggtacaattgtttcagaaatcttcagttattttccctgttttccatcccgtttctcatttttatcctcattcatacctgcaactctggacttctaatgcacagctggctccaagctctactgtactacttctctgttagcatataacgggcagtggctttcttttctctgtttcatctgctttctgtcttgcagaaagcacccgttcatgaattcccacatacaccttcatttttttctgc

SEQ ID NO: 316790 - DNA, 435 bp, Homo Sapiens
aacacagcctcggtccgccaggttcctaaaccagcatttgctggaatcacccagtctcctggcttcagcccggtcacattgctgcccaccgctaccacctgtgcaacaccttcgttccctccaacagcaggcagttcaggaaggagtccgtagtttccttggatcatatttatgtcagatggattgataggggccgccagcatcttcacacggacatctgatcctctcacagcagctagctccaggttcttgagttcgacgaccttggctggatccccgtggtgcccatagacaagcgcccggacccgggcaggctcggcggatgcggagtaggaggaggcggcaggtccgtgacagccagaagctgggagcagcccccgccactgccgggcgggggttcgcacccgccacagggtactgcagacccacatgctc

SEQ ID NO: 316791 - DNA, 778 bp, Homo Sapiens
  misc_feature (80)..(80): n is a, c, g, or t
  misc_feature (127)..(142): n is a, c, g, or t
ttaaagaggcacacccattgcacttggcaaaactgaagtttttcttaattaaaattttcccattacacatttggggtganagggtatctcagtaagagtacatttttttctggtttctttttcaggnnnnnnnnnnnnnnnngtagtacagtctgagccagtagatgagtaacagtgtttgtgatacctctggttgttcctgaagaaaacatgttcagataacaagggggtttgttttcaaaatcaatgcaactgctgtttttgtttccagtatttacatcacaccacttaggtacacagtaatttgtgagacatcattaatgattcagtcttctcctagtattaagtttggttaattttcaataaacaccaaactaaaactttaagttggctgtatttgagagactgaaaataagactattgaagaaaacaaatcacatggaaaccaaaatctcaatcaacagtgattctccatcactgcccatcctgttacctgaactttatcacaaaatcacatgcagctgaaggaaaagagttgcactgaagccagggtgttaggacgagggcgaagggtcttgctggtcctccagaagggtggctttggcctgctccttgcttatctcgttgcatggctcttcataaagaggctcaccaaggtctccgctgccctcttcactctcctcctcgctgtggtcttcacttggctccacagtttgttccaggctgttctccagaagtgtgggagaactgcttattctactttcctcttcagctgtct

SEQ ID NO: 316792 - DNA, 704 bp, Homo Sapiens
  misc_feature (42)..(42): n is a, c, g, or t
  misc_feature (62)..(62): n is a, c, g, or t
  misc_feature (83)..(83): n is a, c, g, or t
  misc_feature (91)..(92): n is a, c, g, or t
  misc_feature (122)..(123): n is a, c, g, or t
  misc_feature (151)..(151): n is a, c, g, or t
  misc_feature (155)..(155): n is a, c, g, or t
  misc_feature (160)..(160): n is a, c, g, or t
  misc_feature (162)..(162): n is a, c, g, or t
  misc_feature (167)..(167): n is a, c, g, or t
  misc_feature (172)..(173): n is a, c, g, or t
  misc_feature (176)..(176): n is a, c, g, or t
  misc_feature (183)..(184): n is a, c, g, or t
  misc_feature (188)..(188): n is a, c, g, or t
  misc_feature (190)..(190): n is a, c, g, or t
  misc_feature (195)..(195): n is a, c, g, or t
  misc_feature (201)..(202): n is a, c, g, or t
  misc_feature (234)..(234): n is a, c, g, or t
  misc_feature (264)..(264): n is a, c, g, or t
  misc_feature (377)..(377): n is a, c, g, or t
gtccaatcagtgcatcttaatcaaaattgcattcgatcagcntcaaatcagcttcatgcacntatcagtcttcactactgtcnacacagannggttacagcccttactcaaagaagccatannagtagtagtttcaaaccagtgcaacacncagnaaatncntgacntttcnntancctatannggcncnaaatnagcctnntagcccttatccaagaccaccctctggaattntgacttgctttatgtaatgaccaatggttntgtgactaattcactaagaatatatatacacatatgtgttcacatatatattcttatatatatacagtaagaagtaatgactaagaagtttaatgaatataaaagtgacaaanaaagacggagatagtgaaaagataaaagacatccagtatttttgactttccatggagactcagttgctatttgacataattctgcaaggtcacacccaacttctaccaccctaagagaatctgctctcaattcacagaagctcacaggagactcctcttttttggcatggcaggtagtatcaatggaaagttattttcattcattaaaactatcacctacacgaggcacacccggctaccaaagtcaatgaaaactaaagaaaaagaactaatgaattcttttaagtctagcctaatctacttcaggaatgattaagtgatctcgtg

SEQ ID NO: 316793 - DNA, 379 bp, Homo Sapiens
agcgcacaactactcattggagtgcagggccactggtgaggaacaaacagcagggcatgctagattagggagaggccatgctctccggtgctttccatttctcccggagataagagaggttagctaggggacactaacaataaattttagaaactgagaaggcctagagtctttgggacttcaggatggttaagataggtcactgcattacctgttttcagatggccttgattttaatgcttgactggtaataaaatttctatgcagtgaaatcttatgtaaattaaatctgagttttaaaaaattcaagagggctggctgacaggatgctgggagagggcatcagcattccacagaggcaggctaacactaaggagat

SEQ ID NO: 316794 - DNA, 649 bp, Homo Sapiens
  misc_feature (23)..(23): n is a, c, g, or t
  misc_feature (48)..(48): n is a, c, g, or t
  misc_feature (70)..(70): n is a, c, g, or t
ggagaagcaatggcttatgaagnagcacattgattcattggctgaggnagaaaggagtttcttgtggggnaaggcacttccaggattctcccaaagagcttggctgcctccagggcacatccccagtggatggtgagcccgtagcctccatggccatagttgtggatgacctctgtgtttgaaggtccagtgcgaagctgttctctttctagccgaatctgggggcgtactggccggaagccagttcgttcaccaataattcttgcattcttcagtgtgggctccagtctgcagcagccttcccaaatggtgttgtggtcctggatattgtttagttcactccagtttcccaactggaagatgcctccaagagtaactgtctgggtccctgggatgatgtacggggaattgtagatgcctctctctgggtcatgggtgagaatgaagtgcttcatccaaggggcgtccaccttcatgatctgcccccggcctggctgcagcagggggtctcgttgtagcgccccagcccataccccagtgcagttgacaatcacgtctgcgccttctcttgccacctcctcaaaagactccactttccgctggaagaacttcactcccctctcagttaacctttcagtcagccactgta

SEQ ID NO: 316795 - DNA, 1812 bp, Homo Sapiens
ttatattttgggtcctttctcggtggccccccttttgtgcgttccgcgtgttgtctctttccctctcacgtgtgtgcggttcctcccgccaatatgtgtttcgaccccgggtcctccctatgggtcccgtccttagccaggaccgttcctggggtgacacccatatgagagaaatctgatgttgtagcctgttgtttttattaggaatttgtttccagtagcccaaggtgcgcacgcccgggtcctcgtgacatggatcgctgtagtggaattggtacttaaagtatcagaagtaacattttacctggtaaaatgttaaatagcaccaatattacttgaaagtaaagtgagacattaataggaatgctgacacagatttaatttctaactactagagagaaagcatctcctagacaaatactatttagatatgaattattttaagatcacagccagaaaaatgtcataaaacattttagattttgcttggaaaagttagaaaagaaagctttgtgtatcgctcttttatcttttatttccaaagaagatgtacaaatgcttacataatcagaacagtgcaatcttaccaatgaagtttaccttgtgggagctacatttacttatttcatatattagttcaacaacataaatataataaaaatgcttttaagcaatctgattagagcaacatttatattaactacaaaatatacagtaaaatgaaacatcttgttaaataggcctgtaggaaaacaatattttaaaggaatacattttcatgaatctactttcacatttatttgttttattgtatcttatagttactataatcgttgtgtgcttttgttactgcaatttccaggatcattgtatattctcagtatgccagtgactatatatgtaaaggtaatttaaaaagtattactcccagagtaaaaacagacaaacaaataagaaatctcatttttaatgggaagttgtgcataaaactattgtagtatttttatagaaatgtcccttaatcattataagttcatcattataaaatgtatactattgtactaaagcaaaactgtctgcctttaaatctaagtggtgtcaacttactgtataattctggttacaaagttagatatgaaatctttggctattaattagaaaagcattatttgaaaagacctgtcaataaacatttctaaatgtggttgctcatcttaatagttttcttaattagaacagctaggaaatgaacagaacagtggtgcttttatgttataataacaaagaagtattacagtatcccaatctccagacctggggtccaagtattcaatcctggctcagttgcaggctgacagaagagaagcatcgtcctacgctcgtacacaatggagcaatgataacatctgtcacactcttccatattgtctgcactgaaggcagaaccattaggcaggtctttacaaaaggcattaaaatccagatgtgcagacagctgagggtggcaaagagaattcccgcaatgaaggccaggggaatggccaggaacaccgtcaggaacttgtacattacgtatttgctgatttcaaagagggcatggctgcagatccacactttgtcaaaggagtgcgtagtcaccggctctgcgatcacatcctcgaagcccagcttgagatgcgagttgagccggtggggatcccggtcctggtccgagtccgcgaacttctcggggtcggcgtactcgaggccgctgtggtggctgtaggagtcgtcgtccatgaagagctgtacgtccgccttctccgtctccag

SEQ ID NO: 316796 - DNA, 2553 bp, Homo Sapiens
  misc_feature (1391)..(1391): n is a, c, g, or t
  misc_feature (1842)..(1843): n is a, c, g, or t
  misc_feature (2067)..(2067): n is a, c, g, or t
  misc_feature (2112)..(2112): n is a, c, g, or t
  misc_feature (2115)..(2115): n is a, c, g, or t
  misc_feature (2123)..(2123): n is a, c, g, or t
  misc_feature (2274)..(2274): n is a, c, g, or t
agacatgcccgttcagacacagaggcaagaacagaaataaaaaaaaggggggaataattagaacacaagccccaaacagttttaaaaatggcttttatttatataagtcattgcacattcctaatacagtgatttcctgaaaattacagtattttgtaaacataagatttacagtttaaccatacacaaagcctatttttttatttcttgacagaataaattacttttcttcaaaaaattagtcaagtgcaattttgcccaatatttaatgcatactagaattaaagcctatgaaactaagtagtaacagacgcaattatcaaacctttcatttgaacacattcactttcaaatttaacttcttatttcgccccatttaacaacattactttctttgaaaattacccaattaagcagttaacagttttccataatatggtacaggccactggcattaactaggcagttgccaagatgtcaagatgcctgcaatctaacgagatcgagaaatctacagatgcccacagcaaaccctgcaaacttccagggtgacctgtgtttcagtggaaagctttgcgacagttcctcttatctcattgtttgcctctctgtataggttggggctctctttagcgatgcacacaactttgcagcactgtaagagtctgtgtgtaaagtcctaatctggcttgcccggcctctcacctctgtggtgctctgcatcgtggtgcttcttgtcatcttttattgccaagtgagactgcccactcagagcactagacagcgcaagaaggccggcactgcccccgaggggcgggattccaggaggctgaagtcccgaagggtgaggcgtaaggggaactgggggtccgtggccatgagaaagatgctgagcttgcaactgctgctgcccgatgatggcattcaactctgccatggtcacctgtttggcacgttcaacagcctgggccacctgttgttgatgttcctgagacagaaatgggatgacttgtgcacaaatcgtattcaatctcttggcgatttcagtctgtttgtgcatttcaatgtttaatccatatgacatttcataatacatcacatagtgcctctgcatttctgtcttttcacttgccagtttctcccattccaatttaaggctgtgatactgcgcctgcaggaactggaattcctctttaatccggtccagggactccgggatagtgaacttgaagggctggcctgcagcctggtgcggcgtcgggtgccggctctgcgggaacatcgctctggcggcggccggggctctgttccccggcaactcaattctccggtcaatttccaactttaatcccgccgaggaaaattaagccggaaagccaagcagaagcggnggaggcgcgctggccacgcacgcgcgctccgccgggcgcaccggccactcggcgcccgcagctgctccggctcccgctcccgtcggtgcgggctccggccctcagggccacattagtgggcgccccaggcccagctgcttcaagaacctgcgcggagacgtcgggcgctcggggactgtgcgcgggggcagcgctccaacccccggcctcagctgcccgggcggggaggcgggggcgcggtgactccgaccgcactcccctcggcgatccgcgtgcgcggcgccagtcctgggcaaacaaatccagacggactgcttttctttgctcttctcctggtccgcctcctcttcgggctttccccgaggcggcggcgggcgaggtgcaggtggcgcggcggcccccgctaaccccacacaaacccgacgctttcggggcgactcccgcaagaatnngctgccttcggccgggtgctcgcaggctcccgggacgcaaaggggagcgaggttgaagacgcagcggaggctcctggccggggagcgacggatgacgaggcggggaaagtgcggagggcgcgccgggaggcggctcggcacgccccgtgcgaccagcactcggtgttctccgcggttgaacaaacctccgggcccgacggggctactccaccgagagcagtccngcaagtgcccaatgctcctcgagcccggggagcatcagggcgccngcntcgggcgnactcgccctgcacggccggaccggccgctccggacccttcttccgagctccttcttcctcggtcttctttctttccttccttcaccttcgtgtgcttctccgcaaagggcgctccagcccactgcaaagttctttcaccacccgagggacnacatccacgagatggtggggaaaacagcaggagtgcgtccgccaatcggccaccctccccggcgggcaaactctgcgggcgagtccagagtagtcacagcggtggggccagcgggggttttggtcgccgcgggacgacggaggtccgggctggtggcgcgggtcccgcccggccgtgcgagggtggggtggcgcagtcggctgcctccgggacgcggggcacagagtacccgccgctgtttctgctgctgctgcttctgcagccgccgctcccatcccg

SEQ ID NO: 316797 - DNA, 939 bp, Homo Sapiens
gcgatttgttcgaatcccatttccccggggcaagtgggcaaggctttcttccggaaaagaagggtcctccattagccccatccccaactaagttgtcatcgcttttgtcaccatcactgtcatagtggctggagtccttatcatccacctttccttttcttgatgtcattggaaaattcaggtccatttctgcgtttatctgtgcctcttagactgtctgggaccaggagggaattacttgtgcccggctctctgtctctgtggtgctctgcatcgtggtgcttcttgtcatcttttattgccaagtgagactgcccactcagagcactagacagcgcaagaaggccggcactgcccccgaggggcgggattccaggaggctgaagtcccgaagggtgaggcgtaaggggaactgggggtccgtggccatgagaaagatgctgagcttgcaactgctgcccgatgatggcattcaactctgccatggtcacctgtttggcacgttcaacagcctgggccacctgttgttgatgttcctgagacagaaatgggatgacttgtgcacaaatcgtattcaatctcttggcgatttcagtctgtttgtgcatttcaatgtttaatccatatgacatttcataatacatcacatagtgcctctgcatttctgtcttttcacttgccagtttctcacattccaatttaaggctgtgatactgcgcctgcaggaactggaattcctctttaatccggtccagggactccgggatagtgaacttgaagggctggcctgcagcctggtgcggcgtcgggtgccggctctgcgggaacatcgctctggcggcggccggggctctgttccccggcaactcaattctccggtcaatttccaactttaatcccgccgaggaaaattaagcttcgtgctgaattcgccacccg

SEQ ID NO: 316798 - DNA, 1124 bp, Homo Sapiens
  misc_feature (32)..(32): n is a, c, g, or t
  misc_feature (40)..(40): n is a, c, g, or t
ttggcaattttaaatgctaatttttatttacntgctaacntgtgcaaaagacaccaattcaatacagtgcagtaaaacacttacatacatccagtattaaacaatagcatatgggataaatctaaagcagagaaccatgtgccttcaaaactcgatatcacagaatgcaactggcttcagataattctcaagaaacgtgaagagctctttaatttaatattaagtgagttatccagaagcaaaggctcttggttttactttctagaaaaaagtggaagttactccaattctgcatggtttaatatgatgtgtgatttttgaaccaatgaaatactttatattcattttatcaattggtaccatcagctaatataaagctgacaaatggctgacaggagaaacagctgaatacaatgaagtatgctcaatatggggctagttgtacatccatctcaatttccttagtcacagcccaaaataataccccttaattttaaagtactattttaaatcaaaagataaaaataattttaaagacaaatacaatggtaaacacctattccccttaatcatttaacccactaacataaaatactttttaaaaacaaaaacagcaagaaaatggcaagtgccaagaatacttccatactgctggatcttaacataccctgaggtacataatgagaagctgggggaagatggagcaaataccagccaattggccccaggatttatagcaccatgaatttgagaagaaccaccatatgctgtaccaactggatgccaggggggaacacaggaataatctggcacaaccggaaggcaggagtcaaaacctggcaaaggtggctgcccatagggatctgacattactggataatagactgctccatgagggacagatgaagaatcagcattcggaaaagtatcatttgctgatgcttccgcctgtatgccatcttctctcctcacctcactgtagcattgaggaacggtttgatctaccagaggtggctcagtatagactggataattctctacatgaagctgctgctgcatctgtggcacatagaccatggagtgccaggtatcttgaggcaaatcactgccgcttggatcacagg

SEQ ID NO: 316799 - DNA, 364 bp, Homo Sapiens
aatgatataaatctcatgcaaacatctgaaaccagtaggaacatacaaacatgggaataaccaaaacttgcctaaatgcttcctcaggagaaaaactgataatgcacatggtttgtaaagaaaccaaaaaatttatcctgttacaatttttcctaaggcttctatgagccaaaatacatacgttgctatcgtgatgagtaacatgtagatgattctgaagacaacataggatgcatagcacacccaaatgttacccacagtgtccatgatatacactgcagcagcaatcaggagagaaaagagagataatgtcatttctccccaagttgacccggatatttttatataaccatctgcaaacaca

SEQ ID NO: 316800 - DNA, 389 bp, Homo Sapiens
gagaagtgaaaaacttggagcagatgataaaaggcttcttctgtatttatgagactcctatgtgcctgccatcatgtgtggaaaattttatcgacattcaccagttcaacatgggataaatgtgagattttggcacacagcttcttcaccatcttggcttctcttgttgaaaagctgttaatagcttaaaacatgggaagtattgtgtgtgcttgtagaaagaaaatcccatgatggcagtgaaagacaattgggccagttgagattcacaactccagcctgagcactataatgtagtaggcagagttcatagttctttgcacaaatgcctatccaaccttcctgcacagccagaggattgactttgggacccctatatgggatgggca

SEQ ID NO: 316801 - DNA, 628 bp, Homo Sapiens
ctctgtcaggggtagtcatggttattggcttgctgctgtttcttgtagacgtatgcctacagtttcggtcttcctagagtatattttcttagatattattatttgtagttccctgtcaagactacttaatccgtgagtgctgcctgttttagatttgactcagctctcacaaacatttggagcattgcccatcccatataggggtcccaaagtcaatcctctggctgtgcaggaaggttggataggcatttgtgcaaagaactatgaactctgcctactacattatagtgctgctgaacagccactctgacttggcatctatgttgtctgacgtaaagaaaattttcaggctggagttgtgaatctcaactggcccaattgtctttcactgccatcatgggattttctttctacaagcacacacaatacttcccatgttttaagctattaacagcttttcaacaagagaagccaagatggtgaagaagctgtgtgccaaaatctcacatttatcccatgttgaactggtgaatgtcgataaaattttccacacatgatggcaggcacataggagtctcataaatacagaagaagccttttatcatctgctccaagtttttcacttctc

SEQ ID NO: 316802 - DNA, 243 bp, Homo Sapiens
aactttctcatgcagtgtttgtggacctgatagtgttccctttcagagaggtgctctgcaccatgtcctcttgactatttcaatgttcaagtcaccatattcatttatccaatgagctcttttctatagtttttttgactcagagattgtggatgatataacatccttacagtttctcacagatgcaaatctctgcatttagcctgaaagtgactaagtgtactatgagtatgatatgaccta

SEQ ID NO: 316803 - DNA, 416 bp, Homo Sapiens
gcaagggcgcggtctggtactcgtgcgtcttttatcgcctcagtttccctccgccgactagcgcgcggggcccggttctccatcgcgcgcacggcagcctagcgcaatgaggcgggcagcactgcggctttgtgccttgggcaaagggcagcttactcctggaagaggactgactcaaggaccccagaaccccaagaaacagggaatcttccacattcatgaagttcgagataagttgcgggagatagtaggagcatccacaaactggagagaccatgtgaaggcaatggaagaaaggaaattacttcatagtttcttggctaaatcacaggatggactgcctcctaggagaatgaaggacagttatattgaagttctcttgcctttgggcagtgagcctgaattacgagagaaat

SEQ ID NO: 316804 - DNA, 550 bp, Homo Sapiens
ataactcagatatttatggaggcaggtagcaaagatgagtgcaggggccacggctggaaagtgtgaaactggcacgcacagcccgggccagagagccaaaggaccagcccacactgttgctgtaggtagatgccgtctgtgcgcttcctgaccttctatgttttcaagatatttttttaatgtgaaataacctaacttacaaacactggctccaatatttaaaaaaatattttatataagctaaatcaaacatgcccaggggcaaaatatagcctacaggatgccaagttccacaaagactgaaatatgcttgacactaggctctccagcctctgatacagcgccctgcagtgggagggcctagaggaagcttcagggttccaggcgctcttactctgctctacacactcttccgtgtgctgagcgccacatgtctgctccctttgctctgatcagcgtccaggagcttgtcaaagctcctctttcacttcaggtcttcctgttccattcaaccaagcctcagagcgtcagtaatggaccttcaccagct

SEQ ID NO: 316805 - DNA, 618 bp, Homo Sapiens
  misc_feature (74)..(74): n is a, c, g, or t
agctttcatcatggctgtagcttcatggtcagaacttgaacggtttcgtagaaaggagtctatttcatctatanagatgatggatggttgtagctttatggcaagggagaagacagcagcagccaatttctgagattctccataccacttatcggtcagtgtcgaaggctgaagaccacagcctggaggcccatagagaagaacaccttttggaggctgcagaagcctggaattctcaaacaaatgtttctttttgataggtaagatgactgtgtctttcagatccgtaatgacatcatctaaacctgctatatcactccaagtaacatgcatattaagagggtctacaagatgagcagcaatactcatttcatattctgagagcttcacatttttcactccaatttgcttcattagtttttctgcctgtttctgagcttctactttttgctttctggttggatcaattgcatctaccatccatttgatagtaaagtatgtcactgcaccaaatattgtcaaacggaaaattaaaccaacaacttcattccgactcaaaggacgagaaaaggcttcagcatgtaccatcttgaatgttaacccaggggcagaaacagc

SEQ ID NO: 316806 - DNA, 2141 bp, Homo Sapiens
  misc_feature (185)..(194): n is a, c, g, or t
  misc_feature (302)..(363): n is a, c, g, or t
  misc_feature (404)..(445): n is a, c, g, or t
  misc_feature (495)..(509): n is a, c, g, or t
  misc_feature (521)..(527): n is a, c, g, or t
  misc_feature (529)..(531): n is a, c, g, or t
  misc_feature (533)..(534): n is a, c, g, or t
  misc_feature (546)..(547): n is a, c, g, or t
  misc_feature (571)..(646): n is a, c, g, or t
  misc_feature (648)..(648): n is a, c, g, or t
  misc_feature (650)..(650): n is a, c, g, or t
  misc_feature (652)..(652): n is a, c, g, or t
  misc_feature (654)..(665): n is a, c, g, or t
  misc_feature (667)..(668): n is a, c, g, or t
  misc_feature (1391)..(1391): n is a, c, g, or t
ctccgcgcgggggggagaaatattttattttccccagagggggcccccaagggggtgtttaattcccccgcgcgcggggtataaagggggggtttcaaaacacccgttgttttagggggagggtctctcccgcggggcggggggaagtttttttattgaaatataccaccccacccctcttctcnnnnnnnnnntaccccagcgggcggggcgccacataaattaaattaaaggaggagacaccccggggggcccccctcttggatataaacaccccaaataaaagcccccgaagagctccnnnnnnnnnnnnnnnnnnnnnnnnnnnnnnnnnnnnnnnnnnnnnnnnnnnnnnnnnnnnnngggggaggggtcccccgccccttgttttgtttcgggggggnnnnnnnnnnnnnnnnnnnnnnnnnnnnnnnnnnnnnnnnnncctgtggggggcgcgccccccacaaaaaggttgtataaaaaatttttttnnnnnnnnnnnnnnncgccaaaccaannnnnnngnnngnntgggggtttggnnttggggatggtgttttgggttttnnnnnnnnnnnnnnnnnnnnnnnnnnnnnnnnnnnnnnnnnnnnnnnnnnnnnnnnnnnnnnnnnnnnnnnnnnnntngngntnnnnnnnnnnnntnntttttcaaaaagaatgatacaacttttattttccatggattttacagatacttttgctacatagtttatgtatttttatgagatttttttcatttgtatgaagttcattcagccttatacaattttaaggtgatatgtttggtagtgtatctataatctttaaaaagtttagagtttttggaatgtacagtatatgaggtaaaatcaagattacattaaaaattgttttctcctctgcactaattttgcagtgaggctcaaatggcaagtatactattaaatggccatttactatcaaaaataggaagttcatttgaattactatgaaaaacataagccactgtaacttgacacagtggcacattttaccattttagacattcaactatatataaatctctgggctattacactcagactcatttgtactgccaaatgtggcactttaaagaagtttctagaaaacaatcgcaatcactgttgtttctggggaaggttatcaccctatacataagagattaaatttaaataaaatgtaaacatacagtatattatagtgacaggtcattcttaccacttagaaaggccaagtttatccatttcttttttgaacaagggttaatgtttttctacagcacagatcatttgacataaaactgttaccaatacatgcccattctattataaaagaaattcttcaagagatcttcaaagcacaaaaanatacgttctttttttcaaagactgacagaagtgcttaataatcactaaaatgccaacctcagcaactaaaaattagtgattcgctatcctaaaattcaaataataaattaaaaaagctagttacaggtgttttacggataacagatgtgctaaaacaagaattgtagatagtttcattataaactgtattattacttgcagtcatcgacatctaggcaagatgtacaatgtgatacttgacaaaattcagtctgatcatccaataactcacaaatgcaagctcacaaaacattaatgaattatgcaattgcaaagtgctctaatgcaacattaaccacatgcaatcaacaatttggaacagtatccaaacagacattatacgttaaccgtttagttttcaagaaagaacgcagcttgatgtttactggtgcaaattaattttgtcttcagatttggtgccccaaccaaaaaggttaggtttgattatgaattctgatggtggtgacaccagtatatggaagaaccaccagaaccttatggaagttcttcaaaattagcctataccagccaaagtaagtgtatgtatgtaatatatacttctacacttgttatgtgtatatgtgtacacttgttatatgccatatatgtatgtgtatacccttatacacatacatatagttcaaaggtctcacaacacagaagccaaataggtttgaaactcaacatgctctctcgtgccgtattcctaca

SEQ ID NO: 316807 - DNA, 227 bp, Homo Sapiens
aaaagaagtgtcatattttaaaagaaatattggcagccttcttttttcacatctgtgttccaatacttatttgatatagtatgtaagtggacatattctcaacacaagtatctatacaaaggtgactggaagagatgatgtagacataaaattattggattgagcttctaattgttgtttataaatctaacaataataagtgttttgcactttatggaggaaaaaag

SEQ ID NO: 316808 - DNA, 435 bp, Homo Sapiens
ccaatcacatgaattttctggaatatttttggagagaagcagatttattgaagagctgttcttttttaccccagatatagacaaagttaaatttattctctgaatataaatcatcagagtaagaaggtaagatttagtcaagaagatacatttgttggactatgggttcatctgtgtgcaacagagacctaaagtttcaatggcttaagcagtattgaggtttatttatcttccatgacagcgtgagagtttgcagccaaagactagtatggcgggtccatggtgtcaaggactgccaggtatctcccatcttattgcttcattatctctaggggatggccctcatctgcatggtccaggcaggaaagaggaggataggaataaccccaccccagaggctgcacccagcacttccccttacatacacctcgtgcc

SEQ ID NO: 316809 - DNA, 591 bp, Homo Sapiens
acatatatccacaggaacacaaaatagtacatcaactcttaaggatgtcagttcactgacatccttgctttcaagctcatccacagacttgaaaatagcccataaaatccaaattgacacttcataaattactatataaactgatactatgttaggaagaatgcaggagaaagagaaaagaaggaaaagaataaggagattcttttaaacttgaagatactaaagacagaatacaataaaatgctgtgtgtgaactttggaccctagtgttttaaggaaagctataaaagacattaaggggacaaatgagagaaatctggatatgaataatatatgataatgtctgaaaattactgtttattttcttagatgctacaatggtattgtaccaactttgaggaatatgctgtgatattgaaaataaattgccatgtttacaattgactttattatggatcaatgggaaaaaagaagtagaaaaaacaaacactgcaaatgtcacaactgttaaatcgctgtatttttcattcatactatactttcaacaattaaaaaaatatatatatattttaatagagatggagtcttgct

SEQ ID NO: 316810 - DNA, 635 bp, Homo Sapiens
  misc_feature (50)..(50): n is a, c, g, or t
  misc_feature (153)..(153): n is a, c, g, or t
  misc_feature (156)..(156): n is a, c, g, or t
acgtggctaccacatgctcctgttggtcttgaagcccctggacggtccgnccatttgggctgtgaaatccctgcagggagtgcctctcactggccagcagctgcaccagtgcccagaatgcatcctcctcaggaagatagaggaggaccaagncgncgatgtggctcaggtccctgcagtagcccacctccgggttatactcctcatatgccaggaggatgtggagtagttcccgctgcttggttccgtatcgatccctgaagaatatatgcttccttaatgtcccgcttacgtcccggtcgatgcgctggatgttcaacttcatttcctcagtgttcaggaggactgaccacatcgggccccggatgttcatgggcattcccttgtacgctcgatctatgagctttctgctgcttttgtatttctcccagtctcccagcatatccacccacttgctctttcggctgatctcccgccgaatttgcttcgcctcccgcgcagtcagaggaggcagctccgtctcatgtacaatccccaaatgatcgacgttgttgttgtagcttcgaaaaggcttaggccccttgtcctctggcagcccagctcggtgtcccttttcgtatttcataatgatgtcc

SEQ ID NO: 316811 - DNA, 542 bp, Homo Sapiens
ggaacaaggcggcgatgtggctcaggtccctgcagtagcccacctccgggttatactcctcatatgcgaggaggatgtggagtagttcccgctgcttggttctgtatcgatccctgaagaatatatgcttccttaatgtcccgcttacgtcccggtcgatgcgctggatgtgctcagatgacctcttgcccttctccttcatgatctggtatcttccggggtttttcaacttcatttcctcagtgttcaggaggactgaccacatcgggccccggatgttcatgggcattcccttgtacgctcgatctatgagctttctgctgcttttgtttttctcccagtctcccagcatatccacccacttgctctttcggctgatctcccgccgaatttgcttcgcctcccgcgcagtcagaggaggcagctccgtctcatgtacaatccccaaatgatcgacgttgttgttgtagcttcgaaaaggcttaggccccttgtcctctggcagcccagctcggtgtcccttttcgtatttcataatgatg

SEQ ID NO: 316812 - DNA, 1110 bp, Homo Sapiens
  misc_feature (416)..(456): n is a, c, g, or t
cctttcccacccgacgtttttaacgcgccgtccttgtttttatcgcctcccttagggccccttggacaaaaaactgggtacgcttaagcttgcgccccccgaggaaacctttagaacgcccccctgtttgttgggtgtgtatacttttgggtaaacttttattttgttatacacaccaaaaatcttaaaactatcttagtacattaacgttttaacaggtcaacttttagtctttatgagcagttttcacgaagttttactcgacatttaaaaaatgtagttaacatactgtagatgcttcaatattgctgcttattctttgtaatcttatttggcataatataatcatgttcagagttattttaaagtaacttaaagtgaacagacgcactccctcctccccccaccctcaattnnnnnnnnnnnnnnnnnnnnnnnnnnnnnnnnnnnnnnnnntaagattaggttctaggaggagggaaaccctaatccaagtgtggggatacagaagtcagctttttgcacccattctccatgctacagaataaaatttgagactacagccaaatattttctaaaacctttcaagacgctccagtggatttctgtatttgttcctttaaaatcaggatactctgcctttgctcagggggcagcatggcaatctggtctgcagtcagttgtagaacgtgcatgatcaaagctgccttctcctgatcctgtggagtgacttggttctgcccgggactaaagctgctaggctggcttccaccctgtatacttgctccttgcattcctgttccgtgcatgactgggacctgtctggatccctgggggacaaccgcccccatgttaattggactgggaccgtgcattccactaggtataggtcctctggggccaggcactgggcctctggtatccatgcctctggcctccatccctcggacttccattgcacgggcctccatcgctcgggcctccattgcacgagcttccatcgcacgggcctgaggggcctgaggattctgctggttcattgacacattggatcctgagccaggcccagcaccatggactggcagggcaatttccggatccacaattctc

SEQ ID NO: 316813 - DNA, 772 bp, Homo Sapiens
gtcttgctctcgacctccaaaagtgctgggattacaggcatgagccactgtgcccggctggaaggggttttaaaaaaaccaatctttacctcccatccacacatcctttagggaaaatgcgccccctcttttcatggcctgtcctggtggtatgaggagacctgcctggcagctgtgtctgttgccggatcatcattttgctggccacagctgattaggaagggggagtaactggactatgctgggccagtggggccctgcctccctcctgggaatttgaattacgtgacactgaatgcccctcaggtagctgtcgggtacccaaatgcaaggagtcagagagtatcatggaaacccatgggcaacttgaagtaacgacagagcagaaactaagagacagacagggaactatgcagttcctacgactgagaaggatggagggtagctgcctggccattgccccgtttccctaaggcctggctgtattgcctgcattgtaatgatgtgagattgtctgacagcctcataataaaaattattttaaccatatactccccacccaagacctgggtgacaagtgatctaaaattgtcacacagattgggcacactgacagcatgtggcatctgaatcaggggagtaaatatttctactgtactctgtggtattcagatcgggaatatggttttgcatctgggaaagtgtcatattttaagaacattatcaaaatatgggatttaaaaatcagcttgtgtgagagcatagaggtagc

SEQ ID NO: 316814 - DNA, 555 bp, Homo Sapiens
  misc_feature (103)..(148): n is a, c, g, or t
  misc_feature (309)..(445): n is a, c, g, or t
gagacaatggtctctctttgttgcccagactgatctcacactcctgagctcaagtaatcctcccacctcagcctgaattcttttcaataaaaaatacaattcnnnnnnnnnnnnnnnnnnnnnnnnnnnnnnnnnnnnnnnnnnnnnncttaagggggagcccgagaacccaattagccctatagcgagtcccattacaatcttactggccgtcgttttacacctgactgactgggaaaccccaggggttacccagctaaatcgctttgcttcacatgctcatttccccagctgccgtaatacctttcnnnnnnnnnnnnnnnnnnnnnnnnnnnnnnnnnnnnnnnnnnnnnnnnnnnnnnnnnnnnnnnnnnnnnnnnnnnnnnnnnnnnnnnnnnnnnnnnnnnnnnnnnnnnnnnnnnnnnnnnnnnnnnnnnnnnnnnnntgtcaaaaaacgttctcaatcacgggattggcccgatatagggtggaatgtggctcagatggaaacacgagtccactattagggaaccgtgactcatcttcaaagggcgg

SEQ ID NO: 316815 - DNA, 1004 bp, Homo Sapiens
  misc_feature (673)..(684): n is a, c, g, or t
aaaatatttttacaaaaacagaagcatgttttatttcaatcctgttaagggagagggatggaaaacacaaaataaggggaggggtctctttatataatacacacaccaggatcaactacaatgaataatacccattccatccctcccccaccaactcctatgtgggttccaaggccagctgagaatagatgggacaagaattaagacactttggcacagtaacatggccaatgcaccgaaagatggagagaagagaatttcccagggagcaaggccctgggcctcagctgcttccccagtggaggggtaatgagaaaactttggctcagcaggaaggcggttgtcaaaaatctgggttaccttaactggactctccagatcacagactacgggctgaatagagtcaagatgtctatccagtccattctgttctctgctttctctaagatcacttctcttcaggcttgcaattattgagggttggcctgcttctcctcttcatcttggaaggcagggggagtaagtgcttattctgcccttcctatatctaggccacttaattactattttcttggctctaaagagacagaagccaactaacaagtccggctctctttgtgaaagtcggcttgaaagagcccttgtgttggcaaaactgcctctgcaaatgggnnnnnnnnnnnngagcctaccccttatagaccctccccaagcttgttcagacacctcaattgtgtgagatgtgggcagaaaagacttggtccctctccagagttggattaagcaatcccatctttgactggagatagggatgagaaagcaggtgctagcaggggaaagaaccggggaaagcaaggcagtttacactaggttgcagattcaagcctatggattgtgaagagccacctaagctccagagaagaggaaatctctgacacgatatgaacaagtgaatattttagcggcaaccctgtaattcccatagactaaaagagaatggtcaa

SEQ ID NO: 316816 - DNA, 635 bp, Homo Sapiens
  misc_feature (508)..(508): n is a, c, g, or t
  misc_feature (515)..(515): n is a, c, g, or t
  misc_feature (593)..(593): n is a, c, g, or t
gaaaaaacaaatttaagcagctgttaacacatgaatgtattatcaagctcagatataatcaaaattaaatatttgacaagagattctacagtttgggagaaatagaagtgtttttttcttttccccaggcccacaagtctagtttcttgctcttcttcactataatggggtttgtcatctgctccccccatatttaagatcagagcccttggtccattgtgttgtaatcagctggctcaggaaagaacacctggctgtccagagctctacacctactgcactgggtgtgaaaggaggcctgagaacccatgggtcccaaacccaccccactccaaattatcatccagtattgagaactctgacaccaaattctcacagagcatatgtttatgcagttttacatttaatttctcattacattacaattgggaaactgaggccccagaagaggcagagactggtccagatctcaggaggtgggcaggctccagagcattagagagggctncagcttnctagggcctgggctcgtcccacttatcaggtttgtttcgaaattagagtctgtagctacacattcaggagcacagaanatgagcagattcaggggtctgtcacaatggggtcctttcatt

SEQ ID NO: 316817 - DNA, 639 bp, Homo Sapiens
gccattgtggccagccaggaattttgaagaagaaattagtataaaaatttgggaggatatcagtacatctgtaatatattaataatttagaaatatttgtgatttctatgaatgacaaagctgcagatacttatgattctactgtggtttgtagacatattcatgattgaaagaaatgccagttggaagttagtgaaaataaagacataattttttccaatccaagttcaccgactaccctacccctattctatcttcaggtttcttgagggtgtgaggacctcaaattaagagcaacgctgttcaagggtcattttccccacagaaaatggtaacatttgaatgctatactaaatgaacaaagtttacagccagaatccctgcccatttcctcagaacttccccatgctgcactctatcacccaagaaactaagaggaagcaatacattggcacacccataacctatccttagaggacactgtttgagaggctctgctctaggggtttaaaaacacaaaattaagaatgctgatcgaaagtgtactatttagattgtcaggtaagcaacatttatcataaaataacatctcaattattttaggggagagaggctctgactttagaaaatgtattcttg

SEQ ID NO: 316818 - DNA, 653 bp, Homo Sapiens
  misc_feature (507)..(507): n is a, c, g, or t
  misc_feature (535)..(535): n is a, c, g, or t
  misc_feature (557)..(557): n is a, c, g, or t
  misc_feature (576)..(576): n is a, c, g, or t
  misc_feature (602)..(602): n is a, c, g, or t
agataggtagtttcacattctcaggtgggtcagatgaccttgttagcgacttgacagacatgtcctggatgctctttgttcccaggaggctctcaggtcctcccccagggtcctgtcactcagccacctacagggatggggagacagtgaggctggctgataagccataaagtccttgactaatcctggtttcctggttctcacacagtggtaacaagggcttgcagccggttgtcagccaacagactgggaagggtggtgcttcttacaggccctgataacaggagaagcctaaatgacaagagaagagacagggaaagcataaaaggcaggcagattttcacaggcacagcaattgaaaatgattctgtttagaaggcagacattctcccacacccttgaggcccagggctcacttgctggtgtacagcatgaagtggacaggagagttgattcagtccatgaacattttcaggaagttagaagtctatagttgtggattggcanaatacatatctggcctgccttccatttnctggctccagtgattgggcagnccctacgaaacttcagggntagggctagtcacagggcccaggcanggattagagggtttcagccccacccttcaattttcccagaatggagaggga

SEQ ID NO: 316819 - DNA, 613 bp, Homo Sapiens
  misc_feature (410)..(410): n is a, c, g, or t
  misc_feature (450)..(451): n is a, c, g, or t
ggtaaaatggaaattagtctgtttctggccataaaacattcaagtcctctcatcactggaagctttcctgtaaaaggcaaggagttgtgacatctggacaccccaaaaccccaaacttcagtaaatgttcaagtaaaaaaactctggatgtcaagaattgagtattccagtccctggatgcagctggaatagactccaaagaccaaagaaaatgtgtgggaaatccagaagtcctaaatgaacatgtcactcactgtgccccctcaaaaaagcgaaattatttttccaggaaaatataaaagcactacgctacttttggattcattccactcccattgctaccccaggtgaatgaccgtggttgcaggttaaatgcaaactttgctataccaaagagtcctaggacattntcacatgagcctataaggcatattccctaagaaagtcctnnctttcttgacataaaggatgtagggtgcatttcaacaccagaggctgttttgagacatgtttggccttctgggttattacctgtggtgtggttagctttacagtacatttggtaactatttcctaaatagtaaggaccaaggagcagaaggtaagaaatagc

SEQ ID NO: 316820 - DNA, 1041 bp, Homo Sapiens
  misc_feature (27)..(27): n is a, c, g, or t
  misc_feature (756)..(766): n is a, c, g, or t
  misc_feature (925)..(976): n is a, c, g, or t
ggttaaagcggcccataatgccagttnatttcccactccagaactccgacaagaggaaagtaagatggcaggactgtgacatggagtcctgatcctttcctgagacggtaatatccttacgggagcttgagtgatgaccatgaagccatgaaacaaattctttctcaagacatttatttacaaatgtcatgaatatattcataaagtaaaattggtttaaaaaaacagagaacaagagagcaagtgagaaaacgagaaaagccaggacttcgatattacacctaaaacacagaagatgcccactttatgaataagcagaattaactacattcttaaaatagttttagtgcattgcatttttagaaaagggaaactcccccacccccaagaaaaggttcctgcaacactgaacagtttgtgtgactattctaatgtaaccacctgtctgctaccaacccctctacatcgagaacaatgagatcttgtgtcatgggctgcagttgccccatcaacctctaatggtgaatctggtaaaaacaaagcattctggtttctaaacttgtaagtaaactgcatcagccttaaggctatttcccatcttcatggacagttcttgtgcctgctgatttgtgacaataaaagtcaaacttcaatctggtcgttttggtattaagattaaattaaacattaatggtttcttccaaaaacatataaactaaatcacctctcaatgcattaagaacaatgaggtaggcnnnnnnnnnnntaaacatgtggtttgaatttttttctttcttctgcaagtgcagactgtggtaaaacttttgttgcacgtctaggtttaaacaaaaattaaacctttaactgaggcagtgctaatactgtcacacgacaaagttctggccattatacaaaatgcacacgnnnnnnnnnnnnnnnnnnnnnnnnnnnnnnnnnnnnnnnnnnnnnnnnnnnnagaaccatctgcacatgatttaggcaacctggtacacagaaaaatgactgagttcttggccagga

SEQ ID NO: 316821 - DNA, 662 bp, Homo Sapiens
  misc_feature (426)..(479): n is a, c, g, or t
  misc_feature (496)..(496): n is a, c, g, or t
  misc_feature (601)..(601): n is a, c, g, or t
  misc_feature (642)..(642): n is a, c, g, or t
  misc_feature (644)..(644): n is a, c, g, or t
gctgcaggaattcggcacgagagtggatcttattcattctgtctatttttgtaaccattaaccatcctcacctctccctcacagccccccatgacacttaacagcctctggtaaccatccttctactatctatgtccatgagttctactgtttcgatttttagatcccacaaataagtggaagaatatgtgatgtttgccattctgtgacaggcttatttcacttaacataataatcttcagttccattcatgttgcaaatgactggatctcattctttttttactcccttttttacctcattttccattgcactttgagccatttatcaaccacaaggaatcaaagccagaagacatctttatcatttaaatttaatatctattcaattcagcccatctgtattaatagtcatacctatcttcannnnnnnnnnnnnnnnnnnnnnnnnnnnnnnnnnnnnnnnnnnnnnnnnnnnnncacatgcattatcattngtcaaccacagctatcacacaaatgacactatgtactacgcttcgtggatatgtcaggtgtcacagacacaatgactcttgtgagtgtatgaggagttcagttgngtagagctatgaactggctcagcatgagtactaatctgaananactattaaggagagaacg

SEQ ID NO: 316822 - DNA, 693 bp, Homo Sapiens
  misc_feature (25)..(25): n is a, c, g, or t
  misc_feature (30)..(30): n is a, c, g, or t
  misc_feature (33)..(33): n is a, c, g, or t
  misc_feature (132)..(133): n is a, c, g, or t
  misc_feature (136)..(136): n is a, c, g, or t
  misc_feature (152)..(152): n is a, c, g, or t
  misc_feature (158)..(158): n is a, c, g, or t
  misc_feature (162)..(162): n is a, c, g, or t
  misc_feature (177)..(177): n is a, c, g, or t
  misc_feature (186)..(186): n is a, c, g, or t
  misc_feature (259)..(259): n is a, c, g, or t
  misc_feature (677)..(677): n is a, c, g, or t
gatcagtacatcacctgatagcatnatatntgnttatataccataatctttcctgctatcagcagaagagaagcagacagcaaaagagcacagtccattacagcttgtacttctcgccatctgtacaaggannganttcagtaggttcccanaacgcntagnaagtggtttctaaanattcacctntacgtggcatagccatttttttctacaaaaggtatctgattcctacaaagggggaagaaaccccagaaaacanaactggggtggtgtcctgttgtgtgatggaagggcattatcccattacactcgtttaataacttatagaggatactctgtagcaataaagaaattgtcattttattttgccctatcagcccctgccacatagaagagctcttcctgagaaactaagaatttcaaacctggctatcctcaaaggacacctgaagcctggtttgggtactcaagaagatgaaggcttcctgctagcaggaagcaattctccactaccttttaggtttactgcacaatagtctaagcaccagtcaaattggctatttcagtaaacctcaatgtcacctgctcatatattttcagctaatccttcactgttttctatattaacatttaaaaacaacttgctggctgcgtgccgtggctcacgcctgtaatcncagcattttctcgtgc

SEQ ID NO: 316823 - DNA, 320 bp, Homo Sapiens
gtctgaggattcatattagggcaccacctctctatttagtggttatgtcttccccgacctccatacccaatatataatctctattctctaagaattatataccacataaaagggcaggaatattcaaaggtgaccgaactatcaaaaatggtttatccaatcaccttattggttaaaaatgaaatacttgggaagaccttagatgttcacatttcctctcagggaaacaattttttaacaaacattaatgttgtgtttgtataataacaggaataaagcagaatgagcttaattaagagagatgcagctggactcagaaa

SEQ ID NO: 316824 - DNA, 1969 bp, Homo Sapiens
agccagccaggaggctgctttgttttttattataaagaacactaacacaaatgcagcatgattgctgtaaaataaatgtgaaatttgtacaaaagtcccagtccttccgcagttctaggtttacagtcaggctcaaccttacttgccccgctcctgcatgaaaacaagtgcgttttatacagcctctgccacccagtggcatagtttaaggctctatattatatttaaaattaaggtttttttcctatcatacacatcaatttggaacctgctggtgactcttctaccacagagggtaaataaaaagaccagtttttaaagtaagaggattcagctcatcttataaaagtataatagtttcggccagacgtccattaacatctgtttaaattaggatacagaccacaatgcccaaatattagaatcataaatgtaattttggagataatgtttaccttgagtaggaagacacttggaccatattaaatttgaaagtcttctgttccagaccaaaatggggtaggctaattccctgtcatccaagcaactaaaaggtaaaaaccttataactttaaaataaaaaaggttatttttttcccctataaaagacaggcagtatgagttaatacattaaaattattttgtacatccctgctccaaacaaccacaaaaatggtactttttaaatgcctgcccatcctctcctggaagggggtttttccaagattcggggtgactgattcatcccacagccccaggcagcagtttatcctggaactgtcctctgttctcccatcactgctgagccctgagaattgtgaatggccctcagagcatctaggcctctgcaacaatcaggtctctggtgacttgaaatgcagcaatgagggagctcagctggatcttctcgttggtgccaacagaaagcctgtactcaatgtctgccattttggtcaataaatgtattcgaactgaagatggaaagtcaactctatgcacaaacaagtgtatctctgtcaggatatcatgcagtgccaaccccttcagagttttcaactctgtaatatttctgtaggctgtggtgaaatcttgattcaacatccagtccaggatgttggcaatgtctgacttgagcgggtgcccggtgcaggtgtagacagtctcctctgtcaccttcccaaaggccatattggtgctctgcaaaatgttcagagccctacgcatgtctccactggaaagagtgactagtgctttcattccatcttcacttatatcaactttctcttcttccacgacatgttccaggcggggaaccatgagttcaggagtcaggggaccgaaccgaaacctcgtgcagcgggactgcaaggcagggatgatctttgacagatagttacagatgaggcagaatctggtattttctgtgaatttctcaattactcttctcaaggcattctgggcgtcctgagtcatggcgtctgcttcatccaagatcactagcttaaagcctttcttaaatattgtccttgtgctagcaaagctcaggatcggtcctcgaatgatgtctattcctcggtcatctgaagcattcagctccaagaccatggagccaaattctttgtctttatatagctgtttcgcacaggctaggatggtagatgtcttgcctgtccctgggggaccgtagagaagcaagtgtggcagtcggtcttcattgataaacttctgaatggtactcagaatgtcctgatgagaaatgagatcattcagggtctgtggccggtatttttcaacccagggcaggttcctgatcttggtcgccgcgggctgctcctgctgcttgagtgctgaggtctccatggcggggagacgaaggtgaccagatccgctgagatcgtcgcgtcacccaagcgcctgcacagtgaccagccgcgacctgaccctgagaccctggcacttacagttcccc

SEQ ID NO: 316825 - DNA, 389 bp, Homo Sapiens
aaagtaatttccacccagattcttcagtgtacaacacacaggctgtgttctggtcagctagtctcccaacccgccttaacaggcttttgtcccagttatggcaacatctccattttattgtttttggacgatgatggttgctttattaccttgacctggagcagaaaggcttggtactgaaatggcaccatcactggtgaaggctgaatagaggttgtcactggagggagatggcttaaggggctgtaacagctgattctgcccggactctgggatgttgccaggagggtggagggtctgctgggggtgcaagactgaagctgcactctgaccagacaggttacctgccaaaagataaagtggcatgaggaaacatgtccagctcttcc

SEQ ID NO: 316826 - DNA, 374 bp, Homo Sapiens
gtgccgtttgctaagactgttggaaaagtgcagtattagggtgggagtgtcccgattttccaggtaccatgtgtcacggcttcccttggctaggacagggagttccccgaccccttgtgcttcctgagtgaggcgataccctgccctgcttcagctcatgctcgcatgggctgcacccactgtccaacaagtcccagtgagatgaacctcagttggaaatgcagaaatcacccatcttctgcattgctcacgctgggagctgtagactgtagctgttcctattcagccatctttgaaagtgtgttattttataatcagaatatacctgaggaaattttgaggacatcaaggtcagtcaaggtgattgggagtta

SEQ ID NO: 316827 - DNA, 428 bp, Homo Sapiens
  misc_feature (22)..(22): n is a, c, g, or t
  misc_feature (27)..(27): n is a, c, g, or t
  misc_feature (43)..(43): n is a, c, g, or t
cggcgaaaaggcccgggtaaanggaangggccgggcatgctcnaaaggatgacacggccacggaagcccgggtgcgggcggctcttcccagtgaagcagggcaacttcagcgtccgctccccaagggctttgatgtcccaggaagggtttattcccaatgcccatggacaccatctgctgcactcggagctccttgttgtgggctgcctgtctccacagcagctgggcaatagaacttgtccacttgagtttgatctctggtgaggttgcctgcagagtgtatgcctctcgtgctgtcagccccatatcagcagtcttaaaggcctgcttgtaaacaaacatctctgaccccccttcagggcccttgagcttgctgaacaggaggagatgctcgaagagaaagacatggcgaaggcacttctttcggc

SEQ ID NO: 316828 - DNA, 418 bp, Homo Sapiens
caatgatgtcagaaatcggggcaacctcaagtttggctgctactctgggcaaaaggttctttccgaaggcagatgctccagcacagatgtgtgtgtaattgaactgcttctgagttgccaaaatcaatggtgtcgctatgcctgctactttacagagatcttgtgccaccttgtcacatttggttccagctactaagcaggacacttcacctccaaggcgtgtggctgcagtaatggtatttaaagtaatgggtgctagggaatcatttgcatgctcagctattaccagggtactctgaaatcgtagcaatgaggccgcccgccggagctgccccggagccgccgctcggaacatggtctccgcttccgccgcaacctcggccttacagcagccccgtgcccggccaactggcgccgc

SEQ ID NO: 316829 - DNA, 414 bp, Homo Sapiens
ggtaaaagtcaaactctttgtttttatttcacagacaattgtggcaattaataaagacccagaagctccaattttccaagtggcagattatggaatagttgcagatttatttaaggtagttcctgaaatgactgagatattgaagaaaaaatgaatcaggatcatgccttaaaaagaaaacttttgttaaagtattccactgaaatcacagatatttgtgggtattataacaatcattggaaagcatggagagctacatttcataatttgagggaaaatttctaacagatgccagaatgcttgtttatgggattgctgtgtttccttttaattatttgtggttccaaacaattattgtttgaacttttttaattctgtactaaaatctataataaagcttttccacagctttgt

SEQ ID NO: 316830 - DNA, 1379 bp, Homo Sapiens
tttttagttttaaagctgtggaaaagctttattatagattttagtacagaattaaaaaagttcaaacaataattgtttggaaccacaaataattaaaaggaaacacagcaatcccataaacaagcattctggcatctgttagaaattttccctcaaattatgaaatgtagctctccatgctttccaatgattgttataatacccacaaatatctgtgatttcagtggaatactttaacaaaagttttctttttaaggcatgatcctgattcattttttcttcaatatctcagtcatttcaggaactaccttaaataaatctgcaactattccataatctgccacttggaaaattggagcttctgggtctttattaattgccacaattgtcttgctgtctttcatcccagctaaatgttggatggctccagatattccaacagcaatataaagttctggtgctactatttttcccgtctgtccaacttgcatgtcattgggaacaaagccagcatcaacagcagcacgggaagcaccaactgcagcatgtagttgatctgccaagtcatataacaacttaaagttctctccactcttcaagcctcgaccaccagataccaccactttggcacctgttagctctggtcgatcactttttgttaatttctggtcaagccactctgatatttccactggtgaagtacttgatgccttttctgaactggcactaccgccacttgttgctgcagcatcaaaggatgttccacggacagaaaacactttcactttctcatcacacttcactgtacatagagcatttcctgcataaatagttctcacaaatgtgtcaggtgacttgattgcaatgatgtcagaaatcggggcaacctcaagtttggctgctactctgggcaaaaggttctttccgaaggcagatgctccagcacagatgtgtgtgtaattgaactgcttctgagttgccaaaatcaatggtgtcagttcctctggaagtaggcctttgtacacatcatgctgagccaccagaacttttgctatgcctgctactttacagagatcttgtgccaccttgtcacatttggttccagctactaagcaggacacttcacctccaaggcgtgtggctgcagtaatggtatttaaagtaatgggtgctagggaatcatttgcatgctcagctattaccagggtactctgaaatcgtagcaatgaggccgcccgccggagctgccccggagccgccgctcggaacatggtctccgcttccgccgcaacctcggccttacagcagccccgtgcccggccaactggcgccgcctcagccagtcacctaatgctcgcgagacgcgcgaacgagatctc

SEQ ID NO: 316831 - DNA, 447 bp, Homo Sapiens
tgcttttatcaatgttttatttgatgtaatatgacttaatttgataaaatgttccactgctttaaaatacttgaataataagctggatttaagaactgctgggcattttactaggatcaagaactacacagaccttgtgaaaatgacatattcaccatggtactggctaactgctcaggaacactgagtaaggtaaatcactgagatcactgttcaacaaatacatacagtacttatccccataacattttacacagcatattttattgcaatacttactggtgctactatttttcccgtctgtccaacttgcatgtcattgggaacaaagccagcatcaacagcagcacgggaagcaccaactgcagcatgtagttgatctgccaagtcatataacaacttaaagttctctccactcttcaagcctcgacctcatttaaaaagatg

SEQ ID NO: 316832 - DNA, 1273 bp, Homo Sapiens
  misc_feature (82)..(82): n is a, c, g, or t
ggccaaaagcaatatagtagcatcttttcactgacccaaggtaaccaggagtgttgatcaagatcacacttgataccttacnaagtggcccaaaattacaatgacaagccttggggggaggtgcccaggaaggtggcaggggtatagagtgtgagagagaacagatgcatgtgagtgtggtgtgatgagggaagcagctcaaaagctgacacctaaacccagaataatttcagaggtgaaaaattaccacctctcttactagtgacattgaagtgaaaaaaaattagggtttttcactgatatgttactagtatttaggcaaaaacacaacagaaaccaaatcaagtcactataaagcagtaagaaaatatttaaaaaagacattatcaaactttagtgaatgttattctaagtctcgaaaatttagatgtctgtttagactaaaattttgccaaaaacaaatccaaagtgaaaaagtagcaattttagtagacattaacaaacattatgcagatatagatacacatatgaataatgcaagagatttacagaagtgtagttttggcacttttacttggatttttttaaagaaagtgaatacaaatatctttgtacacaaattctcattctggagaaacaggatgtagaattcaaaggtgccaacatctcccttcttaaaaataacattgaaacgggtaactgtacctgttaaatctcctggttggcagcttttaaaatctggcttccacctaactccacaaatttgacaaagttatttttgtttgtgtaagtgatactggttatccacttccagtacatgtaccatttggccagaggtccataaataatattaacattttcagtgtagaaatcttgaagttctaaagggaaatattgctcagtagataaattctcctggaatttcttgtagcaaaggttcctcaaatttaaatcgtttggaaatggccttttgctccattttctctttttcagactgtctgcattgtcctagagtatatgaagtaactacaattaactcttcggttacaatggattcctcggtttctgatttgtcggtatccgaattaatttcaggcacagaatgaccttcttggagggcatttgcttcttctagtgccttctccatcctgaaagaaggctcttgaatactgctctgtgtcaaccaggggtgctttagacattcttcagcagtggctcgatcttcaggtttcttaactaaaagtgtcctgatgaaatcaacagccgactcacc

SEQ ID NO: 316833 - DNA, 374 bp, Homo Sapiens
ggagaaagaaaaaagccagaacaagaagaggagcttcgcttagcacaggaacgtgaagagatgcagaaacagtatgaagaagacatacttaagcaaaaacaaaaggaagaaatcatgactctcaagacaaatgagctattccagacaatgcagcgagcacaggaactggcacagagactaaaacaagaacaaagaatccgagaattggcgcaaaagggacatgacacttctagactgattaaaaatcttggtgttgatacaatacaaatggaatataatgcatctaacatttcaaattcaagacatgattctgatgaaatcagtggtcaaacagatgacttaaatataggaatattcaccaatgcagaatcaca

SEQ ID NO: 316834 - DNA, 521 bp, Homo Sapiens
acattcgccgcagccacctcggccgtggcaggaaccgaaacccggagcggccgaagctcagcgctccgctggggcagagggtcgcggcggctgggaacgccgctccccgacgcaccggccgcccccagcgcagcgcgctccgcggggtgctgatctgcctcttctccaagaaactcaaccactagtgacaatgaccagcctcctgactactccttctccaagagaagaactgatgaccaccccaattttacagcccactgaggccctgtccccagaagatggagccagcacagcactcattgcagttgttatcaccgttgtcttcctcaccctgctctcggtcgtgatcttgatcttcttttacctgtacaagaacaaaggcagctacgtcacctatgaacctacagaaggtgagcccagtgccatcgtccagatggagagtgacttggccaagggcagcgagaaagaggaatatttcatctaatgactcccatgccccaaggagcttattcctggctcca

SEQ ID NO: 316835 - DNA, 377 bp, Homo Sapiens
  misc_feature (164)..(165): n is a, c, g, or t
gggtggtggtttattttcttctttattctctaggattttctatttggatatactctaggagttaaatgataaacttttgaatagggaagaaggtggggtggtgaaatttgaaggccaaacatgtgctttcaaacaaaagaattcactccatttccttttccacnnttttctacattttccagaagaactgatgaccaccccaattttacagcccactgaggccctgtccccagaagatggagccagcacagcactcattgcaggtaatagactctgagccaactccaagggaccttctggatcaagggcatctctctccagagggaagcctgaccaaatccattaatgggctcactctgggcttgtaaagttatatt

SEQ ID NO: 316836 - DNA, 657 bp, Homo Sapiens
gcgccacctagactggccgaagttcttaattttggcaaagcccaatgtattaatttttactttatacatcatgcttttagtgttgtgtctaagaaatctttgcctaatccaaggtcatgattttatcattatgaaaggatcttctttattgccagttccttgctctaaagtctacctttgtattaatattgccacttgatctttctttctgtgttagcacggtgtgttttttcctcttcctttactttcaataactaatgtgtgtcttttacttacagtgagattctctgggcagcttatagagtgatcttgctttttattctagtctgacaatccacatctttttattgggggtgtttagactattacatttaatgtaattagtgatgtggccaggtgaaaagctaccatcttgctacttgttttctgttccttccatctgttctttgtctttcttttctgccttcttttggattgactatttttccacagttcagttttatctccttgtttgcttatctgccataactttttattattttagtagttgtcttagagtttatagtatgtctacaacctactgtagtctcctttccaaagatattatcacattccatatatagaagaagaaccttccaggctgggcacggcggctta

SEQ ID NO: 316837 - DNA, 1972 bp, Homo Sapiens
  misc_feature (1171)..(1220): n is a, c, g, or t
  misc_feature (1238)..(1256): n is a, c, g, or t
  misc_feature (1321)..(1321): n is a, c, g, or t
  misc_feature (1340)..(1410): n is a, c, g, or t
  misc_feature (1497)..(1505): n is a, c, g, or t
gtctccaatgatggtaaaaataaaaactacgcattacttaaaggagtttccctcacatgtaaacactgttaggaagtctggattaagttgaaagtcctgttttaactttttttctctcatataccaaacactctgtatttctcttaaagaagccctttaagagaaagccctaattttatatctgacagtaaagtttgctgcaagtgtatgagttcaaacacatcccttgttttctgtccctaggggaaaagtcatgtagttttagcttggctccagtgttaatattatattcagtagcagccttagaagagtggtctaagacttgaacctggagcaattttatagcacagaatcctacgaagataggactgtgaacatttgttttctttttcgtgtgtgtcaaactaactggtttttgctttaccaataaaatgtcctcggcagagtaaattttaaacgtgaaaattatagatcttgatattgaatccatcagtgattcaagagatacacctatttgcctaaaacaacctaagatgtattggttatggaatcatgtgttggataggttcttaagacctgtttcctcaaatcttgacacagttttcaagggtggcttattgacttgcacggttgggcagataatccagatttacctaagattgggtaaaaaagtcatctgtgactttgctggcagggcatttgctaagtggagtacaggatctaaaagggttttcttagaaagggcaatattgtccaatgaagtaagcagaaggactctgggttagaagcatctgcacaaaaactggtgagacctactctccactgctctgcagctggatggctgatggcaggctgagcagtggggaagcaggttttaacaacagggagtccttccaggtcactgtatattgagaagaaacataaaactattgtctgttacattccgaggtcagccttcttcttaacgttttataatatgcaaatgccagcttctggaaagcaagtatcatcatgtaccaaatgctttatacaccatcacattcatgaattttttagcatggtcagaacttgtgtaaatatgtctcttagatgattttggggagatgtgatttatttttcatattttcaaaatgcatttcatttcaaataaagttatctattgagacaaccnnnnnnnnnnnnnnnnnnnnnnnnnnnnnnnnnnnnnnnnnnnnnnnnnncactcaacacaccccacnnnnnnnnnnnnnnnnnnncccccactactaaacacccaaaaaccaccaaccactctcgccgcataaccccaactctaaccagncacccttttttttgccggnnnnnnnnnnnnnnnnnnnnnnnnnnnnnnnnnnnnnnnnnnnnnnnnnnnnnnnnnnnnnnnnnnnnnnngaggccaccgcccacccttccccaaaatatttgttttaccaaaacacaaaactcgtgctcacccaacaccccgccttgtttttcttnnnnnnnnnaaacaaaaaaatccgcccccgcgtcgcactccgcaatccccgtttacaaaacaacatccaccaaatgagaggttttcctcatagctcccctctatgggcggtccctccccccaccgcccgcggtttgcacccgcagtcgcctcaccattatttcatatattatcccccccgccgcgtctgtggtggccctcccacatgaaaggcatggtagttgtcgccgcaacctctatctcaacaccccctctctttatctcaccactatgcgcgaacttctcccttcaccacacacctgctgtgtgtcagacatttgtgttaactcttgcccgcgcggtgttatacaaacaccatactttgtggcgcccccctgctgcaataacacattaacgacctctccctacgcgtgataaacacaccctcagcgccgcaaataataaagccgcgcctatatttgtcgcgcccacctcatc

SEQ ID NO: 316838 - DNA, 883 bp, Homo Sapiens
gatgtccttccacttcaaattgtttcatttgacacataatttttcagagccagttaatcagacaaagatgatttattttcatacctaaagcactttataatattctctggaaaatctaaaatcattctgttatcctaacatttttatactatcatcattttagaaaataaaaggcctgcgttatatactagaaaaatttcttcattatatgcaaaatatttatctcctctagtaaaggagattaaagaacaactgcaagaggaaggaaggtcctgaaagtgtttcatttggtatctacctaccccaaccccaagacataaagacagataaaggcactaagatgctagtatgtggctagtcctttcaataacccagtcagtccatacagataacccatgggatatattcaagccactctttgagccatcgatggtcattatttggttagttcacccaaggtaaggccataccagctgttaaaatgatgtagagattaatcaacagggctgccacttgcgaatcccctccaaggatgctgtgcaaagggtctcattggtcctgatgagtaatcttgtgactgtacatattcctgggtgcatgtccacaaatactgaggtatagcctgcatgccactaaaaataacaaaggtttcagggctggagacattgtcaaccacactgtcatgaccatctatagctccaggactcagtggtgggggaacaatatttaacggatgtccctggcagaagaagcctgtgagtacttcagcctcaaacacatagatcagcttatctgcagcagagattttcttggccttctctgccaggtttttgaggttcttggtgaagtatatgccagctccgtattttggatcgcaaggtgt

SEQ ID NO: 316839 - DNA, 330 bp, Homo Sapiens
aatcagacacagatgatttattttcatacctaaagcactttataatattctctgtgaaatctaaaatcatatctgttatcctaacatttttatactatcatcattttagaaaataaaaggcctgcgttatatactagagaacaatttcttgattatatgcaaggtcctgaaagtgtttcatttggtatctacctaccccaaccccaagacataaagaccgattaaggcgctaagatgctagtatgtggctattgctttcaataacccagtcagtgcatacagataacccatgggatatattcaagccactctttgagccattgatggtca

SEQ ID NO: 316840 - DNA, 814 bp, Homo Sapiens
  misc_feature (20)..(20): n is a, c, g, or t
  misc_feature (24)..(24): n is a, c, g, or t
  misc_feature (33)..(33): n is a, c, g, or t
  misc_feature (52)..(52): n is a, c, g, or t
  misc_feature (66)..(66): n is a, c, g, or t
  misc_feature (72)..(72): n is a, c, g, or t
  misc_feature (96)..(96): n is a, c, g, or t
  misc_feature (116)..(116): n is a, c, g, or t
  misc_feature (118)..(118): n is a, c, g, or t
  misc_feature (134)..(134): n is a, c, g, or t
  misc_feature (143)..(143): n is a, c, g, or t
  misc_feature (147)..(147): n is a, c, g, or t
  misc_feature (154)..(154): n is a, c, g, or t
  misc_feature (164)..(164): n is a, c, g, or t
  misc_feature (186)..(186): n is a, c, g, or t
  misc_feature (195)..(195): n is a, c, g, or t
  misc_feature (199)..(199): n is a, c, g, or t
  misc_feature (201)..(201): n is a, c, g, or t
  misc_feature (205)..(205): n is a, c, g, or t
  misc_feature (239)..(239): n is a, c, g, or t
  misc_feature (243)..(243): n is a, c, g, or t
  misc_feature (251)..(251): n is a, c, g, or t
  misc_feature (262)..(262): n is a, c, g, or t
  misc_feature (276)..(276): n is a, c, g, or t
  misc_feature (289)..(289): n is a, c, g, or t
  misc_feature (305)..(305): n is a, c, g, or t
  misc_feature (315)..(315): n is a, c, g, or t
  misc_feature (317)..(317): n is a, c, g, or t
tgacatggatccgaaaccgnagcntccagctanatctgcacttgaacactanacatatgccgtggnggtganactctatactgagtcgatagtccntgtctgtacacgaaaagggntnaatgttcagccaatgntggtccatnaatnatcgtgngcagcggaangcaatcacccctttgagacagnaaaccgacnagtnanatcnggggtgcagatttttacctgtgaggtctaagttntgcnatagagantcatcagacgntgggcgataccacntcttacaaacacnagagacctttagcagntcagggaggnanagacaggaaaagattcccaagagcagctcatccggaagggagtcccatgaaacacctggaaagttctctcgatttagcttaggctgcggacaatcacaaagtctttgtcactccctttgctcttcagccgtttccgtggggggctctccgggtggcccaggtttgagagcagttcctgggggatgttctcactgtcgggctcctctttctccagggcggagacccccatgcctgacagcagttcagaagtcttgctggaatcccatccccacgtgaagctggtggcaacgttgctactcaggtctggaatctcctggaggtgcttcctgtgcatagcgtccgcaggcccgggagtttaaaatacgtgcatttactgcagagctgctcgcctcccagattcccgctttggcgcgcggcggctccgagcgtgctgctcgggcccccagcagccagacccgctaagcctagcaacgttccatccccactgcgcgcgcaag

SEQ ID NO: 316841 - DNA, 129 bp, Homo Sapiens
aactggtctatcctgcagtgaattttattgaattcaaaggtagtattcctatttgagaaatggaaaactaaaatcaagttttacaagcaagcatcatgagataaagcagtgaagacgccttttcagatc

SEQ ID NO: 316842 - DNA, 955 bp, Homo Sapiens
cctgggcaaaatttcaattccagggggaaacaagtaagaattggaggctgagaaaatgggtctgttgggcttttttggttaaggtttctttaacccctgcctgggagccttgttggtaggccacgggaggtgaagcttggtagccagggattcccagttttaccataataacttgggttttggacccagatcaaatccttcaactttttttgcttctttttctagttcttcctcagtgagagggaggtactgttctaccaacagctctgatttggtgagtgcattttttacgccactgctcacgagctgcatcatccgactccccaagactgtgttaatgctgccactgaccacagacttggtcttctccacactgccagtcactgcccctttggtcttgtccatcaccccctgtgatcgtgctggccacagaatccttggccccagtcacagtagtcgtcacagcatcttttgccccagtcacagcgcctttggcattggcaacaatctgagttgatggctgattcagaataggcagtctctcctcaatcctgtctagccccttacaggcataggtattggcaactgcaatttgcggctctagcttctggatgatgggcagagcactggtcatggccacggaggtgatggtcttcacaccgttctctgccatctcacacacagacttcaggtagggatactggtcctttgtactgagataggctgaggacatgaggtcatacgtggagctcaccaagggcaggttgaccacccgagtcaccacactcggttgtggatcaactgcaacggatgccatttttcttcctggagaaagaaatcgacggactgcagcgaaaggcgaagagcaggcgcgtcccgaagacgactccggctgccacgacccggtcaaagcgtggggcccgcgggcgcccgggcgccacccaggcctcgctac

SEQ ID NO: 316843 - DNA, 1918 bp, Homo Sapiens
  misc_feature (1903)..(1903): n is a, c, g, or t
tttctttttgggaaatgaaaaactaaaatcaagttttacaagcaagcatcatgagataaagcagtgaagacgccttttcagatcacaccagagcagacaccagtttctaccccagcccacatgaagatgtttttattcaatacaaacagtaacagaggcaacacaatggccatagaatgagaacataagtgcatttgaattttttctgagttctggctataggctctgacaagcctatcattcttttcttaccaggtgaacagaaatcatctgctaatgccagaaactttaaagctcttaattcagctggaaacaactacaattgagggcctttatactagctacttgcttcccaatttagggttgcctagcaagttaatttcaacataacaaaaggtgtcatctgtctggccacagcatgcactagtgataggggcaggtttaatgagttttatgctcagatcgctgggtctcctggctgctcttgtccatctctgcaccttggtcctgagcattctgagactcagtcagctgaggataaaagggacctaccagccagttgaggggcgtgttgttaacaagataatccatcacgtcatctaaagattccttcattttctgcagctgccccttgctagaagtgaggaggctgtcagacacttctttaaaggaggcagcattgcggaacactgagtagatgtcgcctgccatcacccccatgtgcttggcttgatcttggatgttctgtggtacaccttggatgttggacaggagggtgtggcacgtggtctggagctgctgagtcaggttgcgggcaattgcaagagtacgtgactcaatgtgctcagcacagtgggactcatcagtatcatcatatccaatgctccttttccactctacccatgagaggtagagcttatcctgagcatcctgaattttctgattggcactatacacattcttcctggcaaattcaatcaggtgaacagtagaatggagctgagaaatggtctgttggcttttttgcttagcttctttaaccctgctgagagcctgctggtaggcacgggagtgaagcttggtagacagggatcccagtctaacataataacttggcttctgaaccagatcaaatccttcaactttttttgcttctttttctagttcttcctcagtgagagggaggtactgttctaccaacagctctgatttggtgagtgcattttctacgccactgctcacgagctgcatcatccgactccccaagactgtgttaatgctgccactgaccacagacttggtcttctccacactgccagtcactgcccctttggtcttgtccatcacccctgtgatcgtgctggccacagaatccttggccccagtcacagtagtcgtcacagcatcttttgccccagtcacagcgcctttggcattggcaacaatctgagttgatggctgattcagaataggcagtctctcctcaatcctgtctagccccttacaggcataggtattggcaactgcaatttgcggctctagcttctggatgatgggcagagcactggtcatggccacggaggtgatggtcttcacaccgttctctgccatctcacacacagacttcaggtagggatactggtcctttgtactgagataggctgaggacatgaggtcatacgtggagctcaccaagggcaggttgaccacccgagtcaccacactcggttgtggatcaactgcaacggatgccatttttcttcctggagaaagaaatcgacggactgcagcgaaaggcgaagagcaggcgcgtcccgaagacgactccggctgccacgaccctcgtgccgaattcgccacccagacctcgcacgggtagaaaggggaaaagggtgttaggggngtgaaaggggaagga

SEQ ID NO: 316844 - DNA, 1012 bp, Homo Sapiens
tcttgccatccaccccccatgtgcttgggcttgatcttggatgtttctgtggtacaccttggatgttggacagggagggtgtggcacgtggtctggagctgctgagtcaggttgcggggcaattgcaagagtacgtgactcaatgtgctcagcacagtgggactcatcagtatcatcatatccaatgctccttttccactctacccatgagaggtagagcttatcctgagcatcctgaattttctgattggcactatacacattcttcctggcaaattcaatcaggtgaacagtagaatggagctgagaaatggtctgttggcttttttgcttagcttctttaaccctgctgagagcctgctggtaggcacgggagtgaagcttggtagacagggatcccagtctaacataataacttggcttctgaaccagatcaaatccttcaactttttttgcttctttttctagttcttcctcagtgagagggaggtactgttctaccaacagctctgatttggtgagtgcattttctacgccactgctcacgagctgcatcatccgactccccaagactgtgttaatgctgccactgaccacagacttggtcttctccacactgccagtcactgcccctttggtcttgtccatcacccctgtgatcgtgctggccacagaatccttggccccagtcacagtagtcgtcacagcatcttttgccccagtcacagcgcctttggcattggcaacaatctgagttgatggctgattcagaataggcagtctctcctcaatcctgtctagccccttacaggcataggtattggcaactgcaatttgcggctctagcttctggatgatgggcagagcactggtcatggccacggaggtgatggtcttcacaccgttctctgccatctcacacacagacttcaggtaggcctcgtgccgaattcgccacccaggctgggtgcggggaggttttgcagggtttgtgtaggggaagagggggaga

SEQ ID NO: 316845 - DNA, 384 bp, Homo Sapiens
gaagaagaggacctcaaattacaattgcaacttcaaagacagagagccatgagactttcccgagaattgcagctgagtatgctcgaaatagttcatccaggtcaggtggagaaacactatcgggaaatggaagagaaatcagcactgattatccagaaacattggagagggtacagggaaaggaaaaattttcaccaacagaggcagtctctcatagagtataaagcagctgtcacacttcaaagagcagcgcttaaattcctagcgaagtgccgtaagagagttgaactgaagaaacgagtggatgactatgtcagaagacatttgggctctccaatgtcagatgtggtcagtagggagctccatgcccaagctcaagaacga

SEQ ID NO: 316846 - DNA, 1123 bp, Homo Sapiens
  misc_feature (20)..(20): n is a, c, g, or t
  misc_feature (60)..(60): n is a, c, g, or t
  misc_feature (106)..(106): n is a, c, g, or t
  misc_feature (151)..(151): n is a, c, g, or t
aggccaaggaacctgggaancccaaagtgcttaaagcaaatttgcttaaattattgactntttcgtaaagaaaaagtcctaaggggaaagggggagaacgagagtngctttttagcctctctcgtcaagagtttctgctgtacatttccantcagaggacttgtggtcatgtgaaaaggaagtaatagtcgtctttagttttcaaggcagagagtgtgtgttctgaagtgagcttcattttctgttcagggacatttgtgaatccaagtttttgcagaagctggagcctgcttctgtttggccttcattttctccctttgcaaatgcatttttacctttgtaagtcaaatttgtctttctgctggtgctgcctttttggctaaatcttgcagtttgggtgctttggcattacctgcttccaaacccccagggctctcctgacccactgcagctctcttccttcccttgttaataggtttatttagatcatcatttttggtagcattgccctgagattcagacttgggtcgacgtcctctcctgggtttggaaggggcgggaggtcccgattcatctactttctcatctgttttttgttggatattctctgcaccagctgctgttactgttcttttctttcctcggtcactgctgatgttgccctgggtagcctgatcagaattgatttccttattctttactgggtcaatattctttacaggtgtgactgaaataatcctcacagggttctcttcattttcactaactccagtttctgctgcctctgaactctgttcccttgatcgatttccggttgaagggttcagctctgaattattcattaatattgcttccagtctcagtgccagtgcttctaacatagggtttccttcccgttgctgataaaggcttatttactgcacctagtactccagcaggctttggctttcctgttaacagaagtactcttgtctcttctgaaatataactcttatcgttacagaagtccttttcaggttgtgtaaaaaatttcattgggaggactgggtcctttggtgaatctgcattgcacaaagcacttttactatttataacacagagagccacatcacatactgtatac

SEQ ID NO: 316847 - DNA, 375 bp, Homo Sapiens
cacacacacacactttttcttagacatttttcaactttcttaagaaatttgcacatgatatcactgttcctcaaaataattcagtgatcattccgctcctccttgtcacacaattaatgccgcagttaatgacttatgtcactttatttgtgctgacttcagacctgtcctaggaatatttttcgacagagctctgcaagtggtcacctccgttaaatcagaaacatacctgaggccagtattcaggtcgataatacaagtgggtctgcctaaagcataggagggttgattagaagaacatgcctttaatttctcacctttctattggattaatgccagagattcagttctcacaaatgatcttttcaggcagag

SEQ ID NO: 316848 - DNA, 670 bp, Homo Sapiens
gaactaggcatttcttctgagttgacggactctttaggaaaggagaatctaagtgaagcactgattttagctctgagaacaaacaaattaaggtacagcatagttagccttggtagaggtatgacttggatttgctgtatcctttaaaatagtatctgggcatttattttattgaaggtgactacattttattagttatattaggaatttaggtagaatcaacttctactgattacaggttgaatttctgtcactttgtagagaaacgaatagactggacactgtgtggtcactgtttagatttgcccatgggtctgtttaaatctatgtcatggatcctgagacacaaatataattaagacaggtctagagacaggagaagcagaaataagttgacccaggagtacagtctcaagtagttcattaatgagaaaattgacatctgacaagagtctttttactttatgctggatgaaaatccaaatcttgttttattttttccactaaaagtgactaaaataataatgaatttcatttgttcttgggttcttttttcctttaatgattgtgctataacttaaaataatgatgttacttttgaacaaacttaaagaaatatttttaaagcgtatctgaaaacgattgatgtttataactctcttttggcttc

SEQ ID NO: 316849 - DNA, 1484 bp, Homo Sapiens
  misc_feature (628)..(628): n is a, c, g, or t
  misc_feature (650)..(650): n is a, c, g, or t
  misc_feature (833)..(833): n is a, c, g, or t
  misc_feature (836)..(836): n is a, c, g, or t
  misc_feature (946)..(984): n is a, c, g, or t
gggatcaatcaacatatatcttagaagtccttccaagagtcttggtatgcaacagccatggaggctgtgacctttttccttcttttctcagcctgcagttcatttaaggatcaccggagatgactcgtgctctagttcttaaaatcaaacttgttctgccaaatccaagaccctgaatttgtccaaattgtagaaacatgcttttaccacccgtccaccaaaatacctcccattcaagtcaacaaccgctttaattgctgattcaactctctcaaattctaaaaatatccgtactgcttcatcatcaggggcaccaggaatttcaaatatcacacattttccaactttgccatatttttcacattcttccttggtttcaacttccaagtcttcatccacctctcccgcaccaaccatgttccttagtaagaccactttagtaggacacttaagtatttcagtcagcggatttgaatctgacttcttggatgcatctttctctgtggcgtcgcccacgatgatcttgccgccacgcttgctggtcttctccactgacaaggcagtgctcaggccctgctcatgcttccccagaccctggccctcccggaagccgtacttctgcatgatnttgtgcgccaccgtgccccccnatgttagcgaggaaggagttgctaggtccggttggagatctcggtctgtctttgttcctcgtacactgggggaggaatggctgctttggaagactgtgatcgaggtcttgagtcctcttcataaggaaaatctcggggtaactctttgtctttctctaccagagaagtgggtggggcaatggncantccgcccatacttcttttcctcctctctcgctcataatcttcatcttcatcagaatctggatctggtctccttgcaaacccacttgcttcatgtctgtctttacgccttnnnnnnnnnnnnnnnnnnnnnnnnnnnnnnnnnnnnnnncgctgtctctgtcgttcctctctttggcgcttcactactttctcataatcattaggaaacatagggtcatattcgtcagctaagggaatcagaacttcccctgcagaaaacccactgggaacaggatccttcagcccagctgctacatgcggtggagtgtccacaatttgccggtcatctgaggagccacctcgcttcaggtcaatgactggggcgaggactgtactttgtttcgtcctttggctctttgcctgagtgagagctgccttcttcacctgaagctgagactgcagaagtttgaagtttttggaccagccttctgtttttgagtcactggtctccactcctaggtcatcgtacagggacatcttttcttcagtttaatgccggcccgcccggccgactctgcccatgagccgcgccggcggcagagcggagccgggcggcactccgcggaaacccgccagcggcaggaggcctcggcggcgcccacccttcgc

SEQ ID NO: 316850 - DNA, 704 bp, Homo Sapiens
  misc_feature (639)..(639): n is a, c, g, or t
  misc_feature (644)..(644): n is a, c, g, or t
  misc_feature (650)..(650): n is a, c, g, or t
  misc_feature (655)..(655): n is a, c, g, or t
cagttcatttaaggatcaccggagatgactcgtgctctagttcttaaaatcaaacttgttctgccaaatccaagaccctgaatttgtccaaattgtagaaacatgcttttaccacccgtccaccaaaatacctcccattcaagtcaacaaccgctgaaaggcaaacaaaagacagttaatacaggtatcctataagataaaggtttaactttaattaaacagtaactttacttgtaaagattaaggctgtaaattcaacttttttattctttaatatttagctgtaccactaacctttaattgctgattcaactctctcaaattctaaaaatatccgtactgcttcatcatcaggggcaccaggaatttcaaatatcacacattttccaactttgccatatttttcacattcttccttggtttcaacttccaagtcttcatccacctctcccgcaccaaccatgttccttagtaagaccactttagtaggacacttaagtatttcagtcaggcggatttgaatctgacttcttgggatggcatctgtatcaaaacataccattaggatgtgttacaggaactgaggcaggcatatcattaggatgtggtttacaggaactgaggtcctactttacaatnatttnattttnatttncattggcggttcccccacctttatgtcccggggatctacacattgggga

SEQ ID NO: 316851 - DNA, 977 bp, Homo Sapiens
  misc_feature (646)..(684): n is a, c, g, or t
gttttcaaaatttccacacctttttccaaacttttcccatatttttcacaattcttccctgggtttcaaccttccaagtttttcatcccacctttttccggcaccaagccaagttcccttagtaagaccactttagtagggcacttaaagtatttcagtcagcggatttgaatctgatttcttggatgcatctttctctgtggcgtcgcccacgatgattctgcccgccacgcttgctggtcttctccactggacaaggcagtgctcaggccctgctcatgcttccccagacccctggccctcccggaaagccgtacttctgcatgatcttgtgcgccaccgtgcccccccatgttagcgaggaaggagttgctaggtccggttggagatctcggtctgtcttgttcctcgtacactgggggaggaatggctgctttggaagactgtgatcgaggtcttgagtcctcttcataaggaaaatctcggggtaactctttgtctttctctaccagagaagtgggtggggcaatggcagctccgcccatacttcttttcctcctctctcgctcataatcttcatcttcatcagaatctggatctggtctccttgcaaacccacttgcttcatgtctgtctttacgccttnnnnnnnnnnnnnnnnnnnnnnnnnnnnnnnnnnnnnnncgctgtctctgtcgttcctctctttggcgcttcactactttctcataatcattaggaaacatagggtcatattcgtcagctaagggaatcagaacttcccctgcagaaaacccactgggaacaggatccttcagcccagctgctacatgcggtggagtgtccacaatttgccggtcatctgaggagccacctcgcttcaggtcaatgactggggcgaggactgtactttgtttcgtcctttggctctttgcctgagcctcgtgccgaattcgccacccaggcctcgctacctt

SEQ ID NO: 316852 - DNA, 499 bp, Homo Sapiens
  misc_feature (160)..(160): n is a, c, g, or t
ttctttaatatttagctgtaccactaacctttaattgctgattcaactctctcaaattctaaaaatatccgtactgcttcatcatcaggggcaccaggaatctggaagaaaatgagagcgtgatgagtaaaggcatttgagattgcattgaatgagtttnctcttttaaatgatttctcagagtggatattctaattatccatcatatacagtcaagtagttgtcaaataccaaggaaataagtataatttgttcatcatcaaaaacgtactgaatgcctgtttttatgacaggcattgttaggtgccaggaacacagggctaggcagtctctgacctcataaaggccctgtgccagctgatgacgtaaacaaataattatgtggtcaacaaacagcaacaggataaagaaacagaggaagcagagctttcagattaaaaaggctggtgccctagtggcctttcacatcaggtctcattttgactagctctgtctagct

SEQ ID NO: 316853 - DNA, 920 bp, Homo Sapiens
  misc_feature (78)..(78): n is a, c, g, or t
aatccataatacaagttacaattccccacgtggccaaaatccagggagatcttgccgcctgaaagtgctggaacagcnagctggtgcctaagagcccccagccctgcaggaagtcaagagtcataactcctcgggaacagatgctgtgggtgcagcagagaggagttctgggaaaaggagcatgcacgggaccacaggacagagtattaatagaaaagaaaacttaaacaacaaggttacaggttacatgttattttaaaaatgcttcaagaaatgtgcaacagacacaagcctctcataaacagttctgtggtataattctgacctgcaattactttatacaatgatttaaacagaaaacatgtacaatgaaatgtatttgttcatgaaacaaagggcacctgagtgcatgcacacacacagataacatacagagcatcatggctttctttacttgaacaacgaattttcgagtttaaatcttagtgttctccagttcattaaagattttcaaatctttataaatcaatattaatgctggggaaaaaaaaccttaaaagatcaaagtcctaaaagtcaacagcatgcatgcagcaccaaggtcatatacaattcaggaaaaaaagtattcaaattttgtctggtaaaacaaaggggttgcacagaaacagtttgttccacattgactggtcgtgttataacagctgctgtattctagtccttcatccagcaagtcaatgggctgaaatatcaggcatgactggcatttcaatccactctataaaaaaaaggcatcagtaatgtctttttcgagcacaccattttttgttcatgtaaaaccaagcgtttatattatgattttaatttctgccttaagtgagattctgaattcagtgatttgctatttatttaactattcc

SEQ ID NO: 316854 - DNA, 529 bp, Homo Sapiens
atcctcatcttgcttcctctgttgctattgaaaagtccgaaattgttctgaatcctaaaattttatttttctttcttaaaacttgtagtatcttctctttgttcctgggttctaaattttgcagtgatgtacctttctatacatatatatttcattcattatactgggtactttagtcactttaatctatcagcaaatgtcctggaaaacttattttgttgataatttcctgccttctattttttctgttttctcattatacaactttgctttttggatgatggatctcctagacttacctggtttattacttttctctcctatttttcatatcttcttctgggagatttctttaacttaatcatttaacccttctgttgaatttttcacttctgctgttttgcttttaatttgaaagagctctttttattcttcaaatatttctttttaatagtacccttgtccagcctgggtaacatagtgagaccttctctctacaaagcagttgaaaattggccaggcatggtgg

SEQ ID NO: 316855 - DNA, 2246 bp, Homo Sapiens
  misc_feature (95)..(219): n is a, c, g, or t
  misc_feature (236)..(247): n is a, c, g, or t
  misc_feature (259)..(410): n is a, c, g, or t
  misc_feature (415)..(475): n is a, c, g, or t
  misc_feature (492)..(612): n is a, c, g, or t
  misc_feature (973)..(973): n is a, c, g, or t
  misc_feature (1168)..(1168): n is a, c, g, or t
cccccacaaccccgggggagggtgttccccccctgttgtttttaaaacgggggccaaatagggaaactttttttgtccccccgtgttttcccccnnnnnnnnnnnnnnnnnnnnnnnnnnnnnnnnnnnnnnnnnnnnnnnnnnnnnnnnnnnnnnnnnnnnnnnnnnnnnnnnnnnnnnnnnnnnnnnnnnnnnnnnnnnnnnnnnnnnnnnnnnnnnttcccaaaaagtgcccnnnnnnnnnnnnaaattaaatttnnnnnnnnnnnnnnnnnnnnnnnnnnnnnnnnnnnnnnnnnnnnnnnnnnnnnnnnnnnnnnnnnnnnnnnnnnnnnnnnnnnnnnnnnnnnnnnnnnnnnnnnnnnnnnnnnnnnnnnnnnnnnnnnnnnnnnnnnnnnnnnnnnnnnnnncccannnnnnnnnnnnnnnnnnnnnnnnnnnnnnnnnnnnnnnnnnnnnnnnnnnnnnnnnnnnnggggggccccaaaaggnnnnnnnnnnnnnnnnnnnnnnnnnnnnnnnnnnnnnnnnnnnnnnnnnnnnnnnnnnnnnnnnnnnnnnnnnnnnnnnnnnnnnnnnnnnnnnnnnnnnnnnnnnnnnnnnnnnnnnnnnaaattgctaacacgtttattcatgaatgaagccaagaagaatttataaatgcattttaataccttgctgataaaatagtaacattccgtctttgcaatctgatacggaatacaggaagatactggtaaaggctttgatgtgcatatctatcataaccaggtaatgagaacacacacgaaccacctactttagtgttacaccataccaacttctcagaaaggtcagcttcaagctctactgggtagctgagtaaatagcgtccaatgtttaaagactggggaagcggggagaaagatgaaaggagtaagcagcacacacttcaaagcccacttttaagcacatgacattatgaatattaaanataaaggatgcaaacaaaaaaggcaattcagcattttcagaaagagcatttggcaatattcaacgcataaggagactgtgcttggggccatccactctctccagcttctcaaagtgtttccgggcattgcgaatgttgatcagagtggccgcagaagggatcgacggatctgacatgaccaccatcacgtacgtntttgaggtgaagatgtcgatgaaagcagcgaagttggaattcctaacttccatgctctggaaggaagcggccaatttactgcagctcagcttgaactgtttgatgatgttgctgatcttctcaaaccggtggacgtcgcgctgctctttgcactggtagtgggaaataaccaagaatgtagctctttcgaacagcagaacttcatcggcctcaatgatttgggcaaaattcctgaggttcatctccagctgctgaacgttgggaatcagctggtagacgatgctggaccaggctttgtagagcgtctcatcccagatggacgttcgaaaacaagcacactccagcgggcgagacagacgcctcaggtcttcctctcgctctttaaaaatcaggtcacgctgatcctcctgaaccagatccattttgtgcaccaggcagaagattttggcgtcaggagagttctggaggatggcctccagacacgactggtaataatgcatgtccttttccagttcgcggctctccacgtcaaacacgtaaatcaaaacttccacgttacggaagatattgtctcgctggctggtgaagtaattttccatgaaggtgtcctgaccgccacagtcccacaggttcagcaccaggttccctaggaatcggacgtgggagtgttccacgtcaatggtggcccccaggcgccgggtgtcgcgagcaatgtaattggcgaagattatcgacctcatgctggtcttccccgacccgctcttccccatcagcagcacctttttcttcatggctgtatttggcatcacccgccggggcaccgcggactgggcctgagggcgcggcctacacgcagcgccgagggaggggtcgggggctgccggggactcgcaggccgcgcctcgctccgctccgccgcgcagctgggcaggcaggagagtcgagagcgcgaacccggggctggagaggccgcggacgggctggctcttactcagatgggagcgcccgcggctgtcagtggcaacggctcgggagatacgctcgctttccgggagggagccgctgcgtccccgccccc

SEQ ID NO: 316856 - DNA, 670 bp, Homo Sapiens
  misc_feature (375)..(395): n is a, c, g, or t
ctactgaaacttattatttgccattaagaattgcaaactatactactaagaatgaacaacattctcttcattaaagcctttttcaaaacacacgagacaaagctcccctttggtcaaggtgtcccacacattcccactgcagctcccagcacagcggcgcaccatgaactcggacgcggagcccaaggaatggagatcgcaccagccttccctgcttccccaccccaactacacccaagggagaaaggatacgaggaaatacactatgtcttcaatgcttggggggctgggggtgtcctctgctaccaggtgggccggtcagtgccgactgtccggcgcgcgtcctggggatctccggctccccgacctacacannnnnnnnnnnnnnnnnnnnngagtcctgccaaacgccgcagtagctgctcatgagaaaggtgcccacgctccccaagccctcctgtttacatttcctagtggggcaaagctactttcccaggacaggcagcagagcagcggggcagagtgcactctgggacccgggacagcaggttacacagggtcaggcggtggtgggtgctggaatcggggctgaggttctggaaatgccaccaggtgatgccaccctgtggtgtctgcccaccacacaccacaagactcaagtggttttccc

SEQ ID NO: 316857 - DNA, 989 bp, Homo Sapiens
  misc_feature (335)..(346): n is a, c, g, or t
gtaaatatccagggaaccctgcccagactaatactgttggtggcataagagaatcaagccattctcaagagataacttcataaccagaattgtctgttggctagcagctgtcacagataggcagggcacttgggatatgacctttctgtccaggtgattcacagactagacctttcttatcctcctcctagagttttgacttgggactctagtgttaagatgatgagcccgtgcatcaggtccttctgcactttggtggaagtctcccagggtaggtttcctatttgaaacagtggaatcatgtttccagtgataaagtttaatgacctcatccnnnnnnnnnnnnctcatctgccatttgtgtgtcttagatgggttttaattgcatgaatgtggctaatgtggttctcagaaattggtcagtatggcccgacatagcttctgctctgtcttactgactcaatacctttaggatttgtatcagagtttggatactagtgttagtggtggtgtcaccactacttaattgggagataatgaaaccaatcatggatgctgtttttattgggcatgtcatctaagagaggagaaatagctgggttttgggtctaattatgaataaggactgattcagaaaacgagtttatggtaggtagactaaagtttcacatcagactgtaccattgtgatttagacctatctaaaattcagagcatatcatctgggctacctcagggtcaccacccatgtattgggcttagtcaggattgacagatacattctcagctggcctgtcatataaaacatactgtcattgagcttaagctccgcttgttctgaggtttcacctccatgtgtttcattggtgcaaaagtggatctcttagttggtcacttaattctttctttttcagaaagatagtatgttcactggtatatttggtcactcttagaaccttccttcacattgttttttatgggacccatgaa

SEQ ID NO: 316858 - DNA, 470 bp, Homo Sapiens
gacccataagatttaaattgacaaatataaaatgattggctacaatgtaaaaatacatttcccagcccccaaacaaaacacaagtatagtaattataaaatttttcgtactcgtcgagttcatttctcttataattcttgagaaccattctaagcaatctatttgtataaaatataaaatttatcataactgttaatttaaaaattattttaaatttgagtttattgaatttgccatttttttgtacataacagtggtttctggtcccaagttccccttgaacttatttactacaatggtctttttactcctatttatttccttctacaatagaaaagaaaggctaaccattcatgggtcccataaaaaacaatgtgaaggacaggttctaagagtgaccaaatataccagtgaacatgactatctttctgaatgaagaaagcaattaagtgtccaactggatagagatc

SEQ ID NO: 316859 - DNA, 1434 bp, Homo Sapiens
ttggggaggtgctcactcaatgtttattgaacagcgaatacagaaaagacagtccctggagctctatatgtggaaagtagtccttctggacagaaagaatattcgtggtccatgtggtttgagtctgttaagaaggacactaaggcacatggctggtgatctttgcgtcatagacacgggtgagctcatggtggaactcctccttgtctgtaggtttccaggctgggcacagaggtgagggcagaatgttgggggtcccagtggatctccccacaacttcctccagggcaggatttccacccaggcccaggctgcccgttcctctccttctccgccagtctgcgctgcggctgccacggctcacaccagagggatggggtaggaggcgcaggcagccaggccacacatgttctttccgcgctcgatgaggaagtacccgttcattccccactggggaccccaagagtttttcacgatccagtaagggatcccatttttttctccatacccaacagccagtactgcatggtttactttatctggagttttatggcaggaagtactggagtagatgcccgttctatacatcatgaagtcctgagtcccctcaagaggcaaagctcacagggttgtagagggccacagcctccaccatcgcttcctcgtcatagattgtgatgttggctacatccttgacaaagccgatggcctttccaggttggaacttgcaataaccatccttgccctggtaggggtaggtgtcttcacccatgatccccttgttgtacaggatatactcgaaagcctggctggggagacccccttggcagccgtgattattgaagtcctgggcgcagtccaccagctgctgttccgccaaggacagcatctttccggttgcgatggcgatcgcagactccagggccccagtggtggagaaagtccagcaactgccgcaggcaccctgatttttcacaggtgagacaaaatttccttttttccgccagtccacggaaggtgggtagggaccagtacctcgaaggtagttacttttggtggctgagcaattctgaggctctgaccagagatacttgtgttttatttcagcaaagctcatgtctgaaaattggttcagtgccattttaaatgtgtggttcccattgttgtgggcgtttatcttcctccagttgctggcaaacgtctgcagcctgtggtggtactcctccgtactgtaggtcttacggtgcttagacatccatgacttgaagtgaaacttctctaaggagttcacggacagttcggcggcaccgcagacggggactcccaggagccaggccccggcgcagagcagcggcagcgtggcccacatagcagcgctggcggcttggctcttgcgctcagggtccgcggaggtggcggcccagagcgtcaact

SEQ ID NO: 316860 - DNA, 528 bp, Homo Sapiens
tgcggacaattgcttgcattttacaagcaagaaaacagaaccaaaagaatgaaggcatgtgtggatctggagttcagaaccagagggcctgcctgccagtttgcgctctccctcccatctcctgcctcgccaccatcacagcgactgagacccagggataatatgaactcgtcaaagggatgtgctgccagaagggctgccttgctgggcccactggctatccgacagcatgagagaggcctcctcatcaggacacattccccatcccagagggggatcggcactcacgattgtgatgttggctacatccttgacaaagccgatggcctttccaggttggaacttgcaataaccatcctgttgaggatgcaaagggcatgaaatacaggttatggacccgaagtctcagcctccccacgcagttcaataacatttactaaacaaaacaagatgtgccagggcctgggggatgggataatttcagagagaattaaagcatccttgtcctcaaggagcttagggtctggt

SEQ ID NO: 316861 - DNA, 1405 bp, Homo Sapiens
  misc_feature (391)..(404): n is a, c, g, or t
  misc_feature (1238)..(1238): n is a, c, g, or t
  misc_feature (1329)..(1329): n is a, c, g, or t
taatttttagttgatttctctacagagcttagcttgtgtagttatttctcttttactgttgctttggtgtgtcttgaagtttgattgattatttttggtcattgagttcttagtgtagtttgctagatgattattaagattcttttgtgtctgacacttgtggtgagttgcttttgaaatctgttgagatttccatgtgagaactgataatcaggctcttgatctgcttccctaaattacttttttagagcccaaaccccaggtttagggtgagggtttgtaatacaaagaaacacttccatcacttctgcccttaacccttgcctctattacctaagcttagtaagtagttttcttaatattgtccaatgtttggtgttatctgcattgnnnnnnnnnnnnnnaattgtggttgttctgacgtgtgaaatttaaggaaagagccattttttaaaaatgccgagcagggcaatgcaagtacagccaaatattagacttgatgtgcaatcttcggtcctttttaatctggggtattataggcagtactttaaattgcaaagtcttccgggcctattttcctctacatttttgtaattaactctgggggcttacttgttttggcagtactgaaatcaaaggagctggttcttcttttctcccaattattttcatatgaaagcacctacaattagcctgttagtcctattcagatacatcaaatatcagtgaatgctttactattcgcacatttaagcatctttgttttacataaaattagagtatgaaaaccagtgttcaattttttatcttgttgagcttgtaaaatgccagcaatttaaaactaggacttttccccccataagccaaggaggtagaattactaatacaagggttaaagaaggtagattttgttttcaatatttgggtaatattagaaagattcttcccacagggaagaactagcaagtgtcccaattttttccaaacgttggggaggggaagattcactgtatcatgaaaccctaagggtttgttgcacttcctgctttttaggcctggataacagtatcaccatccttatttacagaagggtaaaactgactcttaatgagaaaagctttataagttcaagggctgtaaaatatgaactacttagggtcgtttgccttccatgggaacttggctagacttagaaaaagctgtttgttgtgctaatgtaaaagtgtcatacaatttanaagatttttgaagatggtaaacttagaagaattctatgttctgaaatgcacacttttagaatgtttttctttgaaaacaggctaatagttntttctttttttgacaaagtttcagctcctctttaaagttattgtgtcatttttctggtttaaatttcccttatatt

SEQ ID NO: 316862 - DNA, 647 bp, Homo Sapiens
ccccccccagtcaagaagggtaaagaaagatttctcccccttcatgtttaaagggaccatggccctgccaatattaatccacttaagtttgtggtaatttcttatgaacagactgtgcaaggaaattaatacacagcctagttcttaaaactgtcaccagtggcaaatggagatggtatagtagcagaaggaaatgcagtggctggtataaagtattagatatttgaaaacattggaagaatcagtgcctataatgacaatggaatccaattctactgccttaacgtagtctgacactttagaaaataaaatgaaaacctgacagcaatttacaggccatgggaaatcaaatgtggagaagccagtgggccttcttgcagcatagaaagaggctctcctctcctaggtgaaggcagagaaagctgaccaccagtcttaggacctaattgtcagaacagcagggctccaaggaaagctaaactcccagccaagatagatctgctctggcaaggtcaggaccctggtgtgaaagaacagtactctgatactaggatggggacatccaggttgattccagagccttcctttcctcaatcttggaactcctaattctctaaaccctctgggcctgcagaggtgggccaccc

SEQ ID NO: 316863 - DNA, 623 bp, Homo Sapiens
gccatgtggatcgcatctttgaggatgtcaaagagctcactggaggcaaagtggcagcctacatccctcagctggccaagtcaaacccagacctgtggggtgtctccctgtgcactgtggatggtcaacggcactctgtgggccacacaaagatccccttctgcctgcagtcctgtgtgaagcccctcacctatgccatctccataagcaccctaggcactgactacgtgcacaagtttgtgggcaaagagccaagtggcctgcgctacaacaagctctccctcaatgaggaaggaatcccccataaccccatggtcaatgctggtgccattgttgtcagctccctgatcaagatggactgtgacaaagcagagaagtttgattttgtgttgcagtatctcaacaaaatggctgggaatgaatacatgggtttcagcaatgccacattccagtcagagaaggaaacaggggatcggaattatgccatcggctattatctcaaggtccagctgtgttctgtggaggtcacttgtgaatcaggcagtgtcatggcagccacccctgccaacggtgggatctggcccatcacaggcgagagtgtgctgaatgctgaagcagtgccg

SEQ ID NO: 316864 - DNA, 777 bp, Homo Sapiens
gaaacaaggctgccataagtagaatgggaatcccttcctaaaggtgggtgtgaacctcacccacaagctgagctttatagagcccttgagaaaccctcctgagcactaagcagttggggtgctgattttcttgtacttttgaaaaattaagtcactcccagtttcctgcataagttcttgaacagaatgaaatcacatctccattcaaaaaatgtctcaagcatctactgttgtgtaaggaacttctgattctgattgctgttacttgaataggaaatggttactcattctgtataaaagttttgcaagagaatgaattttttattctgtaatcaaaaagcaataacttgaaattcactctgtaatattataggtcagaattatacaagttttaccaaattgttacacttattctccaagctgccagaacctggtatctgtatctgtaaaaccaaattaacttttgcttaaatgggaagtatacatatatctgtatagatacattacccctttacatgtttaacatacacacacttaaacacataaatactagtgtgattatatctttggagtttgcaatatagcataaaggacaagtagaactgcacattaagattacctaccgaagcaactagatgtggctgggacacaatcaaaggaggaattttgtccacaggaaggtgaggaaattccaaatgaagcctagatcttcagtatcataaggaagcctgaaatggaggatctcttgaaaccaagtgttcaagaccggcctattaa

SEQ ID NO: 316865 - DNA, 1007 bp, Homo Sapiens
ttactacacgctgcaatgctttgaactctacttgagttcgactgaatctttgctaagtcaggcaaaactcaaaaaatattttgcaacactgtttccaacgtaaaaaaagattcaaactctcacttctccaattgtctttctagtccttgaacattccaacaaaagaatggattgcatttatatagtttttaggtgggcttaaggttttggagccacattgccaaaaacagacaaacagacaaaaagaaacacccttaactcttaactcaaatttacattttactacataaaactttcttgctctccaagttcattggctaagtaaattacttgacaatgaaaatgtatccacaagagtaattatgctaaattttagtagtggttcagaagggttgttgtttgaatgcaactgctgtttctttttgtagtaaaagatttgtctaagctcataagacgtctggacatttctactttgagtaactttgataaacactgcggcattttccagtggattcgtgtaaatggccaaaggaaaatgttctagctccaagatcgacttcctcgcgctgtgcctgatcccaatcccgcgtctcccgagggccgggccgcgaccgcactttccgcgctccctgggggcctgggcgccctggggtgcccgggtcactttccgcacggtctgacctccgtcccctccgcccaggcctgagcccctctctcccggcgcagcttctggatcccgagcgcgggtaggttcaggagcgaagctggcggaacccacctgtattttattcacatggtttcagcacttttacctcggccgatgaaggtagaacaagaaagggcatgaaagcagcgcgtcgttccccgtaacctcctctccttaccagaaagtcccggccgggtaggggacgcggccacacctacctgcgccaggtgaggcgagggcgggcgcagcgcggggccacccgctcctcctcgctctccagccgccgccggggtggcctcag

SEQ ID NO: 316866 - DNA, 569 bp, Homo Sapiens
atgaaccatatactatctcaaaaccagagatcttccacatagtgggtgctccatcaacatgtattccagaagaaaggtggtaattcttaaaagattattccacatagacacatgtgggcacatgagtcaggctattcccatttctactcttagttaaattattatgcttgggagcttaaaaaattattcaacaattcatgcataaaaagcaaatcatctactaggggaaatggaaaagaatctggctggcttgcatgagacttctctactgaaacattactcagtgctataagactgaaattatgccaattgtatcaaaaactccagaatcaaggaggacattctaaaaggttactagagaatatagaacaataataagttataaaaaagtggttgaaaaactaagtatgaatgttacaaacatggacaatgtaaaaatagtaaaatgagtaaatattaggatgtgaggaggagaaaaatgagaaatgaaactgctaatgtcataccaaagcatggttaaatatatcccacctaaaactgaaacaagattgtaataacagtatctgtaa

SEQ ID NO: 316867 - DNA, 1462 bp, Homo Sapiens
  misc_feature (97)..(157): n is a, c, g, or t
  misc_feature (551)..(551): n is a, c, g, or t
cacacttcacaataaaatttattttgctttggataccatacttatttttcacaaacattctacttatattaacctataattggcttattcatgctannnnnnnnnnnnnnnnnnnnnnnnnnnnnnnnnnnnnnnnnnnnnnnnnnnnnnnnnnnnnggtaataaattaaaacatttcttagtttcaatctcaaatgccataaataccaacaaatattaacccaaataaacaaaaactctttggaatcctccatcatttgtaaggcgtctcaagatatcatgaaaccaggaagtttgaagccactggtgtccccactgaacttgaatactgaggtagatctggtccattactccttggctcagccaggacctcaaatttcagccacactcagggactgagtactgactccttgcccactggcagggacacctggagccaaaactacatccaccgtgcatccatgttcttcattcatcttcatcccaggtccaggcctgtggatgtgcgctctggaaatcctggggctgggtggaaatgagccatcatctcncaggtccccttagctgttatggtgggacttagccacccttacaaccttggtccctcccagctctctggttccacttcctctatctctgatctgcatatctggttccctctcctctctggtggtcctgtggattcctctctcctcttacatcctggtgaaccctgtaggcctcattccaagtccatatcttctggtgccaactggaatactgggcttaatgtggtcaccctgatgttaaacagcaggtttgctgcccatcaacttctcacactttcttcttggctggaagctgtgtacaaactagttccctatgcctggatcccatcccatagttacaagcaaaggaactactaaaaacacagcctagtgaggaggagaaaactggggctgaggtctgtagtgggtgtgaaagaggcagctggaagatgttctcttgtgtgaccagaggggaggagggcgtgtcttccaccaggggtgttgtgcggtggctgctgagatgaccagggcttgtctacatggctgtgagaccaaggaattgattctataggctctggtgggtccccactctgtgaagtgtcaggccctcttcaggcaccgtgaccccattggctcctgtgagtgcagggcagatgaagatggggctgtcctcacaccccaacctgaagaagggcctcacaggcacggaaaaggctgaacggggacatgtgtagatgtgcgatctgtccctcatgttgtagaaggagacatctccagcttcatagtccaggaagacgcccacccggcaaagggactccttcaaagggagaatcctatcaggggaggacacggcccggtattgccctttatgcatctccaaggtccagaagccattctgaggaatcagcaggacctcccctttcctctcaacactg

SEQ ID NO: 316868 - DNA, 1849 bp, Homo Sapiens
  misc_feature (1232)..(1249): n is a, c, g, or t
  misc_feature (1547)..(1547): n is a, c, g, or t
  misc_feature (1701)..(1701): n is a, c, g, or t
  misc_feature (1808)..(1808): n is a, c, g, or t
gaaaattaagaaaaccttttttatatattttaccaaggaaaataacaaaatgttttgacaagtaccacgatgtgaaaaaaagcaccggttgaccatggagtacaactgtgaaatgcaaggcatgtgaaattcaagcattcagagaaaagccacactgagagcttgttagaccatgaatctggttatactatggggtcaaataatgaccctaggtatacaggtttctctttccctcgttaaaacagaaaaaaatttaaaagatgctctccaataatagaattataatgtgatttaaatattttttaattactcatctacacaaatgacctttgatcaagctcaggcaaaatataagttgcaataatatctacacgtaatgtgaaggttttaaaaaaataatacaaagttcattcacagtgcacaagtgaaaacaaggtaagtttcaaatatctcaacaacatatagccatgatcattcaaaaggtaagcatattttaaagcacatttccatactgctagagctataacatagaccagcttagagaactgagagaaaaaccattactttgatacccctttattggaaagcaaaaataccagatttctttcctcagatacatacatctagaataaataaatacaaaattattaactaaagattttatcttttaaacctatactctgactctcatcctatgtcaaattcccacattgtgaggctgggaagcaccactctctgccatgttccctacttatttttatatcattcatttgcatttggaggctgaataatttgcagaaagaagtctgcggaaaaaactgtagaaaatgggaatacaaagagggcaatatcataatctactagaaagtttgactgttccacccgcaactatagcacagtgggttaaacggggtaaaattgaagtcctagccaaattaagtttggatatcatctatttacagttgttcagtcttccatacagagctttgtccactccactctttgcaaattctgacataaaaacaaatgattctgtggctagttcgaatttaacttctgtatatttagtatctttttgtttaaattagaatcatttctgacttttgaactacagacacaagacacagggtttactcttgagactgaattttattttctttcaataacatctgcagttgataaatacctagctttcaaggaaaaataaagcatgcttaggatgagatcagctnnnnnnnnnnnnnnnnnncccatgaaagaagccacattactgtggggcatggagagggcgtcaggactctcatgtgggacttttagtaatattaattgttatcatctattcacatacgttacaatactgatctcctcaaagaaatgaagatctccctccatctctttttaaaacttatacaaagggatgtgataacagtagtgactaatattagccttttccttgggagaaatctgtggaaatacagctgaaggtctttctttctatagttgacagaagtaaataaatatggtcctgttttattctttagaaatangactgtgtagttgtaattgttatgcgtttacaactgcaaaaatattcattaacatgcattaacctgtaagcactggttagaggggtgtacccagtaaggtcatctcctaatctgtgtatagaacataatagagctctcctccctttctattcantcctgtccctagacctaaaagaaataaaaaaagttcctgactatgcatctaccagcgcatctgtgctgcttaaggctggacctacttttcttatcaaacagtataanacaaacatacattgaattcctggtttcggaagtattttttc

SEQ ID NO: 316869 - DNA, 788 bp, Homo Sapiens
  misc_feature (488)..(501): n is a, c, g, or t
acatacacgaaacacaccgcaatgtatagactaataagccaagagctttattgatgcagcaggcactttacaatgagcccaagagtgtccaccttctctgggaagacaggatgtctgtacaaactcttgggtttttttccacttcaaaaacacaagctctcccgtttaccacagcccttggatctgcacctgcccaaaccatccctcccccagtgcacacaggtgcatctgaccaacaccagccgccacgctggtagaccgtcaaaatgtcagttctgcagtactcggagacaaaggcatagactatcagatcctaaacaggatttaggaaacagacgattttcccctccaccttgaaaataaaatacatttcagcagatacatgtcctgaaatagtttacttgggagttcctaggaagatggtccattgtcaatcccttcttcaccagcctgggcatccagaattcttctcaaggtaacatgagtcnnnnnnnnnnnnnnaaacagtctttcttgctgtaagaactcttataatggagcctagtcctcctactgctaaggccttttcgtgccactggagtaacactgcgctgctattttctgtgggcttctcaaagcctttataaatgtacttcattaacaagtcaacgccgtttctgtccagtgactgcacagcctgctcaatctcactgctcttgaagtttgtgagcactttcagcaccacgccctgggctcgctccttcacagcttgattcttggtgttgacgggagagttccgcaaggctgca

SEQ ID NO: 316870 - DNA, 652 bp, Homo Sapiens
tgagccaccgtgcctagcctgaaaattttagattatttttaaatgacctctgttgtcagcttttctttactatttttacctgctttaatattaactttattttaaattctaagataggaattttctgtcatttaattgtgtgcagcattgtcatatcacttctattactgtcctgaattgtgaactgagacttattgttatattatttattaaataaccattaggtgccaggcattatctcatttaattctaaagatattttactcatttcactcatttatcacataataaggaagttgcagaagtggaattgaatcccagccttcctcactttgtagccatcctttcacatgtgttacccctcatgtggctgactaacagggatttgagtggtgttgagggtggtcaaatgcagtatctgctccaggtgtctttattggataccaaacgggtaattcataattacaccaatcttgatttcaatattttgttacttgcttttagaaactaatttattataagctgagcacagtggcacacacctgtattcccacctacttgggcggatggatcactagagctcaggaattctacactgtggtacactattagtgcttatgaatagttagccaggacaatgtagggagacctg

SEQ ID NO: 316871 - DNA, 678 bp, Homo Sapiens
ggggacatttgtaaccattccttctaaaggattttaaaaccggctaatgttgaagtcagaacacagaaagtggcagattatataccaattccactgtttaatgcatgtagatttggtctacctgaatgatcaaactgtccagcatgtctttctatgtgtgttggtatgcctaaaagagaccagaaataataacttgtgtacttcaaccccacttgatcatctcatcagaaataatcgtggaaaaaacagcttccttagaaaacagttctaaatttttgtcaaaataattgaccttactactttagcaactggttttctattttgaccttgtatcaatacaagtttagttgaggtatcaactaaatctgagatatttttattacttagaaacagtaataaattattactagaaataaattattactactattattactagaaatagtaataattactatttctatacaaatagaaatagtaataaatagtagtaataaatagcagtaatatattattactatattctatataaatagaaaataaattattttccaacctagaaaacaaaatatgttcccatattctcaggcacactaaaagaacactgtatccttgtttgcctatagagaaatattgttatataggctattaagtgaatgtaccttttttttagatcga

SEQ ID NO: 316872 - DNA, 910 bp, Homo Sapiens
aaaaataaggatgtttattaaggacatttctagcccacagctagggctcatactcggctctatgagcagctgtccgacctcatccccattcaatgtgaatgacattagggaggccgggcacaggtagatcccactgcctggctaaaggggccatagcaaggggtccctcccatgcaaggggtctctcccatagccaggtatagaatagatacactgctgcggatgaagagggaaatctcattggactaatacattcccctacaccctgcctggaccctctcattcctccccacctcccaagatgatgggtcaaaggtacctagcactattatgtggggtaccaaaggaagcccctttatttgtcccagaactgtgggaaaaggatacccttcccttctcagccatctcaggcctgggggctactgaggtagagggggaggggccaggccactctaatcccccttgtgggccctgctctggacctgccccttagggaagcagggggcattttgctggtatgggaggctgggacatcagcccagactggaatgctgcagttcttcccgaagccacgagggcactggctgtccaagccggctcagcagcttcgacaactccaaattatggttccggaaaaaatccgtaaggaaaagacgggactcagtgtccatatctggatacctccggcctttgctccggcctagacagcgagtcttaccaccttcaagtccctggcaccaaaatcccttatcatcatcaaacccaggaacttctggatgctctccattgaggctgctgggttggtacgcagctcttgcccatccacaatcagcaactgtccagaggggtagtaagtcagccagcgttgtagatgggtagaatagtagccagggacaagacagcggttctg

SEQ ID NO: 316873 - DNA, 1137 bp, Homo Sapiens
tccattatggaaatgaccggctgggcctatacacctttgagagcttggtgcgcttcctccagtgttggacacggctgcgcctacagacccttcctcctgtcccacttgcacagaagtactttgaacttttccctcaggagcgaagccccctttggcagaatccctgtgatgacaagaggcacaaagatatctggtccaaggagaaaacctgtgatcgtctcccgaagttcctcattgtgggaccccagaaaacagggactacagctattcacttcttcctgagcctgcacccagctgtaactagcagcttccctagccccagcacatttgaggagattcagttcttcaacagccctaattaccacaagggtattgactggtacatggatttcttccctgttccttccaatgccagcactgatttcctatttgaaaaaagtgccacctactttgactctgaagttgtaccacggcggggggctgccctcctgccacgagccaagatcatcacagtgctcaccaaccctgctgacagggcctactcctggtaccagcatcagcgagcccatggagacccagttgctctgaactataccttctatcaggtgatttcagcctcctcccagacccctctggcactacgctccctgcagaaccgctgtcttgtccctggctactattctacccatctacaacgctggctgacttactacccctctggacagttgctgattgtggatgggcaagagctgcgtaccaacccagcagcctcaatggagagcatccagaaagttcctgggtatcacacccctttctgaactacacaccggaccctcaggtttgatgatgaataagggattttggtgccagggacttgaaggtggtaagactcgctgtctaggccggagcaaaggccggaggtatccagatatggacactgagtcccgtcttttccttacggattttttccggaaccataatttggagttgtcgaagctgctgagccggcttggacagccagtgccctcgtggcttcgggaagaactgcagcattccagtctgggctgatgtcccagcctcccataccagcaaaatgccccctgcttccctaaggggcaggtccagagcagggcccac

SEQ ID NO: 316874 - DNA, 713 bp, Homo Sapiens
tcatcaaattagatattgtatatttttcactgtaatttcctctttaactaatgagtaatccagtattttcagcttccaaaagaaaggtatctggccaaaatccagtagcagaaagcaggtataccctttcacttaaaagaaaagctttaaaaatgaacaaaacatataacactttagtctttagacatgaaatatcggttagttctgagacaggagtgtgaccctgtctcagaaaaaacaaataaatccaagaatcactgtagtgtgctacagtgattccttaaaaaagacgaataaaatcctacagagttttacaattgtcccggcttatattctagagacagtttccaggcctcagtgcagggcaagggaacccagatggagcctgatggtcaccctaagttgagatgatgaagctaagaatacaggaaaatgaagaaagctagaattcgtaggacagagtaccaaaacagagacaactatacagacaggaaggggaggggggtgtcccatcttcatctcaaaatttcagctcaataccaatccccatatccttgtgaggaaacacacaaggcctagagcagagtcaccagaaaggaagagagagaacaattaccaaagatttctaagggttgggaatagttcatgctctcatcggccagactggaaaacttcataatttaagagacaccaggtagaatactcagaagaat

SEQ ID NO: 316875 - DNA, 669 bp, Homo Sapiens
  misc_feature (508)..(524): n is a, c, g, or t
tctgtgcaaatgctttaattggtggattcttagatacagtggttaatccattgcccacaattctttactaattccgaggcacctcatgccaggaacacactttcccttccactaaacaaaggtgaccacgtttcagagctctcctcttacaaggttcacgtccttcgttaggccgaggaccatggtactacaaaagaacatttcgttagctgaagtcactacgattggcgagaaacatccgttacttcagaatacgttaactacaaaatatattgaatttccatatgtattaaccatatacatgtgtaactattactaaatgtagttcagtcattacaaaataagacattctgggagcgggctacaaatattcaaaccagctgaattccccaggtaaggccccgtgttataaacaaaccacaaacatcagacgtcagaccgagagctcagtgactgcagggtgcgtagccggaaaagccaacaaggcactggcaccgcagagtcgctnnnnnnnnnnnnnnnnncactgccggctcggggggcctttggaagtcacctctaacttcgattcccagccaacagcggctggggtcccacacggacctggagggtgccgagctccccttcccaggggcctggaccgccctccctgcattctttgctcctttg

SEQ ID NO: 316876 - DNA, 666 bp, Homo Sapiens
gttccagtggccctgagccaagcaagaccccaggaaagactctggaaaactgaagggggctggatgtcacccacagtacataccttgtgcctgtaacgaagcaggcactggtttcatttaggaaaggtattgtgtccgaagccccatttttagactgttaaaagtatacaaacagaaacgaacaccgccatcattaactgacaatctgccttctcttcctactttctctggagtctcaggtctgcccagtaacctccagaatgcccagttgctttgtggtcaggcttcttttacctttgcaggcccagggcactcacagaccaggcaagacttttaaatgagaacatcaatttgctacttgctttaatcccaccattgccttaggtgcaaagcacacttttttattttaatagaagcccaggcttgcacaacaccaccttcatgaagattggtcatttctgaggatgacaaaaccacaaagtttattgagattgctccttcattgacagtctctaagcactttaaaagcaatgaccaggcagactctgtgggatgatgacaagggtcctcgcgctgcggcagttgaaagtgtgtctgagccaggctgtctgtggggagaccccaccccagccctgagacctgggtgacttggcaccttgtcacggc

SEQ ID NO: 316877 - DNA, 614 bp, Homo Sapiens
gtaaaatggagcagccttgcttgtttggggaacctttcagtctccccaactatggactatcgggttcctgattttccaagtccctgctgagggtgggatgttgtgtggatgatgtctttcccctctgcagtggttgtggcacacacagacgtgtgaaccttgaccacaggctcgacacaccctggtgtcatcgggtgggttgtgttccagtggccctgagccaagcaagaccccaggaaagactctggaaaactgaagggggctggatgtcacccacagtacataccttgtgcctgtaacgaagcaggcactggtttcatttaggaaaggtattgtgtccgaagccccatttttagactgtttcttcctactttctctggagtctcaagtctgcccagtaacctccagaatgcccagttgctttgtgggcaggcttcttttacctttgcaggcccagggcactcacagaccaggcaagacttttaaatgagaacatcaatttgctacttgctttaatcccaccattgccttaggtgcatagcacacttttttattttaatagaagcccaggctttgcacaacaccacctttatgaagaatgggcatttctgagg

SEQ ID NO: 316878 - DNA, 622 bp, Homo Sapiens
  misc_feature (46)..(46): n is a, c, g, or t
  misc_feature (129)..(129): n is a, c, g, or t
tttctctataaaccaaccatgcatgggcttttaaaggagaaaaggngaagagtggattgacagagaaattaactgttttaggatagaggttaggaaaagactgaagagccagagaaaaggcatcaatcnccagttgttaatccacgaggcatcccccagacccttctgtaaaggttaatgaaggcagtaaggcagttatctctgtttcgtgcactgatgcaatccaagcttccacggtttagcacatagtagacgctctataaatatttattgaatgttgaacgatgagagagtaattaaaaaccggtaagttgatatcataaatacaacgacaacggctcccctatcaaatgtttagtgttcccagagacagccccattgttctacatctcgttatactctggccttttcccgtttttgtcattcgaactcatatacatattgaaatcgaagcacacacaaatccctgaaatgacaaacttaaatgctatccaaaggaagttacattaggttgctgctttgaaaatgaagtcaactcctaatgggttagctgtttctgcagcattctttcccgccttcttggagttgaggtgagggattaaacaatcaaccttctctctcc

SEQ ID NO: 316879 - DNA, 1080 bp, Homo Sapiens
  misc_feature (29)..(29): n is a, c, g, or t
  misc_feature (33)..(33): n is a, c, g, or t
  misc_feature (50)..(50): n is a, c, g, or t
  misc_feature (83)..(83): n is a, c, g, or t
ttagtttcaccacttttgagagacaatgnttgntgccggtcaagtgagtnaaagattgtcttgctgccttgagatgggatgtncctggccaacacccactttctcttggttgtataagacagggaccttaaaaggggaaaggatgggaggaggatcatcctgcagtgatcatgtagggcttcatgctataaatggttttgcatttccggagatgaaacaagtctcttcaccacaggactactgcagatcatagccctatggtctggctggttttgtcaatctggcagttcagggtcagtgcaaaggacatccccaacacctcaatcacacatacacagatggtgatgattccgatatacaggaaattggaatgaaaccacagtcttgctttcgcatagcaaccctccacttttcgatctgaggggcaagatgctggtgggccactggtccaatcactcgtgccatttataccacaacactgcagaaatgactggatggagtcccacgctgccttggtgctattgtctgagtggtaacggtggatgctgtcggtcagacccttagccacatactcattcagcttctgttcatatacaaagagcaggatggccaaggtcacctcagcaaggaggataatcagcagcaggatgaagaacgacataagcagacacttgttttccttgatagagcccatgcagcccaggaaggcaactaccatgataatagagcccacgatgacaaacacattgcccagcgtgagggaggggaggttatggaagagcactccgaagttgttgtggatcagcaggtagatcccaaagcccaaaatgcagcagccacagatccaaaagagcaagttgaagaaaaacaggacatacttcagcagtttcaagctactcatgcccatgccgtgatattcttgcccttttccaggcaccgttcctcagtcctttcggcagaatttagtgattatccttgaggtggccgagacaaggctggtaacacagatatccggggctgtgttacaggatcccagtgtccttcaagaccaccttggatgtttcttcagtctgtcctccc

SEQ ID NO: 316880 - DNA, 734 bp, Homo Sapiens
  misc_feature (709)..(709): n is a, c, g, or t
cttttcagtcgctcacacatggctttctctgtagaaaccatgaccatgtagagaagatgccctgcttgaggaagctcatcttgctaggcagaaaactagagaagccaaacttataataatcttctcatatacacaagtaccaacccatcctatatctgaaattcaattgctgaattttatacagtgaaacctccctggaaagggtgactttcctttcaatcacttattgtttcaaggaatctagaaaaaaagacaagaaaaacagaggcactcaatatccagagcacagtctcaggtttctcacctatatatgttagctacgagtagtagtaaactaaagccctcagagagaaacagcacctccattaataactgcactggtacctttcaattttgcaggtttattctgtggcaggaagaggggaaaaattattactcttttgtttctaggatggttgtgctggacatgacccaaaacacgcatgcattttaccccacaccagcctcttcagtagaggaatgaggagagcttagctgggtaaaggtgagctaaaccgtgctcagaagagatacacttacccaaaagagcaagttgaagaaaaacaggacatacttcagcagtttcaagctactcatgcccatgccgtgatattcttgcccttttccaggcaccgttcctcagtcctttcggcagaatttagtgattatnccttgaggtggccgagacaaggctg

SEQ ID NO: 316881 - DNA, 1639 bp, Homo Sapiens
tctattagctgtgaatttattataaataccctcaagaagtttgccaagcatttcaaaatgctggtaaggctgggctagtatcttccatggcaagatcctcaaactactgaataaaatacacttttaaatcaatataggtacttgattaatttccctgaaattatcaacatcattaccaaaatcttccaggattttgtaagatttgattccttaaatacagttttaaagttaaacttatggagggaaaaaaaccctcatagattgactgtaaattttacgtccttttttggtccctcaatgaccaaagagaattttaaacaaattatgcttcatgtttcctggcttaataaaaagctacaatttttattatccaaattaagaaatattatactaatcaaaagctattaattttgaaatgtctatgtatgtctgtctgtaggtccccttagaacctttccaaacatttataatcaagagattttaatcaattatgtactagaatcatattaaagaaaaacttattttgcaaaaataaaatcactttccaatatgcttgacagaaacaagctattcattttcatttgtgttccactgaagacattactgaaatctgtccaatggtttatttccaagtggtccactatggaattcttcggaatgttttaagattggctgtagctagagttctgacttccatttggaccctgctctccttcactgtttggaggtggttttggttttggcatcttactaagaatggttgccatctcttttctctcatcgaaattcttccactgctcatatagttttaaaataaccctgattatttccaaaatcttttcccatatccacagaaagctcagcaaaccattgcctggcatctttctgctgtacaacacaggctacatgtaggcaagctaaagctatcatgaaaggaggatacagtaggcaaaggtccgttctgtaggtatcattcactatcctccatgcaaggggaagcaacatgtcttcttggcccatgtcctgcacatactggagccaaggtctattaaggatgatacactatcaagcaaacaatccattagttctaacagatagaattcacattctaatatatgattcatcctataaggaaattccttttggaaaggcatatgaaaatctagtttttaatacagaagtagcagcagcaatcaatcttgtatttgaaactactcccaaattcctctactttggatgccaaaaacacacatgtaggagccattaatacaggatctatacttttcagagaatacctggcatagaatctcttgaaatataccgtagcagtggcaataacttgttgtcttaatttaagatgttcacctaatgcttggataacatttgtaaaaaatatttgtaacttccaatattcttcctctgagagaaactttaaatccttttggcgctccttcaacagatcttgtttatccaaaatccattgcaaatagtgggagctctgccaaaagttccctgccatggaacacagcttgccctgataaaaaagcaccagccggcggagcggcccgcggagcgaccatagacccagcccgtccggtaaccgcgctcctcgatcaaatcagctcggctcgactccccc

SEQ ID NO: 316882 - DNA, 930 bp, Homo Sapiens
cctccgggctgcaggaattcggcacgaggccaatcttaaaacattccgaagaattccatagtggaccacttggaaataaaccattggacagatttcagtaatgtcttcagtggaacacaaatgaaaatgaatagcttgtttctgtcaagcatattggaaagtgattttatttttgcaaaataagtttttctttaatatgattctagtacataattgattaaaatctcttgattataaatgtttggaaaggttctaaggggacctacagacagacatacatagacatttcaaaattaatagcttttgattagtataatatttcttaatttggataataaaaattgtagctttttattaagccaggaaacatgaagcataatttgtttaaaattctctttggtcattgagggaccaaaaaaggacgtaaaatttacagtcaatctatgagggtttttttccctccataagtttaactttaaaactgtatttaaggaatcaaatcttacaaaatcctggaagattttggtaatgatgttgataatttcagggaaattaatcaaagtacctattttgatttaaaaagtgtattttattcattattttgaggatcttgccatggaagatacttgcccagcctagccgaaaagtgcaatatttatagcatactttgacattttaaacatgatagtccataaccattttgaaatgctgggcaaactacatgaagttatttataattaattcacagctaatcaggcattttgaaagcttaattggattcaaaaaccataatgttggaatttggtaaaattttaatgttgatttttactgtgaaaaggtttttataagatatacacaccctagtttaatgttgtgtcttggtgtggatttacagatttactacaggtattctgaaccaggaacacaatc

SEQ ID NO: 316883 - DNA, 673 bp, Homo Sapiens
  misc_feature (579)..(579): n is a, c, g, or t
  misc_feature (586)..(586): n is a, c, g, or t
  misc_feature (654)..(654): n is a, c, g, or t
ggagtcgagccgagctgatttgatcgaggagcgcggttaccggacgggctgggtctatggtcgctccgcgggccgctccgccggctggtgcttttttatcagggcaagctgtgttccatggcagggaacttttggcagagctcccactatttgcaatggattttggataaacaagatctgttgaaggagcgccaaaaggatttaaagtttctctcagaggaagaatattggaagttacaaatattttttacaaatgttatccaagcattaggtgaacatcttaaattaagacaacaagttattgccactgctacggtatatttcaagagattctatgccaggtattctctgaaaagtatagatcctgtattaatggctcctacatgtgtgtttttggcatccaaagtagaggaatttggagtagtttcaaatacaagattgattgctgctgctacttctgtattaatattagaatgtgaattctatctgttagaactaatggattgttgcttgatagtgtatcatccttatagacctttgctccagtatgtgcaggacatgggccaagaagacatgttngcttccncttgcatggaggatagtgaatgatacctacagaacggatctttgcctactgtatcctcctttcatgantagcttagcttgcctacat

SEQ ID NO: 316884 - DNA, 1757 bp, Homo Sapiens
ggtagagagccaggcgcagagatgcagtttattcgtgacctctgctggccactcgcacctgcgcaagttccacaggctgacctgccatgtccaccccatgcccagagggcttctagtcctgaatgtgccctcacccagcccctgggagaaggcactgtaacaacaggtgaagagggggctgacggagcctcagcaactgctgcagatgctgtcccctgacaatgtaacagccgggaggagcaggggtgaagagtggcagccgccctggccgctgagtattttagagggagctgactggggaagacagtggtgtgctgtcaggtccccctgctccccttagagtggggctacctctcggggtagctgaggatgggtgggggtgggctgagcaggtctcacttatcgaagtgatccagtgggtagtgctccccgtaggtctgcaggtggcgggccagagactcctgctgcttgcggagctgggcgggcatctcctgatacacgtctgagaagagcaggttggggttgggtttgggcttccgctcggcctgctcaaaggcctccatcaccttcctgcgggactgcttcctccaggccttctcctgctcctcatcccaccagccttggctcagcagatagtgccgcagccgggagatggggtggtcctgtttatcccagtaattgacctcatccaccgagcggtacctgaactgtcgtcactggtgctgtggtgcccgatcctgtaggtcatggcctcgatgaggaaggtctggttctctgccacagcccgccgtcgggcctcctttgtggcgttgtatacggcaaacacatcattaccatccacgcggattgacatgatgccatacccggggcctcgtgctgcaatgccatcgccgcgatactgctcagaggtgggcgtggagatggcgtagccattgttccggcagaagaagatgatggggcactcaagtgtggcagcgaagttgaagccggcatgggcgtccccctcactggctgccccctcgccgaagtaacagatgacgaccctgttggcattggcccgcttggctgcgtacgccgcccccaccgcctgagggatctgcgtggccagtggagaggagatagtgacgaagtggcgttccttgcagccgtagtggacaggcatctggcgccccttgcccaagtcactgatgttgccatagcactgggccatgaatagttccagggggtagtcccgatacatcagcacacctgcctcccggtactggccaaacaccaggtccgtgttgtccagggcggcggcactccccacgtgcgtgccctcctcaccatagttggtcatgtagaaggagatccggccctgccgctgagactcatagaggatgcggtccatggtgttaagcagtgtcatgctcttgtagagcttcagcaccttctccttcggcaggtgggggtcctcgctggggttgatgatctggccttgccggtccatgacgcggtagatggggattccagagatgacgttgggctggatgaattccaacttatctataaactccgccgaggcccctgggaactggggcttgtcatccagagatgaaaactgctgctgctgcctgggggggtgagatctagccagtccccgagccccaggctgccgcagcagcaggagggcagcctggctcaaaccacggtttagccgccagaccctcgctgcagcgatcgctaccgccatcttggctaacaaccactcagcggtc

SEQ ID NO: 316885 - DNA, 432 bp, Homo Sapiens
gagactgcatagggctcggcgtggccagtggagaggagatagtgacgaagtggcgttccttgcagccgtagtggacaggcatctggcgccccttgcccaagtcactgatgttgccatagcactgggccatgaatagttccagggggtagtcccgatacatcagcacacctgcctcccggtactggccaaacaccagggtccgtgttgtccagggcggcggcactccccacgtgcgtgccctcctcaccatagttggtcatgtagaaggagatccggccctgccgctggagactcatagaggatgcggtccatgggtgttaagcagtgtcatgctcttgtagagcttcagcaccttctcctttcggcagctgcgggtggaggcacagatagacgtgggggcagttggggaccagagaggagacaggcaagggg

SEQ ID NO: 316886 - DNA, 932 bp, Homo Sapiens
  misc_feature (760)..(760): n is a, c, g, or t
  misc_feature (849)..(849): n is a, c, g, or t
  misc_feature (870)..(871): n is a, c, g, or t
  misc_feature (892)..(892): n is a, c, g, or t
gtttttggaggtagtaaggaggtcattgttgtgttcggcaagaaggagtttattagtaaaatggggatagtagccaaactgcagtgagttcaagacaggataagagtagaggatgcagatagatgaagttcttttatataagaaggactaaagggcaagtagggaaggaaaataaaagagagtggtgtaatccatggtctgcaagcttaaggctgcacaaggaaagaaggaaatactacactaatagaattcttcattctctcaggcttcaaattaaatggcattaccacccaccaattgctcaacacaaaaagcatgtagatattcttgattcttctcttttcctccgttttcacaatcctcagaattcaggtcaactttacctccaaaacatttcccttctgtgctcttgtaatagctttctaaatggttttcctgcttctgctcttgtcctcattcaccacagcacagctagagtttcataaatcataagtcttaagacataaatcagatcatgtgatttctcatcttagaatccctccatgtctgctgatggcacctgtgataaagtccagacttcttcttcatgcagggcccgtggagccctgtacgggattcccgaccacctctttaaccttatttcccaccactcttcaccaactgcagtgacaccagccttatttctctttctcaaacttgttgaatttgctcttgtattataggatttaccctatatacttccttttcctggaatactctnttggtcattctgatctttgcttatatgtcacctcctcaaagaagccctccctgaccacgccacctgaagtgtccttctctcttcacgtntccaaccatcctatatatatnnttttcgtagtaatggaacttntattctatttgttttatcacataccggtgaaaactcctct

SEQ ID NO: 316887 - DNA, 1175 bp, Homo Sapiens
  misc_feature (243)..(243): n is a, c, g, or t
  misc_feature (418)..(418): n is a, c, g, or t
  misc_feature (454)..(454): n is a, c, g, or t
  misc_feature (480)..(480): n is a, c, g, or t
  misc_feature (607)..(616): n is a, c, g, or t
  misc_feature (1050)..(1050): n is a, c, g, or t
  misc_feature (1091)..(1091): n is a, c, g, or t
  misc_feature (1104)..(1104): n is a, c, g, or t
agatgaatggaggacctttttatagccagaatccagtatctcttgctcctcctcctccctccatcctacaggtaactcctcagttacctttaatgggatttgtggccagagtccaagaaaatatttcagatacaccacctccaccgccacctgtggaagaaccagtctttgatgagtctcccccacctcctcctcctccagaagattacgaagaggaggaagctgctgtggttgagtatagtnatccttatgctgaagaggacccaccgtgggctccacgttcttacttggaaaaggttgtggcaatttatgactatacaaaagacaaggaagatgagctgtccttttcaggaaggagccattatttatggtcattcaagaaggaatgacgatggttggtattgaggggagtttatgnaattggagtgacttgggtttttttcctgggaattancgttgagtctattcatgcattattcntgagtaaagttcagcagggctgtgcttgcctcacaggaatagtcaggtcttcccagattatctgaaggccctggggattccactccagtaaagtagaatgaaggatacaaatgataaaaattacacnnnnnnnnnnggtttattccccagtattaaaaacaaagcaagctgagtctgaacaaatggatctttctgccatcatttgtacaatgctgagctgtctggattgaaataaaatgaccatttttatgtatgtcaaaggtataacagcataactgtgtagccaaaacaaaatcagattaagactgattcagacagaatctgtggcattggatgttcttcattgcctgtgctaaggggttaacctcatggcccagtgggtaccctagccccttcttttcttccacttgtatgaagaggagggaaccaacatttaaataccacacttaaccatttttacaattatttcagatggcttttttcctctgtgacactgtaaattctgcattctctcagcacttgagtgcaccaaacgagtgaatgctgaactcacttgcatcccttcatgtntctggttgtggattataaggatgatgaaatgtgaaagtctnccaacactctganggtggtgaacgatttgcaccccgttgattttaatgtgctgctgcatgagactgcattgttgctaatggcca

SEQ ID NO: 316888 - DNA, 282 bp, Homo Sapiens
  misc_feature (195)..(208): n is a, c, g, or t
tgggctcaagcaatcctcttacctcagcaactaggactacaggcacatgccaccacgcttggccttctaatttatttctgtgtcaacaaaataaaactcaggcctaggaatagcttggttcagaaatcacagagggacttagtattccattaatacaaatggaaaccttaagttcatcatcagatgataaaaggnnnnnnnnnnnnnncctgatactcatctcaaaagacgcagaaaagacatttgcataaatccagtacctattattatttcaaatttaaa

SEQ ID NO: 316889 - DNA, 607 bp, Homo Sapiens
agataaaaggattttagggtttttctaataatgggaggaatttttggaacccacttgggggtgtatgcaaatttcataagcggtttttcagggtgggatcccaggtattttctttcaatgttggaaagagtatgctttgaacccagtcttgggaaaattcccaagaaattttcttttgggtttaatccggtaccccccaacccttgacacaatccattgctcagcagctttggtgtgtggttgttcagctatcatccatcgtgtaactgcagcactatttagtccctatttttctctctcatctacaaggacagtcaacgattcattcaagaatcatccactgaacacttacatgccaggccctgaaagtgctggaacaaatggcatttgaccctgacttccaggaaatccctctgaacccatccacaggccagcacacaattagtatagaaatgtgatgaatgcagcatgatgcgtcatcacgcagcccgatttcacctgtgccgccttttgctggaaattcaatataactgcatgcccattatttttctggatttagcaatctaattagcaggtaaaaaagcaaaagcctgcggccttttctttc

SEQ ID NO: 316890 - DNA, 916 bp, Homo Sapiens
  misc_feature (39)..(39): n is a, c, g, or t
ggccaaaataaaaaaggaaatttttccagatggattaanctgaggtcccactaaccattagggtaggaaccaaagttttaagctaaaaaataaaatctatattttgttgcagataaatgtgagatttacctacagcaattttctattgatgctaaattaaaagcatgaattgacatcgttctaacagaaatggtttgacagatattttcttggctttaaaatgttcttacgcatatgcatagaaatgcaatgaggataagaataatcttctgtattgtctgtacagttcataaggcctttgtcattgttagtcaccttcgatgtgaatatcagtagggccattaaattaaagctggcctaaaaagttttcaaagtgctactgtttccaactgatgaaatcttcagttttctggattttctgggtgacgattattttcaattctttttttctggtgatatatacaagaagttacagcagatatataaagggaagatcagaagcctgctgtccaagttcatcaccacttgttcctgatccttttcaagtgtaagtatttgatagccagttgttctactacatattagttttccactactatcaaaagaagccaaacgtaatctaaatgctatgctccttcgaggctgtaaactgacagatccgctacatggctgattcagtgtattgcgtttgaaaatgatgtatcgattggtgtaagttacaagtaggtcgaagccgaagttaaaacctgtccaacgccagcagtattcaccatctttggcaagctttctaccacacctcatgctgtttccctctagttcttctttattgatttcttgaggccccacctcactgtcctgttctgcccgcagcatagcaaaccactgctgtttatacaatcccagggaattccggacc

SEQ ID NO: 316891 - DNA, 1245 bp, Homo Sapiens
  misc_feature (151)..(151): n is a, c, g, or t
  misc_feature (795)..(795): n is a, c, g, or t
tttatagggttcaattgccttcaatatcacccttgtggtcctgttctccaatcctgaacatacgccagcgtcgtccatcttctttttcctctgctgctgtgtattcagtatttgagcctttcctaatactttcagtagtcttgggttttgnaagatcatctgtcaaaataaaaagtttttgaatcacaaattgttacacaacaaaaatcaaattatacgttaaccactttactacctagattttacagagaattttcattataccatctgcacaattttaaatctctcttccgtaaaggaggaaaaggcttattcttaacatgaggctgttttatgtctttggaaatcatggttctttaacttttattgcccaatttagcaaaaaccacctaatcatagtgaaacgtgtatccacaagttcagaaaatataatttgtagagtcatcaaaatcttagtacactggccttacaatgcctttccagattcaacttgtgacaatattctccctggcagttatgactataggttacttcaagtagctatctgggagccaattttgttgttgttgagcacataaattaactgtaataccagataggaagtggttaactactcaatgatcacttctcatttgatcagtttataaagcagaaatgtatttataatactttgaagtatacatgcagaagtctatttaaattagcattagccaaagcataagcaccaatgattaagtgtaatttatgttttgagattgcagtttagctgattttcaatgtagtaataattttcanaatttcagtattatagtccttaccaaaagatggggggagggggaaacctactgcatgttagttgtttccaagacaaagctgttaacggaaaatatccttccaggaaatgacttcccactcaaactcattactattctctgacggtgtgtctaagccatctaagtcaatctccccactttcatccaaatcatctgacaatacagagccatcactaggatccagtgtcaggctaatgtctggagccattagtttctttctcactttatttccattaacttctagtgagccaggctggtcctctggtccagttatagctagtatatctgcttcaatactatcatcttctggtaaaggtatcggaaaatcttcatcttgccattcttctttaagttccacaccttccatcctcagcctggattcaatgtcaactacaaactcttgataatccag

SEQ ID NO: 316892 - DNA, 1020 bp, Homo Sapiens
  misc_feature (29)..(29): n is a, c, g, or t
  misc_feature (34)..(34): n is a, c, g, or t
  misc_feature (55)..(55): n is a, c, g, or t
  misc_feature (115)..(115): n is a, c, g, or t
  misc_feature (165)..(165): n is a, c, g, or t
ggtacaaaggaattaggggaatttaaganttttnccccgtaaaccttcctaatcnaaattggcctggataaacaattccctggagcccatccccagaacggggcatttttccctncgaagttggttggcacccatttaaaaataaactaatccatgtagttttcnggctactaaatagctcccaaagtgccaataacatatttaaaaagattgtcccatcaggtatctatagttaggctgactactttcaggcatgaaacagacagcaaacacaacaatggcatttaatccatccccataatatcccccatggctgataccttttttatagggttcaattgccttcatatcaaccctgtggtcctgttctccaatcctgaacatacgccagcgtcgtccatcttctttttcctctgctgctgtgtattcagtaattgagcctttcctaattacttcagtagtcttgggttttggaagatcatcttcccactcaaactcattactattctctgacggtgtgtctaagccatctaagtcaatctccccactttcatccaaatcatctgacaatacagagccatcactaggatccagtgtcaggctaatgtctggagccattagtttctttctcactttatttccattaacttctagtgagccaggctggtcctctggtccagttatagctagtatatctgcttcaatactatcatcttctggtaaaggtatcggaaaatcttcatcttgccattcttctttaagttccacaccttccatcctcagcctggattcaatgtcaactacaaactcttgataatccagggagccaatgtccccggaggaagcctcggccccctcgtcctattcgcccctccaggccggcgacgtggggctgacggccaggtcgcaaaaagcagggccgagcggagcccgctcccctcggtcggcggtggagaccccggcccaatcccccggccgcagcggtacggcgtcggcggcagcagctgacccggacacccc

SEQ ID NO: 316893 - DNA, 567 bp, Homo Sapiens
  misc_feature (211)..(228): n is a, c, g, or t
ctccctaggaaggatatcccaaagcaagggcatcttgaaaagcatgattttctcggtaatgtttgccaacactgttcactttccacatggtcacgactgaaaacacatttaccaatacctttcaagcgatatgactaccagaaatagatcttctttactaccctctctgaaatgagtaaacaagaaataaattcagaaggcaggcttttgnnnnnnnnnnnnnnnnnnttgcttgcggcttcacagtgaaaaaaattggagtgtttgtgccggttaagattttaatgttttcttaatcaaaattctctgaagtcattctcaatttacaaggttagaactccttcaaagaaaagacatacaagactctagctttaattattattctaaatgtccactagccctgtatctttggtcatgaaagcagcaaaacattcacattttcatcatactacattcaattgcctttcaagtttagaacattctacattttaaaaaaagacattaaagcaaaagatttcatattacacattacaaatatatgatgtaacgaaataaggtatgcaacta

SEQ ID NO: 316894 - DNA, 611 bp, Homo Sapiens
tgggggaaaaccgcctctttttaatacaaatatttgctactgcacaatgacaggtttcccaaatacctccattggaagagtctctaaagtggaatcaaataatttcttcactccgtctttaataaaattaggcaatgatgtgatccacaacctgaaagcagccaatctccattaaaaatgtgtgttcttttcctcaaaggagatacaatagacatcagaaagatatgattatttcagctaccaaagtgtacttgatatccatctcttcaaagatgcaatatgggatgggatcagtgtgtccacgtgagaaaagtacctaagtctcaagcacagcttttcataagcaaagcaaaaaatccttccaaggagtagattacaggggttgctccaccatcaatatggaagaacttgtccaggcttgtgcagaccaccatgtctctgccgtacaggctgacatttaacaatggtgaaggcaatctcttcttggaaaaaatcagaggctgtgactgattctggaattccatgtggactggaagggaggtggcatggcctcaaaattctatcaaagagaagcttttggaagaacctcgtgccgaattcctgcagcccgg

SEQ ID NO: 316895 - DNA, 596 bp, Homo Sapiens
  misc_feature (36)..(36): n is a, c, g, or t
  misc_feature (46)..(46): n is a, c, g, or t
acttgtgatgaatgcaaaattatgatcattcaatanagacatgaanaactattaacagatttcctatatctactaccaaatgaatccaactggcttcttttcttttaaaaggcaaaataagagtttgcgacacagttcaagcttcattagagcaaactcccagggactacccagattttgttgtttgggaagtcaatgttgtttggaatgagtggatcactggctcaaaattgcagaaacagtcaagttcatgagattttcatcgtaaaatttgttatgggattttgcagtaatgcttatagcagtatgggttacaaactgcccaataacaagtaacttgtgcgagcagacaatagccttcccctggccctttccaagcacttgcatccagatgattccacaggacttgtgtggactgcagcacagggctgtgcctgcagcataggtaagaaccactcaccactcaacactcaatatttattcattcatgcaggctgtagttacagtgtccctgctatgtacctaggagggttagtgatgcttttctcctcttaaatggcattgagaataaattttgggactctcctacatttaac

SEQ ID NO: 316896 - DNA, 475 bp, Homo Sapiens
  misc_feature (104)..(104): n is a, c, g, or t
ttattcattcaagagatatttagaaagtccttctgtaataaatactttatgaggtactgataaatgcaagtctgtatgtgtattccaaaagttcaacgttacanaagagtagagccatcctatccacagcaggtctgttgggctctctgagttcaaatcactacccacaacaagtgttatcctgtgtcaacaacatccttcaaatccttcgaaacacctgattggaccttaggtaaggtttacctgtgtgccaatccagtgctttccaaaagagtgagcacagagcagtattgggttagtgagtagaagaaaaagaagcttcgtgctcctgcattttacaattttctaccattgatgaatatatcttctctctacacactctatacactgattatatttcctacctaggcacaaggctcacacatttgagcaggaagtctgtgtaagaaaagagaggctaggcacggtggctcat

SEQ ID NO: 316897 - DNA, 564 bp, Homo Sapiens
  misc_feature (71)..(98): n is a, c, g, or t
tgtgaatcagtcagacttgatttttcaagcaaagggagatacccagatttttgtgtaagctcctccaaagnnnnnnnnnnnnnnnnnnnnnnnnnnnnaatgttggacaaccagtgaaaagcaaaacaaaactacagaccaaaacaaacgttgctgcctgctaccagtttgcaatttcttatgcattccatgaaactgactagttgacagtcttttcagattgacagtccatgaacaggaatttgctaatatttctaagactcagaccttggcagaaagatcggaaagcaaggtagaatttggagaccgggttttataattgtaagatctcacttttgtgaattgctgattagaattcacaaaagttagatccatggtgcagtgcctcttctctcatctctaagtttaggaagccctcagcaccttttgaactgtgtaacctgacaagaaagatgtctggggaattagcaagttctatttttgtttggtccagtgaaaattctggacaggccacaaacacattctaaagagtctagaatagactcccttgagctcttttaattc

SEQ ID NO: 316898 - DNA, 661 bp, Homo Sapiens
cggctgtataatttttgcagctagaccacattttaaaaaaatctacatttttggaactagtaaaagatacttatttgtgttatttaagtattcacgtcttttactgtgggtagttaagtttaataatttaaaaagacacattttatcagtaacaatgttcattttatttttcagactcttccctctactacttactctgtatttctgtctcttctaatgactaggaaaggcagtttctcaaaatcatcttctatttagttggcaaatgtgataatgtgggtagtgttcctaccttcctgctgtatgtgttctactgaaatgagatataatagccatctggctacaattttgatttctaagaagttcttatgtcattttaaattcaaaaactaagtatttcaacatttggtctctcatatcttaagttttattttctttgttccagctgttcagagatagtgtgttctaatatctccacaatcaagatttttgactaaaatggatcagtacatgaaaaagaaggactagtattaattttaaatcttggtaggtaatcatgggcttactaataattttgcaaagttcttttatgagccaaatctttgatttcaaatgccctggaagttgtattctttcctattagaaccctgttgggaggatg

SEQ ID NO: 316899 - DNA, 431 bp, Homo Sapiens
tgagattaaactgaatgaatatagaacttaatatttatggaattaaatgatacaattttcattaagaccccaaatatcccaccactttttagctttgctgtataatgaaggttagtaacttatatgttagtgtgaacacatttactttggctgatagcaaaacatagattttttaaaatgttctaagaagccaaagaattagaccaaaatgttcagcaccaaaaatcaaaacaatataactagctcaatacttcaggttaaatacacaatatcaagaaattttatttaggtcagcacatggctgttactatgactgatactgcatgctatttctagaattagatatgtatctttctggctggatgcggtggctcatgcccgtaattctagcactttcagaggccaaggtggccgattgcctgagctcagga

SEQ ID NO: 316900 - DNA, 698 bp, Homo Sapiens
ttgcttcttcacatccactgcggagttgtaactggagacatatttccacccacaaaggctccagatgttaaaacgtttcccaacatcgacttaatacagtgacggcaacacctccctcccgcccctcccagtagggttgggattgtactgtattccctactggtttacccttcccccctgtaaagggtaacattttccctgggtgcagaggctcccttatagtctccaagactgaaggacccctaattttgggactgcagcttaagtgtattagattaaacaccataaaaagctgcaagacgctcttttaagggaagaggaaactggtcagagaaacgcctccaattttcatcgccaacttgatttttaaatccatgaaggatcttacagaacatgtctctgagatcatcttttgggttaatccatgatgcaacggcatcacaaaaaaatataaaatcttggattacgccactgggattcacactgatcatggtacaaattccacggaatgctgaatccttttcctcattgtctcttatgtttctcagagaggtgcaccagggtcttataaactgctgtagcatgggggccacctcttgaggacaaacgtaaccaagacgaccaattgttattgctgtattctctaacaacgtctttggtgtgttgggtctgttaatgatttctacaagctggtgcaa

SEQ ID NO: 316901 - DNA, 573 bp, Homo Sapiens
cttccttatttcatccagtacccatgaaatttcctctctgtgtttcatgtgtcccaggtcccccaaaaaacaggtggtggtggattatacatggctttcagtagtggggtgatgaaaatgttctctctggtaaagcatgctgacactgtttatcttgtgtaataggccccaatcttcatctccttcttcattgctttgagagagatggccaaccttcctgtgcccagcctgcagacaggtggcctctggtggttccaggatctcacggtatccgatcccatctacatattaccactggcagtcactgctacaatgtgggctgttcttgagctaggtgctgagacaggtgtgcaaagttctgaccttcagtggatgagaaatgtcatcagaatgatgcccctgataaccttgcccataaccatgcatttccccacggcagtgtttatgtactggctctcctccaatttgttttccctggtccaagtatcctgtctccggattccagcagtacgcactgtacttaaaatcccccagcgagttgtacatgacctggacaaattacctccacgggaa

SEQ ID NO: 316902 - DNA, 1573 bp, Homo Sapiens
ttttctttttgtagtacagaggtttactaactctgtgaatgggaagatcacttggctacccagtgctctcttataaacataagtacaagagtgtttcatgaaatccgtttttaaaatgaacatctctgtgtgccacagttcctaggactggggcaaggacacagtgtcaagtcttgttttgaggatgagtctctgaagagacagaattcctgccagaatgcgcacagaacataagtcagccaagtgtgtcgtgccagggatactttgactttggtttgctgctgctgctgctagggatattgggagggttatcctttccaggttgtaggagagggttgtgggtaaaggtctgtcgtaaaggacccctggctgctagctccaactgattccgcatgcgttgttcacgctctcgcagctgacgcgtcatttcagcatttttccagccttttttgaagctctctaggaagccttcccgtggaggtaatttgtccaggtcatgtacaacacgctgggggattttaagtacagtgcgtactgctggaatccggagacaggatacttggaccagggaaaacaaattggaggagagccagtacataaacactgccgtggggaaatgcatggttatgggcaaggttatcaggggcatcattctgatgacatttctcatccactgaaggtcagaactttgcacacctgtctcagcacctagctcaagaacagcccacattgtagcagtgactgccagtggtaatatgtagatgggatcggataccgtgagatcctggaaccaccagaggccacctgtctgcaggctgggcacaggaaggttggccatctctctcaaagcaatgaagaaggagatgaagattggggcctgagtcacagggagaatgagaggtttatagagtttaataccatgttttttctggtaaagtgccatctccgaggaagccttgtaatactcaatatggtctcctgctaacttggcctctctgattcgactggaaaacttctggatctctggcaagtgattgtggatcctggctgcctctcgctggcccgtcacgatgagaggaaaaatcaggcagcgggcaaagactgtacatgcagcaatggccccccaccaaggtaggcccagatcaacatgcataaattccagtaaattctggatcagtcccactggggtgtatgaccccagccccagttcagcgaagctctgctctgcagcagtttggactacatctgcagtctctccagaagccacctcaggtactgctgtgggtgagggagttgcagcaacaacaggaggggcctgaacctggacttctgcaaaagagatagcagaggtactgaggctgcgggggccggaagccgcaaggaagaggtagtgtgggcgacagcagcacggggctactgggaataggagccgtgtggtcagcggtttcccaagccattgcgagggccctgcgacgctgtggacccgacgcccggactgtagcaagcgcagaagctcccggcgtccgcacattagtcccatcgccattttgcccggaagaggacttgcttttgc

SEQ ID NO: 316903 - DNA, 1000 bp, Homo Sapiens
  misc_feature (275)..(275): n is a, c, g, or t
ccgtgggggggaaactgccagtgttttatgggcccaagggtttattcagggggccctccattttcgggaggcccatttttttccttcccccctggaagggtcaaggaacttttgccaccccctgtcttcagcccccttagcttcaaggacccagcccccccatttgtagccagtgacctgcccggtggtaattatgtaggatggggatcgggatcccggtgagatccttggaaccacccagagggccaccctgtctgcagggctgggcaccaggnaaggttggccatcctctctcaaagcaatgaagaaggagatgaagattggggcctgagtcacagggagaatgagaggtttatagagtttaataccatgttttttctggtaaagtgccatctccgaggaagccttgtaatactcaatatggtctcctgctaacttggcctctctgattcgactggaaaacttctggatctctggcaagtgattgtggatcctggctgcctctcgctggcccgtcacgatgagaggaaaaatcaggcagcgggcaaagactgtacatgcagcaatggccccccaccaaggtaggcccagatcaacatgcataaattccagtaaattctggatcagtcccactggggtgtatgaccccagccccagttcagcgaagctctgctctgcagcagtttggactacatctgcagtctctccagaagccacctcaggtactgctgtgggtgagggagttgcagcaacaacaggaggggcctgaacctggacttctgcaaaagagatagcagaggtactgaggctgcgggggccggaagccgcaaggaagaggtagtgtgggcgacagcagcacggggctgctgggaataggagccgtgtggtcagcggtttcccaagccattgggagggccctgcgacgctgtggacccgacgcccggactgtagcaagcgcagaagctcccggcgtccgcacattagtcccacgccacccagc

SEQ ID NO: 316904 - DNA, 791 bp, Homo Sapiens
  misc_feature (22)..(22): n is a, c, g, or t
  misc_feature (30)..(30): n is a, c, g, or t
  misc_feature (45)..(45): n is a, c, g, or t
  misc_feature (65)..(65): n is a, c, g, or t
ggaaaaacaggaataacttggnacccccgnggaaaaaaacaaaanttggaaggaagagcccagtnaccataaaaacactgccgtgggggaaaatgccatggtttatggggcaaggtttatccaggggcatcattcctgatgaacatttcctcatccactgaaggtcagaactttgcacacctgtctcagcacctagctcaagaacagcccacattgtaagcagtgactgcccagtggtaatatgtagatgggatcggataccgtgagatcctggaaccaccagaggccacctgtctgcaggctgggcacaggaaggttggccatctctctcaaagcaatgaagaaggagatgaagattggggcctgagtcacagggagaatgagaggtttatagagtttaataccatgttttttctggtaaagtgccatctccgaggaagccttgtaatactcaatatggtctcctgctaacttggcctctctgattcgactggaaaacttctggatctctggcaagtgattgtggatcctggctgcctctcgctggcccgtcacgatgagaggaaaaatcaggcagcgggcaaagactgtacatgcagcaatggccccccaccaaggtaggcccagatcaacatgcataaattccagtaaattctggatcagtcccactggggtgtatgaccccagccccagttcagcgaagctctgctctgcagcagtttggactacatctgcagtctctccagaagccacctcaggtactgctgtgggtgagggagttgcagcaaccc

SEQ ID NO: 316905 - DNA, 399 bp, Homo Sapiens
  misc_feature (296)..(296): n is a, c, g, or t
  misc_feature (372)..(372): n is a, c, g, or t
  misc_feature (387)..(387): n is a, c, g, or t
tgaccttcagtggatgagaaatgtcatcagaatgatgcccctgataaccttgcccataaccatgcatttccccatcagcatcagcagtgtcctggcttggcactcacagcaaggccactgctgatgctgatggggctgctgttttctttcttgtcttattcatttgcaaaacctttactgatgacttttaccacagtcacacatattatctcatttaaacctcacagcaactctgtgagggattgttatctccattttatgggatgagggaagctgactctgaggagatgactttnccaaattcatccaactggaagaaaaaggaagtctctgggggacttggaatccagaactgtttcaggttccaagttncagggggttcaattntatttaaggcca

SEQ ID NO: 316906 - DNA, 522 bp, Homo Sapiens
  misc_feature (31)..(31): n is a, c, g, or t
  misc_feature (36)..(36): n is a, c, g, or t
  misc_feature (67)..(67): n is a, c, g, or t
  misc_feature (105)..(105): n is a, c, g, or t
cactggagcaggcacctccggaccccgagcnggcantcatgccggcgcccttggagcctgggctccncagacgctgggctgggggctgcggtcggcaaggaagcngagggggccggagaagagagctctggggtcgacacgatgacacacaataatttttggttgaagaagatagaaatcagtgtttcagaagcagaaaaacgaactggaagaaatgccatgaacatgcaagaaacatatactgcttacctcattgaaacaaggtcagttgaacataccgatggtcagagtgtcctaacagactcactatggcggcgatatagtgaatttgagttgttgagatgctaccttttagtttactatccacatattgttgtgccacctctgccagaaaaacgggcagaatttgtttggcataaactctctgctgacaacatggatccagattttgtggagaggcgacggattggtttagaaaactttctcttgaggattgcttcacatcccatcctttgtagagac

SEQ ID NO: 316907 - DNA, 519 bp, Homo Sapiens
  misc_feature (138)..(171): n is a, c, g, or t
aacatcccttttcaatgaagcaaaattattatatgatacaatttttcagcagaagctaaatacaactttatgcttaaaagcaataactgaaatcttcattaattaccttaaaaagtatatagacatttcacaaaaagnnnnnnnnnnnnnnnnnnnnnnnnnnnnnnnnnngcttgctttccatcagaaagtcacctattacaaatgtcagtttatttcttatgcttaacattttaaacatgatgtccagaagcccttatttgccataggtacaaattagaactatgagattagattttcagaatatgcaaaatttccaattagtcaattttattattccaaagtcattccgattgtcagatcttccgaatgttgtatcttccatgacatgacaaggtagaggtacacattcaatggaagaattaggggacagaagtaaagccttgtatatattcagtcaaagaaatcacccttgcatagttctccatgtccctgcctcaagactgttttcacataaat

SEQ ID NO: 316908 - DNA, 501 bp, Homo Sapiens
  misc_feature (42)..(42): n is a, c, g, or t
  misc_feature (81)..(81): n is a, c, g, or t
cccaaccccaccccctctacctccacccccagggagtctttntattcttaggcaggttcctgagtgctttttatctttccnccgaaatcccatcaccttcccgagcttaaaccctcttctcccaatattccattgttatagtaaaccatttttctatcaaaatagaatagatggaaatacattcagagtatatctttgcttctctctttcagggatctggcagagctttgcttccacctgtctaggtattgggaattaacctggttcacttttttccattaccagaaatgtactaactttagaccaacataataaaagctctgatttctgacaaaggcccctagataaatgcatgttatgtttaaaaagctgtgtctcaattatacccagactgatttttaaatataaatgatgttcctaagatattacttaaataatttttaaaaatattgataaccagttcttttcatcaatcatgacattctcgattttaaacaagtc

SEQ ID NO: 316909 - DNA, 1064 bp, Homo Sapiens
tttttttaacaaacacctatttattatattaaatacaagcctgaaatattaagtacaaattacagattccaagaaattacatttcacatcccaaaatgtcctgttggtgctttgacaactaaaacaatgttttagaaagattttgtttcagatcctaaaaaatagcaacaatttggggataaaaataagtaaaatccaaaacttcaaagtttattccaaattcttttgaatccctatggtggctgtaaacagtttttaaatgctcatagcttcaaggaatgtgagtatcacagtttatatgaatttctgcctaggaagcccagcaatgttacacagtagtttcgtgtttccataatccagtcctaacattgccagtgctatcggtaccgagcaagggtccctcctgcccattgcttttaattggtccattctgaatggccaagttgaggccataagatttttgctgattttcaagttcaaccacagctggcttccttaacgcatcttttttactagtggttgaaactggcttttcaaaatttctgctacttttgggaagtgtgctacaagcatcgctgctgtcttgctggggtgggttgtactgtctctctctgtaggctaaataagctcttcggctcctcgagtgtccttcgttattgcccagccggcttttaggtaagccgttctgcacgcttccttccacgctcgttgggacatcgtaggcatattctctcaggactgtgagtcggcttgcccggtgtcctttacttctgtttttatggtggcggcttgagtgcacatttgttcgaaactgaacttctaaaggcgccacgtgcattttaatatcattgtccattgaatgttctgtcagactattatcaagctgaggggtggagttcaaaggtaaagaattggcatggcactgagctgcagccgcctgcaagtttgttaatttgcagccctgggaggaatttttgaagcttgaagcacttttgtttgtgcatgaagactccgcactgctattggggcatttgggtgcctctccattcgtcccattagagttg

SEQ ID NO: 316910 - DNA, 725 bp, Homo Sapiens
ccgaggattttgtttttacatcaaccctggaaaatgagcacacttttcattctcaggtcttgggggccagccttactttgctcttatatgttgcactgtggatgtttggggctttggctgtttctttgtattaccctttggacttggtttttagcttcgtttttggagccacaagtttaagcttcagtgcgttcttcatggtccaccattgtgttaatagggaggatgttagacttgcgtggatcatgacttgctgcccaggacggagctcgtattcagtgcaagtcaacgtccagccccccaactctaatgggacgaatggagaggcacccaaatgccccaatagcagtgcggagtcttcatgcacaaacaaaagtgcttcaagcttcaaaaattcctcccagggctgcaaattaacaaacttgcaggcggctgcagctcagtgccatgccaattctttacctttgaactccacccctcagcttgataatagtctgacagaacattcaatggacaatgatattaaaatgcacgtggcgcctttagaagttcagtttcgaacaaatgtgcactcaagccgccaccataaaaacagaagtaaaggacaccgggcaagccgactcacagtcctgagagaatatgcctacgatgtcccaacgagcgtggaaggaagcgtgcagaacggcttacctgcctacagagagagacagtacaacccaccccag

SEQ ID NO: 316911 - DNA, 679 bp, Homo Sapiens
  misc_feature (532)..(550): n is a, c, g, or t
tggatatattttgcattcattttccaacgcctacatttaattcctggtaagagcagtgctcgtcaagtttctggtttttctctgctctcatttaacccgtcaaacacaatctttgtaaagctagattggtggtgttttatacaacttatttactcagcttacctttttgagaaacgattgttagaaattgacgatgtgtttgttccagtgatactgaaagtagtgggggcaagaattgagtttcacagtggaattggctttggatctggcctatagattagtgacataaaatattttctctattttcccctgttctttttgtgttatgcacttaattttatgactgccgggggggtcagctggagtgctgcttaacaagtatctctcctactctcagtggtcagaggctgtgttggacccatagtagaattttccaggtcacagacccaagcttccatgggtttttactgtgctgtaccacttggtgggtctgattctgaacctgatgtgtgtgttaattattttttaagcnnnnnnnnnnnnnnnnnnngcctcatgtgatggacttttattacaaaagaaaaaatttggatttcttaattacaaatgggcaattatttattcctctcttggttcaccaaaaaccccgaaagggtatagctttttcatctatatttat

SEQ ID NO: 316912 - DNA, 544 bp, Homo Sapiens
  misc_feature (259)..(276): n is a, c, g, or t
agattagtgacataaaatattttctctattttcccctgttctttttgtgttatgcacttaattttatgactgccgggggggtcagctggagtgctgcttaacaagtatctctcctactctcagtggtcagaggctgtgttggacccatagtagaattttccaggtcacagacccaagcttccatgggttgttactgtgctgtaccacttggtgggtctgattctgaacctgatgtgtgtgttaattatattttaagcannnnnnnnnnnnnnnnnngcctcatgtaatggacttttataacaaaagaaaaaatttggatttctaatttacaaatggcaaattatttatccctctctggatgcaccaaagaccagtaaagtttatagcttttccatctatatttataaagcaatactgtattataaaaatcaatatttttatcacatgcttgaaatttttattttgttgttttaaaatgtgcactctaaacatatcagaaccttatttcttcctatgaacttaagctgcctgcgcacaaaaaaaa

SEQ ID NO: 316913 - DNA, 613 bp, Homo Sapiens
ttttgacagcaaaaaccaaatatcctgtaagaaattgaataatcaaaatgaaaaatttttcaattgtttttttgaacgtaagcagtatggtattaattaaacagaaagtcagtttttaaaattaataactatctagcaagcccaatcaacaaaaggcttccaaaatcaaatatatatgttattaccaccaaattcaatccagtgtttacttttggtgaaaaagaaagaaaacgggataggaaaggaatgacacttcaactctaactgtaaattttatttccttaaaaaataaaaggcatataccaaaaaaagaactctatggaaaacagcgtggaaattccttaaaggaactaaaagtagaactaccacttgatcccaggaatcccactactgagtatctgcccagagcaaaaaagtcattacatgaaaaagatacttgtacacacgattacagcagcacaatttgcaactgcaacaatgtggaaccagcccaaacgcccatcaatcaacaagaagataaactgtggtatacatacacagtggaaaactactcagccataaagaagaatgaaataatggcatttgcagcaacctagatgggattggagactaa

SEQ ID NO: 316914 - DNA, 635 bp, Homo Sapiens
gacacaaaactgatcttacaggtgaggtgctctattaattgtgccccattttcttcaggattgattttaatttctgagtatagcataaatggcacatcatgatttgacttttgcccattccatcttcatttcaggccttttctcctatgtgcataatctgctatagtggtacctatctacttggcaggttttcctgcattaatttttcctcatccatgtgtcttcccacacttgccttctatatggatttctgttggtctttcaaaatacaacgcaagcatttccccttgaaacctctgccctccccatttcttccttgtttccatggtgcactgggccatacctctgtcacagtattttgtagatttaattttaatccagtctttacttgtcctttacaccgtgggttcccaggacaggagctgtgcttctcattgctctattctgtgacagtgctatataaaaatgaatgatttggtctttagtttggtagcataaagttaacagtgaatttttaaccattactaaaagtgtacttctaaagattgagcctgatgaaccaaatgtctgaatatttagtaattaaagtaagcttacatttaacacatgcaggattatttacttgttccaaatgg

SEQ ID NO: 316915 - DNA, 623 bp, Homo Sapiens
  misc_feature (519)..(519): n is a, c, g, or t
  misc_feature (590)..(590): n is a, c, g, or t
gctgggtggaggaatgagcagggggcgctcatccggaggcagctgctgcgaggcttgtttaccgcggactttgctcggtcacggtttgcaaagacagcacagtcggctggctccactctgtgtactttcggacaacgcgactcactgcgccgggctctatttagctgccagcccgtagcctcttaggcaccagcccgttgagagtttgcagttattgcacccatctaaggcctgctgtgcgctgttaacacttcgggtaggttcaaaaggtggctcagtccaatgcacttactgcaaaaatacttcctggtttgccgggaggtggcgtggcagggtccttgcagcctttcctcctagctcacccttccaccagtaccgctccgccctcctgccctcccttcttggtgcagcagccgcagctgttccaaggccactgtcgagcagattctccacagctggttctgttgatcccagggagcaggtgatccccaggccccaggatctgctaaggaccatctnccacccttctcgctcaagtctcaatctgcagttgttttccctggctgttgcaaacgtttgcctgagcatangacaatgagattagtacaaggtctaggaatact

SEQ ID NO: 316916 - DNA, 277 bp, Homo Sapiens
  misc_feature (86)..(103): n is a, c, g, or t
ctgattctgagatcaatttgtgggaattttacataaatctttgttaattactgagtgggcaagtagacttcctgtctttgctttcnnnnnnnnnnnnnnnnnngatgccttaatgtagatatctttatcattctgaattgtattatatatttaaaatgctcattaatagaatgatggatgtaaattggatgtaaatattcagtttatataattatatctaatttgtacccttgttgaaattgtcatttatacaataaagcgaattctttatctgtaa

SEQ ID NO: 316917 - DNA, 639 bp, Homo Sapiens
  misc_feature (424)..(424): n is a, c, g, or t
tttttaaatcttctgattatataggtagtatgtgcatattataatttgaaaaatgtcaatattaaattatattcttgcatattataatttgaaaaatatcaagaatattaaattatttgactaattagagataaccactgttagtattttggtgaatcatagtttagtaattgttttggggggtttgtgtgtgtgagatttgcatgtaaaagttgcaattgccttttttaaaaatatgagatacttgcatcctgttgtttttacttaacatattaaatgtgtctcaagtcattctaaaatattcaattatttttatttttatttggttttcgacacacgctctcactcccgttgcccaaggtagagtacaagggtgctatctttgctcactgcaacctcaacttcccaagctcaagtgatcctnccacgtcaaccctccaagtagctgtgaccacacgtgtgcaccaccattgccaagctattttttcttggttttagtagagccaaagtgtatattatccttaaattttagccttaaatccttcaccatcctggtatttacaactgtagacattaatatatcttcctctaggttattagaacttatacattttgattaaccgatttatgaatggagtg

SEQ ID NO: 316918 - DNA, 791 bp, Homo Sapiens
tttttaccatgtcttggttccaatatttattattctgacaggttaggaatactaggataaataagtaatattttctcttacagaaaattgtaatgataccattgagtacaattaaacactctgagaatttcacagaaacatcagaattttaatagacagtagccagcgtccttgtggccagtgtgagtgacttctcacagctgcaaacaccctgggccagatttcttaaaacagctacatgacaaaaacaatgctattgacatccaataatgctaaagcctgggtaccacccaggctccactgactgtggtttccaaacatctctccactgactgtggttttcaaccacaaggaaaggaaaatggaatattctttggctcttccagcctagacacaactcctgacctaagacattgagtggagagtcctaaccctttggaagttgaactttctgctttcttcctgtgactttggaactgagtttgcaacagaggacctgccatcatgctgcccatggattttgtgttaacgctgggagaattctgtcctcctcttgctgacaagctcttctggccacctgaatatcttgagatactgcacgtggtgacagccccgccccccaaaactcttagaaaccagatctgagaaaaagcatataaaagtcacatcagtgttgtgtgacacaaacatcggaagagtacattgcctagttttcttgcacacacaatttctggacataacagcatatttgctagaaagcacaaccctggccgttgcacaacttcactacc

SEQ ID NO: 316919 - DNA, 1674 bp, Homo Sapiens
  misc_feature (124)..(124): n is a, c, g, or t
  misc_feature (173)..(194): n is a, c, g, or t
  misc_feature (342)..(391): n is a, c, g, or t
  misc_feature (521)..(531): n is a, c, g, or t
  misc_feature (565)..(573): n is a, c, g, or t
  misc_feature (660)..(676): n is a, c, g, or t
  misc_feature (687)..(711): n is a, c, g, or t
  misc_feature (775)..(856): n is a, c, g, or t
  misc_feature (932)..(941): n is a, c, g, or t
cttattaaaaacaaaatatattcttttgtgtgcgcccacaacacccggcgggggggtgtggtcccccccgctcttgtgtgttataaatggggtggcgaataattaaagaaattaatttttttcnccggcgcgtgtttttcctcccgcggcgggaaagtatatttatctcgccnnnnnnnnnnnnnnnnnnnnnntaagagttgcccgcatgggcgaaaatcaagtgtttgttgagcagtacactaggtgttgtggggagtgggtgttccacatagcggcggggacaagaatttttttgtagagaagttctcccgcccctctctcttccgtacaacggagccnnnnnnnnnnnnnnnnnnnnnnnnnnnnnnnnnnnnnnnnnnnnnnnnnntgtaggaatccctttgctcgcgagaaggggcccacgcgggtgggggccgccgcggaaaggggcccttttggtggattttttttaaaggagcctgcggtgtttccccccccgggcgtgttttatttatttnnnnnnnnnnntaacaaacccctccggttcttttctccccggggnnnnnnnnnggggaaaagagtcgtttccccgtgtctttcttttcccctggggggggcggccggccaagaaaaagagttttttaaaaagattttttnnnnnnnnnnnnnnnnncgcccaaaaannnnnnnnnnnnnnnnnnnnnnnnngtcccccgggtaatgattgaggatttcgttttggtatgtgctcttgcggtgtttttggttaggnnnnnnnnnnnnnnnnnnnnnnnnnnnnnnnnnnnnnnnnnnnnnnnnnnnnnnnnnnnnnnnnnnnnnnnnnnnnnnnnnngacaagacaaacgagtttttatttattcaagagtaaatttccaggtgtagaaagaggccacaagttaatgttgttnnnnnnnnnnttaaacatctgctaaccaagtgctgcatttaatgaaaccacctaagacagaaaaagagacatgagacaaccactgagaaccagccacccggagctcagtttctgctacagagcacctcctcttcaacgaatcactggataccattggagagcaagtcactgttgttgaagcagcagagctggaggtgctgtcaagagtctcagcagactcattggccagatgcaccgaactcaatgaggcacttagagatgagaaacgatctgtactgggatttcccagcagaagagactttggtttttgtcatcctgaagttgccactccaccaccagttttatagagggatattcgcttttcactggtagtttattcaggtagctataggtcttgtctttttggatagggcagttaattccactcttacaaccatcaggctcaggaatgggaaagggaactgggacgcccatcaggatgccatgcaccacggccttgctgcttttagactgaatattgctggtgaaggtgacattgacgctgtaagactgtcctttgctcagctggcagggttgggtggggcatgggctcacattcacttcctttataactccatccacagaaccgcagtccttgaactgcaccggttcggcctgggcagcggtgctgagcgccaggagcaggaatgtagctgccaggaaacgcatcgcggataacgaagttccaagctcgggaaagaaag

SEQ ID NO: 316920 - DNA, 443 bp, Homo Sapiens
ggggaaggagttagggaggataccataggaaggtattcaacattattcaacattccaatccattattcagcattccaatcccttatatctcagtgtcccccgcatcagagtgtgagcagaagtaatgccataaatctcagcatatttcgtactgtctctgttaggatagccttccaaatttaatcctggaaaaaaatccatggacgtaacggcatcaagaaaggagatgcctcctgcaacattcacaacctttccatcgagcagataggtggcagactgcattacattcatcaaaactcccactggactccagctaaatttatatctcaatggattgtttgaatgttcaggggctggaagcccaccacagtaggaaatatatgattcaatcgtggctcccacttccttggctttatctattgtttccattgctaacatgtgat

SEQ ID NO: 316921 - DNA, 958 bp, Homo Sapiens
tctttggtttgggcaattcaggagctttttcttcactctgagaagtactgggctgagaaactgatggactgggctgagtgacaactggctctgacacctctgttttcggggtagttattttgtcctctcttgaaatgctcatttctgtcatttgctgagttacaggcaaggcagccacaggcacatttcttgatttttcagatgtgctgccagcagcaccttcacagttgtttaagctagtgtctgctctctgtacagatgcagaatctgaggtaggactgttggaaccactagctgtccccattgggctcattctgccactattttgctgcctctgaagatgttctttgtagcaaactgaacacattccatttgtcctaggatttccataaaagccacatcctgtgctacacagcatgggccccggggtctggttagtctcctgagccatatttttctgctgggaatggagacctgagttcaagtctctagtctgccactaagtcagtgaccttgggcaagtccttactttccagatttcagttccctctttgccaaatggagtagaattgacttttaaaggctccttttcagggccctgcagggtcccaaatgcgaaagccgggttcgcgccgaagccggcacgatgaggccgggccgaggcctccgggaaggatgagccgggcgccctggtgccgccgccgcgggccgggagcgggtcggagcagcaggcggaggtggcgccgccgccgccgcggggtcttcctttgttcctgcagcagcgtcgagcgtggccggtacacgccggagctcgggaagtgggaggaggtaagcgagggggggccgaggagcaggtggagggaggaccggcggccgcagcggctaacgctgctcgaggcgctcgcctgtcgtcgcctcacgcctccacaggccgcaggttgggcggacgaggagggcg

SEQ ID NO: 316922 - DNA, 378 bp, Homo Sapiens
tctcacactgctgcaccaccttcccttcaacctccttgggtcttcacccctccccatttccctgggaccctccctgcaacaaccaagggtcttaatttcacctgctgctgtcactagtaactcctaagtccacacaggactatgggcacactcatctctacctattatcctcatgacagaaccctgtgcgccccaaggatggagaccatctctacctattatcctcatgacagaaccctgtgcgccccaaggatggagaccggcagtgtccttcagactcagctgcacctccaaactctgactctgtactcccaagtacaaggctgaagctaaatctgcctcctcagagtctccacatggcctcgtgccgaatcctgc

SEQ ID NO: 316923 - DNA, 933 bp, Homo Sapiens
  misc_feature (94)..(94): n is a, c, g, or t
ccttatttcaaattgttatactgtaggttgaaaaatgaacttgagatgctgacatgctgtagaaggaaaaagaattgtatactttctcatttanagacgcagtgttcctctctgctaaatcctcaggcatggaacgtggttactgaaacacccacatttgaagtagctcaagggcgtatatgcaccagcatgtggagttccaccctgggacatccccagaaaccgcccacagctcagcactgcatttgtaagtcttacaaacattaagtactgcacataacgcttcttgacaagtgttacacctctatatggtacaagtgaccacagtaactacagagtgacactgctgggtgcagtacttcctttttatttagaaaaatgactgcattttctaaaagctgggccaatagcacataccttatatatgttagtgactaccatgatatgagaaaagacgtggacaagtgctccccaaggattccggagacggaagcacttgctgcaggctgcaacatcagccaaggtatttccacaagctcctgctctggggaaacagttatggtcaaaaggtgaagtgcaaataaggggctgtcactgacttaaagtgccctaggtagtagccttccctatcataaagtgagatgccagtgactagagccaattggggaagaatctctctctggtgcggctgcatggtcagcagggcatcatgtagaaaaggattcaggagagggaggaaccactgcatctttcaaaccagaaagcaattagtgactaaagcaacagtaagcagtaggtgcactgaagtacatactgccgcaggtcaccaatgggtgacacacacagggctgccaggaggaattctctggactgaagaaattctttgaaagcataaaagccacaactaccagaaacggcccctccaaacggctc

SEQ ID NO: 316924 - DNA, 514 bp, Homo Sapiens
  misc_feature (359)..(398): n is a, c, g, or t
ggaaattggtgcatttttacaaggtatggagatattgtcccacctgtgtgaacctgcctaaaagagtatctctgtgtaacagtgatggtgagttagaaatggagctctcttgtctcaatgcctgacttcagtctgatctttgcactactccttgactgctgacctcactccccgcccttccatgtacatcctcttgtgtaccctgggaacttgtatgtagttaattgtatctggacctgcacccccagcttctttcttggcttcatttaatctctctcttggcttccttgccttcagggatctccttcaaggcagggccatttctggtttcctccagctcccagggctccttcctgcannnnnnnnnnnnnnnnnnnnnnnnnnnnnnnnnnnnnnnnaagtggattgggaggttgcggccaagtgtatagtgaggtgacgcttagggaaagcttaggctgctctgagaacacctgaaaagtacacccaaccggcttggtgtggtggctcacac

SEQ ID NO: 316925 - DNA, 287 bp, Homo Sapiens
gtgtctttaactaggacttctatttggaactgagtccgacagctcaggactggctgctcaaactccacaatttaatgaaaaatctcagatgatgactcagaaaacctctaatgatctgaggaatatattaagggattccagagtcaaaggctgatcatggagggcattgatgagggaagacttcaggtggctggagaccagaagaaaggaacactggaagaatgaaaacggttgtgatgcactgcagtgtgaaaatatgcccttgagccttaaagaaaggggcttaa

SEQ ID NO: 316926 - DNA, 536 bp, Homo Sapiens
  misc_feature (412)..(412): n is a, c, g, or t
  misc_feature (457)..(457): n is a, c, g, or t
  misc_feature (475)..(475): n is a, c, g, or t
  misc_feature (501)..(501): n is a, c, g, or t
  misc_feature (512)..(512): n is a, c, g, or t
  misc_feature (524)..(524): n is a, c, g, or t
cttacaatataatctgttttattttacacttctctgattattgaaatctaaatagaggtttttgctaacaaaaaggaaaataaaaagacagcaaggacacgattaaatgttgagtgcagatgaagggttgtatgaggccccatcctggggaggctgtacaccttcttggcacagcagcagtgtggcccacggagcttgaacctgggtgaagacagcaagtaagccacagctcaagagttctgaggcttgggaacagaaaagagctccttcctgctccaccccaatctgggttgcatggggcatgggaaaagaggcaaacacaccctgcaaagcattactgggacatgcctcttctttaggcttcttcagggccaggaacaccctccttttccacaaacgtgttgcacatttngcacggttcctttaaggcttgttggcacacttctttttcacacantcaaggcctggtcttggntttcggggtttttttgcgggtcaggntttcaccccgngccgggtttttnggggttccttgg

SEQ ID NO: 316927 - DNA, 908 bp, Homo Sapiens
  misc_feature (520)..(520): n is a, c, g, or t
  misc_feature (525)..(525): n is a, c, g, or t
  misc_feature (581)..(581): n is a, c, g, or t
ttacacttctctgattattgaaatctaaatagaggtttttgctaacaaacaaaaaggaaaataaaaagacagcaaggacacgattaaatgttgagtgcagatgaagggttgtatgaggccccatcctggggaggctgtacaccttcttggcacagcagcagtgtggcccacggagcttgaacctggtgaagacagcaagtaagccacagctcaagagttctgaggcttgggaacagaaaagagctccttcctgctccaccccaatctgggttgcatgggcatggaaaagagcaaacacaccctgcaaagcatactggacatgcctcttctttaccttctcaggccagaacaccctcctctccacaaacgtgtgcacacttgcacgctcattaagcatgtgcacacatcatattcacacactcaagctatgctcttgatttcagggctctattgcaggctcaggtatcaaccccagagccgaggtgtgtgagagctaccttagcagactcacaaaaggctnactgncagaggcaggggtcaaccatcccaaggacctggcaagggagaaactgaattctgtnatcccactgatgtgagaggaaattctaatgagcaaatgggaccagcggggcccagttagggaggtccagatgccagttctgagatgccacccagctctgccttgctcttcagtagccagtcagtgaaaaagcagagtgccaggaggccagtaccgagcaggtcccccagccctgtaaggtaggggatgcagtggttgtcaggatccagggcctggtgccaagtcagccgaaccatcacttctgccaggtacagcaggattgtcacctggatcaggctgccagcaggtagagcaccacaaaggtctggctgtttatgactgactgacc

SEQ ID NO: 316928 - DNA, 250 bp, Homo Sapiens
ttttattttttattttacccattgctttaattttacttcttgaaaaaaattttcaactaaaggtcatgtgcaactaatgtcatcaaaacctcactttaacacattaattcaatgctggtgaatatgaccattcggtattccaataaacacaaaatgcgtgaatttcattaacatatgcctggaataaccagtttttatgaaacctgtaatgcgatcctttcatttctgtccattttaactgccctggggc

SEQ ID NO: 316929 - DNA, 1595 bp, Homo Sapiens
  misc_feature (980)..(1012): n is a, c, g, or t
  misc_feature (1252)..(1265): n is a, c, g, or t
  misc_feature (1268)..(1347): n is a, c, g, or t
  misc_feature (1466)..(1466): n is a, c, g, or t
  misc_feature (1498)..(1498): n is a, c, g, or t
  misc_feature (1528)..(1528): n is a, c, g, or t
  misc_feature (1540)..(1540): n is a, c, g, or t
  misc_feature (1546)..(1546): n is a, c, g, or t
  misc_feature (1559)..(1559): n is a, c, g, or t
  misc_feature (1565)..(1565): n is a, c, g, or t
  misc_feature (1582)..(1582): n is a, c, g, or t
gggataatctgtcatcagaagaaattcaacagagagctcaccagattactgatgagtctctggaaagtacgaggagaatcctgggtttagccattgagtctcaggatgcaggaatcaagaccatcactatgctggatgaacaaaaggaacaactaaaccgcatagaagaaggcttggaccaaataaataaggacatgagagagacagagaagactttaacagaactcaacaaatgctgtggcctttgtgtctgcccatgtaatagaacaaagaactttgagtctggcaaggcttataagacaacatggggagatggtggagaaaactcaccttgcaatgtagtatctaaacagccaggcccggtgacaaatggtcagcttcagcaaccaacaacgggagcagccagtggtggatacattaaacgcataactaatgatgccagagaagatgaaatggaagagaacctgactcaagtgggcagtatcctgggaaatctaaaagacatggccctgaacataggcaatgagattgatgctcaaaatccacaaataaaacgaatcacagacaaggctgacaccaacagagatcgtattgatattgccaatgccagagcaaagaaactcattgacagctaaagctactgctgttcttctttatcatttattcacttccgtagctcctccttgaaagttattaccttttcagagtttaagttttcggttccacgctcttctaattgggagataatatggaagaagggccagagcagttacagccctccttcttttttgttttctgttgagggccgactgctgctctgccttccttctagtattttctttctcaattcatacgcttagattggttttcatatgtcatgtttagtgttttcatcctcctcatatacttcagcaggttcttttgctttcaagatttggaagcattgccaaagacagccatgaagaaggaagctgtagagnnnnnnnnnnnnnnnnnnnnnnnnnnnnnnnnnggttgagggaaggacaagagataagaggttgttacctcagtaaaaaccttcaggccacaaagcaaaaagttgcatagccacaacgaagatctagttggatatagtttttgatttaagttgcagttatagccaatttaggctaatgcttggttttggagcttttatacacaacgtttttgttaggcatcacagttttgcaacctctgctccaaagagaaaaatagaatgagttttctttcnnnnnnnnnnnnnnggnnnnnnnnnnnnnnnnnnnnnnnnnnnnnnnnnnnnnnnnnnnnnnnnnnnnnnnnnnnnnnnnnnnnnnnnnnnnnnnnaagcaattctcctgccttgcctcctgagtagctgggattacaggcgtgtgtcaccacgcttcggctaatttttgtatttttagtagaggcagggtttcaccatgtcaagctggttcttnggactccctgacgtcgtgatccacccgccttngccttcccaaagtactggggattacaggtntgacatcttttngcccgntccgtttttcttnaaagtngaggctttaaatttctngaactcttaggtg

SEQ ID NO: 316930 - DNA, 732 bp, Homo Sapiens
  misc_feature (23)..(23): n is a, c, g, or t
  misc_feature (34)..(34): n is a, c, g, or t
  misc_feature (69)..(69): n is a, c, g, or t
  misc_feature (163)..(163): n is a, c, g, or t
  misc_feature (229)..(229): n is a, c, g, or t
  misc_feature (247)..(247): n is a, c, g, or t
  misc_feature (254)..(255): n is a, c, g, or t
  misc_feature (259)..(260): n is a, c, g, or t
  misc_feature (268)..(269): n is a, c, g, or t
  misc_feature (271)..(271): n is a, c, g, or t
  misc_feature (282)..(282): n is a, c, g, or t
  misc_feature (286)..(287): n is a, c, g, or t
  misc_feature (290)..(290): n is a, c, g, or t
  misc_feature (292)..(292): n is a, c, g, or t
  misc_feature (295)..(295): n is a, c, g, or t
tctccgggttcctggacctaccnatcccctgtgnaaaagtggcttcccctccccgtgggtggccaaccnacgtactcctctgttcccccctgctttccccggccccaggtcagcaagcttccccttccctcagctgtcacccaactccttcaagcggcctccnacagggctttcggacatgacagcaaccttttctcccccaggacaattgaaattttgcctaaagggnaagggggaaagaaagggnaaagggnngaannaggaaacnnangagacttaaanggannggngnagnagatggccataggagaggagggttcctcttaggtcagatggaggttctcagagccaagtcctccctctctactggagtggaaggtctattggccaacaatcctttctgcccacttccccttccccaattactattccctttgacttcagctgcctgaaacagccatgtccaagttcttcacctctatccaaagaacttgatttgcatggattttggataaatcatttcagtatcatctccatcatatgcctgaccccttgctcccttcaatgctagaaaatcgagttggcaaaatggggtttgggcccctcagagccctgccctgcacccttgtacagtgtctgtgccatggatttcgtttttcttggggtactcttgatgtgaagataatttgcatattctattgtattatttggagttaggtcctcacttggggg

SEQ ID NO: 316931 - DNA, 1613 bp, Homo Sapiens
tgcaggccagctagtttattcaaattgaatctaaaccttagatctctggcttaacaataacaagagaaacctttatagacacaatatatcttgcattaaatcagagacggtttaaatcagtcttgtaacttctaatattctgggctggcaactacagcatgacaaatgtttagtgcagttacaaaatcacattttactttccttggctagcaaaccttaaacaaatctgaaaaatgcactgttttacaaaggcttttaccatatacccactgctgccagtctcaagtaattatggtttcttcatcccccaggaacatttctaaataagggggatttttctttgatccgctcgccttgaagtgtatgtaagaactcaagagagtaagttgaaagaatgaagattaactgagatgccaagaaaagtttttattgcaagcacagtgagcagaaagagatgtcttctcacacaaagtggccacaaggtctgccattaactaaatctctttgacaagccttcattggtttaaagcatatgaattagcttcttgctatcaggtgtacatcatttctgccatgtgggacattttcttgggaatatacaagtaatactccatgtagcctgacaggtcctcaatggtcacatcatccacgaagactcgagcttgctcagaacaggatcggggagagccagacagagttctggcgtgcagcgactgagagtagtcctcaagtgtggatcttcgttctggagccaagggagggacactctgcaggcctgaaaaggaatacacttccatatcatgccatctcttacactggcattccttgcctatgcatgtgcatggcttgccctggtttagcttggaaactgattgaaagtcagagagatcactggctttgagacttgcttggggggacttgggtagcgtcagaggagtcttccttcttactctctgatgggagccttggaacagaagttctcaaaggctcaacgactgcccctgtgtgattagcatcgagagaagtagagctttctcctgcactgaactctttaggggatgaaattcccagcccactgctgccatcaggtgagtcagtctggcttttgtgcttgagttgactgctggaagaagacgctattgtactgcaatgtataaactttggaggatgaaggacaggagacttagaacgtcgacgacgctgagttctcactgctcctcgtgaagacttccttgtagacccgtgccaactgtctttagatgcacatgtggttttaggtttggtatcatctgttgctgttctgactggtgctctgacacctgtgccttctccaacagacagagatgctacagaccctgatgcatccactcttaattttttgaaagcagtctgtagactctcctcctctccatccttggcttcggatttcattgtgcaagtttttacactacttatcgatgttcctgtttacactcctcgcagctgggacgctccggtgatgcggggcagtcagttcagagcgtctctcccaaatctcggcacccgactgacccggatccaaaccagccaagggggcggcccgcgcctcgggagtcgcgttgcgcctgcgcccc

SEQ ID NO: 316932 - DNA, 780 bp, Homo Sapiens
cttcccattattcatggcccatcttcctaaccactgggcatttcccttggcctatgccatgtgccatgggcttgccccctggtttagccttggaaaactgattgaaaagtccagaagagatcactggctttgaagacttgccttgggggacttgggtagcgtcagaggagtcttccttcttactctctgatgggagccttggaacagaagttctcaaaggctcaacgactgcccctgtgtgattagcatcgagagaagtagagctttctcctgcactgaactctttaggggatgaaattcccagcccactgctgccatcaggtgagtcagtctggcttttgtgcttgagttgactgctggaagaagacgctattgtactgcaatgtataaactttggaggatgaaggacaggagacttagaacgtcgacgacgctgagttctccctgctcctcgtgaagacttccttgtagatccgtgccaactgtctttagatgcacatgtggttttaggtttggtatcatctgttgctgttctgactggtgctctgacacctgtgccttctccaacagacagagatgctacagaccctgatgcatccactcttaattttttgaaagcagtctgtagactctcctcctctccatccttggcttcggatttcattgtgcaagtttttacactacttatcgatgttcctgtttacactcctcgcagctgggacgctccggtgatgcggggcagtcagttcagagcgtctctcccaaatctcggcgcccccc

SEQ ID NO: 316933 - DNA, 416 bp, Homo Sapiens
  misc_feature (315)..(315): n is a, c, g, or t
  misc_feature (344)..(344): n is a, c, g, or t
  misc_feature (374)..(374): n is a, c, g, or t
tgggagagacgctctgaactgactgccccgcatcaccggagcgtcccagctgcgaggagtgtaaacaggaacatcgataagtagtgtaaaaacttgcacaatgaaatccgaagccaaggatggagaggaggagagtctacagactgctttcaaaaaattaagagtggatgcatcagggtctgtaggcatctctgtctgttggagaaggcacaggtgtcagagcaccagtcagaacagcaacagatgataccaaaccttaaaaccacatgttgcattttaaaggacagttgggcacgggttcttacaagggaagtnttttcacggagggaggcagggggaggaanttcaggcgttcgttcggactttcttaagtnttcctgttcctttcattccttcccaaagttttattacctttg

SEQ ID NO: 316934 - DNA, 457 bp, Homo Sapiens
taagtgacttatgatcatattttcaacttatgatcatattttccaacttatgatgggtttaatcaggatgccaaaccccatcacataaatggaggggtgtcctataaaacattgttagacctataattttgctgttgattattgggaggtggtatggcacagtggttaggggcagaggccttggagttggactacatgggttcaaatcccagcttggctgttttctgtgcagttctaatccagttctgccacaaacttgttgagtggccttaggtgagtcacataagcactctagatatagcttccttattgcaaaatgtctcaagctaagtttagtattctccctccaccccgaccctgcttctgttcctcttccaggctgccccatctcagtaaatggcccatcagccacccagaaggtcaagccagattcatccttcacatcgaatctaccttc

SEQ ID NO: 316935 - DNA, 339 bp, Homo Sapiens
cattcaagagtttattgctttaagaaaatagtacatgctttcctattaccagttctttaaaattctacgccttcctagagaaaaattatttagaataaactgccttctaaacttataataaagcgtacaataagagtgatcctatttttcatcctttacaaatacaagtggcaattgtcttccagtgcaaattctcctctgtccgtcttatttaatatttctatatgacttttaaaacacatgcaataggcttctaatgttataattcgtaggtagtattcgaccatagtgtcacattatattcagcaataactatgtgcttatctttcaagtatgata

SEQ ID NO: 316936 - DNA, 1908 bp, Homo Sapiens
  misc_feature (1832)..(1832): n is a, c, g, or t
ttttaaaaggacgaaattatgttttaattatgtttttatgttttccccatacatacctcacaaggcaactataaatcaatttagtcagtccatgaagttgtgattcaggaattggtttcattataataacttctaaagttttacaatttctatcagatgccttctaattacaaagaaatctgcttgaaattctaactatatcatgctaggaaaaataaatatttgctgatatccctagggcaaaaacatagtaaaacagtcttaatagaaataaggcaaaaaacaagttaaattgagcagtcacaaactcttcatatagtctacttttttcttcctaatacacttttatttttgttgaaaactatttgaaaataatttaatctttggaatagccaatatcaggttctctaataacataagggagaagagagagatactattggtaaagatagactggatcagtgaaaatccacaggatttccattatctgcaaaccatacatccaggctttataatataactgggtgctcctttacaattccttcctgagtgtgcgccattggagccacaagcatgcaagcctgaaagcatttaagtgagggcgtggcgatactagtcactaacactctgaaccaatgcttcctcccaccaaaatgaacgccttgctctgtctttgtagttcaaaggtggattttggctaaggaggaagaaagaaaggcatgttaacaagtcatggacacattttgatctactgccatctccaaattatgtctgaaagtaaatcgcaatctgttcattcaagagtttattgctttaagaaaatagtacatgctttcctattaccagttctttaaaattctacgccttcctagagaaaaattatttagaataaactgccttctaaacttataataaagcgtacaataagagtgatcctatttttcatcctttacaaatacaagtggcaattgtcttccagtgcaaattctcctctgtccgtcttatttaatatttctatatgacttttaaaacacatgcaataaaagtaagtaattatcctttagtagccatttaaagttatctggtctttccactaggcttctaatgttataattcgtaggtagtattcgaccatagtgtcacattatattcagcaataactatgtgcttatctttcaagtatgataacccttcatttttcttgcgatccatatactctctttttaaaaatcttctaagccacggcagcatagtccttgttttgttggttgttttcattttcttctggactggtaatttttacttctggccttggtggtctttgagggtctacatcagcctcatcttgtccactgccagctccttgagactttctttccttgtctaggaccagttgaagctcattattaacctgctgcagctcctcaccattctcctcatcggtgcctccatttacacgagcagggcgtgcctgctgctcactgtgatccagaatctcctcgacttgctcaggggcatctgtagcctccctacctccttcctcttcaaggtcaccattcattcctgaaaagtcttctttctgttctgcatccttgtttgccttctctccatcttcttcctcgtctactatttctgctggcctctgatcaactgggacctcaacctgagtatcttcatcttcttggacttctgctgtcccccgtgtttcagacctctctgctccagctttgaaaatgccttcatctattgagacaaacacacagtgaaaatcaaaatccaattgtgacatcgtgtggctgaatgctggaattacaatcaaatgcttatttttnatagacatttggattccctttttagttgatagtatttttgtgcaccccctcgctccgaccaccacaccacccccag

SEQ ID NO: 316937 - DNA, 819 bp, Homo Sapiens
  misc_feature (695)..(766): n is a, c, g, or t
tttattatgtaatgcaggtttgtttatttttactttaggaaagtgataccttttatatgccatccattatgtaagatcctcagcagagtctggggcagcaccttgtcagcaaacccattaatatttctacagcaaacatatgaagagtcacactaagtggagtaaataaagactatcaatagctgcatgtcagttcaggtcaggtttttgccatcacatatggttcttgccacaagtcaggttgcttcacatttacaaaaaatgagtcttggaacagcagacaagggcttgtgtcccttcccagaggttcaggtccaggtaaagaagggttcatagaggagacgttgctcaagctgaaacttgaaagatcaactggacaagatgcagaagaactttccaggctgatgagccacaacacacaagaccacaatctgcaaggattctagcaacccaccgggcaactagggccaatcctgagggacacaggatcctgctgctcccagagggtggcaggtatccaggtgcaacagtgaccaggtggtactgactacctgtgccagcgtcacacaactctgggccctcactgtaagcatccagggaaccaagtcctgcaaattgcatttaaacaagttctccaggagatttatccctgctaaagtttgagaaccaccaatttatttgacacatcctaagtnnnnnnnnnnnnnnnnnnnnnnnnnnnnnnnnnnnnnnnnnnnnnnnnnnnnnnnnnnnnnnnnnnnnnnnnggagaaattaagataccaagaggattaaaaaactcatccaagatcgcaaagct

SEQ ID NO: 316938 - DNA, 643 bp, Homo Sapiens
gtctgcccaagtaactttattcgtgtcttctcaaacatttcagatcaaataatgccattttctaatcttgaaaccagcaagattagaaagagaatgaggccatcctttcactcagactttcccagttactcaagattgtattcaggaacgaagtcaaactcggcctcacttcttaattagaataaactagaatcaggtccattgcataactgctaattgttttgcaccagggagccacaaaggaagctaaaactagcctttctaagttatcctaagtttttactatctaaccagcacttctgattttttttcccttaaaactctaaagtacaggtgttgtatgtctgccgcatctgaaaggctgccccggaaatcagagcctatctagcgggaatgtctgggcagtcacccccatcctgcgcgcagatagcaaagggctgctggcaggtgtcagacacacggtaccgcaacagcagtcccgaggtctgagattctgaatgtcagcaggtggctggagagtatcaccagagccactcaggaaccagccatgcggaatggctgggtttcttattgaacatgaaatgcttcctctttggcctggactgttttgctaaaattgttagtgggttttggggcaggccag

SEQ ID NO: 316939 - DNA, 637 bp, Homo Sapiens
  misc_feature (510)..(510): n is a, c, g, or t
cacgagggaatgtacatcttctatactccctcaaaatatatctacgaattatagtctcccaggttctgtatactgtagtaggtcaggaagatctctttcttttgtcatcaagtctggcctaaaataaaaacttggaacttttgagacagaacgaacttccagtttccatcactgctatttactattaaatttagtcaagacacttatcttctctaagcctcaatttctttttaaaactggagataataaatatcaacctctaaggattgttaaaggtttaagatttggtattttaaaaaatttaatataatattgttttacaaaactactggaaaaccgagttcctgccaaatgagcaggtgtgccataaatgtttgttcccttgccttcagcatagtttgttctgtgactcacttaatttacaagtccctagccccacattattggtatcagcagtttacttgttagacttaagaagaaagacagtgaagaagagaggaaggggatgangaaagaaagattcccgagatgttcttgacccccgagaccttcacgatactcgagactttagagaaccgagagacctcaaatgttttatatgtggagatgctggacatgtaccaaaggaatgcccaga

SEQ ID NO: 316940 - DNA, 818 bp, Homo Sapiens
tttggctataaacaaggcaggcactttcataccctttagctttgagaatagatgtgtacacagaaatataaggtgcatgtaaatggttcttctccggtgtgtttaactgattgtaagcgtacccttgtcacagagcatacccagcattccagccccaggaacaaacccaggccccatcaagtggcaaacagacctacctacaccaaatcacacacacgcactcacagctgcagtttgtgcccttgctcctacagactcatgtcctcgggaaccttcacttgggtacccagtgcccgccatcacagctcagcatccacacagggaaattccttgtgctgcttttgtcacttatcatttctccttttgatccaaattgtttgtgtttctgtttgtttttttaactataaactctgtgagctcaggatctatatctgagtcaatgctgtataccccacagcaggctacctattatcggtgcttaataatgtgttcaaatggatgcagagacacagaatgatgtggccggaatgaggtcatgccaagcttctgacatttggtgcaggcctcctggattctcatctctctagaggactcccacagatactcatgcgcctgccgatgagtacaggcctggagcccacaaagcagctcggaagaggaggggaacgagtgggaagtgggagacaggactattagaggtagcaatgaaaagactcaggaagcgaacaaacgtgggtatgtgggcatagaccccagatggcccatccttggtcgcttggtcccttccacaccttgacactttagtgggatcttgaagg

SEQ ID NO: 316941 - DNA, 1067 bp, Homo Sapiens
tccctcttgacattcaaaacagttacttaagattcagttttcccactttttggtaatatatatatttttgtgaattatactttgttgtttttaaaaagaaaatcagttgattaagttaataagttgatgttttctaaggccctttttcctagtggtctcatttttgaatgcctcataaattaatgattctgaagcttatgtttcttattctctgtttgcttttgaacgtatgtgctcttataaagtggacttctgaaaaatgaatgtaaaagacactggtgtatctcagaaggggatggtgttgtcacaaactgtggttaatccaatcaatttaaatgtttactatagaccaaaaggagagattattaaatcgtttaatgtttatacagagtaattataggaagttcttttttgtacagtatttttcagatataaatactgacaatgtattttggaagacatatattatatatagaaaagaggagaggaaaactattccatgttttaaaattatatagcaaagatatatattcaccaatgttgtacagagaagaagtgcttgggggtttttgaagtctttaatattttaagccctatcactgacacatcagcatgttttctgctttaaattaaaattttatgacagtatcgaggcttgtgatgacgaatcctgctctaaaatacacaaggagctttcttgtttcttattaggcctcagaaagaagtcagttaacgtcacccaaaagcacaaaatggattttagtcaaatatttattggatgatacagtgttttttaggaaaagcatctgccacaaaaatgttcacttcgaaattctgagttcctggaatggcacgttgctgccagtgccccagacagttcttttctaccctgcgggcccgcacgttttatgaggttgatatcggtgctatgtgtttggtttataatttgatagatgtttgactttaaagatgattgttcttttgtttcattaagttgtaaaatgtcaagaaattctgctgttacgacaaagaaacattttacgctagattaaaatatcctttcatca

SEQ ID NO: 316942 - DNA, 657 bp, Homo Sapiens
  misc_feature (140)..(140): n is a, c, g, or t
  misc_feature (162)..(162): n is a, c, g, or t
  misc_feature (169)..(170): n is a, c, g, or t
  misc_feature (173)..(173): n is a, c, g, or t
  misc_feature (452)..(452): n is a, c, g, or t
  misc_feature (627)..(627): n is a, c, g, or t
ctcccaacctattttaagtgggcaaccccccaggttttcccagttcccgccggtggtaaaaccgggccctggattttttattccccccccttaggggggaattggggcgcggggcccccctaaagaaacccaatttaggncaaaatttgtccccgccccccnctatatnnttngctgttgttgcttttaatcaatcttttattcacagctacaaactttaatcaattatggataaaacacaaaagctttttgaaatgctgataaaggaacccataccgagagaccaaataaaatccgagtgctgagctggccatgggcttggcaggtcagcagcacacggaggcacagagatggtggcaccaacagaaaggaatgtgggaaaattttgtcccccagataatatgaatagaacagtaaaatgaggttcagggttgaaatggcaaagccaacgnttgctgtcattctcttgggtcccttccatgtgctgggctacgattataaatggggcatgctggctgcatgcagggggctcctggccctccagggagacagacactgtcacaccagggctgagcaagtgccataaagtcagggttttgtttgggggccagggttttaaagaccagnctgggcaacacagcaagatgcctttttaca

SEQ ID NO: 316943 - DNA, 652 bp, Homo Sapiens
tcaaaattaaaatctgagtcagtccgcctgcctcggttctcattagtttaattcttaatgccttgcactttccggcaatcattcaatcaaaagagtgaaatgaagcacattaacaaagcaggaggcgccacggaccgcctccctccacaccgctccttccgccttcattccttgcccacaggcttgcactggaagctgaataagaatccccaaaactcaaacttcctagggatgccacccctttagtagctcacacctcccccctccaagagctaagaaacaaaggagaatgtacttttgtagcttagataagcaatgaatcagtaaaggactgatctacttgctccaccacccctcccttaataataacatttactgttatttcctgggcctaagactctatgttccagaactgtcacagctccccatgtcacactcactagcttgtgatctttgtcaaataactgaaatcttttaagcctctagtttcttcctttgtaaaacagagataaaatgttgtggtttttaagtgagataatccaagtaaagcacctaacatggagtagtgaattaacatcggttgctactaaaagtggacatcctactgcatccttaatgccactaggcatttccatacaatctggggacaata

SEQ ID NO: 316944 - DNA, 890 bp, Homo Sapiens
  misc_feature (170)..(170): n is a, c, g, or t
  misc_feature (602)..(602): n is a, c, g, or t
gcccccacagaaaggttttggaaatagctctgggaggggcttctcccaggacagtttccagttggtgaatagtctttgggcactgaggttttacttcttcacattcatcttccatcaactctgctaagaaagggaatggattctggtagcaagacaatataattctcctntagttttcgagccagtgctaccacagtaatcaaagcagcaaatcgaaccttaggcgaggagtctctcgtctttagcagaatctggtagttcagtgtttccaaagagagtcatccgccatggccactgaaaactgtgcgatgcatggtatcaggtgctttgtcacccgttcctggaatttctcttctcccccaagcctgttttccagctgatccaccagaggcatcatcaaggctcctgctctctctttacttataaaatgctgggtatcaaaaaggaagattttgtataaacagttcaaaataaactgcaacagcaagcagcacttttcagggtcattttcagagtcaaaaaatgcttcatctgttttggagatgttcacctggtccaaggtgtcagcaaaaggcttcactaagtggccggcaaacagagtnaaaaagccctttcaagcttttccagcaatgcaatctgcccaagttgtaaaatgtcaacaacctgtcctttggggcatcttctgttttagcccaatcaaacagcttgaagaacaggggcctgaatgtgacctcggaaagtttgacaaccatggctactagacagtcaatgatacaattttccgtttttccaacttcctccagatcgttctcagagtgctgggctcggaagtccagggcctccaggaaaaaggcggttagctgagactgatgggaggtgagctcttcctt

SEQ ID NO: 316945 - DNA, 1015 bp, Homo Sapiens
  misc_feature (265)..(265): n is a, c, g, or t
caaaagctaacaatacccaactactgcttgctttccttattatagacaaggcatgtgaggaacacctagacgtttttaaagccccaaaactaggatattgtgacacagaatgttttttattcagtgctgagatgggagtttatcccaagcgactgtcctgggcccctcatacaattatagtggtgaccagtcaggggctgtgggtgaggagacctgccagaggtggctggaggcactttattgccagcctggcgggctcggaagncgccaatggaagtaaaatctgggtgacacacttgagtttgcatgcggcattttattttattgggttttttttaaaggaagagattataaaaagacatttcacattaaagatttgcagtcctgggacacagtttggaaaacactatttataaggttgcacatattacaaacagctcccaaatggtgaaactggtattctaagatgaaagcttaatgaacataatgaagtgaataaacgcatgtgaactaatgtttaaaaagttagagcttgtctcaagtcagtacagctcttaagataataaatacagtaacactactttttatttctttgctcttttatccctttcaggttcgatttgctgctttgattactgtgttagcactggctgaaaaactaaaggagaattatattgtcttgctaccagaatccattcctttcttagcagagttgatggaaggtaattcccaaactattcccaaccattaaacaattaaggaataattcagtaaaattctgtgaaaatgtgcccaatgataatgcagatttggatataacgtgactagcagttgatccagtcctcatacaggcagctccagtctcaaatacaggcaggctcgagctcctgttttgagttgggtggagggagcaagttgcgaagtgaccacctcctgatcatttgagagtccgtttacagtgtaatcttcacgatcttttcttttgtggtggtttgtgatcatacaagcagattac

SEQ ID NO: 316946 - DNA, 450 bp, Homo Sapiens
  misc_feature (27)..(27): n is a, c, g, or t
taataatacggtaacactacttttaancccttggcccttttaacccctttcaggtccgatttgctgcctttgaattacctgtgttagcactggctgaaaaacctaaaggagaaattatattgtccttgcctacccagaatcccattccctttccttagcagagttgatggaaggtaattccccaaactattcccaaccattaaacaattaaggaataattcagtaaaattctgtgaaaatgtgcccaatgataatgcagatttggatataacgtgactagcagttgatccagtcctcatacaggcagctccagtctcaaatacaggcaggctcgagctcctgttttgagttgggtggagggagcaagttgcgaagtgaccacctcctgatcatttgagagtccgtttacagtgtaatcttcacgatcttttcttttgtggtggtttgtga

SEQ ID NO: 316947 - DNA, 488 bp, Homo Sapiens
cctccagcaggtagcgcaggcgacactggctctcctggtagatgaggtactcgctctgggagaatgtggagctgctgaactctgggcagggcacaggctggccctggggcaccaccacttgctggccatccagctccaactcagtgtcctgggtcggatcaggctcggtgtggcctcgggcaatgacactgtcgaagccaggaggtgggctcttcaagctggggttgtccgtgttgatatggtgctctctgcccagggccacctcacccaggaacatgtagccgacatggtgggccccacacttcatgccaataacatatccagctgacttgctgttctctgaggcaaagtagatgcccttgccaacacgcccaccagaatgtggcatgatgcggagcccactagtgaggatggcggccaccacggccatgttggtgccatgccacagcagcttccgattacccagtttggagtgggcctggaatctg

SEQ ID NO: 316948 - DNA, 592 bp, Homo Sapiens
gccttgtcagccgactggagtgcccccggctactgtgggaggcgtggtgcagccgtgcctcggtcctgccggggctgggcagccccagtccgtgcctccgccgcagatgggtggcagtggtccgctgtcagccgtacctggtggccctcacgccgtggtgcccggagttcccaacgtgcctgcagccgtgcccgctccaagcgtgcctagtgtgtctaccacttctgttactatgccaaatgtacccgcggcctctggcccagtccgcaacagctgagcaggcataacgccagtcagcaggagcagcagcataatccagcatgttgggctgcccttagcgccaggcacacacagcgcaccaacaagtctaccacagtctgacctaagccagtttcaaactcagacccagcctttagtcgggcaagtcgacgatactagaagaaaatcagaacccctacctcaaccaccactttctctcattgctgagttaacacctatgaacagtctggccacctctgtattcagcatagctattcctgttgatggtgatgaagacagtgcatctgggggaggtgttgtagccattgacaac

SEQ ID NO: 316949 - DNA, 1796 bp, Homo Sapiens
  misc_feature (462)..(462): n is a, c, g, or t
  misc_feature (473)..(473): n is a, c, g, or t
  misc_feature (1728)..(1728): n is a, c, g, or t
  misc_feature (1765)..(1765): n is a, c, g, or t
  misc_feature (1789)..(1789): n is a, c, g, or t
gatcggatcctcacacgactgtgatccgattctttccagcggcttctgcaaccaagcgggtcttacccccggtcctccgcgtctccagtcctcgcacctggaaccccaacgtccccgagagtccccgaatccccgctcccaggctacctaagaggatgagcggtgctccgacggccggggcagccctgatgctctgcgccgccaccgccgtgctactgagcgctcagggcggacccgtgcagtccaagtcgccgcgctttgcgtcctgggacgagatgaatgtcctggcgcacggactcctgcagctcggccaggggctgcgcgaacacgcggagcacccgcagtcagctgagcgcgctggagcggcgcctgagcgcgtgcgggtccgcctgtcagggaaccgaggggtccaccgacctcccgttagcccctgagagccgggtggaccctgaggtccttcanagcctgcaganacaactcaaggctcagaacagcaggatccagcaactcttccacaaggtggcccagcagcagcggcacctggagaagcagcacctgcgaattcagcatctgcaaagccagtttggcctcctggaccacaagcacctagaccatgaggtggccaagcctgcccgaagaaagaggctgcccgagatggcccagccagttgacccggctcacaatgtcagccgcctgcaccggctgcccagggattgccaggagctgttccaggttggggagaggcagagtggactatttgaaatccagcctcaggggtctccgccatttttggtgaactgcaagatgacctcagatggaggctggacagtaattcagaggcgccacgatggctcagtggacttcaaccggccctgggaagcctacaaggcggggtttggggatccccacggcgagttctggctgggtctggagaaggtgcatagcatcacgggggaccgcaacagccgcctggccgtgcagctgcgggactgggatggcaacgccgagttgctgcagttctccgtgcacctgggtggcgaggacacggcctatagcctgcagctcactgcacccgtggccggccagctgggcgccaccaccgtcccacccagcggcctctccgtacccttctccacttgggaccaggatcacgacctccgcagggacaagaactgcgccaagagcctctctggaggctggtggtttggcacctgcagccattccaacctcaacggccagtacttccgctccatcccacagcagcggcagaagcttaagaagggaatcttctggaagacctggcggggccgctactacccgctgcaggccaccaccatgttgatccagcccatggcagcagaggcagcctcctagcgtcctggctgggcctggtcccaggcccacgaaagacggtgactcttggctctgcccgaggatgtggccgttccctgcctgggcaggggctccaaggaggggccatctggaaacttgtggacagagaagaagaccacgactggagaagccccctttctgagtgcaggggggctgcatgcgttgcctcctgagatcgaggctgcaggatatgctcagactctagaggcgtggaccaaggggcatggagcttcactccttgctggccagggagttggggattcagagggttcatttgggtccagccatactggcctcaatggcggactcagtcacattaactgacggggaccaggncttttttggttcgagagcgccctcatggtgctggtgnttttgtgtttagtcccctggtganacaagca

SEQ ID NO: 316950 - DNA, 910 bp, Homo Sapiens
taagccgagctgagcggatcctcacacgactgtgatccgattctttccagcggcttctgcaaccaagcgggtcttacccccggtcctccgcgtctccagtcctcgcacctggaaccccaacgtccccgagagtccccgaatccccgctcccaggctacctaagaggatgagcggtgctccgacggccggggcagccctgatgctctgcgccgccaccgccgtgctactgagcgctcagggcggacccgtgcagtccaagtcgccgcgctttgcgtcctgggacgagatgaatgtcctggcgcacggactcctgcagctcggccaggggctgcgcgaacacgcggagcgcacccgcagtcagctgagcgcgctggagcggcgcctgagcgcgtgcgggtccgcctgtcagggaaccgaggggtccaccgacctcccgttagcccctgagagccgggtggaccctgaggtccttcacagcctgcagacacaactcaaggctcagaacagcaggatccagcaactcttccacaaggtggcccagcagcagcggcacctggagaagcagcacctgcgaattcagcatctgcaaagccagtttggcctcctggaccacaagcacctagaccatgaggtggccaagcctgcccgaagaaagaggctgcccgagatggcccagccagttgacccggctcacaatgtcagccgcctgcaccggctgcccagggattgccaggagctgttccaggttggggagaggcagagtggactatttgaaatccagcctcaggggtctccgccaatttttggtgaactgcaagatgacctcagatgggaggctggacaggtaattcaaagggcgcccccatggcttcagtggaacttcaaccggcccctgggaagcccttaaagg

SEQ ID NO: 316951 - DNA, 605 bp, Homo Sapiens
  misc_feature (127)..(213): n is a, c, g, or t
  misc_feature (320)..(330): n is a, c, g, or t
aaaggcgttcacaatatattgataaaagggaaaagttgaagtttcctgccagtttgtgagaggcagctgttgcttagtgatcaataattaagaacacacaggctgtgtggaggcagacacatggatnnnnnnnnnnnnnnnnnnnnnnnnnnnnnnnnnnnnnnnnnnnnnnnnnnnnnnnnnnnnnnnnnnnnnnnnnnnnnnnnnnnnnnnctgtggttaagtgagattatttgcacattcaattgacaatatttattgaacatctctgtggcagggaaacaaatggttcctgccctctgagagcttccagtctagcnnnnnnnnnnntcagaaatcccacacccgtattaaacataaaaataaattacagatgatggtacaagtgatcaaggaaaggtaatggatgtgatgaaactaacaagggccctgacttgtgctgtcaagaagcctctgaagaagtgacatttaagatgaaacctaaaattatgagagaactgcagctgttacagccaaaggggaaatgatgacatggacaaaggcctcgaggcaggaggagctgctggcagccagctctcggcataagctttggcatacagtaagtg

SEQ ID NO: 316952 - DNA, 711 bp, Homo Sapiens
acagtcttattgttagtagtaatactgtattatttagaaacacatatatgttgtgatacttacataagtaacaacatcatttgaagaaccaagatattcagcataagataaaaatgatacaagtataacataacccaaaattagcctgtatttataaatttgaaatatcaccattaattcatgatttacctagcactacctactgaaaagacccagaaacaatgacaaccagtaggaatgaacatgtcagcatccaaattgttgcttccaaatagtattatctattaaaaggatcacggttccttagaaacatggctgattccaggcatgacgcaggaagtatacatgagcctgggacgtcttactattccagaaaacaagaaactatcaaagataaatgggggaaggaattaaaaaatacaggaaccaacttagtaattcctaatggctacagatggcacaatgtgaacatcaaaaaagaatgatgactgtaactgatcataaattcaatacataaaaaaaacctcaaaataatagacctaggcaataatcatatgacaatggctgttagaaccattaaatgaaaggacaatgtgagcatcgccagaaagacattctatacctcctaaaacgatgtaacaggaaggccgctatatcatttaagtattcttgtgaaagaaactggacatggatctgaccaaccctctggat

SEQ ID NO: 316953 - DNA, 1046 bp, Homo Sapiens
  misc_feature (418)..(470): n is a, c, g, or t
  misc_feature (676)..(697): n is a, c, g, or t
ttcaaagccagctaataaaacatgttggaagcgtatcaaatttcagttcagagtctaagagtgatattcttgaagatctctcccataagtaagttgcaagaaactttgtgacatctcctctggcagctgaaaggcctttaagacgtaattcctgatttttttgctttgccagagaggtaacttctggataaatgaccttttcactaaccctccatgtactctacctgtccttaaaaaggctattagaagtgggaccatggatgtaaaagcactttaaaaaggcataaactgtgaaataggtattgtttagcccatgtatctataaagaaacacacacagatgggccaaattgaatcaaccccaatgtttttatttaatttaaagttttaaagggcagtggttaagcacattatgtatnnnnnnnnnnnnnnnnnnnnnnnnnnnnnnnnnnnnnnnnnnnnnnnnnnnnnggaaaccaaccccttttcaactttagccactgatgagctaggcccactgtctagtgcatgactcactttctacttcttcataggaccaattctaaaagtaaaaataaacaccctttatcagtttaacagtaactaattgtgtttcttttttttaaataaataaagttactattaaactgatcacatatggtagaaacgtagaactnnnnnnnnnnnnnnnnnnnnnngtccccaatttaaaatgtgatgtatgaatgacctatatgtacaaatgggtgctgctgactcccccaccccaagcagaggccatgaaagaactcccattactcagggagtccccattctctatgctgggatggaggatgtgtgtgttcctggcaccccgggttagacctcagaatgcacactccccaagcgctgatacagatggtggttcagttctatggtactagtgttcaggtacattagggaataaataggcatttgtagctgcctgagaactaaaccatcatttataactctttatagggagaaatgtattctgaagttttagctaactgacatacaaacttttag

SEQ ID NO: 316954 - DNA, 1196 bp, Homo Sapiens
  misc_feature (1057)..(1057): n is a, c, g, or t
atcagggcaaaggaaattcttccagaggtgatgatgcggcagatattcccagtgctctcccaaagcaagctggccctcttgtcatcctctcagtgggcggcaccagctgcccctccttccacaagtactcaagcctgtttgtaaatactgaaggaattgatggggttgaggaaaggaggtgcatgtgaccagggtcccaaggccacagcttttcagatcctaggaagcaagtggcatttgcttgagttgtggcctcggaaggagaatgtttatctgttttctaactttgctgacaccaggattctccctgtcattgagaagaaagcattatctaattaccttcaggtggtttacttattctgtaaagaatatgtgtaaatattttgtacagagccctgtgtcaaataaacagccatatgtggttactaatcacctcttctgtcattccgtccttggccaccgctcagtgggaatggtctctgatctggatgctcccaccttccatgtcaggcccagaactgtgccatggtctgtggactcctggtcagccttgactggctaggagaccttgggcagtacctacagtcttgctgtttctgtttcatctgcaagaattatgacccacacactccagctgcagcccagggcactgtgatattttatacgtgtgtagatgtttttgtccacagttcctggttcatcactcccataaccctttgttataatgttgggacactgcaggcctcagaaaacggaatctctgtctgtgaccttctcctgccccatttcacttgctcaacaccagactttaatctgactgtagctcataagaccctcattccagagagggtgctgccccatacccggaaggaggaacgctgcacagagaggccaagaagcatctggacagacaggccttgctgggtttagaccttatgctttttgtccagtttcatctcaacacagctgccatgcttcagccattgcctatccaattgacgtctccataaaaggcccatggaacacgggagcttctgaagagcttgaacatgtggangggaggggaactagaacttgtccatgtgccaagagggtggcgcacccccactccattggggacagaagctccagcatttgcccaggacccgtccagacctcaccctgtgtgtatcttcatctggctgtttacttatttg

SEQ ID NO: 316955 - DNA, 384 bp, Homo Sapiens
ctatttgcaacagtttataaaggcaaacaaacacctgcaattgaggtagcaaagccaaattcacaaactttggatcaagaaaaatacccttcctatgttttaacagcatcttctatacaatagtgaatgaattctaattgttccaaaatttttaattcacattactttacaaaattttatttaaaatactgaaaatgttttgttaaaaagacagttagtcctgacaatcatctcacattcaaaatactgtacaaaaaaatctgaagtcaccatatattacaaaaaactaagctatgtatttacattttcaatgtagttttagaagttgaggttaagccaactgctacaaatggtctcctttaagcagtgtctgctaatctcgtg

SEQ ID NO: 316956 - DNA, 368 bp, Homo Sapiens
  misc_feature (65)..(173): n is a, c, g, or t
catagtgaaaccctgtctctactaaaaatcaaaaaattagcctggtgtggtggtaggcacctgtnnnnnnnnnnnnnnnnnnnnnnnnnnnnnnnnnnnnnnnnnnnnnnnnnnnnnnnnnnnnnnnnnnnnnnnnnnnnnnnnnnnnnnnnnnnnnnnnnnnnnnnnnnnnnagagagaagcatgacaaaacacatgagcagcaatatgaaagcatatatttatacttcattgcttcattctaagttggaaacatgaagtaataaaagtaccttgattctttatttagagataaagtaatgaccctttaaagtaacattagaccaggcccagtgtctcattcttgtaatcccagcactttgggaggc

SEQ ID NO: 316957 - DNA, 119 bp, Homo Sapiens
gctgtgtcatcccactgcctcctagcctccatggtttctgatgaaaaacagctgttaatcttatttgaggatactttatacagtcagccctccatatccacaggttccatatctgcaga

SEQ ID NO: 316958 - DNA, 700 bp, Homo Sapiens
gaattccacaataaaacacttgcttttctttttgagaaaaattaggttccttttcatctatttaattattgcccatgtcaaatgcttggttttgaaaactgaggaattctatctgacaaagatgaaaccagctatagttgcttgtaaatcatcctttctagtgatcacataaaatgaacagtagacagcaaataatttaggaattgaacctatacatttatcttataattttgctgacttaagtttccctttcttggtttatgatgccagcagaacttctgtgtaaaattatagtctgttctactgttctcagtttcaggcaactgatttcaaatgcctatgaaaccactccaattaagccacatgggggtgctagaaacttatagtatgccagtcacagcagtggaaaagacctggggtggaaaatagcagatgttattgtgatttaaatttccacttgacatacgttctgatttttggacaaattcaatgttttaattgaatagttttcgttacaaccagaaggcaggttgagattctaactaagcataaataagggtatattgatagtgaaaaaggtccttggaggattaaaacaacacactgttacagatcatttataatatttttctgacttccacattctgttgcatttatttgccgacaatttgacattttcaatctccattttctggcataa

SEQ ID NO: 316959 - DNA, 1062 bp, Homo Sapiens
  misc_feature (22)..(23): n is a, c, g, or t
  misc_feature (735)..(735): n is a, c, g, or t
  misc_feature (741)..(741): n is a, c, g, or t
  misc_feature (745)..(745): n is a, c, g, or t
  misc_feature (749)..(749): n is a, c, g, or t
  misc_feature (764)..(764): n is a, c, g, or t
  misc_feature (771)..(771): n is a, c, g, or t
  misc_feature (788)..(788): n is a, c, g, or t
  misc_feature (877)..(877): n is a, c, g, or t
  misc_feature (882)..(882): n is a, c, g, or t
  misc_feature (896)..(896): n is a, c, g, or t
  misc_feature (913)..(913): n is a, c, g, or t
  misc_feature (926)..(926): n is a, c, g, or t
  misc_feature (932)..(932): n is a, c, g, or t
  misc_feature (934)..(934): n is a, c, g, or t
  misc_feature (938)..(938): n is a, c, g, or t
  misc_feature (965)..(965): n is a, c, g, or t
  misc_feature (967)..(967): n is a, c, g, or t
  misc_feature (969)..(969): n is a, c, g, or t
  misc_feature (976)..(977): n is a, c, g, or t
  misc_feature (989)..(989): n is a, c, g, or t
  misc_feature (995)..(995): n is a, c, g, or t
  misc_feature (1000)..(1000): n is a, c, g, or t
  misc_feature (1005)..(1006): n is a, c, g, or t
  misc_feature (1009)..(1009): n is a, c, g, or t
  misc_feature (1013)..(1013): n is a, c, g, or t
  misc_feature (1024)..(1024): n is a, c, g, or t
  misc_feature (1052)..(1052): n is a, c, g, or t
  misc_feature (1059)..(1059): n is a, c, g, or t
ggacggagcctcagcttttcanntccccctgcccgtctccctggctcttcccataatactcaagggcaagagtgatgagataatccaatatctgttttattaaacacctagacatttctggcacatgtttcccaaatggggacctcaaaatctatactctccagctttaagactcctagcattcaatctacatttactctcccatgggtaggacagtcataatgctttcacataaaattgcagtatgaactgatggacaagaactctgggccaggagtcaggaggcccaggtcctcaccctggcccagcgactcataaagtcatgcaaccatgagcatcactgcctcctgggccaaagtgagcacaaaggtcctctctgtggtgaaatgcccttgcatttgtcttctaaggtaggagggcagacaccattgcctttggtctacaactgaggaaacaatatagggagtcaggtcacagcttcaaggtgacatggccaggcaagtggcagagccagacctgggtcttcacacactttcctcttcttgactgtactggcgcaggtgcttaagatttgggggaaggttggtgggtatctggcctcttctttgggactcaaattgtgatatctcatcttagaacccacaggctccctctttagggctgaggtgagaagttctgaaagtcaagcagacacatccaggcatttgggcaagaaacttcttccttccaaatcanaggtgnaatntttncgataatgagcccangggggangaacaaaagagaatggngggctagtctcgaggatggcctaattcagagtttcctaagtgtcagccattcatggaaccacccctgtgatttttgctacctctctggntctgngcccacttttacgntatgtttttgtttaaantgattcactattntggggngnagtnatctttatcctaaacagatcatctatnanantacaagnnaatattctaatnatattnggggntaggnnttnaatntatacttaatnaaaaatattaatttaatacatctaaatnttttatnaac

SEQ ID NO: 316960 - DNA, 931 bp, Homo Sapiens
  misc_feature (38)..(38): n is a, c, g, or t
  misc_feature (89)..(89): n is a, c, g, or t
  misc_feature (149)..(179): n is a, c, g, or t
ccgggttaacccatcaactggtaaaggatgtgtttttnccatgtgtaacacgtttccacagcactgtccacaccctgttaagttatccncagttagattttgatcctcacaacccaccctgtgaaagtactggacaggtaaggcaagcnnnnnnnnnnnnnnnnnnnnnnnnnnnnnnnaggtttgaatcaagaagtgaccaggcccagtagtgtgctggtaaatgttgaacaactggctctcgaggagggaaaaagccctgttttatggcatttagcaatttctgtggtgcaaatattcccaccatagcagattttaagctgccaacagctctcacagcctggtgcaagccagctctggcgtactactgcaactgcccaacggtcacacagtaagtcagtgagcgctaaggcttgaagccaggccaaggctcctatccaacaatctcgtaagcacagaagaactcagtaccagttccaaaatcccttctcttatcaggcttcatccccaacatgcttgtccactgagatcgcataccccattgttggctgcaagccaaagatatttcacagctctctgctcatccaggtagggctccttggtgaaaagcaccccgaggaaagcttgggcctctctcaagcctgagtctgcagcctgcttcagcaaggacactgccctctgccgctcagggttccacgaagaggctgggtctcgtagtaggcacctggcatagcggtactgagccaggctgtggccctggctggcagccaactgataataaaggaccgccttgctaatgtccctgggggtgcctctgccatgctcatgacacaagcccgcattgtactgcgctttgctgtagccgcgggctgcagctttctggaagtaagaaaaggccctcgtgccgaattcgcgcgcggcgagaaggaga

SEQ ID NO: 316961 - DNA, 773 bp, Homo Sapiens
  misc_feature (30)..(30): n is a, c, g, or t
  misc_feature (36)..(36): n is a, c, g, or t
  misc_feature (201)..(201): n is a, c, g, or t
gagtccaggtcaccagcttccaagggtgancatggnccaggcaagtgggcagagcccagacctgggttcttcacaacacttccctcttcttgactgtactggcgcaggtgcttaagatttgggggaaggtgggtgggtatctggcctcttctttgggactcaaattgtgatatctctctgagaacccacaggctccctctntagggctgaggtgagaagttcttagccaaaacctagtcttacaacactcctttccagtgggtaggggtgtgggggaatagccctgctggaggcttccaggctggctccgagatgcccacttctgcagaggaggccaaggttgcttgtgctcgaggcatgtggtaggcgtgaggttcctgctagcagggtgttcaagctgcagagggaggggttggagaaagacttcagtcctgtaactgtcaggtcgctgggccccggggctgcagcccccatggaaaagagggctcgcagcctctcctgggcggcctcatttcccagagcggctgactgctggtaacatctcaaggcctctcccagattcctctgcacaccaaggcctttctcatagcaaattccaaggtggtacctgctctgtgagtccccattgttggctgcaagccaaagatatttcacagctctctgctcatccaggtagggctccttggtgaaaagcaccccgaggaaagcttgggcctctctcaagcctgagtttgcagcctgcttcagcaaggacactgccctctgccgctccc

SEQ ID NO: 316962 - DNA, 777 bp, Homo Sapiens; identical to SEQ ID NO: 144808
  misc_feature (146)..(159): n is a, c, g, or t
  misc_feature (243)..(243): n is a, c, g, or t
  misc_feature (273)..(309): n is a, c, g, or t
  misc_feature (313)..(313): n is a, c, g, or t
  misc_feature (363)..(373): n is a, c, g, or t

SEQ ID NO: 316963 - DNA, 666 bp, Homo Sapiens
  misc_feature (37)..(37): n is a, c, g, or t
  misc_feature (122)..(122): n is a, c, g, or t
  misc_feature (304)..(304): n is a, c, g, or t
aactgaaactgccttactgttcgggactgcccgtccntggcatctgtgacttgaattccctttaggatatactgtggcatgttgtactcagccatgggatctacaacaaagtactggtatcntgcagaccgttctgctggccagtattggtgacatttctctgtgcccatttcacgcagcttggtgagcatcacatctatggtggaattgtgttcccagagcatccgccagaagtcttcagtggtctctgccaagggcccctgggtagcgatgtaggctttctgttgtctgtatccatcaatanaacttgcaattgatgtaatcagatctttctattccacggatagtgattttattacatggaagattggcactgataacctttgaggtgtgagcttttgagctggctagacgcttaaattcgagctccattcctgtgacattctctcccgtttctatttgtgtcagcttttgaatgtaggcatacaagtttctagctggcacttcggtatttccacaagtcactgcttctaacagtgcatcatggataaagatgtattggtcttctgtttgaaccatatagttcctctgggctctcattaaagttacatggccataaatatctacagttttttcatgctttattctttctaacatggcatctat

SEQ ID NO: 316964 - DNA, 405 bp, Homo Sapiens
cggctgcaggaattcggcacgagcccacgctgcaggatggcctcctgggctaagggcaggagctacctggcgcctggtttgctgcatggccaagtggccatcgtcaccggcggggccacgggcatcggccgtaagttggagagattgaagtctgcggcagatgaactgcaggccaacctaccttccacaaagcaggcacgagtcattcccatacaatgcaacatccggaatgaggaggaggtgaataatttggtcaaatctaccttagatacttttggtaagatcaatttcttggtgaacaatggaggaggccagtttctttcccctgctgaacacatcagttctaagggatggcacgctgtgcttgagaccaacctgacgggtacctctacatgtgcaaagcag

SEQ ID NO: 316965 - DNA, 1095 bp, Homo Sapiens
caggaatagtttttccatagatataattaataacacttaaaaataagaaaaatgttttccataccaactataagcttttaaaaagtacagaagcatatcctcaagatgtgaaggcactgggggatggaggacaccttgtttcctcagctcagagcttagctttctccttaaaggtctccttcatctttttgacaccagaaaggtcccctgcttcccttgggcccgttgtccatgatctggtccctcatccgagtgagtatagagactcgggcccccatccacatccaccgactgtcccagtgatgaaggaagttgcaggagccagtaggaagcagcccacagaggggccctcctcaggaccaccaattcgtttagcggggattttctaaaaagacccttcaaagaagctttgtccccaggacccatagttctccacagcagtctgggaataaataactccaggggcaacacaattgatccgtattccactgcaggcccattccaaagctaaagatttggtgaggttgtaaacacctgctcttgcagctccagaatgcacagctaatggaaatccagctttagtagggacaatgatattgacgatagatcctccatgctctttcatccaggagctgtaaactgctttgcacatgtagaaggtacccgtcaggttggtctcaagcacagcgtgccatcccttagaactgatgtgttcagcaggggaaagaaactggcctcctccattgttcaccaagaaattgatcttaccaaaagtatctaaggtagatttgaccaaattattcacctcctcctcattccggatgttgcattgtatgggaatgactcgtgcctgctttgtgggaggtaggttggcctgcagttcatctgccgcagacttcaatctctccaacttacgggatgcaatgaccacattactccccagctccaggagctccttcacgatggcttttccgatgcccgtggccccgccggtgacgatggccacttggccctgcagcaaaccaggcgccaggtagctcctgcccttagcccaggaggccatccctgcagccctcgtgccgaattcgccaccca

SEQ ID NO: 316966 - DNA, 1015 bp, Homo Sapiens
ccccaatattttaaaggccactggggggagggaggaccccctggtttcctcagacttaagaggtttagtgttcccccttaaagggtcgccctccatcttttttgaccaccagaaaggttccccttgttcccttggggccagttgtcatgatctgggtccctcattcgagtgagtataggagagttccgggcccccatcccccatccccccgattttccagtgatgaaggaagctgcaggagccagtaggaagcagcccacagaggagacttcctcaggaacaccaattcgttagcgggggattttctgaaaagacccttcaaagaagctttgtccccaggaaccatagttctccacagcagtctgggaataaataactccaggggcaacacaattgatccgtattccactgcaggcccattccaaagctaaagatttggtgaggttgtaaacacctgctcttgcagctccagaatgcacagctaatggaaatccagctttagtagggacaatgatattgacgatagatcctccatgctctttcatccaggagctgtaaactgctttgcacatgtagaaggtacccgtcaggttggtctcaagcacagcgtgccatcccttagaactgatgtgttcagcaggggaaagaaactggcctcctccattgttcaccaagaaattgatcttaccaaaagtatctaaggtagatttgaccaaattattcacctcctcctcattccggatgttgcattgtatgggaatgactcgtgcctgctttgtgggaggtaggttggcctgcagttcatctgccgcagacttcaatctctccaacttacgggatgcaatgaccacattactccccagctccaggagctccttcacgatggcttttccgatgcccgtggccccgccggtgacgatggccacttggccctgcagcaaaccaggcgccaggtagctcctgcccttagcccaggaggccatccctgcagccctcgtgccgaattcgccaccca

SEQ ID NO: 316967 - DNA, 384 bp, Homo Sapiens
  misc_feature (56)..(56): n is a, c, g, or t
ttccaatggacaaaaactgtttcttcttctataatgagttaattaaaacggaacanaatgtcaataatgtcaacaaacctttgtaaaatacaccaagcacccagttatttctaatattctccccttgttaaatttcatttgctgacacagtaaagaactggaacacagaaatatgaccttctactttaacaatgcagtgtcttcatagctaagacaatagagttgattccccttaagatgaaaaatgcaagtgatgttcttctcttgtccaataatttctctagccttttgggtaatcatgttccgaaggccatgaatattttatagttgtgggatctgaactaactttaaagcttatgctccttcttacacagtaaactattt

SEQ ID NO: 316968 - DNA, 672 bp, Homo Sapiens
acatgtaagtcaagaactgaccacattctggttattaccatttggaagcaaaaagacctttcataccagagttacatttaacttactgagaaagaatcatttttataaaactaataatatacttattattagccagataataataatatacttattatagccagataataattatagccagaatgagcttctttgacacttcataggatcataagtttaaaggattagctgagaatgaccatgctagtgtttttgttttaaaagtaagaataatcccatataaggttagtgatcatttaaggtgttgatgaatcagtaaaattaaccccaaattttactcttcaggcaatggagatgggcgatcctgtatccataccaaggtcttgattgtgagctttctcttgcccttccaggtataacagactatacccagtccagagcctgggcatgcccagggggcaggtgggctcctggtccgtctgactgtggagaaccaggaggaagccaccgaggtatccagggtagccgtcttctcctgtgtcacctttacgtccgggaggcccaggagacccagggacgccatccacacccctcctgccatccagcccaggctctcctttgcaccctggtcctggggggcctctcattccagggagccccatggctccttct

SEQ ID NO: 316969 - DNA, 391 bp, Homo Sapiens
aaaagatcaaaatgatcgatttagataattcatggactcctgcattccatggggttagatttaaaccctccatctcacagtaaattcagatactgccgaagccaacagcaatgtttccacctttgttcatgcctcccaaagcccctcagaaaacgcctatatagcccaccagtatctcacaggggccaccttctcctgtgcttgcttgctgctgccaggaagttcaactgtctgtcattctcaaatctcccctccttaagttaaaggagaccaaatctagccattacccccaatagtggttctcttttggtcaccaggagagttttctgacttagttagcatctctgtttacattacccctgtcgagctccttcttttggagtcactcgtg

SEQ ID NO: 316970 - DNA, 510 bp, Homo Sapiens
acgctttgggcggagttttacctgtgatagctgtggatttggctttagctgtgaaaaattattagatgagcatgtgctaacctgtactaacagacatttataccaaaacacaagatcttaccatagaatagtagatattagagatggaaaagacagtaacatcaaagctgaatttggtgaaaaagattcttccaaaacattttctgcacagacggacaaatacagaggagacacaagccaggctgctgatgattcagcttcaaccactggaagcagaaaaagtagcacagtggagtctgaaatagcaagcgaagagaaaagcagagctgctgagaggaaaaggattattattaagatggagccagaagatattcctacagatgaactgaaagactttaacattattaaagttactgataaagactgtaatgaatccactgacaatgatgaattagaagatgaacctgaagagccattttatagatactatgttgaagaagatgtcagcat

SEQ ID NO: 316971 - DNA, 486 bp, Homo Sapiens
attttgtcaaaactaaaaaatccacaaggcagcctctgagcagcccagagtccaaactgccatctgtcccctcagctctgaaagatgaggtgcaaacccctgccctacccaaggctctcctgctgcacactgccaggcactgtcttcatggacccacacttccttccatattgctggggacacagtggggccttgccaacagtgattcctctttgttaggatctttgcgtgtagtccatgggcaaacctccatggatgactggtctgtgaccctcaccagccaggccagccattctggacatgaccagagccctcccctcttcttcccttgtcaccagccctcaactgtgaaactacagatggcatgtcacctcttcatgctcccagtttggggcctacccagtgaggggcacactagttgattccatacaccctcagctggctttgtttagaatgtgaatgtcacagccaggcgcggtggcttat

SEQ ID NO: 316972 - DNA, 912 bp, Homo Sapiens
ccagctacatgtctattttttattcaatatattaaatatattaatcagaaaagtcacatactataaatccaggaaaatacacaaatataaatgtcagaatctgtcatttgtcttcttcctagagtgacagtttatgtacatgtggaaggagggtaggaagagagagccagcaggaggctgtaaaggctgcccaggaaggcggggcccatcccttcctcccagccccgctcccacctcaagctctttcttcctgtatttacagcagcactgggcttatttacagcacggcgctatgtgttaaaaacggtttatcttacaaaaaacataaaggccggggccaggctgggggggataagacaaatcgtggggtcacccccatgaaggcatccccctccccaagggcttgagctccctgcaaacctcctggagcaggtgagaaggtggagtcattctgcagctcaagcccaggcttgggggtgctctgggggtccgtggactaaaggcacatggggtggcatatgagagtgcgcatgtgcacacgtgttcccaggcaggggtcagaagggcagcgtgtccatgaagatcttgtcaatgatgggtggagggggcaccaagtcctccagcttgaggtagaagatgcgctgcaggccctgggtgcacagggtccgcagctcgggcagtttgcccaacagacgtgacaggcagctggctggctggggctcgcccgccacagctgccacgtgctccttcaggcagctggcgatgcggttctgcagctcctccacccgccgcggctcctgcagcccatgccggtcggtgatgaggacaagggcagagaggcaggcgaaggcagggacatcgacaagcaagctgtgcagggaccttgagaaggccaggatactgtcaatccag

SEQ ID NO: 316973 - DNA, 488 bp, Homo Sapiens
  misc_feature (42)..(42): n is a, c, g, or t
tccacctagatttcagaggatgtatggaaatgcctggatgcncaggtagaagtttgctgcaggggtggggtcctcatggagaacctctgcttgggcggtgtgaaaggaagatgtggggttgaagtccatacacagagtctccatcggagactgcttagtggagctgtgagaagagggtcttcgacctccagaccccagaattgtaaaggcattgacagcttgcactgcacacctggaaaagctgcagacactcaatgccaggtcacaaaagcagccaggagggaggctgtgcatcattgtgacccaaatgtgagacatgcagtcaaaggagataactttggagctttaagattggacttccctgctggattttggaattgtatggggcctttagtaaaactgctatggagaacagtttggaggttcctcaaaaaaatcaaaagtaaagctaacatttgacccaacagttccactgcaccattgtatct

SEQ ID NO: 316974 - DNA, 436 bp, Homo Sapiens
atttctataatttggctgtataatcttcaattaagtcttcttatgacaattctacagtaacattttctgtaacgagaatgtagagataatttagcttttcctctagcatgacgatgaacattggtttgggggtatgtctaatagtttagaatttttttctctgcttcacttctcattgttcgtaaggtcggtaaacttttaggactgttgttaattttgggaaaacttctatcaactttctgtttagtagatctatatggtataaacacagtaattataacgtattccattttacacagttccttgagcatgagaggacatgcttacctcagagtgtagggttaggaaggatgcttaacgcttgaaagggctagaaaagttgaagctggttggattttggagtgatggcacacatgtcaaggcaggtggaatattc

SEQ ID NO: 316975 - DNA, 497 bp, Homo Sapiens
tgagccactgcacctggctgaacaaaatttctaagaagaattaccagggtttaatctttttcagcttctcctatattgttttagttttaacattagtgggatgataattttatgctattgtcctaatataattagcctcatgtcatctccaaagcatagacaactaagtatcttatgttaaattatgttcaccactcttcctgtcttctacttgaaatgtaagaaataagaagtaacataattgattatgcttttcacagctcatctcctagaacaagctacttacaatttggaatacatttaaagataatatatgggtacagatgtacatgtacatctatgcatgtgtgtgtacattatgtgcattcacacattatatatatatgtataacttatgcacacatacatatagggttaaatgtttatttacaatattgggctcatatcacacatcttgtattaaaacttgctattttcctaccaagtaatatgccagc

SEQ ID NO: 316976 - DNA, 373 bp, Homo Sapiens
gcactcatgtgccaaggaagcatgtttggaagacacaggttcttccaaacatgaagcaaacaagagaatactgtttgactcgaagtaatattttgcatcatagaaaaatgatgggaaattttacttgttggacattgcttcatttcaagggttgtatgccaatacaactattaattacacataagattatggtgctaatttgatttttgaaattttctgtgaaaacaaattgataaagacttttggaaccaggtctatttaagagtattagagacacagaaaaacctcaaatctcttttaatcttcagtgttgaatgagatcagaggtgaacatttagactcacacacttttgcatcacacacatagcccatg

SEQ ID NO: 316977 - DNA, 408 bp, Homo Sapiens
agtggcttatgtagtttttcagcttccatttaatgagttagcttgggttatccagaaagcctttgagagttaaatcagtatgttccttccttcccctactctcatcctagttggccagcttcatctatttatgcatcaatgcgttaaatagaaacttaatgtaagtttattcttgttagaacaaatacatatcatggtaagcctcgggaaatatatgtcatgtcaaaatgatagcacaaaagaatatttaattggtcatctagggttgatgtaataaggttttaacctattaaagcatctattcagttcatctttaagtacctattgtgtgtcaggtactgtgctaggataataatacatattaattttttaaattaattaactgaaaaaatatcgattgactaaagt

SEQ ID NO: 316978 - DNA, 1922 bp, Homo Sapiens
  misc_feature (1512)..(1512): n is a, c, g, or t
ctactgcaaagacttctgttttctcctcggttctgtattttcccaaattcctaccctggtacgtactatttttttctaattacaaaataatcattaacttttaaaaagccatgtacaactagttgacataataaaaatccacctaactcatcttttagtaactatggctatgttgtaacaattttattttgatttttaaaaaaggaatctcttgatttaatcagggctttggggtcatagggggattagtcactgtcacagtcataataatgcatttattcagggaaaactttaattttctttgtcttctccaaaaacagctgctggaacacctcaaattaagggatgttcatctaaaacacctttactgaaacttgattccttgggccagaggaaggtctttactgtagttgatagtacaagtagaccttctcatgtactgtttccaggcatcactgccagactccctgccaccaccagtgtgcttttctcctccaaaggcacctccaatctcagccccacttgttggaatgttgacatttacaatgccacagtctgatcctttaggtccaagccagcgaaagattctgcccagatctttggtaaagatgctacttgaaagtccctgttttacttcattattccatgcaaagacctcttcttcattcttgaatttaaagacatagagaatcggagcaaaagtctctgtgtgtgcaatggacgcatcgtggccaagacctgtcacaattgtcggttctacataatttccagggcgatccataaccttgcccccatagaccactgtgccaccttctttctttgcttcttccactgctccaagaaacatgctcactgcctgcttggtgtggagtggcccatagagaacattagggtcccatgggttcccaactcggatctgtgcataggcctttttaagtctgtttacaacctcatcatggatgctttcatgtataaacagtcgcctcgcagtggtacacctctggccagctgttcccacagcagcgaagagagctgatggaacaactaagctgaggtctgcatcttcaaaggcaataatggcattgtttcctccaagttccaacagacttctcccaaacctctcctgcaccatcaggcccacctgttttcccacctgagtgctcccagtgaaggacagcaggttcactcgttcatctttggccattgctgtgccaatatctgctccaccacaagtcaaggaacaaattgcaccaggcagcttgttgtcctccagaaccttggctattatctttgtgacagccacactaatgagggaagtggttggagctcctttccagaggcagacatttccacagatcatggcgatggcgttgttccaaccatacactgccacagggaaattgaatgccgtgatgattccaaccaggcctacgggattccactgctcaatcagtgcatggccagatctttcagaaggcaagataggtcctccaatcatccttgataaaccancagcataccccatctccaaagacaccaagcttcctagtacttggatcttctcccgcaaggcatcgccaatctgtcttactatttctcctcgttttggagcaggaatatctgcccagattttccatgcttctcttgctttctttacagtttcttcatagtctgccacactggcctgtcggactcttgctattggctcgttgttagcagggcaataggtcgtaataacctctccccggcctccccagcttccattatacacgccctcgttttcctcgcggagccccagctctttcagccacgcatactggggctgattgatgaggagagtggacatgaaggcggcaggcctgctccaaggtccagagagcttgctggtctttgcagcgtgcacacacagcgcgcgaggaagg

SEQ ID NO: 316979 - DNA, 1043 bp, Homo Sapiens
  misc_feature (8)..(9): n is a, c, g, or t
  misc_feature (25)..(25): n is a, c, g, or t
  misc_feature (27)..(27): n is a, c, g, or t
  misc_feature (34)..(34): n is a, c, g, or t
  misc_feature (36)..(36): n is a, c, g, or t
  misc_feature (41)..(42): n is a, c, g, or t
  misc_feature (59)..(59): n is a, c, g, or t
tcgcctgnntggacacttttgccantntcccacngngcganngggtgatggacaactangtgaggtctgcatcttaaaggcaataatggcattgttcctccaagttccaacagacttctcccaaacctctcctgcaccatcaggcccacctgttttccccacctgagtgctcccagtgaaggacagcaggttcactcgttcatctttggccattgctgtgccaatatctgctccaccacaagtcaaggaacaaattgcaccaggcagcttgttgtcctccagaaccttggctattatctttgtgacagccacactaatgagggaagtggttggagctcctttccagaggcagacatttccacagatcatggcgatggcgttgttccaaccatacactgccacagggaaattgaatgccgtgatgattccaaccaggcctacgggattccactgctcaatcagtgcatggccagatctttcagaaggcaagataggtcctccaatcatccttgataaaccaacagcatagtcacagatatccacatactcctgaacttcacccacaccttccactaagattttccccatctccaaagacaccaagcttcctagtacttggatcttctcccgcaaggcatcgccaatctgtcttactatttctcctcgttttggagcaggaatatctgcccagattttccatgcttctcttgctttctttacagtttcttcatagtctgccacactggcctgtcggactcttgctattggctcgttgttagcagggcaataggtcgtaataacctctccccggcctccccagcttccattatacacgccctcgttttcctcgcggagccccagctctttcagccacgcatactggggctgattgatgaggagagtggacatgaaggcggcaggcctgctccaaggtccagagagcttgctggtctttgcagcgtgcacacacagcgcgcgaggaaggcgccacatactgagcccgggactcgggatgagcccaaggccctgagagctgctgaaat

SEQ ID NO: 316980 - DNA, 894 bp, Homo Sapiens
agaatttattgggctgtcttgaagggtctttgtatgggcttgggccagggcggtctggggtccttcccccttgcttgtttttgggctgctgctgcagcctttaaggctcttcttcgcttcttcagcttttgagtcttctggaaaacccgaatgcacagagccttcttggtcacgaatcggcggtgggctcttcggtaatacagaggggggaaggtgtactcaattcccagcccccagcatatcttctcaaagacatcatagttggtgttacggaggtttttgagcatctttttcctctggtcaatgctcattagcagatagcgtttgtgggctttgtcctttcgatgtttctccaagtgttcttcataactgcggatcttgacagacaaggcaataattcgagcctccagggatctggtgtcctctgggtttgcaacaatcttcttcataaactgttcttgcttgatttttagcatctccttcttgttggccatttccaaagacaagagtcttttcacgacatcatcaaccttctcaattccagggacattctggtagtctttgagcagcgtagaaggaggtgggtcatcatccagcctagactgggctggtttccggacgacatatccgcgcgcggcctggaggaggagacttcgaggctgcaggccccactggttgaaaggaaacttggcgctcccaccgcccggcagcccgggtactaggacctgggtaactgcccgggtccgaatcaaactcagcgtcctccacgcgaccctcagcatggtgacctctaacccccgcggggcccgcgccgcggccgccgttcgctttgcggcacggaccgggttacatgggcgccgccatgctggcccaggatcgaccaatcgaggcccc

SEQ ID NO: 316981 - DNA, 261 bp, Homo Sapiens
tggttgaacagaatttattggctgtctttgagtgtctttggtatggctttggcagggctgtctgggttcctccgctttgcttgtttttgggctgctgctgcagcctttaaggctcttcttcgcttcttcagcttttgagtctcctggaaaacccgaatgcacagagccttcttggtcacgaatcggcggtgggctcttcggtaatacagaggggggaaggtgtactcaattcccagcccccagcatatcttctcaaagacc

SEQ ID NO: 316982 - DNA, 659 bp, Homo Sapiens
actccacagtcttcaaagtggggaaaataaaagggtcaaacaagggccagatgtacgcaaaggggaaagccaaaaaggtctcattcccattctcccgtgtagggctgattctatgacttcgagataggaataagagcagcagaagtctgatacacccaccattaagtgcgctcacagtattcactcaaccagtgacaaggagggccaaacaagaggaaatatcatagaagtgcagcaagacagatgggaatcacactagaggagggacttcacagggcatctgaggtaaggtgtaaactctctgctttctcctccgtaaatgtccccacaactgagtccagtgcaattcagcctgaagatgatagatgggtgagatggcatatgcccattctggaagggatgtcctgaatgtgctaggagttgtgagagatgtctggaattccagtaacttttggcaggatttactactgtatctggatctttgggattgagagaggagcaagaagctgacactgcctactgcaagtggctataaagccattctcacggtcgtgatgcaatgctcaagataaaaagcaagtgagtaattaataactaggttgtgaactaacctcttgctccaaggcatagtaccattttgcacaatccatccaggcctg

SEQ ID NO: 316983 - DNA, 718 bp, Homo Sapiens
  misc_feature (148)..(148): n is a, c, g, or t
  misc_feature (157)..(157): n is a, c, g, or t
  misc_feature (173)..(173): n is a, c, g, or t
  misc_feature (235)..(235): n is a, c, g, or t
  misc_feature (238)..(238): n is a, c, g, or t
  misc_feature (254)..(254): n is a, c, g, or t
  misc_feature (257)..(257): n is a, c, g, or t
  misc_feature (259)..(259): n is a, c, g, or t
aaatctattaatccagtatttagcacatatttagcattaagcctcaaacgatacagcaatatgttacattctcttgtgaaaacagttgttgtagactgttaattttttttaaatgtaactccgacttgtgcctaataggatttgaccnttaagaggnttcttttgctgtgganggggtggctttgcttgaacttccattctgtgccttgtagctggtgaggctgggagtatgganggncccggggcccttggcnatngnattcagtgagacggaggaggcaggagaaggaggggaggaggaaaatgacaaaggagggggtgctcggccattttgactctgcggtgagaatgaaagatggtgacctttacctgtatgagtgaggctctgaaacttcaaagagccattagagacagaaggtatgagggaggcagagtgagcaggtggtcttgtttgggggctgagagggttagaagcaatcgatggtttagtagcaggtggattagggaggttagagctgtcaccactagaagagggcagagaactgcttttcccagagctgggagaaagggctggaatcttagaagcaggtaaggagggggaagtaggcttaaagtccccaccagattttttagcacttccattagcctgacgatattggcggggatcctgcagtttggactgcttgccgggtttgtccagggttccgggtctgctcgt

SEQ ID NO: 316984 - DNA, 420 bp, Homo Sapiens
agggcaggggtgaacgtttattaaaaagttttagagccggaatgaaaggaagtaaagtccccttggaagagggccaggcgtgaatgacttgacaaattcaagtccctggtttgacctttgattggggtttcatatgctggcatgcttccagggatttacggtttgcatcttttttcccctgattcctaccttggcatgggctgtccacatgcacgggggcctgccagcacttgggggggccacaagcacagggggttcagtatactgaagggcacatgctcacttaagacgtttttcccttacagatctagcattcctgggggaagggcatgtaccattaaactccgccattttgccttttggggcataagcttgagcccatttacccaacttttgagatcttatcgagaagctgctgat

SEQ ID NO: 316985 - DNA, 382 bp, Homo Sapiens
gaaaagggagagactacttaacacagtcatttaagagaagtgaaaataccttgttacagtcttattctttggataaagtatatgaccaccttatgtaaaagtgggatgacttgcattacttttgtctaccgaatgccagttctcttgctacctttgctaactcttctggccaagtttccattcatctttatttctccatttccatagttactttaaaaaatattttgagacatctgtgggcagcttgatactcttcttggtgttctctattcagatatcaacatctctgaataataaagtgataaagttcttaatactgtaagatgacgacattttctcatagttctcaatatgtttggtttctctgttcttgtgtgcactt

SEQ ID NO: 316986 - DNA, 197 bp, Homo Sapiens
caggcactggctggtgttggaatcggggtcaggattattgtcaggaccctcagagccccatggtacccactgcgtggtgcaaacctctgaagctcccccaacccaggcatctttgagagccttaagttaaggagcctccaaacacagtcattcctacacatttatttctaaaagcagcttgcaatttacttacttat

SEQ ID NO: 316987 - DNA, 771 bp, Homo Sapiens
  misc_feature (658)..(658): n is a, c, g, or t
agcaatggcggttcccggcgtggggctcttgacccgtttgaacctgtgtgcccggagaagaactcgagtccagcggcctatcgtcaggcttttgagttgcccaggaactgtggccaaagaccttaggagagacgagcagccttcagggagcgtggagacaggctttgaagacaagattcccaaaaggagattctctgagatgcaaaatgaaagacgagaacaggcacagcggactgttttaatacattgcccagagaaaatcagtgaaaacaagtttcttaaatatttatcccaatttggacctattaataatcatttcttctatgaaagctttggtctctatgctggtcgtagaattttgccaaaaggaaagcataggttcactgcagaatggggactcatactccaagcacggccatggagactgcaattccattcagatcacgtttcttcaatctgaagttgaaaaaccagacttctgaacggtcacgcgtacggtcaagtaatcagttgccacgttcaaacaagcagctttttgaattactttgttatgcagaaagtttagacgatcagctgaacactctctttgaagggagttccagctaacagaggagaaacactaagcctccgatatctcacctgttcctcttatttgagnacatggccgccgcgccatttttccagactggcttatccagacccttttggttcctccagtcaaactttttgggaaattaaggatgtgttttggacttgttttttgggacctaa

SEQ ID NO: 316988 - DNA, 714 bp, Homo Sapiens
  misc_feature (42)..(42): n is a, c, g, or t
tcgtggtcagcgtcataggtggtaaagggcctcccactgtgnaggctcagggaatcccctgcagtgccctctgagaacttgcccagtgccagctggtagtggtctacctcaccgaggaggcggaaggtcgcatagtgggcgaaagtacgattaccattaaagtcttccagcgtctacccgcagctcccagttaccctggagagtaagctggtgcaaattctcatttcccagccagaattcagactcttggttcccaaaacctgctctgtaggaggaccaagagcggaagaaatccacagaaccatcctggcgcctctgaaacaccagccagccgcccccctcggtgtccatgtcacaaaagactgggagggccctgccctcaggtaggcacagatggtaccagccgctcaaggtggcgccctggctcaacagctcccggcagtttctggggccttcctggcaccggagcaggttcactggatctcctggctcacccttggggcccatcttgcctggtggtccaggtggcccttgaggacctggggctcccttctccccaggacttcctggagctccgggacaactgggcaggaggacaactttgctggcttccagttccctgggtcctgggcagctggggtgttcctgggtcttcaggcaggcaggccccccaagcaggagaagccacagggagggcaggatcccacagtagaa

SEQ ID NO: 316989 - DNA, 509 bp, Homo Sapiens
  misc_feature (186)..(186): n is a, c, g, or t
  misc_feature (202)..(202): n is a, c, g, or t
  misc_feature (215)..(215): n is a, c, g, or t
  misc_feature (355)..(355): n is a, c, g, or t
  misc_feature (435)..(435): n is a, c, g, or t
ttgaaagggctaaaatgattttatttttaaatgtggacaggcaagcagaggtggttggcaaaggcaaggtggctgacgatccggaagctgtacaggagagataagggcactggctgccagagtgccctatcgaagcatcatccgaaccctgcggtaggggtggcccacaccacggcctgaggccangtcaatgccatatttntgggcggcctcangacactgcatagcgaccattgagatttgatcggtaacaggatgcataccaccagggcaccgtgggacaatcacttgcacagttgctgttgctttgaatcgtgggtcagcgtcatagggtgggtaaagggcctcccacttnttggagggttcaggggaattccccttgcagttgcccttttgaggaactttgcccagttgccagctggtagttggttttanctttaccgaggagggcggaagggttcgcattagtttggggcgaaagtacggttaccattttaaagttttttcca

SEQ ID NO: 316990 - DNA, 424 bp, Homo Sapiens
  misc_feature (378)..(378): n is a, c, g, or t
  misc_feature (403)..(403): n is a, c, g, or t
gaaagggctaaaatgattttatttttaaatgtggacaggcaagcagaggtggttggcaaaggcaaggtggctgacgatccggaagctgtacaggagagataagggcactggctgccagagtgccctatcgaagcatcatccgaaccctgcggtaggggtggcccacaccacggcctgaggccagttcaatgccatatttgtgggcggcactcaggacactgcatagcgaccattgagatttgatcggtaacaggatgcataccaccaggcaccgtggacaatcactgcacagttgctgttgcttgaatcgtggtcagcgtcataggtggtaaagggcctcccactgtggaggctcagggattcccctgcagtgccctnttgagaacttgcccagtgccagctnggtagtggtctacctcaccga

SEQ ID NO: 316991 - DNA, 896 bp, Homo Sapiens
tcttgcagttctttctcacatgctgcttagctttcagcattctccagaggcgttccatttgattgttcctcatgtggttaatttggttcattctttcaaatgatggtctgccttcaagtacagccttcttagtacaattaacagaattgatacactgtatgatgtatcattattctggatttccagatctctatgaacctattctggaggcaataaaggattttcctaagcccagtgaagagaagattaagttaattctcaatcaaagtgcctggacttctcaatccaattctttggcgtcttgcttgtctagactttctggaaaatctgaaactgggaaaactggtcttattaacctaggaaatacatgttatatgaacagtgttatacaagccttgtttatggccacagatttcaggagacaagtattatctttaaatctaaatgggtgcaattcattaatgaaaaaattacagcatctttttgcctttctggcccatacacagagggaagcatacgcacctcggatattctttgaggcttccagacctccatggtttactcccagatcacagcaagactgttctgaatacctcagatttctccttgacaggctccatgaagaagaaaagatcttgaaagttcaggcctcacacaagccttctgaaattctggaatgcagtgaaacttctttacaggaagtagctagtaaagcagcagtactaacagagacccctcgtacaagtgacggtgagaagactttaatagaaaaaatgtttggaggaaaactacgaactcacatacgttgtttgaactgcaggagtacctcacaaaaagtggaagcctttacagatctttcgcttgccttttgtccttcctcttctttggtaatgcaa

SEQ ID NO: 316992 - DNA, 253 bp, Homo Sapiens
ctgagctcagttgtccagttgggaaagagatcaaattaaaagctacctgtgctaccttagcatcattctttatcttcctctaactaacacaaaatcatctttaagcttaaactttccatcactctctgtgctttgagatgtaaatttgccactgttttctctaaaattccataagggcttcaatcatgtgaaacagataaactttactttttccagttacacaaaagcacagtttgaatcccgtgttgtttgt

SEQ ID NO: 316993 - DNA, 483 bp, Homo Sapiens
cttgatctgattttatttttagcagtttctggtatcaaatatgagatgtaaagtagatcgttgataagctccaagacaggtgagtaacctgatgccagtaccacagagcccatggcgctcactgctttcttgctgaacacggagctcaagggtactctcagatccaagatgtactctctgcatttcaagctcttcaactctgttgtgcatacctgtgctgtgtgaaagtttcttgataagtcatccttacatctgcaagaggagaaaacccattattccctgtgtctgtaacaggagacaacctgccattccgttgggtttctggacagcagtacaagtacaaggttccctatagatacattcatttgaggaaatccaaggcaaagatactttccacctggtccataatcccttccttacatctgtctgaaccccctgcttcctatatttataacagctatggatcaggatcttgtgtctttt

SEQ ID NO: 316994 - DNA, 1751 bp, Homo Sapiens
  misc_feature (25)..(25): n is a, c, g, or t
  misc_feature (64)..(65): n is a, c, g, or t
  misc_feature (137)..(137): n is a, c, g, or t
  misc_feature (357)..(357): n is a, c, g, or t
  misc_feature (374)..(374): n is a, c, g, or t
  misc_feature (557)..(557): n is a, c, g, or t
  misc_feature (650)..(650): n is a, c, g, or t
  misc_feature (729)..(729): n is a, c, g, or t
gtaaacagcaacctacttgccaccnggggaggtgcagcgtggcttgactggatagtagcctctnngggttttgcttcaaacccaacctatttgaaggtgcagtgtgcggtgagagtctggaaccctgcagtggtgangagggggaggcagagggagggaaactgaccacagaagggaaaaccagtccaagctggctgacactgaaagccacctctccctgcagctcagcagcgatctgaactatatcctgggttccagaaaaggcagaggttcttaccgaaagcaggggaggaagccgcagcccaaggaggtcgtcacttgccgggaaggtggctcgggccaggctgcactcaaaanccgtgctctgtccaaantgctacggggccagagccaaggaagcttccacttcttcccccagacagccccaacagcggctaccccaaggagccagcagccttgtgtcctgggatccccagcccctgcagaatgacccaccaggatctgagcatcacagccaaactcatcaatggaggtgtagcagggctcgtgggggtganctgcgtgttccccatcgacttggccaagactcgcctgcagaaccagcatgggaaagccatgtacaaaggaatgatcgactgcctgatgaaganggctcgggcggagggcttcttcggcatgtaccgaggggctgcagtgaacctcactctggtcactccagagaaggccatnaagctggcggccaacgactttttccggcggctgctcatggaagatgggatgcagcggaacctgaagatggagatgcttgccgggtgtggggctgggatgtgccaggtcgtggtgaccctgtcccatggaaatgctcaagattcagctgcaggatgctggacgcctggccgtccatcatcagggctcggcctcagcaccctccacctccaggtcctacacaactggttcggcttccacccacaggcgcccctctgccaccctcattgcctgggagctgctccgcactcagggcctggctgggctctacaggggcctgggtgccactctcctcagagacattcctttctccatcatctacttcccactgtttgccaaccttaacaacctggggttcaacgagctcgccggtaaggcgtcctttgcacattccttcgtgtcaggctgtgtggcaggttccatagctgcggtcgcagtgacgcctctagatgttctgaaaactcgaatccaaaccctcaagaaaggcctgggcgaggacatgtacagtgggatcaccgactgtgccaggaaactctggattcaggagggaccatctgccttcatgaaaggcgctggctgccgggcactggtcatagcacctctctttgggattgctcaaggggtctattttattgggattggagagcgcatcttaaagtgttttgactagacagagctggaggtcaagtccctgcgcttgccgccctctctctagctgtttcacttagcctagagggggcaagggcaggtggggccactctggcctgcctggtcctctgcgttgtagtgctacctcaatctcgggagaaacagccctatattctaacaagttgagcacagacttcttccccttcgtgtctacactcgttttcctttgtgggcacagctaccaggggcttttggaagcccctaaccacctacttttcaacacaaatggtactctcgttgtattaattgcacgaccttaacacgtagtcacactagaa

SEQ ID NO: 316995 - DNA, 1002 bp, Homo Sapiens
  misc_feature (102)..(102): n is a, c, g, or t
  misc_feature (171)..(171): n is a, c, g, or t
  misc_feature (980)..(980): n is a, c, g, or t
ttgagcggacttaactaggttgttcaaggccaatatcaaatcagtttcatacagagagtaggccccaggctgaccatgtagcaccatcctctccttgtagcncaggtcttaggacttggccctgctgctgtgacattatctctcctgtagcagcctttgggggaggaatcnaggtgcgtgaggagggctctcacagcaaactcagctcctcaagacgattcacttatgaagggatagaatcaaggcttaaaacccagtgtcactaacaagcagatatttccctatggctgtgttcctccacccccacaagtaacagtttgaagagtgacgggggtctgcttctatgccctttttaatgtttggttttgaaatggacgtagaaaagtagatggtgatagcattcactgcagcctatctgctgtacccactgatgaacagatgagattttagccattcacctttatttcagagtgttccttggttacagggaggggtgtgcaagaccctgggctctgggggaggggctgagctgcccagtcagagccggcctcagccccctcagccatccagggattcgaaagggtgcttggtctcaaactaggtgctgactctgagggctttcacggtcccttgaacttctgatcctccttttcctcaaaatcagtgctaggactcataagttatggagtccaagattaacaatgctaaatcctcaagctgactgaagaatgccgagtttgactgtgaaatagaaatgttaaaatacagaaacaacccttctattgtgactaccctgttaagggtcctgcaattaatacaacggaaagtaccatttttgttgaaaagtagggtggttagggggcttccaaaagccctgtggtagctgtgcccacaaaggaaaacgagtgtaggcacgagggggaagaaggctgtgctcaacttgttagatatagggctgtttctcccgggttgagggagcnctcacgcgaggccagggaggca

SEQ ID NO: 316996 - DNA, 642 bp, Homo Sapiens
  misc_feature (559)..(559): n is a, c, g, or t
  misc_feature (614)..(614): n is a, c, g, or t
ctctggcaaagggggagccatgaaagcctgaagcgaggtgggttgttagcagaggtaccttatctctcaggtttaagtcaaccccagcaatgaggagcatatttgctatgtcctgccaggcgtgctctgcagccatgtgaaggggcgtctgctgcctctaggggagaatccaagggaataggtaagtgtatatttcttctagtcttttctttaatgcagaatgttttcagtttgttggttttacatacatgagatcatcttatatgtacattttacatcttattttttttaccccaacatgacactttttgtgtactataaactctgataaacgccatttttgatcactccatactagcctatttttgtctgtgccataatttacctaaccacttccctattattaaatatttaggccattttcaaattgaagactgataaataatactgcagtaaatatctctgtgcatgagcttttaatatgtttctcaaggctgagttcccagcagtgctcacacatatcatttaaaggtatatgacatattctgccaaattgctntcagctcccagtggctctgtgagccatgcccttgctggtactgagaaatatatgngtggtgggtagattgtggggacacgatt

SEQ ID NO: 316997 - DNA, 1782 bp, Homo Sapiens
caatttatgtttgtaaattttacttaggccatcattttttattttcacctttgaatttcaaagtaaattagagatatgtaaataacagaattatcaacattaaaatcttattcacaatggctaacaagaacaggatgacagtcaagtcagtagctttttaataaaatgagcagaatcccatcgtaacagttctttgttacatgaattcaaatacacagcagaccaatcatgttccctgaaatttaacaatcaatcatacttaataaaggcctgttagtgctgtccctcaagactctaattctaaagggcttcctttgaattccctttataaagctttgtgcaaagaagagcttaagcaccagtaagaaagactgtcgctagcatttttatttcatcatcaacaacaaacatgcagtttctttctctgatgtgcatggcactgtaaaatgggtgctacactctctcttgtggtacaaagtttataaatacagtatactgatacaaagttgaagccattaaaaagagcttaataacaactatgaggagataattaaatctggagtgttgatggaatctatgaagagatttagaaacaagacataaacactacggtaaaagttttacttgggaaggggccagaggggaactttttatgtgctactgaaagattttttaagttgctccagatttactttctttctgctattatctttaaatactgcaaagcattgtgagctgcatcactttgtgcattgccacaggagataccggagccatgacagactgtgatggggctggtggacagttcagcaagacattgatattgtccattggcgctcagttcatctatatccaaatatgttatattaaaaccttgttccttggcaatttcactaagcagctggatgtaatctgtatttggaatactaaggaggcttcttttcagtaagttgatcttttcaccaggagaattcctcaaggaatgccaagtacatcctaaagaatgtcctactacatttgttaaagaaatgtggttctctggagaaatattactaaatttggcaagaaatttctcagcagcattccttttggcttgcttttttgatgccccctttccagtttccataaatgactctagcctgcaaattgtagtatattctctcttatgagcaggtcctccctcctgggaaagggtatattcaggaagtctccagccatgatgaatagccaattcctgtaatgaaccaataggattaagctggttctttggttgcttggaagggtcaggcattaaggggtcaggaactgcaaagcaaatacttgcattggctttcaaaatgtttatggcagcctctgcagctctatgtttcgccagcttcttacttgtaccttcacctgtgcaggttatgtcaccaacggttactctgaaggtgaaagtgggcacgtgtatttgcacatcagatctttcacattcataaactgggatgttcttggtcttcatgccgtattcgtgtaatacctgaatcggtgttttccctggcttagctgttatcatcttccccaaactgaaggtcccactgtcctcgcgctccagcggcggggcctcggcgcggtgcctgctctgggacatggcgagaagggacggctcagcggctggaggaagagcggtgcggagcgacgtgctcgctccccgggtcgctggtccccgggaggagctccagcgccgccacctcctccgactcccccgcctcctgcttgcgttgctccagcgagggggccccc

SEQ ID NO: 316998 - DNA, 643 bp, Homo Sapiens
agttgccccggatgctcaaaggtggagtaggtgcaaggagtgaaggggatctaactgagagacaagtccctccgttaaagaaccataagtgtgtgcactcctcatgcagttgaagaactctggagtcagactgcttggattcaaatacagcctctaccatgtaatatctatgggatcctgagtgagtttccaatttcttcatctagaaaatggggtcataacagtgtcctgctttatagcactgtcacgaggcttcagtgggggctcattcctataaagaggcttagaggcaataaacattcactatgatctcattctatctcccaaacatccgtatacccagcccctggacggtaccttacacacagtagacaatacgaatttgctaaaaaatacccaaatgattattatctctaatttactgtgaggaaacagaaggctcagtgatgagggaacgtgacaaaggtaacaagggaaaggggacatgcgagtccagctggctccaagcccatgctccacacaaacctactgctctccttgccacccacccagcccgcgctccaatgtgggaatccacacaggggaggcggagtggaatctacctacagaggcaggcagaaaggacgcacatggcctgcttcta

SEQ ID NO: 316999 - DNA, 647 bp, Homo Sapiens
  misc_feature (47)..(47): n is a, c, g, or t
tgtggaatttacagttagtattaaggatattcttctacacatgaaanaatcacttaaatatgagaaaatggcattctacatgtatgtactatgaaatgtgtctgatttggtatgcattatttcaaaaactgtgaatgtgtgttaataacactacagcaatcacacagtgactatagcttgcatttaatgcattacaaaagagggaggacaaactttctagaagaaattaaaaccatatgttattttttgttgctaatcatttgacacttaatcgaaacagaataagttactgtggaaaaaaggatgatccaactcctgaggattgccacctgtgtgtctttaattgattatctttgatagttagagttatttttcagatttttccccctcatactggattgtgatgctctgatatgagcatgcaatgactgatacagaaataggctggagcttcggtgtgtgcttttgctatacagcttacagttctaatgcctgatgtagagatgatgaatttctcctttttaaacctatcttctgtttactccttttgcattatgaaggccctcttcaatgatgtatgtttctgatggaatcagaaaatttcacactagaaaagtgtacctaacttgattcagtgtgagctcttg

SEQ ID NO: 317000 - DNA, 648 bp, Homo Sapiens
aagtagattaaggaacacatttacttaatatgaaacgtatataaaataaccgtcaaaaatataccacagttcacatgaaatacggtagtcaggaatataagagctctctagcacataatgatacacgagcttaagcagaatgtcgcacgaggacagagtctgagtctcgagctttccagattaacatggtcaagacagtgtctcagcataaagataagaaaattcccataactaactatttgtacagcacaggccatgcttaagatgcagtggctccacaggaatggtacagtctagttctttggtcagctgggggcatgcaggttaggtcaggagttttccatttacttgcaatgcttcgtatttctcatgtacatgccatacatctaagtatcacaggatgaatggttttgaattgcaaatttcttgtattaacgatatcttttactgaatgataatctccattgttgatttgattacttagtttctggttatggctaaacgtaaaaacatcctctgcactatgtaactaaggcactctacaggctgtatctcggttacattgcgataatttatccagtaaaatgcattaaaactcaagattaattttttcagataaattcaatattatctttcatttttatagtt

SEQ ID NO: 317001 - DNA, 399 bp, Homo Sapiens
aagtcagtgtctcaaaagaaagtatagtaatttcccataacagactatttgtacagcaaaggccatgcttaagatgcagtggctccacaggaatgccatttaccttcaatgcttcgtatttctcatgtacatgacatacactaagtatcacaggatgaatggttttgaattgaaaatttcttggattaaagatatcttttacgaatgataatctccattgttgatttaattacttagtttctggtttgcgctaaagtaaaaacatcctgtgaactatgtaactaaggcactctacaggctgtattcggttacattgcaataagttaccagtaaaatgcattaaaactcaagattaattttttcagataaattcaatattatctttcatttttatagttt

SEQ ID NO: 317002 - DNA, 601 bp, Homo Sapiens
tctattttataaatatgtaactgtatttttcttcctgtccagaaactgttattgaataaaattcaggtatattcctccaaaacccacacagttcagagattttcaaacaccaggtttccatttgtattaaaatgggcaagataatgaaggcacaggctcactttgtatcaataaaggacatcaaacacagtcatgaggcactaatgacataagcaatcacaaaaagcaagtgttcaaagtcttcagtaactcttctccctttaacatttggcaaaactcagtccagatattttaatacctcagaaagaaaaaataaataagagtagctacattaaaatgtcagattacttataattagtctttagaaatataagggataaaatgaaaggaagagaacacagatttcctatattcttggattatccttcctttctgagggtctcagatgtctctatgcatctgccaaaatgccagctgtacctgaagatttaagagatttttggtagttgctggcatggtccctcgacacttaaagtttatatcacaaacacaaatctaggttggtttcagctctttagtcctgtgttaaaaaccataaatc

SEQ ID NO: 317003 - DNA, 1433 bp, Homo Sapiens
  misc_feature (534)..(535): n is a, c, g, or t
  misc_feature (588)..(588): n is a, c, g, or t
  misc_feature (590)..(590): n is a, c, g, or t
  misc_feature (601)..(601): n is a, c, g, or t
  misc_feature (613)..(613): n is a, c, g, or t
  misc_feature (616)..(616): n is a, c, g, or t
  misc_feature (637)..(637): n is a, c, g, or t
  misc_feature (707)..(707): n is a, c, g, or t
  misc_feature (724)..(724): n is a, c, g, or t
gccgttggtgattacggaagaaccaggagtttggcgtgaccatggggaagcaaaagaaaacaaggaagtatgcgaccatgaagcgaatgcttagtctcagagatcagaggcttaaagaaaaggatagattaaaacctaaaaagaaagaaaagaaggatcccagcgcattaaaggaaagagaagttccccaacacccttcctgcttatttttccaatataatacacagctgggcccaccttaccacatcctcgttgataccaactttatcaacttttccataaaagccaaactggacttagtgcagtcaatgatggactgtctgtatgccaagtgtatcccatgtataaccgattgtgtaatggctgaaattgagaaattggggcagaagtatcgagtggctctaaggattgccaaggatccaagatttgaacgattaccatgtacacacaaaggaacctatgcagatgactgcttagtacagagagtgactcagcataagtgttacattgtggccacagttgaccgggacctgnncaggagaatccgtgagattcctggcgttcctctcctgtccctttctcaccctngnttccaccttgngcgggtgcccgntgnttatggcgcccctcggttctnattcttacaagacacagttcctctgcctttcttcgaccaactttctcttgttgccagttcattacacaanatgtagcgggatttttnaggaatcagagagactgatggagttcagggagatatttattatttaggtgcaccagcccagtcgggttaacatccaaaggactgagctctgaacaaagagttaagttaccttttaagcatttcgcggggtggggggagatcggtgcagggggaagcatgttacagaagcgagaaacaaagacagtgattcaatgaattgagacattccttacatcatttcttccttttgaaggaaaaacatgttttacgacttgagtttctctgtctgtgaccttgcagctgcacaactagagaaacggtgtctccacagcgccttggcaacgttctcatgaagaatcagcacaggagaaagctgatgcaattgttaagctgctccacaaggagggggtgtctcaggcagggccgccggacactcaggtgcaggacaactttcagagtagccccgggcacagaagaagacataaacagggtgcgctggagatacccagataagctcaagaattgaggtgacaatggagcacttctcagatctgcaggagagggacagggctcactggcagccgccgtggagcactgtggagagaacaggataaggctggatcatcacctctcccgctacagccaaaggcatgccaactgaatgagaggtttcgatgtaaaaagaggaggtttttaaacctcgtgccgaattcgccacccaggcctcgct

SEQ ID NO: 317004 - DNA, 766 bp, Homo Sapiens
tacaatccactgggatagcatccacccttaaaaataaggaaatcttgaaaaagtactacaataaggacaaatccttcaaaaacattctgttaagtaaaataagacagtcaaaaaggaaagctgtataattacactcatgtaaaatatttagtcaaactcaaagaaacccaagtgtcgtagtctcagcagtgcacccaagatgtaacagtctctcgtagtctgagataacatccagagttctttgttctacctctaaggagattaaggagcgtgaacacaaaggtgaggttggagtgaaagtttaagaagcaagagaagaaagctctttgccagcagagataggtgtctgaaagtggtgcctctacgaggctgggtccagggtttttatggactgggaagggaaggatatgtgcctagttcacaggctgtcttgaaaaacgtgtggctcagctttggcccagctttggcccgggatcaatcaggagctgaagggatgattgatagatgctgcttagcttggcccaagacttatcagaagttaaggtgaaagtttggccaaggagcttggcccggaagcactcaggggctgaagtaattattcatagaggtcagacttacagtccaaataaacgagagtgtcgaccggaatgcaccagatcccacagtgcccatgccaacaaaaagagaaggaacattttcctgggagcccactgactgtacaaagacaaaagtgcttcttttttctctttctcgtgtctctcttttt

SEQ ID NO: 317005 - DNA, 1019 bp, Homo Sapiens
gttccagggcctgactggaaagaagggttaaggggttgccctttggagtggttgaccgtttcctctccaaaagcgggccatggtctttttcaaagtgtgttcccttttgcccaggttcccggagtctgaatcatggagggatcggcccagtactttgtttccctcctatcatcatcatgttggtgaatttactgatgactgggtcttcaaacacaggaacttgttttccctgctggagcagctttgatgagctgagtcttcttgagctcccgaacatatttctcctcctcagttagctcctccactggcttgcgataatattccttgtcaatcaagggatccttgaattcaggactatagcggctccatctcacctgagttagcctgggagggggggaaaggaggaggcaggcaaaagctgactccacaagcgagtaggtttgacttaacaataggcatgactgccaacgcgccgacgagggagagcggcgcggagaccgcgagctaaacctgagccacaacaattcaggcccttgtcccaagtaggaggacattccccaagcaggcgggtaaagtctcctcctggtcaagtgctaacggtaaggatgggcttggcgcctacacacccatcccaattcacaggcgatcccagatctgagctctttagctgaaccgcactttcagctccgcgttagaaccctagatcagccagactccttaggcgagaggtagtcactaaaccttcggattggcgcagggtcacgcagctaacttagaagcttgaatccagatactccggcccccagggcaatgctctctctaggggcccacgcggcctgcctgtggcccccttccttcctcgcagcgccccccccgctgctcgccaccctctcaccctggaagctgcaagacagcccgccgcacgcccaacgccaggcccgaccatcctcgggcaaccttcactgcgggggcaaccatcttggcctcgtgccgaattcgccacccaggcctcgctcttt

SEQ ID NO: 317006 - DNA, 1716 bp, Homo Sapiens
ccgcattgtttcggccttccttgagcccccctgtggagatccccccttttggcctctcccggctccccttccgggatgtgtccggagccgttgctggtgtccccgcggcctttttttatttggggtgggaattccccgcgccctgttggtgtctgtggcgcgcggtttctcccctgggggaaccgctctctgtggccccgtgtccccgtagcccaactggggccccgggccccaaacgaaggggttccaaaaacctttccgaggcccaagtcggccccaaaaggtgttgttggttggttttgttgcttttttgttttgcacaccagaaactgctttttatacattttgtataaggacaactctggaaacaagcctatttcctccagccagtttcactgaatgctgcaccacatgctacaccagttcagcgtgagaattttctaataaatcttttctgatactaaaactgcttcctttatatgtccaaaggtccgccccaacctaagggaagagaaaacagccctgagtttcctgggaggaaattcccaagtcaatgtgctccctctttacaaggaaataggggcagagagagcaagttccagcctcaaagaaagaaggattaacggatagtgaatatgctgctacatctttcttacgaggcctgcccacccttacaaaggaactacatccttaacccacaggtagttttcagcgtggcagtagctcacactgtttcttgcggcagagggccctgggctcctcctggagactctaccaccagcggtagtgggccagggcacggttggcctctgccatcttgtgcaagtcatgcttcctcttgatcacggggccctggttatggaaagcctccagcagcttgtgtgacagcttctccggcatcagtgtccgctggtgctttttatcccggcactcagtgatcatccacttcatggctaggaaagcggcgacgccggtcgggtaggggtacagggacctggtagaaacggcctcccttgaggatgggtaccagcccaatcataggctcacagtttttcagtgcttgatggaagatggtgtaggggttgcgttcgatggttgcctgttcctctgcagaagcggcatggtacttctcaaactgcttccttttcacagcttccagagtctgaatcatgagggatctggccagtactttgtttcctcctatcatcatcatgttggtgaatttactgatgactgggtcttcaaacacagaacttgttttccctgctggagcagctttgatgagctgagtcttcttgagctcccgaacatatttctcctcctcagttagctcctccactggcttgcgataatattccttgtcaatcaagggatccttgaattcaggactatagcggctccatctcacctgagttagccctggaagctgcaagacagcccgccgcacgcccaacgccaggcccgaccatcctcgggcaaccttcactgcgggggcaaccatcttggctggccacgaggaccccacaaggactgccctcggcgcgcctgagcgagtgacgggaaacgggtgaaaaagactcctcagggtcctaaatctgcgtttctctccactgatctggacgttagagtttttcactccggggtccaaagggaagcgccaaaaggaaacccttgccctccctgtatccgtcgcagtctggcgcggccctcggtccc

SEQ ID NO: 317007 - DNA, 414 bp, Homo Sapiens
accttatttacatagtgcatatctcccaagaggtaaatatgctttacagacattttttagtaactctgtgaggtggggcattgggtacaccatcaattctcattttccgcaagcaagtaaactacccaggaccactcactttagcagtggtagagtaaatacagacatggagatctcctaaatccggaagtctccaattaccagatcaaatagtcttgtggtagtaataagatttccatcattcagcagatctcctaccacaaaggattaatttctaagtcttcatacacttgtgattgtgcgttatattgatagccacagggagatcaaaatggtttttggttttggcagatgaaaaagtctaacattcagtgtgattatagttcagtgtaacttctccagtttaagtgtgac

SEQ ID NO: 317008 - DNA, 561 bp, Homo Sapiens
gatttaaaagattttattttctttatgcaggtaggcagttagaaatttcaaagtctaacaatgacattcttgaagtgggcacagccttttaaactcaggctatgtatacagtaaccttgtggaactggttcagccagatcttcactttcatgaaagcacagggtctgtccttttctttccagagggctcctctcatattccatcgccagtttctgttacaaggcagactgaatcaagccaagatcaacacacactggtacacgtggctcccaaccaattttatatgtatatatatattctacttccaacacccgcattcatcctggttcaatcaaagcctggttttggccaacataaactcgtcaggagatcgaaggttgtagatgtctgcacgtggcttccttggaggtccagtggtgactccctcttccaaatccattctgtacccgctggctgctctaaccacacacaaaacgggaacttacgggcaggacaatagcgtatgaagcctgactgcaactaggagaagtaccacactccgggcaccgcagacgcgaaaag

SEQ ID NO: 317009 - DNA, 821 bp, Homo Sapiens
gatttaaaagattttattttctttatgcaggtaggcagttagaaatttcaaagtctaacaatgacattcttgaagtgggcacagccttttaaactcaggctatgtatacagtaaccttgtggaactggttcagccagatcttcactttcatgaaagcacagggtctgtccttttctttccagagggctcctctcatattccatcgccagtttctgttacaaggcagactgaatcaagccaagatcaacacacacattcttgaagtgggcacaggatttaaaagattttattttctttatgcaggtaggcagttagaaatttcaaagtctaacaatgacattcttgaagtgggcacagccttttaaactcaggctatgtatacagtaaccttgtggaactggttcagccagatcttcactttcatgaaagcacagggtctgtccttttctttccagagggctcctctcatattccatcgccagtttctgttacaaggcagactgaatcaagccaagatcaacacacactggtacacgtggctcccaaccaattttatatgtatatatatattctacttccaacacccgcattcatcctggttcaatcaaagcctggttttggccaacaataaactcgtcaggagatcgaaggttgtagatgtctgcacgtggcttccttggaggtccagtggtgactccctcttccaaaatccattctgtacccgctggctgctctaacgggcaggacaatagcgtatgaagcctgactgcaactaggagaagtaccacactccgggcaccgcagacgcgaaagattttttt

SEQ ID NO: 317010 - DNA, 415 bp, Homo Sapiens
gcttttggtggccgcttgttgatttaaaagattttattttctttatgcaggtaggcagttagaaatttcaaagtctaacaatgacattcttgaagtgggcacagccttttaaactcaggctatgtatacagtaaccttgtggaactggttcagccagatcttcactttcatgaaagcacagggtctgtccttttctttccagagggctcctctcatattccatcgccagttttcgtcaggagatcgaaggttgtagatgtctgcacgtggcttccttggaggtccagtggtgactccctcttccaaaatccattctgtacccgctggctgctctaacgggcaggacaacagcgtatgaagcctgactgcaactaggagaagtaccacactccgagcaccgcagacgcgaaagccc

SEQ ID NO: 317011 - DNA, 488 bp, Homo Sapiens
tttttgatttaaaagattttattttctttatgcaggtaggcagttagaaatttcaaagtctaacaatgacattcttgaagtgggcacagccttttaaactcaggctatgtatacagtaaccttgtggaactggttcagccagatcttcactttcatgaaagcacagggtctgtccttttctttccagagggctcctctcatattccatcgccagtttcaattttatatgtatatatatattctacttccaacacccgcattcatcctggttcaatcaaagcctggttttggccaacaataaactcgtcaggagatcgaaggttgtagatgtctgcacgtggcttccttggaggtccagtggtgactccctcttccaaaatccattctgtacccgctggctgctctaacgggcaggacaatagcgtatgaagcctgactgcaactaggagaagtaccacactccgagcaccgcagacgcgaaagaagcc

SEQ ID NO: 317012 - DNA, 1936 bp, Homo Sapiens
  misc_feature (214)..(214): n is a, c, g, or t
  misc_feature (234)..(368): n is a, c, g, or t
  misc_feature (1055)..(1129): n is a, c, g, or t
  misc_feature (1132)..(1132): n is a, c, g, or t
  misc_feature (1139)..(1139): n is a, c, g, or t
  misc_feature (1537)..(1537): n is a, c, g, or t
  misc_feature (1554)..(1554): n is a, c, g, or t
  misc_feature (1630)..(1630): n is a, c, g, or t
  misc_feature (1746)..(1746): n is a, c, g, or t
  misc_feature (1754)..(1754): n is a, c, g, or t
  misc_feature (1793)..(1793): n is a, c, g, or t
  misc_feature (1848)..(1848): n is a, c, g, or t
tttttggatgtgtgaatgtgcatagttcttaaagtccaacattcatgtaataagacatcttgcatataacaatgacccttacgtctaagatgttaaatagatcctaagcctggtataactttattcaagtatccttatttgcccctaaaatgtctttaatacacattacttgggttatttcttgaatgaacatacaggtatcccaatttctgtntttaacgagaatggggtctnnnnnnnnnnnnnnnnnnnnnnnnnnnnnnnnnnnnnnnnnnnnnnnnnnnnnnnnnnnnnnnnnnnnnnnnnnnnnnnnnnnnnnnnnnnnnnnnnnnnnnnnnnnnnnnnnnnnnnnnnnnnnnnnnnnnnnnagagttggcagccttgctacgtgacccaggctggagtgtagtagctattcacaggcatgattgcttgaaactcatggcttcaagggaaactcccaccctcaatatcctcagtagctgcaactacagccataccccccactgctcagcttctcatcctttaaaagatttttactggtagtgtcctcattctgggtttttgtcttctgtgtttactgtgacatgaagtcatttttagatgaaggttaaacattttgccaacgcaggtacaatatgggattcaataaaagtacagaattaaagttgtcttattagagattgggaagtttcccagctccgtttatcggtacttggccgtaccgataaaggggatggacttggagtgaccaggtcttagtcacatgtattttcataccctaaacaagaagcggtatagaccagaatggagcactgattgtaatccaccttctttcttagaaactggcgatggaatatgagaggagccctctggaaagaaaaggacagaccctgtgctttcatgaaagtgaagatctggctgaaccagttccacaaggttactgtatacatagcctgagtttaaaaggctgtgcccacttcaagaatgtcattgttagactttgaaatttctaactgcctacctgcataaagaaaataaaatcttttaaatcnnnnnnnnnnnnnnnnnnnnnnnnnnnnnnnnnnnnnnnnnnnnnnnnnnnnnnnnnnnnnnnnnnnnnnnnnnngangaagaanacaaagaggaagggggacccgggcccataaagtgatttcaaaaagagctcccggtctgatgtccgcgcgcattgcctgtgtcctacacctagttatttggcgcgtaccccctaagccaagtcagctctgccgcgcgaatcacaccaagcgagttctccaaacaacccccctcccggggatttgcctcccgccccgcgacttcccgggggattatatttccgcactaccaacgactctgtcgcgcggtgccatggtcccacgatagtgggcccccccgcccggcggggccaatttcctattccgcagtcatttcgctgtgccccgcaattctgtgttctatagcccactctccttccggcgcgcggtgctgtggttattgtacccccctctataaaacngccccgccgccgggcgnaattacacccccagaatatttcgcccccgcgcgttgcgacgcaacaaacaacgccccttagcggtcgtactttggntgtgagacagacaacactctcgcggcccacactaagagttgggatatacccggccgcgtcgccctgcaacaagtggtgtctcagttctcttttgcccggggccccccccatccctnaaacaaanaatataatctggggtccatacagcctcctccccatcggnataatgttgttcctttattgcgccccaattcttctgtgttcccgcccgggccgcngcgattttccgacgaaaaaataccggctctggtaaccccgcccgcgatacatccggccgcgatctaaaccgggggcatctataccgcg

SEQ ID NO: 317013 - DNA, 711 bp, Homo Sapiens
aaattgtacatggacttaataaagggggtctccctatgttgcccagtcgagtctcaaataaggggcatcaagctcgatcccactcagccatccaaccgttctgaggtcacacacatgagccacagtgcatgccagagtcccgtctttactgttgatggatgagccaggggtagtaggtttgagacctacccttacatcgacaccatgacatcgctgtcaaggtcgcagagtgagtgtaggattctattggagaattctggatccttggagccggaaaagtactggagaacatccagtaccaaggttggcaagcgcattccagcctcgtgccaactccaattggtgatggacagctgggtcaatgtgcggaaagaattcaaggcactcatctggaatgagcgcggtgatagattaataatgtctgtcacaggtgccagaaaagggggtgtggagtctcggtcatccttgacccaatccagtttctccatttgtcagattggaaacctgaggtttctgagatgttatctaggatcatacggcatgccagtggcaggggccagacctagatctctcttgctgtggtccccaacttcccccccaagttacctgtttcaccctctgtaggtccgagtaatcactggagctgggcgtgcagggttgggtctcggaagtggtcaccgaagaagacgacttcatcctgggggagttggt

SEQ ID NO: 317014 - DNA, 1125 bp, Homo Sapiens
  misc_feature (31)..(31): n is a, c, g, or t
  misc_feature (154)..(245): n is a, c, g, or t
gggaagcgagaggcgagcggggggacgcggnagctgccccctccgccgcgagagagagatgtgccccaagaggggagaagagccccgcgggggtttagggcatgtaaaaaaacgtcccggccttcccggttgtattcaaagccccagggagggnnnnnnnnnnnnnnnnnnnnnnnnnnnnnnnnnnnnnnnnnnnnnnnnnnnnnnnnnnnnnnnnnnnnnnnnnnnnnnnnnnnnnnnnnnnnccaataaagcggtaaaggtgatttttggaccaagggggaatgtgaaaattcccttcctttcctttcccccccttccttgtggggtttcatttggtgcatcccccaggcagaggggcccggccccccaagggggatggccagagggggaagggcccaaaggggagaaaaggggcggggggccttccccagcccaatcagcagccaagtgtgggtgtgagcagggaaagcccccaccccccttggggttttccaagtgggatggggagtgggaacgatgcattcctgtgtagtcttcagccaattccaagtcaagtagaggcagggaaagcagggtgacaggccgggtgtgcggaaaggagaagcgggtcttctgggtccctgtggtcagggagaaccccgcttcctcagctcctggacgaaggcttcaatgatttcctctttcactttctgcaattccttcttcacctcttccagaagctcctgtttcaccctctgtaggtccgagtaatcactggagctgggcgtgcagggttgggtctcggaagtggtcaccgaagaagacgacttcatccttggcaaggttgtgctgttcttctcccagggtctccgcacagattcactctgggccgggactctggcctctggctcctcattggcagattcatccttgggggttttctccccaacttgcgtggctttccttctccgggccagcatggcgttcatctcttccatgagtcccccacctccgcttcgaccactctcagctttgggggctgtgggcccccctgaggcctcctcctgcttgctgactttcctgagtttggctccagcaatagctgcggccaggcctgcctcgtgccgaattcgccacccaggc

SEQ ID NO: 317015 - DNA, 670 bp, Homo Sapiens
ctaaaaaaaaccaaaacttgaaagggcattaagcgttcaagtgaatctagaacaagggaatgctgaaattccctccttccttcccccttccctgtggggttcattggtgcatccccagcagagggaccggccccaaggggatggcagaggggaaggaccaaagggagaaaagggcgggggcctccccagccaatcagcagccagtgtgggtgtgagcagggaagccacacccccttggagttttccaagtgggatggggagtgggaacgatgcattcctgtgtagtcttcagccaattccaagtcaagtagaggcagggaaagcagggtgacaggccgggtgtgcggaaaggagaagcgggtcttctgggtccctgtggtcagggagaaccccgcttcctcagctcctggacgaaggcttcaatgatttcctctttcactttctgcaattccttcttcacctcttccagaagctcctgtttcaccctctgtaggtccgagtaatcactggagctgggcgtgcagggttgggtctcggaagtggtcaccgaagaagacgacttcatccttggcaaggttgtgctgttcttctcccagggtctccgcacagattcactctgggccgggactctggcctctggctcctcctgatggccctcgtccgaattgcc

SEQ ID NO: 317016 - DNA, 847 bp, Homo Sapiens
  misc_feature (176)..(226): n is a, c, g, or t
  misc_feature (432)..(440): n is a, c, g, or t
  misc_feature (457)..(457): n is a, c, g, or t
  misc_feature (465)..(465): n is a, c, g, or t
  misc_feature (478)..(486): n is a, c, g, or t
  misc_feature (698)..(698): n is a, c, g, or t
  misc_feature (743)..(743): n is a, c, g, or t
  misc_feature (766)..(766): n is a, c, g, or t
  misc_feature (771)..(771): n is a, c, g, or t
  misc_feature (790)..(790): n is a, c, g, or t
  misc_feature (795)..(795): n is a, c, g, or t
  misc_feature (803)..(803): n is a, c, g, or t
  misc_feature (817)..(817): n is a, c, g, or t
agagacgggccgacagggtagttttaattgtgtcgaggtgttgtgttgtagcatttataaaaactggcagatttattctgcaggggcccattttcaagaagctaaaggtgaaggtgggaggggagaagtttcctccccttttcctttctccctcatgttatttcctccaaggggtnnnnnnnnnnnnnnnnnnnnnnnnnnnnnnnnnnnnnnnnnnnnnnnnnnnctgaggttccaaaaagttacagcatcttatttcctcatagaaaaggggaaggagccagagggaaggggagtccctggggtggggggatatctcacccccagcccggtgagacatcccctccccttaaatagctgccccaaatggggcaagcccagggctatagcatttaaaaactcccacatcccattttatcaaaaccaaagagnnnnnnnnntttcccttttcccccanaaacccanaatatatatatannnnnnnnncttaaaaaaaccaaaactttgaaggcattaagcgttaaagtgaatctagaacaagggaatgtgaaattccctccttccttcccccttcctgtggggttcattggtgcatccccagcagagggaccgaccaggtgggaagtgctgggggtggagggggcccacctccttccaacgcctctagggcactggccatgcggcggaaaactgggccnaatcctccttgctgccgaagttgaggccccagacctgggcgagcntcggccactgatgggaagttggngggtngcctgggttatactttganaaccnggacgatngcacagtttatgancaccttcttggttcgggtttacatttttcc

SEQ ID NO: 317017 - DNA, 786 bp, Homo Sapiens
ggcttctcctgagaccggcgctttatgttgctcggacgggccggctgctgctttttctgctgctccacctctccgggaggcctttcgggaccgaccagttgggaatttctggggttggagggggcccaccctccttccaacgcctctagggcactggccatgccggcggcaaactgggccgcatcctccttgctgccgaagttgaggccccagacctggcgagcgtcgcgccactgatggaagttggggttggcctggttatacttgacaccccggacgatggcacagttgatgaccacctgctggtcgggctgcatcttccggcccacgacgcgaaaggaattggccgtggggttgtggtagatctggacgcggctgaaggcctggggacccgtgccagcagggagccatcgcttgttgccatcatcataaagcatcacagtggcccggctggaacagatgaccgtctcgctcatggctgctcggcgggcgggcggctcgcccacgggctggctgctcccggggcgcccctggctggaggttcaggggttcggggctggctccgggctcggctcaggctcccccagggtcccgccccatagagtccggcttcctggggagaatgtggaccgggccggggcgggtctccgggcgccgcttccctcaggcggtctgatgagaggttcctgcagcagaaaggggatgcagcgtccgctccccagcgcgcaccccttgccggtcggacgcgtgggtcgacgatatcccggtaattccggaccggtaccc

SEQ ID NO: 317018 - DNA, 644 bp, Homo Sapiens
  misc_feature (96)..(109): n is a, c, g, or t
aagcagaagatcattttaacccgcaaggcaagggttcagtaagcaaggtcccaccctggcattccagctgggtgacagcctgagcctctctcaaannnnnnnnnnnnnngatcacagatcatgctgggtgatgtgtggcctggaagggaacaagagtgaagtgggaaaccagttaggtgggcattgtggtcatccaggcaagagatgaaggtagcttgaccggggtggagacaatgaagatacagatttttgagacttgctatcacatctctcaatatcttctcttccacaaaataaacagttcagtgttcctctcatctcctctcataacaggtttggtgtctcttctcacctgggtgtttctcctcctgtttctcctccatctgattcctctgtaaagaactcagtctttccctcagctgtttcttcctatcctgtgccttgcttgtagttctagggaattaaaatcttcaattcaatgactatcgttctcatataaagaggggagctgggtgcagtggtgcatgcctgtagtcccagcttctctggagcattcaggtcgatacccatgcatccttagggcacggactgtagttcaagaacgcgatgtgtctgtcagacccagagatgttccctgatctcaa

SEQ ID NO: 317019 - DNA, 680 bp, Homo Sapiens
  misc_feature (87)..(87): n is a, c, g, or t
aaataacttgtttcttcccctttactttttaccaaagcctcagacagagtcctgtgcgttgcatcttgtattacaaatgccttcatntcaatttctcacgcgcttctctgacagattatgctttacctaggttatagatctttctcttattcaattttattctacttcacttacaaatctgctgctgaacatgaagcaaaaattcatagtaagaaaatgcagcctctgtccggtcttcaatcaaatgctgaaaaaattctgctttggcaggactctcatcttttactatgtgaaggattggacttaatggtctgctgtctctaagccaagttatgaaggatctggctctttctgatgaaagtgtatctagctctggaagatgtgtcattttctgtggtattgatgcaaaattagtatatccaagcacatcctctatgaagttattgtcacagcctttcccaacccaaatgtaaaaaacagagccacagtccataaggaaagcaccttctcttgtcagcttctctggcagacaatttttgaagaggtggctgtggtacaatcccgtccattaacatgtactgcaccctcatctgtcaatctgtctatcctgtataagttgggatgaatcattttcattagatgaacaagtggctgagactttatctgacacatggcatata

SEQ ID NO: 317020 - DNA, 804 bp, Homo Sapiens
  misc_feature (640)..(725): n is a, c, g, or t
aatacttgaccatcttcagatgttgtctctatgttacccctctctattccaacatcatcctctttctttttcttaattggtctcttttgaatttttgctttcttcttgttttcatcatgagctcgatcagatgtctctcgatcttcagactggtggtgtcctataatgtcctgtgcacgcattcttgagctttccaggatttctgtctgttctctctgtttatctacagaagaaactttctccttgagttcctgttcttcgtagcgccttgaactctctttcctttctggtttacgatcctcctctttccatctaccctgtctgtcttctgtgaggtgcgagggactaagagaacgagattcttgaggtcgtacaacttggctcaagagtctgtgtttttcatttttatcatctccactgttgtaggcatcactgtccggagaatgttcacgccggcgcttcggggactgtctagggctgggactcccttcatttctatagcgcttctttgattttctttcatcatgtccatctcttggattcctatcttctcggatctcttctcgcttttctctgcggtcatctcgtcctttgtctttgtcttcccaatccctttggcgttctcgttctttatcccttnnnnnnnnnnnnnnnnnnnnnnnnnnnnnnnnnnnnnnnnnnnnnnnnnnnnnnnnnnnnnnnnnnnnnnnnnnnnnnnnnnnnnnttcccgttctttttccctgtctcgttccctctctctttcccgctctcgatcgtggtctcggtctctatccctttcacga

SEQ ID NO: 317021 - DNA, 473 bp, Homo Sapiens
acagggtctcattatgttgcccaggctgctctcaaacttctgggctcaagggatcctcccacctcagtctccccaaacgcgtgagtcaccatgctggacctcagcctcattttgatatgcgttgtttccaacaggctggaacaccaggtttggacataattttttcatccagtcaaacaccagaggcagcaggcaccagcacacatgtctaaggcttgactccctgaagattctttgatgtgggattctcactacagttcattagaaacaacaagcacacatgagtcttctctgtcagaagcccctgattctggggctgggaatgttccttgaggaagtgccagtgtctcaggaggtgccagcagaaccacccgcattgcccctgggtgctaaaattctaaattctcaactctgaaaatgcacacatactggggacaaaataactaactgtatgtcagtgagctttagggcca

SEQ ID NO: 317022 - DNA, 1879 bp, Homo Sapiens
  misc_feature (1150)..(1150): n is a, c, g, or t
  misc_feature (1158)..(1158): n is a, c, g, or t
  misc_feature (1171)..(1171): n is a, c, g, or t
  misc_feature (1175)..(1175): n is a, c, g, or t
  misc_feature (1178)..(1178): n is a, c, g, or t
  misc_feature (1181)..(1182): n is a, c, g, or t
  misc_feature (1185)..(1185): n is a, c, g, or t
  misc_feature (1191)..(1191): n is a, c, g, or t
  misc_feature (1193)..(1193): n is a, c, g, or t
  misc_feature (1212)..(1212): n is a, c, g, or t
  misc_feature (1219)..(1219): n is a, c, g, or t
  misc_feature (1227)..(1228): n is a, c, g, or t
  misc_feature (1239)..(1239): n is a, c, g, or t
  misc_feature (1249)..(1249): n is a, c, g, or t
  misc_feature (1267)..(1267): n is a, c, g, or t
  misc_feature (1284)..(1284): n is a, c, g, or t
  misc_feature (1361)..(1361): n is a, c, g, or t
  misc_feature (1387)..(1388): n is a, c, g, or t
  misc_feature (1392)..(1392): n is a, c, g, or t
  misc_feature (1397)..(1397): n is a, c, g, or t
  misc_feature (1403)..(1403): n is a, c, g, or t
  misc_feature (1413)..(1414): n is a, c, g, or t
  misc_feature (1417)..(1418): n is a, c, g, or t
  misc_feature (1427)..(1427): n is a, c, g, or t
  misc_feature (1430)..(1431): n is a, c, g, or t
  misc_feature (1444)..(1444): n is a, c, g, or t
  misc_feature (1448)..(1448): n is a, c, g, or t
  misc_feature (1453)..(1455): n is a, c, g, or t
  misc_feature (1460)..(1460): n is a, c, g, or t
  misc_feature (1462)..(1463): n is a, c, g, or t
  misc_feature (1466)..(1466): n is a, c, g, or t
  misc_feature (1472)..(1472): n is a, c, g, or t
  misc_feature (1474)..(1474): n is a, c, g, or t
  misc_feature (1480)..(1480): n is a, c, g, or t
  misc_feature (1607)..(1607): n is a, c, g, or t
  misc_feature (1654)..(1654): n is a, c, g, or t
  misc_feature (1691)..(1691): n is a, c, g, or t
  misc_feature (1693)..(1693): n is a, c, g, or t
  misc_feature (1698)..(1698): n is a, c, g, or t
  misc_feature (1713)..(1713): n is a, c, g, or t
  misc_feature (1768)..(1768): n is a, c, g, or t
tttttcccaataagaaataaaagtccctttattttatattctacccaaggacagcaatgcgataaaggggtggccttttagctgagagggagttgctcaaaaatgatagaagtggcaaaagctcagggtgtgtgcaaggagttcctcccacctctcgagtctggcggcctccttctctccctcctcatctgagacatggcagcagccaggaaccactgtgccagagctggagcctctaggacaagccccagcaaggcggagactcagctcagcactgtctctgcaggaactgcagggcccactttcttattgggaaccaggacaatgcgggccacactcttcaactcccccgtctccggggccaggaccaccttgtacttctggatcagccttgcgaggagtagctgcatctccagctctgcaatcctgcggcccaggcaggcccggaccccatagccaaagggcacagagccaaatgggtgctggatcctgggggtagcaggctggctgtttctcagccagcggtggggctggaagctttcaggctcagagaaggcagtggggtcccgggacaccacatagtggcagaacacaaactgggtgttcttggggaagaggaagccatcaacttcaatttccttttctatgatccgggagtttgtggggaccacagggtagagacgcagagtctccttaagcacagctttgagcaacggcatgtgggcaaagtccttgtgctggggcacttgcccggctggcaccacacccaccacttcctcgtgcaaggcctcctggatctcagggtcctttgagaggtggtacagggcccatgtcagcgtgttggatgtcgtgtccactccagccatgagcagctcaggcaggctgcccatggcctcccgaggactgagctgtccactggccagtaagaagtgcaggtagccagacacctggatgccatctggccctgctgcctgcagttgggcctccatatcttcgagcttctcatcaatcagcttcttcccaaaggaaaagatggcattccaaccatccaggtatcgcttccagaaaggcagcacggggcgagtccacttggggaggaaggtggcatagagtgagttctggaacattaacccgatggatctgacgaagntcacggtntcctcggggatgnatcnctncanncanccaatncntttctcgaacaggatgtancaaatancttccaanncaaagtagtanaagagttganccatgtccgacacctgtnccccgaagcactctctncccgcagctggtccagtagagtaataaagtaataaataaactaattgaaagaatcagtatagagagctgttcagctngattaagcaacacgctggttaagagnntggngaagntggtanaagtggtgtnnttnngtggtgaanggnnaataggtaaggtngtgntggtnnnggtgntnnttnaatagntnaatgtngttaagtaatgggtaattgccatattgccgcataaattgctccaagagcggggaaatggccaggttaacgtgcatatgaggccctaagtaggaaatccaaattggaccgtaattggcattgtaaagnaaatgtaaatggtgaagttgaagggaatagcattgaacgaacagatnaaagaagaagagcagatgtcatagaagtggaatatcntntaagntccgttgccgccgcnggaaaccaggcccggctccgggagctccggtggccttgtccgaggggagggcggnagggatcgcggccttggctctggccccgtgggggcagaggccacggccggcccctcgcagcgcccacctcagcctcgcgcagcccagcgcagccatgggttgtgtcgcgcg

SEQ ID NO: 317023 - DNA, 1038 bp, Homo Sapiens
  misc_feature (985)..(985): n is a, c, g, or t
  misc_feature (1010)..(1010): n is a, c, g, or t
  misc_feature (1024)..(1024): n is a, c, g, or t
ggactcgacccaaaggtgcaggcgcgcgacacaacccatggctgcgctgggctgcgcgaggctgaggtgggcgctgcgaggggccggccgtggcctctgcccccacggggccagagccaaggccgcgatccctgccgccctcccctcggacaaggccaccggagctcccggagccgggcctggtgtccggcggcggcaacggagcttagaggagattccacgtctaggacagctgcgcttcttctttcagctgttcgttcaaggctatgccctgcaactgcaccagttacaggtgctttacaaggccaagtacggtccaatgtggatgtcctacttagggcctcagatgcacgtgaacctggccagtgccccgctcttggagcaagtgatgcggcaagagggcaagtacccagtacggaacgacatggagctatggaaggagcaccgggaccagcacgacctgacctatgggccgttcaccacggaaggacaccactggtaccagctgcgccaggctctgaaccagcggttgctgaagccagcggaagcagcgctctatacggatgctttcaatgaggtgattgatgactttatgactcgactggaccagctgcgggcagagagtgcttcggggaaccaggtgtcggacatggctcaactcttctactactttgccttggaagctatttgctacatcctgttcgagaaacgcattggctgcctgcagcgatccatccccgaggacaccgtgaccttcgtcagatccatcgggttaatgttccagaactcactctatgccaccttcctccccaagtggactcgccccgtgctgcctttctggaagcgatacctggatggttggaatgccatcttttcctttgggaagaagctgattgatgagagctcgaagatatggaggcccactgcaggcagcggggcagatggatccaggtgtctggctactgcacttcttactggcagtggnagctcagtctcgggaggcatgggancctggctgagctgntattggtggagtgg

SEQ ID NO: 317024 - DNA, 1171 bp, Homo Sapiens
ctgctccgtgcctcccgcgcctgttggttggaagtgacgaccttgaagatcggccggttggaagtgacgaccttgaagatcggcgggcgcagcggggccgagggggcgggtctggcgctaggtccagcccctgtttgccgggaaccccagaggaggtcgcagttcagcccagctgaggcctgtctgcggaatccacagcaaccagcaccatgcccatgacactggggtactgggacatccgcgggctggcccattccatccgcctgctcctggaatacacagactcaagctacgaggaaaagaagtacacgatgggggacgctcctgattatgacagaagccagtggctgaatgaaaaattcaagctgggcctggactttcccaatctgccctacttgattgatggggctcacaagatcacccagagcaacgccatcctgcgctacattgcccgcaagcacaacctgtgtggggagacagaagaggagcagattcgtgtggacattttggagaaccagtttatggacagccgtatgcagctgggcagactctgctatgacccagattttgagaaactgaagccagaatacttggaggaactccctgaaatgctgaagctctactcacagtttctggggaagcggccatggtttgttggggacaagatcacctttgtggatttcatcgcttatgatgtccttgagagaacaccaagtatttgagcccagctgcttggatgccttcccaaatctgaaggacttcatctcccgctttgagggcttggagaagatctctgcctacatgaagtccagccgcttcctcccaagacctgtgttctcaaagatggctgtctggggcaacaagtagggccttgaaggccaggaggtgggagtgaggagcccatactcagcctgctgcccaggttgtgcagcgcagttggatctttgcatcccagcacctgcctcctggttcctttttcctgtttattcccatctttactcccaagacttcattgtcccttttccctccccctaaacccctgcctggcccctcgcctgtggagctcagccccgacctgtccccgtgttgcataaaggaccaccattgactggtttacaggccctgctcctgcagcatggtccctgccttaggcctccctgatggaagtaaa

SEQ ID NO: 317025 - DNA, 636 bp, Homo Sapiens
cagcaatgataataatcgattcaggcaacaatgactgttcatctccagaaagaaatctttaggatttttctcaaaggtttctttatagtttagaaagaaaaaagtgttagtatgaatttatcatacacacagctttaaaccgctgagccccgtagaagctgcctctgctcaaattagacctaatggaactgaaatgtgcagtctttctctttctctctttcttttttaaatttgagaagcaagttgtaggaagtagaatccagactaatcatatcagtgtcataagtatgagaattacagaggtttggctcaacagtttttcatggtttgaaatggtaaaaatagataaaacacacatgttcatttttgaaattttcctatatcaggaatacacattttcttgaaattaactgaaactggatgcaaaagtaagacattatttagctctaagttgtagaaaccaaataaagataaatgtgagaggtttctctccctcctttaaaaaaggaaacattttaaaattcaacagaaggtataaaagaagagcaatgatagctcttcttttacattttaacatcttgtttgaatttttaaaaggtgaataacaaggctttatattgagtggctgtagtaaag

SEQ ID NO: 317026 - DNA, 342 bp, Homo Sapiens
cctttaaaatcgccagactcaggcatgaaaatagagtttcagggacagaaggaacaagtcccctcttcttggttaatatttaattgggtgctaaagatttcttggagaggacctctgtacctccagtgacaggcatacaagaggctcctatctctgcaagagatgcaggcacttccctgaataaacgaaaataacatacaattaaatcagactattcaattaataaattactttggtggaccttgcaggccaagtcctatttaattacataattttaacttaacacttgagttagagaacacatttatttaataaatgcaggcctaagtgctagaaggccgt

SEQ ID NO: 317027 - DNA, 850 bp, Homo Sapiens
  misc_feature (370)..(370): n is a, c, g, or t
attgcagagtctgtgcagcatgctgtacacgtccgtcctccccggctcaggccctcaaagaaggggatgaggtccagcagctccgtgtccgtcatgtcatcgaacccaggactgcacaggcactgcattctcaggatggaagatgtatgaggcaggggaattgtcaacaatgatcactttgctcagctccccccaaggcgactcaggtccttcacgtagttcccacgatgaaaaacacatgattctctgaagagccgggcccggaacacaccccagcggtctaggaggtcagccacagggtctgcatacttgccaagctggcagtaaagagcacacattcaaaaagctgccccatcctctggaggaaccntcgtccacatgtggccgcttcagcacatacacctgatgtatagttccatcgatttcaaccggaacaataaaatcagcattactaataggcttaaacgaactgtgcaccaatgtttcatctaaatcaatgaccacacatttctttccatagtcaagcaccgtcacctctggaagaaggtacttagctggtggacttggtatgggaatgacctgcctctggtcacccttctgaagcccaccattctcctccaccagtggcggaagcacactggggctgctgggtggaggggcctccacattgtaatcacggaagcagcagaagaaggagctaaggatgctgcggctcctctgcttctttaagctgacgttgcactgggaggctttctcgcccgcgcccggcaaccggccctcgtcctccttggggttggtcacctgggtgatgatggccgggccgtccatgggtgcgcggcgcggcgggagg

SEQ ID NO: 317028 - DNA, 278 bp, Homo Sapiens
gtgtaagccactgctcctggccaagagttattctcgtgactattaacttctccagtggtagatattacagatatccagtgaacgattcaaaacataagtgattttcagcatggaggagctaccaataacagtagtaacttgtacctttctgggcactcaactatgggccaggcactggtctcctgctacatatgtgtcatctgacttcattctcccaagtcctagttgtaacatttttctctctgtttctccatagaaagatcccttttatttcctgc

SEQ ID NO: 317029 - DNA, 2243 bp, Homo Sapiens
  misc_feature (191)..(191): n is a, c, g, or t
  misc_feature (233)..(233): n is a, c, g, or t
  misc_feature (393)..(393): n is a, c, g, or t
  misc_feature (461)..(461): n is a, c, g, or t
  misc_feature (778)..(793): n is a, c, g, or t
  misc_feature (809)..(947): n is a, c, g, or t
  misc_feature (1012)..(1028): n is a, c, g, or t
  misc_feature (1169)..(1169): n is a, c, g, or t
  misc_feature (1186)..(1186): n is a, c, g, or t
  misc_feature (1361)..(1403): n is a, c, g, or t
cccaccgcctccgcgcggtggagggaggtgttcctcgcccgcacctgtctcccttgcgcgttattatacataagcgggggccccccgagtatggtgtgcgaccccacctcgtgttgtcgtgccgacccggcctgtttgtgtctgcccgcgtgagggggcgcagagttttctattgttttttcccgcacgcngagggcggaccacaaggcgcgggagggtgtagagaggtaccnccggcgctggggagagaacagtcgagaggttgtctccgccacacgcgccgccccgttgctgttccggagtgagggtctctccttgctacgtgcgtcgcccacgcaaggaagacgtttcttggtttgagagtatatgttcgcccgccgcccctccgtctcncacaccgggtaatgttccaccgcgaggggcggtgggcgcgccgccccctttttgtcttatcttgcaanggcgttcgcgccctcggcgggtgcccccccctgcgtttgaagaagaccgccgccccaaaatgcgccgccccccgggacggccccccttctgcggttttgtgttctcaacagccaccgatgggtgttcgcgcccgccgggggtttctttcttttgttggggggggtcccagccccccttttgtgcttgccccggggttttctcggggggaacaagagatttaccccgttgtcgctctttccttgtggggcccgcccgccccacacaagaggtttttaaaaacttttttgtgggggggaggagggcgggcacaaaccgnnnnnnnnnnnnnnnnggggtcgtcggggccnnnnnnnnnnnnnnnnnnnnnnnnnnnnnnnnnnnnnnnnnnnnnnnnnnnnnnnnnnnnnnnnnnnnnnnnnnnnnnnnnnnnnnnnnnnnnnnnnnnnnnnnnnnnnnnnnnnnnnnnnnnnnnnnnnnnnnnnnnnaaacataagtgactttaggagttttatttatggagcagttatctttttaatcaccaagtgatttnnnnnnnnnnnnnnnnnaattttcttcctttcctttgtggtttttcgccccggtgcttggaaagatggaggcaggggttctggtcctgcagtctgagggcaggctctcctggcaaggccgtgtctaagagcagattgtaggacatgcgatggactccncaggttcctctgtcccncaacagagacacttctttcctccacatggaccaaccctcacctctaaaaaccatttcccctcacagtcccaaagaaaaggaaaacccagcaagggcatggtccatctgctgccttttctgggctcccttttctgctgaccaatttacgtgcacggtaaaaatgcatgtttttccnnnnnnnnnnnnnnnnnnnnnnnnnnnnnnnnnnnnnnnnnnncattggcttggaaatttctgtggatgaaatgtcccaaagtcagaggcactctcccggcacaatccctgctctgaaggggtctctccacctccccttttataaaaagacaacaaaataaaacaaagtaatcttttcagtattttccacaggagcaaccaaagaaaaaggcaggaagcttccaattataggtcattaacgataataaggtttttgctcaatacccagggttctttacagagaagttcccctaactgaggcactctggaataagtcactggcatttcctcaaagtttcaaccccagattattggggcctggagaccaatggaagtgggcagagggtcatgggagcagactgctgtttgtaaggtgcagtcaaaagattcagcagattggaagaaacaaacaaaatgccaccccctaccaggatccagtttcttctaaggccagttaatgccagggtcaaaactggcctaggtggcaaagaggggaccactctgcctctattgctttggaagtggcaagggtgcagttggcgtctctcttctcagtggctcacactttagacccctggtgcctgggctccattccctaactctgtagggcttcaggaagaggaaagcctgagactgggctacaggaagagggccagaaagggacagggatggacgaccaaaaggcggggcggggtggggggaagaggttgtgctatcagtatccttacagagggggagcagagtgcaaatttgcatcaatcatttataagctcttgccataggctgctgctactgagcatctcctcacacacttaaaaatattgacccaaaagaaattccgacc

SEQ ID NO: 317030 - DNA, 846 bp, Homo Sapiens
tgaggtgattaaaaaccactcctttattgagtcttaaaaaataaacaccttaaagggacagcgtgaagctgagaagtagcatcccaacagcttgtgtccttgggagctgcagtcttctctgaaggaagctgcttctgttccacagacacagggcaaggggtgctatgtatgctttgtacatgtatcaagggtccctcctgggggtggcagagctcagttactctcgccatcactgctgatgatgccacgcatatgtgaccagtctgggggtgcgggacggggccgctcttcatctgagtccagggtccgtcggtacagctcccctgggggtgctgcttctcctaaagggttccaggctgtacgtctgcgtggccggcccgagccactgatgatgttcgcaacatccaaggaggccacctcagctgcctcctccctctgctccttcagggcccgacacttccctagggaaggggtacccttcatgcctagcgcttccagttctgcccggaggatactcaggcgctccttgtgtgagcaacaggagcccaacagcttcttgtagtttcgatgggcaccacaggcccgaatgtagcgcttcagcctcatcacagccgggtggtcctctccacggcgacctgagccagccttccctcctttggcctctggacttccatctgaggaggaagaggagcttcgtgtcctgcctttcctggagctcttcttggaagagcggttcttcctctccccctgggggcctccccctgcctcgctgtcacttacctccctctccaagtcactttcctcaccactggtgctgcccctcgtgccgaattcgccacccaggcc

SEQ ID NO: 317031 - DNA, 469 bp, Homo Sapiens
ctcataaagcttctcttttccctgttggcctaacttcgtttcgaaatgattagtcccgatgtactcaaatgaccatggtgtgtttctcaaatgtctcgagcagcatacaggcccagcccctgaatccgagaccgtgcccagatacacattggatttcccattcaagttttcatcttccggtactgcgatgacttggagtgaacaaactgtttactataaggtgcgttcagttctccagtgactgtgctctgaaatgactttgaggtgctggtgctgtttaaggtgtgaggcctcttgacatgggcactcattttaggttcagaacgggcacaacctgtggggttaacggcaagaggaagttccatgagaggatttcggccgtatcggaaggtataattttcacatgcctcaaccccaggaagtgatctcgctatgcgtgccactgcagagacggtcaggccaaacagat

SEQ ID NO: 317032 - DNA, 521 bp, Homo Sapiens
acagaactttaacaaagtatcttgttcataaaaggaactcaactaaatatttgctcaattaaattatttccatcaatccactacttataatcaaaacaactgccagatgggaataaaatttggccttaaaaaatcattcacattttatttctaaaatgagaatgggaaagtactgtgagaaggaaatgaatatatagtaataaaccaattatcagtttttaaagtgtgtttttttctatgtaaatgaagcaacacttaagcattcagaaatgtatttattgacatcaaactattgtatatatatgtgtgtgtgttacttggtgctgaccggttcgctccttgcaggggctccaagtgggtgcaggctgagccccccacctgcagctccttgaggccactgtcaggggctgtctattggcagaaacctgccacaatgagccactccagtgtgcaggggtcacagtcccttgagttcaaactcttgtcccctaagcataaatgtcatcaggcctcagcatcat

SEQ ID NO: 317033 - DNA, 794 bp, Homo Sapiens
actccctgccactaggcagggcctccccagcccctactggcctgccccacctccatttggactggcacatttggtgttcatttggatttggaagaccgcctggcaaaatttatgaagacagaagaagccattatatactcatatggatttgccaccatagccagtgctattcctgcttactctaaaagaggggacattgtttttgtagatagagctgcctgctttgctattcagaaaggattacaggcatcccgtagtgacattaagttatttaagcataatgacatggctgacctcgagcgactactaaaagaacaagagatcgaagatcaaaagaatcctcgcaaggctcgtgtaactcggcgtttcattgtagtagaaggattgtatatgaatactggaactatttgtcctcttccagaattggttaagttaaaatacaaatacaaagcaagaatcttcctggaggaaagcctttcatttggagtcctaggagagcatggccgaggagtcactgaacactatggaatcaatattgatgatattgatcttatcagtgccaacatggagaatgcacttgcttctattggaggtttctgctgtggcaggtcttttgtaattgaccatcagcgactttccggccagggatactgcttttcagcttcgttacctcccctgttagctgctgcagcaattgaggccctcaacatcatggaagagaatccaggtatttttgcagtgttgaaggaaaagtgcggacaaattcataaagctttacaaggcatttctggatt

SEQ ID NO: 317034 - DNA, 986 bp, Homo Sapiens
  misc_feature (310)..(345): n is a, c, g, or t
attaatcatgtttttcttttaataagggtttttactcaaaagtgtagctttgaaaatctctagcttgttgtgaaaaccaggaaagccaaggagctgcctcacactgcacaccaccacgtgaagctgtgggccgctgtgtgtttgcaaactctccattaccaaggctggaatcaaatgcaccactttaaaatcagagccaacatttaaaattaggaggatgatgcatgtcctactttgattcaaggagaaaggacaagttcttagtacagtaaaacaaaacacaaaagtaaacaaatctttagaaatcacnnnnnnnnnnnnnnnnnnnnnnnnnnnnnnnnnnnnattaggattatcatcatttcaaactattaaaaataaggttgccaccttaccttttcttttggtaatggggtgttattttttttaagagaaaaaaccaaacattttgccccagactctagagtttcccaacttcaattctgttttctgctgtgcaacttccccaccttcacgctgtatccccaagtcccgccaccaattctggctggcaggaggcagagcaagctttcattctggtcatcaagatgacaggcccacaaaagtacagctgagacgggaactgaattcttccccaggaagaaaatacctatacccacaataggtctgcaaaatctgcctaaaagcaagatggcaatcttaatcaaaaagggaagctagatttttaaaataacttaaaaaaaccatttttatataaagcagcaaaaacatatcttcctctctgcagaaagaaaaatgttaacaaggaaacacagcgatgtgaacggactgtccgtcaactcctgctccactggatcccccatccagcttcacctcgagctactccttaactccagcagtgctgtctgaagaagatcctttggcgtcttcaactgctcttttactttcttgattgagactttcattttcggacctggtcccattag

SEQ ID NO: 317035 - DNA, 489 bp, Homo Sapiens
ggggagggggcgataaaatggcgcatggggcggagtgaggcgcagtcgttcgcccaggctttggcccggcttccggaggaaggtgggagtcaatcattttgacaagtctcctgaaaggaacagctagcaggaactgaaacctttttccatttggtctcgtggcaaaggcagagattgctccagcagctccacacaaaatgatgtgctcacgggtgccctctgaacagtcttctggtacctctctcttgcctaaagacggtgccccattttcttgggattccttggatgaggatggattggatgactccttgctggagctgtcagagggagaagaagatgatggtgatgtaaattacacagaggaagagattgatgcactgttgaaggaagatgacccatcatatgagcagtcttctggggaagatgatggtgggcatgttgagaagggagaaagagggagtcaaattctacttgatactccccgagaga

SEQ ID NO: 317036 - DNA, 557 bp, Homo Sapiens
ggctgctaacctcttgaagcggcataacttaagggggtggtgtccagaggatggccctggttagggaaggaaatgagccagggctgggagacttggatataatagggtagaaggggagtttgagctaagctctgcccttggtttctctggggcttgagccctggataaacacaataatggtctcccaaaccaaccagagggggctgcctgactgtggctgctatcattgctggatccattttacaagcctgacaaaggtcagggttgtttcttaggactatgaaggcctgtacataggagatttttgcccaatttccctgctgccagcaaaacaaatccagtcaatagatcatattaaaatttatgatctcattttctggccaagattcctggtccctgagcttggattcaacccaggctatattacagaaaaatgttagccttttcttttttagagtttgggggtcaaacttttcccagttcttgaggatgcatctaggggtgtgtcctgtcatatggagaggcaattacccatctgtgaagagagaacagaggag

SEQ ID NO: 317037 - DNA, 908 bp, Homo Sapiens
  misc_feature (147)..(147): n is a, c, g, or t
  misc_feature (215)..(215): n is a, c, g, or t
  misc_feature (249)..(249): n is a, c, g, or t
  misc_feature (878)..(878): n is a, c, g, or t
  misc_feature (880)..(880): n is a, c, g, or t
  misc_feature (887)..(887): n is a, c, g, or t
  misc_feature (891)..(891): n is a, c, g, or t
tccgcagtcgcgacctggcgtgaaggaggagctgccgcccccgccccagcctcggggacgcctctctgaagagaagccatttgaagcagaatccaaaccatgaattgtagagaattacccttgaccctttgggtgcttatatctgtnagcactgcagaatcttgtacttcacgtccccacattactgtggttgaaggggaacctttctatctganacattgctcgtgttcacttgcacatgagattganacaaccaccaaaagctggtacaaaagcagtggatcacaggaacatgtggagctgaacccaaggagttcctcgagaattgctttgcatgattgtgttttggagttttggccagttgagttgaatgacacaggatcttactttttccaaatgaaaaattatactcagaaatggaaattaaatgtcatcagaagaaataaacacagctgtttcactgaaagacaagtaactagtaaaattgtggaagttaaaaaattttttcagataacctgtgaaaacagttactatcaaacactggtcaacagcacatcattgtataagaactgtaaaaagctactactggagaacaataaaaacccaacgataaagaagaacgccgagtttgaagatcaggggtattactcctgcgtgcatttccttcatcataatggaaaactatttaatatcaccaaaaccttcaatataacaatagtggaagatcgcagtaatatagttccggttcttcttggaccaaagcttaaccatgttgcagtggaattaggaaaaaacgtaaggctcaactgctctgctttgctgaatgaagaggatgtaatttattggatgttcggggaagaaaatggatcggatctaananacatgangagnaagagatgagaattatg

SEQ ID NO: 317038 - DNA, 784 bp, Homo Sapiens
aaaagcgggcgatgattgcaacagactcactataggcgattgggtagcgggcccacccatgagtatttatatcttatttatgggtgttgtagttgttctcagatggagtctcactgtgtgaaagaagaaagaagatgatgatgatgacacagacactcagaggaacatgcaatatgtagatgtaggcagagattagagtaagacatcttctttctaagtacactagtattgcaggcagccaccaatagctggagacagtgaagcatgtattatcttgtagagccctttgagagagtagagtcctgtcaacactatggtttcagacttgtggtctctcagtctaaatgaggatactcctttatgccattcaccactgtgttaaatctttgcaaggtctcttgcaccaggtggtgtcagtccaacacaggtgcacatgcggtgagacatccgaggtatctacacatgcctacatagcagggattgggagatggaagttgtgttcagtgtgttgggtgtggtattacattattaattgagcagcaaagtagcacatgtatgcttatctctttttaggtgctgggtttttttacatattgaaaggcggcttatctgtagtgttcactcttcacatgtggacatatccacatttttcgtctcttattttagcatcctttctttgtgacaatagtagtgccgtggtatttccaatgggagagagcttcgtgtgttttactttgtgatatgcactataacgaatgatcttgtcacccatgtctgtttttcg

SEQ ID NO: 317039 - DNA, 466 bp, Homo Sapiens
  misc_feature (226)..(303): n is a, c, g, or t
tagaaattctgcagaactgattctctgtagtggtgagacttgagtaataccacacccaacacacttaatacaccttccatctcacagtacatgctgtgtaggtattcgtagataccttggatgtcttagtgtatgcgcacctgtgtttgtctgacaccacctgttggaagattccttgcaagtatttaacacagtggtgaatggcatagaggagtatcttcatttnnnnnnnnnnnnnnnnnnnnnnnnnnnnnnnnnnnnnnnnnnnnnnnnnnnnnnnnnnnnnnnnnnnnnnnnnnnnnnttttcacttctcccagctcttggtggctgccagcaatcctgttttcaatagaatgtagaagtcttgctctaatccctgccaacatctccataatgcattttcctatgagtgtctgtgtcatcatcatcatcttctttcgtctttcacagagtgagactccatc

SEQ ID NO: 317040 - DNA, 776 bp, Homo Sapiens
  misc_feature (197)..(235): n is a, c, g, or t
  misc_feature (651)..(651): n is a, c, g, or t
  misc_feature (696)..(696): n is a, c, g, or t
  misc_feature (708)..(708): n is a, c, g, or t
cagaaaccctgcttttctatctgatctttggctctggcaatgtggagcctaagaaaaatgttattagggagcagcccttcttgtgaacttttgcacagatctgctacaagtcatttttataaatcagcgggtagacgtgtgtgttattttaatatggcggaactgaccaagttcctcttcttctgatgtgttgttgnnnnnnnnnnnnnnnnnnnnnnnnnnnnnnnnnnnnnnncccatacctctccaatttttacatgaagctttctctcaagctgggtgcaacaccggaggatttcagcaacctcccacctgaacaaagaaggaaaaagctgcagcagaaagtcgatgagttaaataaagaaattcagaaggagatggatcaaagagatgccataacaaaaatgaaagatgtctacctaaagaatcctcagatgggagacccagccagtttggatcacaaattagcagaagtcagccaggttgaaggccggctcccagcacgcaacgagcaggcgcgccggcagagcggactgtacgacagccagaacccacccacagtcaacaactgcgcccaggaccgtgagagcccagatggcagttacacagaggagcagagtcaggagagtgagatgataggtgctggccacngattttgacgacaagtttgatgatgaggagcccctccctgccatnggggacgtgcanagctctctacacatttgaaggtcagattaaggacgattttcgtagttgaggagaaacatggatgtata

SEQ ID NO: 317041 - DNA, 895 bp, Homo Sapiens
gggtacaacagcaggttcttttccaattcctcaaagcgctgcatggggtgggggcagagacagaagagaatgtaaacattgggttccaccccctggagctcaagggaagacccttacccagatagggactaactggaggggtggaagggaacaaggttaaaggtatgggtcctggtgagacaaaagcaggggggcctgagaacacagagcaaggtgggtttggagggagcccagcagggtgcaggaagggagatgggggacatttcctattccagtgcatgtccctttaaataaactgggtacagcagcattatggaaggagaaccaaagtacagaagacagggcgagcacccccaccccaggccaacgccatcctctgtacacaattacaacacaggtccagaatgagagccctggccagtaagtgggggagacagggaggtctgaagacagggaaaaggaagccagctccacctcatggtaaggggagctatggagtgtaagaatctgaaactgctgactcccatcaccaggagtcacccctgggatgacaacgggccattcaggacagcacataggaggggacccagagggaactggggcaggagcgacagagaccccagctgagcctcatgggagatgagaggctccagactcatttgcagctgcccatctgtcctgcccgtgtagggatcagcagctggcgaggagatggggaaccaagccactttccccagcaagggacagcctgacaaggtgctagggggtggcaccttgggccaggcctgttcttggctgagggaaagaggggggccatgcagtccagccccagggcagaggtcagaagtaagcgtcctgccgggcctcggctgagggcctgtccccaccatcatgg

SEQ ID NO: 317042 - DNA, 596 bp, Homo Sapiens
ctgcccgcttttgttggcaaaagtttcaacaacctcttttaaaaaatcttgcttgccacgacttaagtttagcaacatatgccctgattggctcagtcggtcacaggccatcatttccagcagattttgtccagcttcaccttttattaatttaatctttggtcttggaacctgaaatgctatgacatagcacaatgcagccagctcagaaagagcttgccattgaacattattaccatgctgacccatcttcaagagcagagaaccagcatgcatgtagaaatgtcctttcatttctaagaaagtagctgacagttcatcatttccacccaaagaagattttgcagactgaagagcactatcaaaactttccagtaattctctactttcctgcacatctctagtggaaagcgtaagaagcataagattagcataggccagcagtaagtctgtattggttgctcgccagtcacttttatcagactccaaacactgtaaagactccagatattccttaagggtctgtacaacacacgaattccactctaaacttgaacgcaaagctatgttcctctctgcctcatggcagcgggcca

SEQ ID NO: 317043 - DNA, 885 bp, Homo Sapiens
aaccctcaatctcccagcaaaagaaacagcagggcaaggacctgaaactggtccccttttccaggggctgtccttgaaagatggctgttttaacaagacatgaaggctgccccaaaggtttcctacaaagccacctgccgtggactttgggggttgttgaacacatgccctgataaccatgaattggagacctggatctaaacatgggctagctacccatcctggcatctttggctaatacccttagcttgggtgcccctatctgagaatgatactttgggctgttcaagatcctgtctgaggagcctcacatgggtttcctagttaagttgtaaagtcactctgccagagaaggttatcaccgcaaaaggcaggacctggtgggctgggctctccatacacttccagctctgactgcctggtataaatgttcctcttgagatggatgtgtgttgaggtggatagtgagagcactgggcggtggctagggatagggcaggcaggatttgctcttggtcacactggagggatgcccagaccacacccgggcactagagcagttctgggatacagtgtctgaatcctcagtggtcactgctctcttggccctgactgtgcaagggaatcacgaacacagagacgtcatcgtaggacacctgcccttcctctgtgagactgtcttcctttccctgtgtgctgtgtatcagcatctgggccagctttgagaacctgtgtgggtcctcttggttcccagggaggaagctccgcaccagccatgccacctgctcgttggacagtacatcccagagtccatcagttgccatgacaaccacatcatcctcctgtagctccagctggtccacatccagcacagtcacctgtggc

SEQ ID NO: 317044 - DNA, 709 bp, Homo Sapiens
  misc_feature (30)..(30): n is a, c, g, or t
  misc_feature (298)..(315): n is a, c, g, or t
  misc_feature (641)..(650): n is a, c, g, or t
tatccatccaagagtgtgaaaagcggaagnatgaacacacacgtgggatggtgtggaaatcccaaagcccccacattttgggagtctgtgaccactccccatctgccactaaagctacgagttggtgttggcatgaatctgctttgtttattcccagcaggctctggctcgtgtcacataaggcaccaacatccttttcaaggtagtaaccatctagaatcaactcaattgtaacctgaattcataagcttaagtcaccaaaagacatcactgggtcataattatataggttcccctnnnnnnnnnnnnnnnnnntcaatttctgctatgtagaaaaagaaacaaaaggtttaggtgcctttgccttgtgcaatggatatttcatatgtttattaattggtttcagttaatatgtaatatgaaggcatgataaatgtcaaactgttctcttgtttcagatacaattcttggcatttcaatataggttattatctcatatgtcagacttgagtccagagaatactagaaggacatttaatttcctttcctcctccttcctttcactactcaattcaaagaaaagttatgagtacacagctaggaaccatttttacgtaggcatccatctgagcccatcttgnnnnnnnnnnctaaaacaacaaaaagactaaggacaattacataatgcctcgtgccgattcggcacgag

SEQ ID NO: 317045 - DNA, 473 bp, Homo Sapiens
  misc_feature (182)..(199): n is a, c, g, or t
  misc_feature (406)..(406): n is a, c, g, or t
  misc_feature (412)..(412): n is a, c, g, or t
  misc_feature (424)..(424): n is a, c, g, or t
  misc_feature (431)..(431): n is a, c, g, or t
  misc_feature (445)..(445): n is a, c, g, or t
  misc_feature (463)..(463): n is a, c, g, or t
agataataacctatattgaaatgccaagaattgtatctgaaacaagagaacagtttgacacatttatcatgccttcatattacatattaactgaaaccaattaataaacatatgaaatatccattgcacaaggcaaaggcacctaaaccttttgtttctttttctacatagcagaaattgannnnnnnnnnnnnnnnnnaggggaacctatataattatgacccagtgatgtcttttggtgacttaagcttatgaattcaggttacaattgagttgattctaggatgggttactaccttggaaaagggatgttgggtgccttatgtgacacggggccagagcctgctgggggaattaaacaaaggcaggatttcctggcccaacacccaactcgtaggctttagtnggcagntggggagttggntcacagncttccccaaatgtngggggctttggggttttnccacaccctt

SEQ ID NO: 317046 - DNA, 637 bp, Homo Sapiens
cagaagtgggatacaaagctgactcacctcatggagaatcattggcctttggagttatggcatgaggtacccatgttggggccctttgaaccccctacacccccaccactttcacaggtaatcctttctccctccagtaagtatctcttggacagaactctcagatatggttcgagttctgttttatttgggatatgattagggagaggtctttccccctcttgtttggtagatctgttgggtagaattattttccccctgttgacctcagctgcgaggtttggaccttgaggcttggatgagggaatttttccctttctttggagaaggcttatcattcttactggtaagcatgtattttattttctgtcctgtcttgtatttatttggcctttgtgtattcagtgcttgcatttacttggcttttgcatagttgacattaaatcagagcacccacgaaatgagctctcaaagttcaaaggcatgccagaatattttctggaactccagctagtaacatattcaaacattacagggatcatttagtctgtttttcttaaaactgaactaaaagatggaggctataaaatcatacactccaaataagatatgcatatttcattgatatcttgagtct

SEQ ID NO: 317047 - DNA, 666 bp, Homo Sapiens
ctcactttgccttgtgttttccaccctgaaagaatgttgtggctgctcttttttctggtgactgccattcatgctgaactctgtcaaccaggtgcagaaaatgcttttaaagtgagacttagtatcagaacagctctgggagataaagcatatgcctgggataccaatgaagaatacctcttcaaagcgatggtagctttctccatgagaaaagttcccaacagagaagcaacagaaatttcccatgtcctactttgcaatgtaacccagagggtatcattctggtttgtggttacagacccttcaaaaaatcacacccttcctgctgttgaggtgcaatcagccataagaatgaacaagaaccggatcaacaatgccttctttctaaatgaccaaactctggaatttttaaaaatcccttccacacttgcaccacccatggacccatctgtgcccatctggattattatatttggtgtgatattttgcatcatcatagttgcaattgcactactgattttatcagggatctggcaacgtagaagaaagaacaaagaaccatctgaagtggatgacgctgaagataagtgtgaaaacatgatcacaattgaaaatggcatcccctctgatcccctggacatgaaaggagggcatattaatgatgcc

SEQ ID NO: 317048 - DNA, 1550 bp, Homo Sapiens
  misc_feature (173)..(173): n is a, c, g, or t
  misc_feature (182)..(182): n is a, c, g, or t
  misc_feature (204)..(214): n is a, c, g, or t
  misc_feature (225)..(330): n is a, c, g, or t
  misc_feature (335)..(335): n is a, c, g, or t
  misc_feature (338)..(338): n is a, c, g, or t
ggtggggggaaaccccaacccctcttggtgttggcgcgcgattttttcttgtgagaaaaaaaggtttgtggcccccgtgtttttctcttcttttgggggcggccgccccccccacgaaaaagtgtgtggaaaaaaatttttttgggaggccgggggggccgccccaatagccncgggggtgncgtcgttttgttgtgtttgtannnnnnnnnnntgcggtgggcnnnnnnnnnnnnnnnnnnnnnnnnnnnnnnnnnnnnnnnnnnnnnnnnnnnnnnnnnnnnnnnnnnnnnnnnnnnnnnnnnnnnnnnnnnnnnnnnnnnnnnnnnncttgncantccgaaatactgaagtatttattggtcttagggtattctcgggaaggtgacagtgaggggttcttcaaaggagaacagaggataaaaggctcaatgaaaggataatctccatattagtgctaccaaagtgtcattaatttctatttgttggaaactttactaaggaatgactgctttgaggtaatggataaggacagagcttgaagggtcagcaattcagtcagccactggagtagttttcacatgaagtgagaagaaaagctgagatggagtttgtagggcagctggagttcagatctctcctaagtcctcttctgttcagatattttgtcacctttacagtatttcacagggtcccctgggcccgggggtcatggccagaacgcagagactttatgatgaggacggtgcccacgatgatgccgactaggcccagcaccaggcccagggcacagagcacagtctccgttgtctcaggcatctggattggctcttgggcctcccagtgcttgaggagcggctggtccaagccccagtgctccaccctgcagtcatagaagtcctctgctgagggcacaaaggtcaggtaatggaacttgtggaagctgtaatctgttctgggcaggaagaggctctcagcgacaccctcagtgaccagctccccgttgcacagccacgtgacgttgagcactggtgggaagaacttgtcaatgtggcagatgagggtgttgggctggcccagctccacaggctccttgggaaacacggtcacctcagggggatcgttggtggcctgagtgtggttggaacgctggatcaaggtattcaagttgttgttcaatatagcaatgttagccagcccgccctgagcctcaaaggaaaaggcttggccaaactcctccagatgccagacggtctccttcttgtccagatccacatagaacatctcatcttcatcaaattcaaacataaactccccctgttggtctatgcgtctgtacaaacgcggcataagttgacacatggtccgccttgatggccccagctcctcggagactcagcaggaaagccaaggagagggctctcaagatcacagctctgatatggaacattctgtcttcagggcgcatgttgtggggtctataattgatgactgtgagcacaggaacagtgatgaggaactgaggccgagtggaggcagatgagactccc

SEQ ID NO: 317049 - DNA, 652 bp, Homo Sapiens
ctgaaatactgaagtatttattggtcttagggtattctcgggaaggtgacagtgaggggttcttcaaaggagaacagaggataaaaggctcaatgaaaggataatctccatattagtgctaccaaagtgtcattaatttctatttgttggaaactttactaaggaatgactgctttgaggtaatggataaggacagagcttgaagggtcagcaattcagtcagccactggagtagttttcacatgaagtgagaagaaaagctgagatggagtttgtagggcagctggagttcagatctctcctaagtcctcttctgttcagatattttgtcacctgcagcaacacacacagttattgtcattcctgggttcagtactgtaagcccggacccatcttccccactccctttgcacccgagcttcccatttctctgccctgttcaggtcccagggagaaggtggtcatccctgcacatgccctggtcctcccaggtgaagagcacataggagccaaggagttcacgaaagtcattgaatttcaccctcaaaccccagctgactgtgaggccatcccacatgcttcatgtctccaaaatatacagacaaggggaagggccacattactgagggcagagaagaagcttaaccctgga

SEQ ID NO: 317050 - DNA, 847 bp, Homo Sapiens
tattgttattgcttttattattattgcttttattatcattaaaactctagttcttgttttgtctctccgaatgaagaagtatgtattttcattaggccaagtctgcgggaaggctggggcagcagcatgaagtgtttgaggaagtgggttgggtatgtcagtttccatctcctctctgagcctgtcagggtgtttctggagtgcagagcaggagcaccctgctggagaggccaaggcatagctgtgggcaggctcgggcttcagtttttccatgcccaccatttgcccctttgtcctagggtactttgaccagcagggtatgttggtgctcatactccccaccctacatgttcccaggttctgtcccatggcacaggtgatggtctccctctcagctctgggtccatctccctggcctagttctccagcatctgctcacaggttcgagccacatcactgagcttgaggcgggcatagtccactcgcttcagagccatctgacagtccttcctcgaagagtagctggagccctcatggggctgccctgtggccacctgggtgaggtagcggatctgagctgacagctccgcctccacgtgttgcactgaagcggtgaaggccgccgcctgccggtctaggagccgctcgttagttttttccttggacaattctaggatcacagtacctgcattctgaaggatggcgccgatttcccgttcaatgtcttccagagcgcgtagtctctcgttcgccaggctgtaggtagccattatcactctgggaattctcaccaagagtttctcctcagaaacgcgacgcttgttccggaagtggctctcggtgtgcg

SEQ ID NO: 317051 - DNA, 559 bp, Homo Sapiens
caaaacagctattagacattgtcagggatctttaaccaaggatcagagctctacaaaccctataaaaacgtacgtagaagtttgatgtgtacttttctggaaggcggttttagaatccacagagtgctctctgacctaaaaaagtcaataaccaaccataaagttgtttctttaattatgctggggagaaaaaaatcataaagttatgccagttgaacagaatattgaaggaaaacattttccttcaatctaatgtgtttacacagaaagaatttaatgacaaacttttactacaacagaaaaaaaattttttaataaaagataagtttgattcatgcatgtaattgggaagcatttgttcttattgttgttacatattaatgtacaaagagattctttctcctatgaatgaacataaaaacctggtagaaacaagcccattctcaggcttataaaacaagcctttacagataattatgttttattactcttcattttatggggattgtgttatacaaaacaaataccagacgcctatttgttttattcgtttcagggc

SEQ ID NO: 317052 - DNA, 353 bp, Homo Sapiens
gccttggctctgtcggtgcttgtatgaatgaatcctctaggcttggaactgggatatcagtcagaggcacgaacacagtcccttcatcgtctgagcaccgtgtcaggttgcagtactcccacctgacattgggatccgtcgtataacaccaagggcctgccgctggggttctactgtgctggtgtggcgtcatagatgaccaagcttggcaggttcttcctgtgacagtggtgaagtatgtgcctcgataactctgtccattactgtggtagcactcctgcacagaaggccctgtctcagtcggtgctgatttcagaaataacagaagtagaagaaccacttccttatgttcc

SEQ ID NO: 317053 - DNA, 821 bp, Homo Sapiens
  misc_feature (531)..(531): n is a, c, g, or t
  misc_feature (560)..(560): n is a, c, g, or t
tttcatagggctcggcgtggcgtcccagtaacagtggttgccttcttgccccggtatcctttcccattcccaaacatagagttcatttgggtagttttctggggtcctctgatgccggtgtggtgtcatggatgaccaagattgacatgtccttcctgtgacagtggtggagaatgtgccttgataactctgtccattaccatggtagcactgccggaccacaggggtttgctcagttggtgctgcttcagaatgagcctccatgcttggaactggaacaacagtgggagtctctaggacactgattctgtttctgagcattgtgtcaggttgcagtactcccacctcacacacgggatccagttgtgtaacaccaggggttgtttcccagaatctgggattcctgcagtagttcctggtcaggccattttctggggtcctactgtgctgatgtggcgtcatagatgaccaagcttggcaggttcttcctgtgacagtggtgaaagtatgtgccctcgataactctgtccnattacccgtggtaagcactgctgctcccnaaggccttggctctgttggtgctggtttggaaggatcctctaggcttggaaccgggataacagtcagaggcacgactgcagtcccttctgtgtctgagcatcgtgtcaggttgcagtactcccatctgactttgggatccatcgtgtaacaccaagggccttccacaggatctggattcctgcagtagttcatgatcaagtcagcatttgggtacttttctgaggtcctactgtgctggtgtggtgtcatagatgaccaag

SEQ ID NO: 317054 - DNA, 365 bp, Homo Sapiens
ttgtgccaattaagttaggcattgaatagacgttaaatatagctctcacgttcacgatgggaagaatgtgtctactggttactactggtattctattggttactgcaggctgcgatttaaaaaaagatgaaggccaatcatttgaataattgagaaagagtatcgcttcagatatcacacagctgaaagccataagcaatacctggaagaaaaaattaggagtcccagtaacacttcccactctactgatcacatgtgcaataatattcacacaacagaagtaaggatctttgaaattatgataaacagggaatatatccaactcagaaagtattgattattctttgtttagagctaacctaaga

SEQ ID NO: 317055 - DNA, 1162 bp, Homo Sapiens
  misc_feature (559)..(575): n is a, c, g, or t
  misc_feature (577)..(882): n is a, c, g, or t
  misc_feature (1026)..(1076): n is a, c, g, or t
gcaaaacagtcatttaaactgatggttactgtaagtcagttggaagctggcatgtatgtaaattacttggtgttacaccatatccgaagaagttcctatgtgcagtgcagaattgcataaacagtatttaatcactgctacaaatcttccaaccaagaaggaaaactgctattcttcataaatctaatttttagtatatgcttcctttcatcttatacttttatcaatatttataaaagtcatttctataataaaagcagtctttcttgctcaaagtattaaggtgaacaattgaatagagtactgtggtcgggagactgatttgagactgcagagctgatgctgggtagagggtctggacttgtattcatgttctgtctcagggcagcccctggagcaggagatggcagaggcatttacagctgcagaaaacagggaggaatggaatctgaggtagccctggcctcaaaattcaggcctggctgtatcatttacagagatttttctggagggaaaagtctcatttctgaggaaggcaaggtggctaatcattattaannnnnnnnnnnnnnnnngnnnnnnnnnnnnnnnnnnnnnnnnnnnnnnnnnnnnnnnnnnnnnnnnnnnnnnnnnnnnnnnnnnnnnnnnnnnnnnnnnnnnnnnnnnnnnnnnnnnnnnnnnnnnnnnnnnnnnnnnnnnnnnnnnnnnnnnnnnnnnnnnnnnnnnnnnnnnnnnnnnnnnnnnnnnnnnnnnnnnnnnnnnnnnnnnnnnnnnnnnnnnnnnnnnnnnnnnnnnnnnnnnnnnnnnnnnnnnnnnnnnnnnnnnnnnnnnnnnnnnnnnnnnnnnnnnnnnnnnnnnnnnnnnnnnnnnnnnnnnnnnnnntttttgaaattgaattgcaatatgtctgctactttggcttgggctggacagtttatctaataagcaaggcagcttcttgtgggctatggtaataagccttcttaacaggctaagcttccctcataagaactggggggggtctcnnnnnnnnnnnnnnnnnnnnnnnnnnnnnnnnnnnnnnnnnnnnnnnnnnngccttgcgctttaaagccccgcccccggggtttcaccggggggccaagcggggaagttgccgaccccgtgccctgcgcgggttgca

SEQ ID NO: 317056 - DNA, 372 bp, Homo Sapiens
gcctctctcagtaagaacccttcatagcaaatggtacatgaataatgaagagatctacatagtccggtccaagtttcttcagtgacctttctagggccgggtgaaccaattctgcccgaaagaaagtagcccatagcttgatggtgtagaatatttcctctctcttgaggtataagtatgctgaatcaatatggcggaagcttacgtcaatagccactttggtggcctcggcagcctggcttttgggagtatgatcaggagcataagtgccaaatcccagcactggcatgaagggtccatcattcagcctcactgaatggctttgcttcagatccgtcatcatccccagctaacctgtctttcctccttttc

SEQ ID NO: 317057 - DNA, 2015 bp, Homo Sapiens
  misc_feature (107)..(191): n is a, c, g, or t
ccatgggtttctgtttaactcagtggaaaaagtccaatggcagttagcaagggagggaatataatgaggtgtgaatgatctctcatcttgtcatggttgggaaactnnnnnnnnnnnnnnnnnnnnnnnnnnnnnnnnnnnnnnnnnnnnnnnnnnnnnnnnnnnnnnnnnnnnnnnnnnnnnnnnnnnnnataaaatgaatgaattaaacatttagtgtaagtccaatgttttatttcctacaaagttaactaacattttttctctactacatagcactcatacaaatgatttctctttcttacatgcatacacacattctgtttcactaattgttgaacacaactaatattttgtcagatttattattcaagaattacatcattacagtgaattataatgtttctgaaaacagtaagcagaaaagatgattagtaaatgttagcataaaatgaaatgaaatgtgaaagtggctgatatctgggtgcctaaggaccttgtctcacagagttctcaaagtcagcagccagtctcagggcccgctcatagtactccagggcttcattcatatttccttccaatttgtagacgaacccaaggaggctcaagctttccagatctaatgcctttctccgaagtttccttaaaaccaatttcttcaaagaattgatacttttatcccttgttaatgatgcctgttctatttttatagcttttaaataatggataattgcattgacgtcagatttcttttgaaattcctgaaaccgaccatagtggaaatgtatgtcttgcattgtttcttctaccactggtttcatgcataacaatttttgaaaattctcttcagcttttctgtgattgcctgcttctatatacattcttgccaggtctagatgagccacctcaaatgtgggctttttttccactgcagattcaaaatgaaatatggctgatcttatcattttgtctagcttttctctgttctgccctctaggctgcccttttgtagcctccttgatttggatcatttgtgccttgtagcaaagccctatctggtgatgcagtaagacagaagtgggtgtttcctgcaaggccttttttaataactcaagagctttatccacagagccttttcttcggtaaaacttggctgcatatcgaaagacataggtctgtgaggacatgttggctagagcttcttcaatgtacttttctccttcagcttcctgtccttcatcctgaagcttcagggcaaggagaaccttaatatatccattgtctggatttaagcggacagcctgccttaggggaagcaaagaaaatggcttgtgattttttgtggctaatttaaagccatccaggcgataggcagagatcgcatacccagcgctggattcagggttttcagggtccacttcaagcaccttttcaaagcaggccttggcccgttcataattctttcctccacacttcagcaaggcccatccttcctcacagtctatttctggacactccattctatagcggaagggatttgaaagcttcttgcaaatgttctccaccttgtccaggtaagtctgggcttctgccagtctgcccatgtggtaatacatccaggcaaagttgccccaggtcaccagactcctcacatttgcttggttgtcatgttcttcctgcattaagttttcagcttcttttaagctcttcagggcttcctcattctggcctttcaggtgtttcacataggctagtaggttgtgtattcccacactgtatttggtgtctaggaattcaatctgatccaagactctgttttctaaatcaggcatttcatcgtcatcaatggataactcccatgtaaagtgacatctcaattgctccagactatccttgacctgatgatcatcaccatttgtactcatggttgctgtaaattaggcagccgttctgcagggttttgcttagccaggctcctctgagatctggctattctgtcttgtggattttcagtt

SEQ ID NO: 317058 - DNA, 584 bp, Homo Sapiens
acacagcatcagggaggaataaggcattttctctgcacgtcctaaaacgagctgtcaggctaaatccagatgatgtatatattagggttctccttgccctgaagcttcaggatgaaggacaggaagctgaaggagaaaagtacattgaagaagctctgaccagtatatcttcacaggcctatgtctttcaatatgcagccaagttttatcgaagaaaagggtctgtggataaagctcttgagctcttaaaaatggccttggagacaacacccacttctgccttcctgcatcaccaaatggggctttgctacagggcacaaatgatccaaatcaaggaagctacaaactggcagcctagaggggcaagatagggaaactgtggacagattggttcaattggctatatgcaaattttgaaaagactataatgttaaagcgaaccatttggagatgggcctatgttgacctggctgaaacgtatgcagaaataggccaccacagaaaggctgaggaacatttttcagaaagggttacgcatgaagatctttgaagatcagctaaagcaagagattcattaccactac

SEQ ID NO: 317059 - DNA, 1600 bp, Homo Sapiens
  misc_feature (560)..(560): n is a, c, g, or t
  misc_feature (564)..(564): n is a, c, g, or t
acaacaagccaacacatatgctttatggttctgtttcaaaaacatgaaaacccaggccctaggattcaagtgatgttgagaggcagaaaggatggagaagttgttggcgcccgatgggggcaagcagccagacctcaggccctcactctaggctccacgtggctgggcttgacttctggccaagggtgcttttcccgcctgggcccacctgaggccagaccttgcctgaggaaagggcctgtggtgggggggaagctcaggcagaaggaagacgtggccaacgcattccctgaggaggtagtgagcagctcctggttcggcaagggcggtgggtaggagccaggccgaggagtcttagggtcccctctccacagctctggtgggccccctgctcccctagccaactggttgctcacctgccttctatgctccctcctgaagccagcccctgggagagaacatctgaaggcaagaaggaaagagagccctgcctaagcttcttcctccctgcttggccaagtgggagaagcagctgaggtcctttgttgtaactgaggaangcanggaggagctggaattgcctaccagctcggagagggcacttgagagggtctatgaacaaatctgtctaaaagccacgtttgagctaaaagcatcagtccatccctcagccccagctctgtgcgggccaagaatccagaaggcagcaagcaaggcctatctcccaggctggaggtggttgtggagctgctctgcctgagtcttcagatgctggaattcctcttgaatgaagtccgtcagggcttttccgcatctccacagccgacttgttctccgcccggagccgctcgagtacaggcagggcactgaagggcttcccgatcagcacagtgattttctgtccaaagcgggggaagtagggcggactgttaggaaggacgtcattcattccgacatgccacaggggcaggatgatggggttgagatgacactcagcaatcaggcgcccgattccccacttgaaacgcaggaattcggaactcatgttcactttccctggtgagagagcacagaggcgaggcttgggagcccatcccgctcatactgggggggctcgacccagtcagccctgctgaccttctgggaagatatgcacccagtccccatggttgagcttctccaaaatgaagtccatccccttctggtagacgccatctcctttctctcttctttttccagcacctggcatgtgcctgcctgtgtctagaacacctttcccctcattctctgcttggaaaaattctgctcctcggcacacaggcacacacttgcccaagctgaagaagtgggagtgtagctccttggtgaagcagatgtctgcagctgcaggggtcctggactgctggacgccacctcctgggcagagcaggaggagggcaaatctgggcagaggcaggtggggccggcccggcccacttcgaggggcccattcctcctcaccaacgcatcaacttcaggttccagatgtggcggagtttcaggatcccccagagatgagggtcgtccatgcaggactggtgattggacacggtgatgaggg

SEQ ID NO: 317060 - DNA, 717 bp, Homo Sapiens
ctgataaaattatgttttaattgcctatgcctactattacataatggctcaaaattaatagtctggctgaaattaagaaaaacagctgatgatgacttagtaaatccttaattttaagtaagcttttggccaaaagtcaggggtagaaaattgactcaaaattaacagccttcaccatcttttattcattctgctgtgatacaactaaaatggccagtaaattctcccctgggtctcaggtaacagttttccaaaagtgaagtatcactttctctgcacagtggtgaaagccggcatttggatgggctggatcgggtggacaggctgaaacactggcttctttctcacttcagagtgtgttttcactgcagggagcagctgattccttttgatgatctgtaaggccagctgagtattaccattctgcagttcaaggtagactgccagcaagatggcctcagggggcacctctttaggatggatcattgaagccgcctttgctcaaaacagaaagatgcccgtgaaaaaacaaaagcttaagatacacactccaagtacatctgccaaccaacaaggtaacaaacttattcaagctcattcccacgtgacttcctagggactacctgttgttctgctctgatgagcctcagttccttttgtcttaaaacctaacaattaagctagacatgtaatactctgggttttgagatgggtgac

SEQ ID NO: 317061 - DNA, 2107 bp, Homo Sapiens
  misc_feature (50)..(50): n is a, c, g, or t
  misc_feature (70)..(70): n is a, c, g, or t
  misc_feature (101)..(101): n is a, c, g, or t
  misc_feature (223)..(223): n is a, c, g, or t
  misc_feature (369)..(369): n is a, c, g, or t
  misc_feature (474)..(474): n is a, c, g, or t
  misc_feature (1900)..(1900): n is a, c, g, or t
tatcaattatttactaatcattttctataagcttggaaaggactacaagnatggtccctgaacccaaganacttacaggtttgctttctgggaggattggngtggattagagactgccttccagtcagtgaccacaggatgggccatcttggtctctgtccgtatctggtttgggggttttcgcaggactaggcctaggctaaggacagggagggcacaagtnctggctgggtccagggtcctgggacccagggccatttgggacctgtgagaatggatggacagcatgggatggggcatgtggtctgagccctcagtagattcccttcaccctcttgttgttggggtcgaagggcgacttaaggtganacagggcaccataggtcacccccattctctccagggcatggtccccgctcttcccaaagtccagcgagatcggcccaccgctggggtcatggatgtaaccgtagncgatggtcttgtcgatggcgaacccaaagtcagccctccggacatggcccaccacttggccgttcctccagatggcctccaggccaaacatgggtactttgtcctccatggtgaagcacaccaggcgccggcggaggcctgcggcccgctgctgctccagggcctccctccccaggaagggcaccggcgacttgagcttgcaggtgaaggccaggcctgcctccagggggctgtcgtctggccgcaggtccgcgtgccagtgccggtagcctttctcaatgctcagggagtcgatggcgcggtaccctgcgttgatgaggccgtgcttggcacccgcggccatcacagcccggtacacaggcacgcaggacgcctttggaatgtgcagctcccagcccagctcccccacaaaggacagccgcatggctcggaccaggtgccctgcggctctcagtagcttgtgggtggagaacgggaaggcctcgttgctcaggtctgcgtccagcacctcctgcaaaatggctcggcttcaaaggcgggggccagcggggaggcctggtggctgggtgccaggcggctgacagtcaggtcactctcggtgcccccacggtggttgagcatgcacgtgtacacggtggagcctgggggtcggctgacatctgcggagaagagccagtcggcagccttccttgcatccagccccaccaggtagaacttcccgaagtaggacatgtcaaacacagcggcggcccctctgcaggccaggcactccttcttgatcgtgtcgtggtggggcgggaaggcgaaggtgtactcgtctgccagcagcctgcggtaggcgtagtcctcgtgcgcgcggctcccgtaagccccgtagtagtcgtactcgaggaccggagctgggcctcggggatgaaaccatcccggtcgctcccagccatgccgctcctggaacacgcagccttgtccaaggagttcctcatgcagcgggtctctcctcatgttgcgcccggccagcggctcatcgtgggggaagacgacggagtagttcttggcgtaggactcatggttccgctctcggatccagcgggggtggtccgtgagcgagtgattggatgcgcctgatgtcatagccatgcatgttcttttccgggcgccccatggatgatccagtggggccagcttctggccacagccaccacccagcatcattcctgcgctgttgaagccacaggccaggaagaaccctcggagctcaggtgcctcccccatcaggggcttgtggtcgggcgtgaaggattctgaaagaaggagagagaggcctgcagtcccttttgcagtgcacatactcttggggtgaggtcttccaagagagcagtgatcaggcagggtctgcaggggcccctccacccaaccccctccctcntctaggccctgctcagcgccacttcctcatgggggcctccccgctggctcctgcccgtgctctctgagcccctccacgtgtgctgccagaaccagctgacggcgacctggctgggttctgcctggtggggtcccgctgtcttgtggccgttgtcctgccgacaaggagcccttctctgaccctggagaccatgctgcggctccccca

SEQ ID NO: 317062 - DNA, 570 bp, Homo Sapiens
  misc_feature (397)..(407): n is a, c, g, or t
ctttcttaagatctaaggtactttcttaagatctaagaatttgctgaaagcattttcagctttgaaatctccaaatgaaactttaaaatttattttggtttatcccaaaataatggcttcctggggaaattgtctttggtgtttagaggagggaatgagaacacaaattggataatccactgtctcccatcccaggaggtggtgagttggctacaagagaaagggacaagtgaggcaggcctagcagttcccttacctgaagttttcaaatccatactgcagttccctctcgtaatgatgtaactttacaactattcttaatgcttgaacatgtatttaggggcaagtttctcatgatgatgaaaaagtatcaagtcatattgctatgttaattggnnnnnnnnnnnaaaaggtaagttagtgattactgttaatggtgggggagtaagttttcactgtaaattgaacttataatttatgtgcaagtgttttcagtgccctgaatcaaactataaatgtggggagaaatcacctccatcaaacagttgcatatttactgtttctcagtgt

SEQ ID NO: 317063 - DNA, 1433 bp, Homo Sapiens
  misc_feature (549)..(549): n is a, c, g, or t
  misc_feature (1243)..(1279): n is a, c, g, or t
acaattcaaacttttatttggcaataagttcagagtcacataacacataaaatcaacatttaaaataaatagcaaattcacatctagaataaataggtctgcctaatttgcattaattgtgcctgatatcatacaggcacaatctgtcattccacgagataactggaaaagtctccaaagtcagagttcaaacctgcaggactgaaaacacacagaagcactgtcgcaggttgggttccccgaaagcagatactgaggtggagaatggcgtgcaggaaggttcataggacagtgctgtgggctgagccggctgggtacaggcttgtcagggagaggcactgggctgtaatgtggccacaatgaggtctcactgaccccacaaggggctctggagctgggatggccccagagggtttcccaagttggggtgaggaggccagccctttgtaccccatatggagccggtaagggttacaggcaggaagggggtatgatctggggcaggcagggctcttcagcaggggaaactcctcataagggctggaagtnaaatggcccagccagcagcactcccagctgttaggggagtatgtccttcagtctggaaaggtcatccgggcagctgagctcagcacccagcactagcacaattacaaactaatgcaatgagaggtatattcaacaagtgtctgagcctgatggctcaagtacacacactggccatacatgtaactatgcccaggaagtagctcagagggaatacagtgcacttattacctacagaactttctcctctctgcatcccagctataaggttattcatctgcatgttctcagcaagggaatcttgccattgccgccaacacaatccattagagcatggggctagcaagccacagcctgaggaccgaatacagcccacagcttgtcttggtaaaccaagttgtgctgggacacagctatgaccatggtcattcccacagtagtagtagcgaaagcaaacagcccaaaaagccaaaaatacttcctatctggcctttctacaggataaagctgttgctgagccctgcattaagggtacttcattccctaccctttcttgcatgcactagctagtgtcaaaggttagctgcactgttgagctaagctcctaaatgacactagtagtgtcaaagattactgttactaaatgacactagtagtgtcaaaggttagctgaactttgagctaagctcctaaggcnnnnnnnnnnnnnnnnnnnnnnnnnnnnnnnnnnnnntcgatattaagaaggcaaaatgtaagttctctattagttgaacagagcaatcaaggaaccctgtgtctggccaaatttcgtcttagagcattctagacaaggagccccaagtggtctttggcagcaaatgagcaggcagaaaagtggaattcag

SEQ ID NO: 317064 - DNA, 814 bp, Homo Sapiens
  misc_feature (654)..(654): n is a, c, g, or t
  misc_feature (791)..(791): n is a, c, g, or t
tgaacaatgatgagtccagtgcagcagccatcacaaatatgacagtccagcaaggcccatggaggtccctttggaagggacttgcacagctgattttctttttccagtgttgtttttacgggtgaaacgtggcttttgaaatactttagttgtttggcttagagctcccactttccccctaacatagtgcctgtctgttttttaaaacattttacccttcggcactattttctgctattcccattaatattatgtaacataaaccacttgctactgatttgggcatattacagactacaattactagttgctttgaatgcattggcactcttaattattgcaaaggagaattgaaaagtagtcttgtggtcctagttaatttaagctttgggcaaactaagtggcttttcttctgtcctcttctcaaaaggccttttaagcagcagagactgggctaaatactggaactgaattccacttttctgcctgctcatttgctgccaaagaccacttggggctccttgtctagaatgctctaagacgaaatttggccagacacagggttccttgattgctctgttcaactaatagagaacttacattttgccttcttaatatcgactttcttttgtaccaggtttttctttctttctnttttgccttaggagcttagctcaaagttcagctaacctttgacactactagtgtcatttagtaacagtaatctttgacactactagtgtcatttagggaggcttagctcaaagttcagctaacctttggacactggntagtgcgttcaaggaaagggtag

SEQ ID NO: 317065 - DNA, 359 bp, Homo Sapiens
tatgtaaagaatgaggacttagaggtagctttagtgagaaatattatatatatgtcaacgttagctgaagtgtttttttggaagtttgtaagataaagataatacctaaatgaagcaccccaatagctgaaattatttactccacattttacaacagatcctccagatactggaatatgggctatgtaatcctcatttggcaggccagatgaaccgtgccactcttttctcttttaatgagaatgctccaaagttagaggtatattagtatctttccattccaaaaaagattgtacaaacaaattgcttcccaaaattttgtgtcaatgaaggagtctggccaatataatccctttagc

SEQ ID NO: 317066 - DNA, 616 bp, Homo Sapiens
tagagtagaaacagattatgcatgaattctgtatatggagtaggacacactttcttaaaggtcagggacccaatgatcagatataacaccagacggacagcaataggaaagacagagaatgatctgttaggtcgtctaacagcttatacattcaacctttccttgcctgtggtatttaaatgtcagtgcctgcacagaggtcccgtagttatgtcttgtaaattaactctgttctttcaattctttagatgacactaaatttgaagaaggagaaaattctctgttgcatctgaaaacagtcaacatgagcttcttccaaggtacttcctcattttgttccttctctaatttatccccagcatttgcaaacaatccctatggtgggttgtcctgtcatcttttataagcgctaatgtatatattagctaatatgtaagagctaaagagcttatatttccttatttataaatgtgtgtgtatagtttccttataaaccagggcaagcatggcatatgaaagttgatgtcactcatactattcactgttctatgcggactcctttgagaaatgatgaagtgcccgactacagggtgatactcttcaggcccatcttgag

SEQ ID NO: 317067 - DNA, 453 bp, Homo Sapiens
cctgcagcttacacaatgttcatgagcataccatcaaatacaaatattccaatttttcctgttcccttcacacaaatgtagccttctctctatatactgttctgtactttgctttttaattgttagtaatttttccgcaacaggacacaaagagcaatctcattctttctggaggtccatgcagaatactgccctcaatggatgtcacctatgtgaccagttcccactgatgacccttacactgaaaaccggcttacacaggagtggtctatgatctatgatgtattaacatggacatttcctcttccattatgaatttgtaaagttttgatttccataattctttttttaatcagtgaaaacataaaataaggttctgggagagagatacaggaagccaatctgtggaacttttggtttgggccccagcatcctataaaaatggcactagga

SEQ ID NO: 317068 - DNA, 1352 bp, Homo Sapiens
  misc_feature (21)..(21): n is a, c, g, or t
gattcgggttttcccattcancccagggggatgcggcggccatagtccagggagctgcggtcccgattccctcccacccagggagtagtgccatctagatgagatacccagggcttttttgaggatgtttttgcccccgggccacctcactttccgttggcactggtacacaggcgcatccactgcccttgcaggacgaacatcatgtcatcgattttcattcggtcacagacaaagtgtgcacccagcaagcccgtctctgcatagcagatgctgaaggtctggaaactctggcatagcttgttggccacagcacctgaagccagtgggctggacaggtgcacgccaccaccataagtgcagtcatagtggccgatgatggcattggccacttgcaaggccacattgtccgggctggcccagccaggaccctctactgcaatggccacgtgggcaaaaggtagagcatcatcacggtggcggatctcactgccagtgaagcggcatggagtaagagtgggcacagcgtcctctgcatatgtccatgggatgccaccgaggtgcttctgggcgaggtctaacagttgctggtgctccactcctccagctgctgccagcaccattcgaggggccttgtaatgtgtgctgaggtactcggtcaagtctgcacgagacagcttcctgacattctcactgggcccctccacagcctgggctagaggtgtgccctggaatgctgtggcatgcaggtagttaaagaccacatctcgcatagatgcatcattctcctgcatctcccgcaggatcacatcacgttccttctcaatctgtgagtcttccagactacagttctgcacaatgtcacccaggagctccacagctttcggcagatccttggacagcgccttgatgtagtaagctgtgtgctcccgggtgctgtaggcattaagatgggcccccatgctctccacctccttctccagggcactgccaggccgattctttgttcccttgaaagccagatgctccaaaaagtagcctgccccattattcttctcagtctcaaaacggctgccaacatcaatccacactcccaccgtgcaagtgggctgagaggactgctcggaggccacacgcaggccgttgtccagcaggctaacctgcgtctccggcacgaactggagcgcctgagcgaaggttgccgtactccgcaaggctggcgtccgcagcagggccggcgagcggcgggcgcgcaatagcacttgtgccccggcggtagcggcccgacagaccacggacgccgccatcttccagctgcagtcggccctgttgcgccgcgccagcgtagactg

SEQ ID NO: 317069 - DNA, 1196 bp, Homo Sapiens
  misc_feature (77)..(85): n is a, c, g, or t
ccacttctcagcagaggattttattggtggtcacctgtggcacaggttagaggagccgaagtgctgtgtttgtggtnnnnnnnnnaccacaaaccccggccctgccctcttgcttacataggcttcccgcctagaagcgcagccagaacatgccgctacggatccggttgtagtctgggagctgctcaatggggccatatccagccactgctgggcactggtcatagatgtacttggagcagatctcacgtaccacactggcatccacctccgcaatccggctttcccattcagccagggggatgcggcggccataggtcaggaggctgcgtccgatgtcctcacacacaggagtagtgccatctagatgagataccagggcatttctgaggatgtttttgccccgggccacctcactctccgtggcactggtacacaggcgcatccactgcccttgcaggacgaacatcatgtcatcgattttcattcggtcacagacaaagtgtgcacccagcaagcccgtctctgcatagcagatgctgaaggtctggaaactctggcatagcttgttggccacagcacctgaagccagtgggctggacaggtgcacgccaccaccataagtgcagtcatagtggccgatgatggcattggccacttgcaaggccacattgtccgggctggcccagccaggaccctctactgcaatggccacgtgggcaaaaggtagagcatcatcacggtggcggatctcactgccagtgaagcggcatggagtaagagtgggcacagcgtcctctgcatatgtccatgggatgccaccgaggtgcttctgggcgaggtctaacagttgctggtgctccactcctccagctgctgccagcaccattcgaggggccttgtaatgtgtgctgaggtactcggtcaagtctgcacgagacagcttcctgacattctcactgggcccctccacagcctgggctagaggtgtgccctggaatgctgtggcatgcaggtagttaaagaccacatctcgcatagatgcatcattctcctgcatctcccgcaggatcacatcacgttccttctcaatctgtgagtcttccagactacagttctgcacaatgtcacccaggagctccacagctttcggcagatccttgcctcgtgccgaattcgccacccaggcctcgcta

SEQ ID NO: 317070 - DNA, 928 bp, Homo Sapiens
  misc_feature (141)..(149): n is a, c, g, or t
  misc_feature (295)..(295): n is a, c, g, or t
  misc_feature (537)..(567): n is a, c, g, or t
  misc_feature (635)..(643): n is a, c, g, or t
gttcatcgcggactgtgtgaatttctgggcgcccccatatcgggcccccggcggtttctctcgcccttcaaataatttttgtgcggaattttaattttgagaaaaagggcctttctgcgggggggtatatttgggggagannnnnnnnnaccctctggggtttgcgaagaatattaaggataatttcccccgccccgcgtgtaaaagaaatggggagacccccccttccctcacgaaaaaaacccttctcccaccatttctttggggggaaattttgtggtgttttgcacagaanaaacccgggctctcgggtgttttgccccccggcccgggggggtcgtgtttttgttttaaattggggtgagaggaatattcccaaaagctcacttatgctcagtggccacaagggattcttccttaggagaaaccagcctattgttgccagtgtttcaccttagccttaccggggccccgcggcgccaaaacggaatgggtttgtgaaagcttttttgagggccggagggcggcccgacaagnnnnnnnnnnnnnnnnnnnnnnnnnnnnnnnagcagaggattttattggtggtcacctgtggcacaggttagaggagccgaagtgctgtgtttgtggtnnnnnnnnnaccacaaaccccggccctgccctcttgcttacataggcttcccgcctagaagcgcagccagaacatgccgctacggatccggttgtagtctgggagctgctcaatggggccatatccagccactgctgggcactggtcatagatgtacttggagcagatctcacgtaccacactggcatccacctccgcaatccggctttcccattcagccagggggatgcggcggccataggtcaggaggctgcgtccgatgtcctcacacacaggagtagtgccatctagacc

SEQ ID NO: 317071 - DNA, 310 bp, Homo Sapiens
gacactaaattatcctaaatgtgccaataaacaatataattctatgcttctgttaatctttctggttcttccctctctccccttttgagaaaaatgggaagttctttatggattgtggattatgagttttgaccttggccaggatgaatgagtgaggattaggtacctgaggaaaaagacacctaatagggactctccatatagaatagggactaaatgaccttatcatattcttcctctgaggggaagttgaatgtgggaagagaggcaacatttgagatgcatagaggagacatcagaatgaaagaga

SEQ ID NO: 317072 - DNA, 457 bp, Homo Sapiens
tacaatataacaacatgtattttcattagatattaattataaaccaataacgcatgtaaactgaatacaatacttcaaatcattctgcacaaagaaattacagatcacatttttttaataacaaaatgtctacttgtttaataaaatgtttttaggaacttacaatgttcaaaaccaaagaataaaaatattaaatatatcactttatggcacaggacaacataaatttatttttgtaacacagcaggcaaatttttgtgctagaaacaggatgggagaaaaatctaaattaaagcaaaaagtcaggaaatgggtgttcataaattcctgcttaactaagactcaacatttattgtaagaaacggggcctctgaacatcagattttgtttataaaaataaaaacttcctcccgaattccaccacactggcggccgtttctccgaatccgtgcgggaa

SEQ ID NO: 317073 - DNA, 963 bp, Homo Sapiens
  misc_feature (546)..(558): n is a, c, g, or t
tttgaattgtaccagcaatggacttttaaaaaattggatgtaaatcccttaccctccaataataagccattcagcctaaattcatttttatgaataaatctcttctttctcatggtaaatgtggcttgtgccactcaaacactagtgaaagggtatgtacaaccgcaacatcaggccaggacaccatttatttaaccaagtaatggaggagagtgaaacattttccaaggccttatttctttttcagaatgctttaagtgttgattatatgtgctgggtctctagagaagtttttatttgttacaatactgctgctttgagcaattttgtttctcttcattgtctgttaggggaatcaccagctttggcatcttaacaacaaacagtggatgggtaatttttatttctgatacgcatctttagagtcaaatatatcttttccctgtactcctcatgtacaaccaaagaacatacattatgaaaattgtattataatatctggaaacacaacattttcctctggcaggtgacttttgtacgaaatgnnnnnnnnnnnnncctgtatttttttggtggtcctttggtgattaaggatatacattagtagtctttgttattaaggaacctgctgattaggttcagtgtgacctctccttccaatgttgttgtttgatgccttgctctggcgtccatagaggtggatcataatacgcattccggatctggttaaaattggcgttcagtaacattgctaacccccggaacccgggattggttccacgcttgggtggggacaccaaccacacggcggtttgaagacatttgggaaccggtcccaaacaaaatttccaggtgttccgggtgcttaaacaatcgcgttgcatatatagagatgagccacagcaaaaaatatgtgccacaagcagtttgaaaccgagagaatattacaccaatctgttccac

SEQ ID NO: 317074 - DNA, 1388 bp, Homo Sapiens
  misc_feature (145)..(163): n is a, c, g, or t
  misc_feature (671)..(752): n is a, c, g, or t
  misc_feature (850)..(887): n is a, c, g, or t
taaagtgcacggctgataggcttttattacagactgggggcggtaacggctggacagagaacggaaaaggaacatctgagaccaggctcaaagctagggggttacacaacctccaataacacaaggtgagtgcagcacttctagnnnnnnnnnnnnnnnnnnntcacttactcataaacggcacagcctacggtacaagaaaaagggcaaggtaggtaagggcacccaacaccctcctgcctgcagggggccacagggttaatgtgccttcctgcacgcaggcttaagagggataaacaaggagagggctgcccttggagaaggcctgcggataatagtgactgaggcacaggtccatgcaggggaaggaagcacagttcacagagtggcaagctcagtgccagccagtgcaagcaacaggcagttctttgatcctggcttagtcacagcaaacatttacccagcctggctcttctccatagccagcaggttgcttgctcatccagtctgtccctggtcagcgggcatgtgctcaaggagaacaaacacagttcagcacaggactcagctgagggtcactaaaggatcatagactgtgagggtgggaggtcttggtttagaggttgagtctagtgcagctgatcacctggggtctagtgaaaatgcagggnnnnnnnnnnnnnnnnnnnnnnnnnnnnnnnnnnnnnnnnnnnnnnnnnnnnnnnnnnnnnnnnnnnnnnnnnnnnnnnnnntatagcaaagctctagactaggaggtctcaaccttggctgcacagaattatctggggagtttttaaatttcccagtgcccaggctgcattcatatcannnnnnnnnnnnnnnnnnnnnnnnnnnnnnnnnnnnnntcaatcatctctgagggtgggacccaggcatcagggttttttaagctccccaggtaattccagtgtgggggaaaaaccaatgatctaggaattatcagcagaggtggggagtaagaaaagcagatacgtgagtagtctgaaaaacataatctctataatcatttaatttttctttttggaaaatgtatgtatacatacacacagtttccataaaaaaacatagatagtaaagctgattaaaatcttcctgtcctattggtaccagcacatgaagcccttctacaaaattcctgacggactgggaataaaaattcctagtgacagcccactccttctcaggcaggtgtgattgtttgaaatctctcccaatattgagatgaaacctgcttccctgtaacttccctgtaattctgtgggtcccttgtagcccacagagaaggcagcaatcagtaggggaagtgctataaaaatatactatcccggccaagcgtggtggctcat

SEQ ID NO: 317075 - DNA, 1273 bp, Homo Sapiens
ttggaccatttttacaaagatttcagcaagagagaactcgttgtatgatagagattggtgtggcgttttatgacatgctgctgaatgttgaccagtgtagcacccatttaaattacatggatcccatctgtgacttcctctatcacatgaagtatatgtttactggtgacagcgtgaaagagcaagtagagaagattatctgtaacttaaaaccagctttaaaacttcgtcttcgattcatcacacacattagcaagatggagccagctgcagtgcctccacaagccatgaacagtgggtctccagcacctcagtctaatcaggtgcccgtgtctttaccagtaactcagtgaagccagactgtactgtggagaaagtagaaatatatccgtctttgagagtggactcaaaccttttaaatctgaatgcgatcacactgtagtgatatagtagaagcagtgatgatattcagattgttttattttgattcaaatgatgaatctgttgacaccttataactcccatctccctatctatatttttgtctctaagagatcaagtaagatacatgttgttcatattcataacaacttattagagctatgtaggaacatagaggtatctgtgatcaaatgacttgtcattggcactttcagtctttcctattctagccgttgtttttgtttgtattttttattattaatgacatatttagtcttcagatatattattttaaaggcaccacacatgtaaaacagttattacaaatattttatacataaatctcttggtagattttcagaataatagagatttatatcaagaaaaggaatctagattttgttgcattgtaggagcaaacaaggcttcatattctttttaaaatgacttgaaattttattataaattttcatagttttctatcagggtcaactgggcagttttattacctttgctatggacttgaacttactgtataaaattagttggaagccatgtaagaaaataacatctgaaaattcttgaacttaaaatcatgcttaaatggttgattctccaatttctttttttaaaaataagttaattgcttttgcaggttgacactctcacctgacagatgatgtaattcttcaatttttataatcttaaaatttttaaattttatatttgtaaatacagtacacattttatttcttggattttgagagacattgttaattttgggggaattggcattgcgaaagacttgaaaactaatgagtaaagtctgctg

SEQ ID NO: 317076 - DNA, 1040 bp, Homo Sapiens
aggcctcagcagcacaggagggaaggcggggatgattgagtgcatcaggccagttctgagtctccaggcagaaaccgtagtgtttgggatagacagctccattcttgccctttaatgtgccatccaggaagtggggggtgtaaaactggaccccgggctgggtggtgtatacttctagtacccgcccgcttgcagcatgatgcacccttgcacaaaaatgcttttctttagatcccttcagacagaaattgtggtcaaaaccattgagatggaagtcctgcaggtgttttccaagctccactggctttctcaggtcgaatgcagtgccttgcactggggcaacttctcctgtaggaatcagggtttcatccacatgcaaataagtatccgcttctatggtgacttcatggtcatttatatttgggggaagcctggccttgcccgggttgaagtaagaatggttggtcaggttgactgggtgtggcctgactggcttgtgctctgtagttgactatgagctctccgccatccaggggtgtatgtcacccagacttttaactctccggggtagccttcttcacccatctggactgatgcgcgagaactggacgccatttgacagcacccgaggggtccagagcactttatcaaaccctctgactcctccatgcagactgttgggttccttgttaatggccaggtgatactccttcccatccaccttgaaggttcctttggcgattcggttggccaccctcccaataactgctccaaagtatggctgcttttggaggtatccttccaactcggcgaagccaagcaccacgtccgaggctctcccctgcctgtctttgacctctagggctgtgatcgtgcagccccaggagatgatgtccactctcaagaggtctgactgcagctggaacttctccactgtccctcctcccgagggcagctctccaaacacggccctggtcaccgaagccatagggaaagtttggcgtgtgcagccactgcccgctcttcaaactccagcgctc

SEQ ID NO: 317077 - DNA, 371 bp, Homo Sapiens
cccaacttcttgctttttattcattcaacacatacttgctgttcacttactaagtggcaggcagaggactagatgctaagggcataagtagatgtgttaggagacacttcctgaagcttttgtttgcagtggatggccccttttctaatacttatctctcttttccagatgctggtattggctctggtcatctcaccccgtttcctgtccaatatgtacagttcacagacagtgtcttacacagtcttacgtttattcccatttgtagaaacacacagttgttgccattgtctcagttaagctcataatcattgttctcaagacatttcagctactggtctcttcacctaatatccttggtgacgggcttg

SEQ ID NO: 317078 - DNA, 619 bp, Homo Sapiens
  misc_feature (502)..(502): n is a, c, g, or t
agaaaaagccatgaagcccatttggtttcatttttctgaaaataggctcaagagggaataaattagaaactcacaatttctcttgtgtgttaccaagacagtgattctcttgctgctaccacccaactgcattcgtccatgatctcagaggaaactgtcgctgaccctggacatgggtacgtttgacgagtgagaggaggcatgaccccttccatgtgtatagacactaccccaacctaaattcatccctaaattgtgccaagttcttcagcaatagaggctgtcacaaacttcagggagaaagagttacaagtacatgcaatgagtgaactgactgtggctacaatcttgaagatatacggaagagacgtattattaatgcttgacatatatcatcttgcctttcttggtctagactgacttctaatgactaactcaaagtcaaggcaactgagtaatgtcagctcagcaaagtgcagcaaacccatatttcacaggcctncaaacccttggtgttcacagaaccacacagggcacatgctgtacagggttctggttggatttcttctttgtccgggttacttatttatggggactacgggttctgaaatttaggttt

SEQ ID NO: 317079 - DNA, 409 bp, Homo Sapiens
tactgtcagccacagagttacttctgtgcggggacaaatctcgcacacagttttctgagagaagcagctgtttcagaacattaaagcttttgctctctctggcccaactcctgtgttcactttcgctggttgagccatgaccagcaggatatttaaattcaagatcatttctgctaaatttcagctcttcctggttaagcaaggacccatacagtacttctggggcactgtgattgtttgcagcatcaacaatgttgtttttcatctttttaaatggattttctaatggctcagtataaagcttccttttcttagggaccatgcaaagattctttgattctagaagtgccatttcattatttctgtgactcctgtctgaatcatctgccaggtaactatcttgattttg

SEQ ID NO: 317080 - DNA, 1295 bp, Homo Sapiens
  misc_feature (150)..(170): n is a, c, g, or t
  misc_feature (183)..(247): n is a, c, g, or t
  misc_feature (315)..(414): n is a, c, g, or t
ctacccactaattaatttcagcatccactggtgggtcttgcaatgcagtaattattaacttagttttcaaaggtgatttttgcattttcctcattcctttgacgtttattaattggaattcatctctaagaaagagcagtcccttcagcnnnnnnnnnnnnnnnnnnnnngagacagggtctnnnnnnnnnnnnnnnnnnnnnnnnnnnnnnnnnnnnnnnnnnnnnnnnnnnnnnnnnnnnnnnnngctcacgtgatctcccatctcagcctcctgagtaaccagaaccacaggtgctcaccaccatgcccagnnnnnnnnnnnnnnnnnnnnnnnnnnnnnnnnnnnnnnnnnnnnnnnnnnnnnnnnnnnnnnnnnnnnnnnnnnnnnnnnnnnnnnnnnnnnnnnnnnnnaaggcatgagccactgcgcctgacctacgatttctttctttatatatcagtatgaacgcaagggctgtttgttggattctgtgagtcataatctgatactgtttccacgctttggccattgggagctcctggagattgtctcctgtgccctatccttatttaagcacttgtttattttgggatgtcttcagttttccttgtcccagctctgcacccagctgcttctccagggagccctccctcactggagactgggatttagcaaccaagacctgggcactggctgtgcttgttgcttctgggccctcctgggacagagctgggaagtggatctatgacacgtgcttgtgcatttacccgccctgttggtttctgtagctgtctagttcctgctgttcctgtctcacctgcccctttccttatgtgtagtttcttcctgtgacagggagaaacctggctctcagattgacaggacattcgcttaggccatgtcagtgctgtaggtgaactgttcaacctgtgccccagggaggcgcagtcactatggaggcaccttacttccttaatcgtgtactgttgtttttgtgtttgacctgtagcatctaagtactggtttcaaaagttgcctagatgagttcttttctttctttccacactcctgcaaattatgtgatttgcataatttgtacatagttaggttcatttgttagatttgtattccttttggcttcccccatatcctcgttgacttttactttcttttgtaacttaacatatgttatgaaatttatatgaggatatttaatttcataaaagttatatggtttacatgtataagttgttatattaagattaacctgggattgactggacaagcattg

SEQ ID NO: 317081 - DNA, 933 bp, Homo Sapiens
ataatacattaaaagcgtaaaatcacctttgagcccggaccataccaaattaggttcatttgtcatcttaatgcggtttctcctccccgggttttttccatattccaaaataaaattgttcttggtcataaccccattagagggatatagtcctccacggtttggaaaggagcactggattaactacacagtgattttgttttagcataaaatgtggtaaatacatgtttagcatctggaatcttcacatcattctggtgaaacacggtactcgtttctgcaagcatagcattgtaggtaatggctttataagtgtctgttggggcctcatggtacaatcgaatgacatagccttttgtaataaagtgaagcagcactggggtgatcaccgtaaagcttcccatgatgccatagaatatgatttgaataggcagaggcacactttcagaaatagcattattttgtgtaaaaatgtatggcagaaatgtaaggccaatcagactcgtagaataagagaaacatttcacaccaaacactgctcgggccatattgccagtataaattagccttccatcttctgatttgtcagatggcgtatttaagaatcgaacatatccttcccaataaacagggatctgcgctcgacccggacgccggagaaggcgcgcggctcccgaaggccccgtactccagccggctaccggccccgaaggcccgctgctggaggacgcccgggagacagaggcccggggacctcggagcgcggcggccgcacacaatgcagtcctccttccgcagagaggcagttcgaccgcccacgggctgcccaacgccagaaacagcatcacgcgggtgacgagcggctgcggacgccccagctgcacgagtccacgactgcgagacacggccctcgtgccgaattcgccacccagc

SEQ ID NO: 317082 - DNA, 794 bp, Homo Sapiens
  misc_feature (31)..(31): n is a, c, g, or t
  misc_feature (269)..(277): n is a, c, g, or t
  misc_feature (500)..(569): n is a, c, g, or t
gacaggattttttggttgggttggtggtggnatgtaggtgttaaaactttattcacttcaaaacctttatcagagacacggttctgttctggggtgggggtggccttgacaatgagctgatgttagcccttctccaggctggaggccaaggccagactggggagggggccttgggcctttcaggacttgccctagatggaaagatttgggccactccaatggaggatcaaagttggggctccagcttcccctcatcctagaagaggatnnnnnnnnntcctcaggggtttttcggaggatggagaggcaagcagccgcctttccgtctggctgcagagagctgggacagaggccaagaggggcccatctgtcgcctcccagtcctgccagcttctctgagcaggctgggctggggaggaggacggggggacagctgtctggcccgggagatgggaacaggggccactttaggaggacaggaagctggactgtttgcttgnnnnnnnnnnnnnnnnnnnnnnnnnnnnnnnnnnnnnnnnnnnnnnnnnnnnnnnnnnnnnnnnnnnnnnataaaactttcatggaataagggtagggtgggggcttcggtggcctggcttcctggcatcactcgtcatcaaagttctgactcaggaggaagttggcagccaagttctcatttttttcacacgcgaaataggcctggatgaccaggctctctgggaagcccagggccttcaacctctctatagcttctttctcctgcggcgtcacctggatgtagttcatctgcg

SEQ ID NO: 317083 - DNA, 1328 bp, Homo Sapiens
  misc_feature (14)..(14): n is a, c, g, or t
gatttttgattttnttatccattcctaaataaacatgaatatatatatattttttcttttataaaactttcatggaataagggtagggtgggggcttcggtggcctggcttcctggcatcactcgtcatcaaagttctgactcaggaggaagttggcagccaagttctcatttttttcacacgcgaaataggcctggatgaccaggctctctgggaagcccagggccttcaacctctctatagcttctttctcctgcggcgtcacctggatgtagttcatctgcggggcctcctctcctatggcgcccacctccccctccacatctgagatgtccgccagctccccagggggctcgttcagcatctggatgaactgctcctggtgccggctgatttgctgtaaaagctgagggttctcctgggcccagctgctggagcagggcgggcagcagcgcagggttctgctgaatcacctgccgcatgttctggaactggggctggtcccgcaggaactccagggggttctctcctgctgcttccgtggccggctgctccgatacctggctctcctggacagaaccgtgttccggctcggggctcccaggaattcccgtgagcagatactccacggctcggtgggggttgttgtagctggctctcagggcggccacgacccgctctcgctcatagcccatggacatgatctccgtcagcatcgtctcatactcagagcccgtcactagcgtggaggccgcgtcttcctctcgcccgctgctacctgaagagggaacagagcctgacacagactctggggacgtcgtgggggcggattcctctgatgggctcttgtcctctctggcggcaggtgggggatgggacatgcctgaggtgggggcaggcgggaaggatgtagaggactctggggcagctgtgggtgaggcctctgggggtgctgaggtaccctggccggctttggtcttggtcaccatgacgaccacaaagttcttctcatcgatgcgatagtccctgatagggacatcgtcactcaagatcttgccggcatagatgagtttctgtccagccacggggaaggcatcacgacccttctcagcttctatcttctcctttagcaccttcaccgtctcgtcaggctccatgcggatcttgaaggtctgctgctgcagcgttttgagcgtgatggtgacggccaatggcggggcccgagcgacgcggcggccccgggatcctcacacaacatgcaactcacgccgccgccatcttagcgcccaggcgcgccgcgccctcgtgccgaattcgccacccaggcc

SEQ ID NO: 317084 - DNA, 510 bp, Homo Sapiens
  misc_feature (471)..(471): n is a, c, g, or t
gaaggtaggaagatagatgctgagaagggtcgtgatgccttccccgtggctggacagaaactcatctatgccggcaagatcttgagtgacgatgtccctatcagggctaatcgcatcgatgagaagaactttgtggtcgtcatggtgaccaagaccaaagccggccagggtacctcagcacccccagaggcctcacccacagctgccccagagtcctctacatccttcccgcctgcccccacctcaggcatgtcccatcccccacctgccgccagagaggacaagagcccatcagaggaatccgcccccgcgacgtccccagagtctgtgtcaggctctgttccctcttcaggtaggcagcgggcgagaggaagacgcggccttccacggttagtgaacggggcttttgagtattgaggacgatggttgacgggagattcattgttccatggggttattgaggcgagaggnggttcgtgggccgccctgtaggaggccagtttacaacaa

SEQ ID NO: 317085 - DNA, 803 bp, Homo Sapiens
  misc_feature (674)..(759): n is a, c, g, or t
gcctccagctttgttctttttgcttaggattgcctttgctattcaggctcttttttggttccatatgaattttaaaatagttttttctagttctgtgaagaatgttgttggtagtttgataggaataacattgaatgtgtaaattgcttatgttttcccatttgtttgtgtcatctctgatttctttgaagagtgtttttaattcttgttgtagagatctttctagagtattcctaggtgttttattctttttgtggcagttgtgaatgggattatgtttctgatttggctcttggcttaactgttggtatatgggaatgctagtggtttttgtatgttgcttttgtatcctgagacttcgctgaatttatgtatcagcttaaggagcttttgggctgagactatggggttttctagatatagaatcatgttgtctgcaaacagagggtagtttgacttcctctctttttatttgggtgctctttatttctttctcttgcctgattgctctggccagggcttccaatattatgttgaatacgagtggtgagagagggcatccttgttttttgccagttttcaaggggaatgcttccagcttttgcccattcagtattatgttggctgtggatttgttatatacatggctctcattattttgagttatgttcctnnnnnnnnnnnnnnnnnnnnnnnnnnnnnnnnnnnnnnnnnnnnnnnnnnnnnnnnnnnnnnnnnnnnnnnnnnnnnnnnnnnnnnttctcaggagatctgatggttttataatgggcttccctcttcct

SEQ ID NO: 317086 - DNA, 1052 bp, Homo Sapiens
ggtgaccctggatgagaaccacagcatatggcagctgctgcaggctggaggagctgagacagctagagctacaggtactgacagcgcactcctggagggagaaggcctccaagacctttctcaagaagaattcttgctacacgctgcttgaggttctctgcccatgtgcagatgccggctcagacagcaccaagcgcagccggtggatggagaaggagctggggttgtacaaatctgacacagagctgctggggctgtctgcgcaggacctcagggacccaggctctgtgatcgtggccttcaaggagggggaacagaaggagaaggagggtatcctgcagctgcgtcgcaccaattcggccaagcccagtccactggcatcatcgagcacggcctcctctacaacctctatctgtgtgtgtgggcaggtgctggctggggcgggagctctgcagtgtgacctgtgtcaggactggttccatgggcggtgtgtgtcagtgcctcgcctcctcagctctccgaggcccaatcccacctcatccccactgctggcctggtgggaatgggacaccaaattcctgtgtccactgtgtatgcgctcaaggcgcccgcgcctggagaccatcctggcactgctggtagccctgcagagactgcctgtgcggctgcccgagggcgaggccctgcagtgcctcacagagagggccatcagctggcaaggccgcgccaggcaggctctggcctctgaagatgtgactgctcttttgggacggctggctgagctccgccaacggctacaggctgaaacctagacctgaggagccctcctaactacccctgcagcccctgcttctgaccccctcagagagggcagtggcaaggatatgcctaaagtgaactactcagcccagctcttgtcctcaaattcttgtctcctagcccctaccccagtttaggctcggccctgccccttgttctccaattttcagttttcttttggacaaccctccctatccaattctgcatcctgtccagattccctaaacttcgcc

SEQ ID NO: 317087 - DNA, 894 bp, Homo Sapiens
  misc_feature (383)..(391): n is a, c, g, or t
  misc_feature (708)..(708): n is a, c, g, or t
ttgttattttctttgacttatgggaaaactgggacacaggaagacaggtaaattacccaacctcacacgttaagtcagaactgggagccataattttgtatccctggtataaatagacaatctcttgaagaaatgaagagatgaccatagaaaaacatcgagatatctccagctctaaaatcctttgtttcaatgttgtttggcatatgttatctttggaatttagtgtctgagcctctgtctgttactgtagtatttaaaatgcatgtattataatcatataatcataactgctgttaattcttgattatatacctagggacaatgtgtaatgtaagattactaattggttctgcccaatctcctttcagattttattaggnnnnnnnnntaaacctcctgatcggagacaatgtattaatcagaagtgtaaactgccagttctatatagcatgaaatgaaaagacagctaatttggtccaacaaacatgactgggtctagggcacccaggctgattcagctgatttcctaccagcctttgcctcttccttcaatgtggtttccatgggaatttgcttcagaaaagccaagtatgggctgttcagaggtgcacacctgcattttcttagctcttctagaggggctaagagacttggtacgggccaggaagaatatgtggcagagctcctggaaatgatgcagattangtggcatttttgtcagctctgtggtttattgttgggactattctttaaaatatccattgttcactacagtgaagatctctgaattaaccgtgtactatccacatgcattacaaacatttcgcaaagctgcttagtatataagcgtacaatgtatgtaataacatctcataattattaaatgggtat

SEQ ID NO: 317088 - DNA, 607 bp, Homo Sapiens
  misc_feature (531)..(531): n is a, c, g, or t
cttcaccctttcggtcttcagacatggctgtccactccttgcctgtccccacagctcttcctgcagactcttttttcccgaggatcctgttaagattgtccgggcccaagggcagtacatgtacgatgaacagggggcagaatacatcgattgcatcagcaatgtggcgcacgttgggcactgccaccctctcgtggtccaagcagcacatgagcagaaccaggtgctcaacaccaacagccggtacctgcatgacaacatcgtggactatgcgcagaggctgtcagagaccctgccggagcagctctgtgtgttctatttcctgaattctgggtcagaagccaatgacctggccctgaggctggctcgccactacacgggacaccaggacgtggtggtattagatcatgcgtatcacggtcacctgagctccctgattgacatcagtccctacaagttccgcaacctggatggccagaagggagtggtccacgtggcacctctcccagacacctacccgggcccctaccnggaggacccacccaacccaactattgcctatgccaaccaggtgaaacgtgtgggcagcagtgcacaggagaagggc

SEQ ID NO: 317089 - DNA, 1112 bp, Homo Sapiens
  misc_feature (3)..(3): n is a, c, g, or t
  misc_feature (9)..(10): n is a, c, g, or t
  misc_feature (15)..(15): n is a, c, g, or t
  misc_feature (22)..(22): n is a, c, g, or t
  misc_feature (24)..(24): n is a, c, g, or t
  misc_feature (32)..(32): n is a, c, g, or t
  misc_feature (45)..(46): n is a, c, g, or t
  misc_feature (49)..(49): n is a, c, g, or t
  misc_feature (51)..(53): n is a, c, g, or t
  misc_feature (61)..(61): n is a, c, g, or t
  misc_feature (66)..(66): n is a, c, g, or t
  misc_feature (77)..(77): n is a, c, g, or t
  misc_feature (84)..(85): n is a, c, g, or t
  misc_feature (96)..(96): n is a, c, g, or t
  misc_feature (115)..(115): n is a, c, g, or t
  misc_feature (119)..(119): n is a, c, g, or t
  misc_feature (123)..(123): n is a, c, g, or t
  misc_feature (131)..(132): n is a, c, g, or t
  misc_feature (145)..(145): n is a, c, g, or t
  misc_feature (151)..(151): n is a, c, g, or t
  misc_feature (153)..(153): n is a, c, g, or t
  misc_feature (155)..(155): n is a, c, g, or t
  misc_feature (161)..(161): n is a, c, g, or t
  misc_feature (167)..(167): n is a, c, g, or t
  misc_feature (175)..(175): n is a, c, g, or t
  misc_feature (177)..(177): n is a, c, g, or t
  misc_feature (201)..(202): n is a, c, g, or t
  misc_feature (216)..(216): n is a, c, g, or t
  misc_feature (995)..(995): n is a, c, g, or t
ggntgcgcnncgagnaacaggngncgtgccanggattgccatggnnacntnnnaggacaanttttncctggagttgnaggccannagtggttcttnccggccaaagcaacctggntttntttncaacaaannccctcccgccttncggatntntntgccantggganagtagccngngggggaatgatctccctcccacannggcagagactcagngaagaagctgcaatcttctgcccttctcctgtgcactgctgaccaacacgtttcacttcgttggcataggccatagcttggtttgggtggtcctcccggtaggggccccggtaggtgtctgggagaggtgccacgtggacccactccttctggccatcccaggttgcggaacttgtagggactgatgtcaatcagggagctcaggtggccgtgatacgcatgatctaataccaccacgtcctggtgtcccgtgtagtggcgagccagcctcagggccaggtcattggcttctgacccagaattcaggaaatagaacacacagagctgctccggcagggtctctgacagcctctgcgcatagtccacgattttgtcatgcaggtaccggctgttgtttttgagcacctgtttctgctcatgtgctgcttggaccacgagagggtggcagtgcccaacgtgcgccacattgctgatgcaatcgatttattctgccccctgttcatcgtacatgtactgcccttgggcccggacaatcttaacaggatcctcgggaaaaaagagtctgcaggaagagctgatgagccgtttgcctcagggccagcgtgtcggccttcgggcgctggtctgcggccatggtgggtggccgtcagtcggtgccgtgacgccacgcggagacgtcgccgcgcgggctgggcctccaaggccccgctccgggccccgcccctgcctgggtcgggatttggggctcaaggttcgcactcggccccgccccgaagcgncgcgcgtatgcaggtggattcatttcttcgcttgcccactgggcctggcagccttccggcccgtggtcgtgccttggcagtcccgcgcaggaactcgagcatcccgggaattccgga

SEQ ID NO: 317090 - DNA, 612 bp, Homo Sapiens
gtccccagtatattttagataaagcataaggaatgatatagaaaagaacaccaaaatgagaattaggattgattctgattccaacttttctagtagttgaacatgtctttggacatcagattttttttatgtgtcaaatgaggaagttaacctggtaaaatccataaacaccctttaattctcaaaatcagtcattggtttatttctttcattggtatctctaatgcatttcaaaaataattgttgtctttcctctctttcattgtctcattcttaaatatatactttttttagttttaatactcaaatagatgtctgaagtagttaacttgaaaagaaatgacatttgcactgtattttcaaggatttttcagtcttattgaagaaatgtacatgaaacaatttaaaaagactaccactgaacaacttagggaaaaacaaagttataaactatatactaaagtttctgtaaaatttgaggaaaaggaaaaatctgccccaggggggcggtatggggggagtagttaggtaaagtattggttgtagggggacctcagccttagagcatgagtacctatgggagagaggaaactgaggccaacctggatatgt

SEQ ID NO: 317091 - DNA, 827 bp, Homo Sapiens
agaacgttttagaatctcagttcaaacgccacttcctattaatttgaaatgaagacagttacagtgaaggtctagatgccatttcagtttctgctgactcccaaaggcagttttgagtaacttacctttcctgttccatttaatacatgtctcttgccataatagtgaaaaacagcccttgcaggttttctgaaaggcagatttatcaggataggtgaccagtactggagtttctcaactggtgagacaaacaaataagtaaaaacccacaatccttggataaggttgaaattaggaatttcttttttattggccactaaagtcctagcaagtttctgacagaagcacagacagaaaatggaaacaaataccttactgggaatgtttccttgcttgcactaaccttgactacagcaataacgcattgcttaacagtcaaagtgcaccaggtcatttccgcaaatggcagggtgagtgactgtgccgttcccaaggaagcaaaacagacacaaacaggtcccacgcgctgggtgtcctggctgagtacagaggaggctgctagaccggcagtacccttttcccaagtgaggaaagccagctgtgacactctgcttgccggcaggtgtccccaccctcccctccaccatctggcccatagctgtaccaccaattacattttcttccagcttccacttcatttcctacttttacagcatttcatcctctcctttatgcagcctttacaaataagatcagaaatgtgtccaaacaagtgcattaagataggcccctattggccaagtcaaagagctctcacacatgggtgg

SEQ ID NO: 317092 - DNA, 620 bp, Homo Sapiens
  misc_feature (350)..(396): n is a, c, g, or t
  misc_feature (518)..(555): n is a, c, g, or t
ggctgcaggattcggcacgagggtcgtcttggccacgttccccctggtttatccatattccacgtaaactgtgttcatcatactgaaaacagacccctggaggaattctgaggtccaaggatttgggcaaggtcattacctcctttttcctggaccatcttcttcaattaatgcaacctaagactgcaataagctcttttacaggtatataattttgtatcatttggagcatattcttagaattgtttggtgttctttcccccatgtatgcagctgatttttaaaaacagatctgtgatctatagcaagttgctcaatctctttaagccccacatttttggtgagtaaannnnnnnnnnnnnnnnnnnnnnnnnnnnnnnnnnnnnnnnnnnnnnncacctacgcttctcaatacagcgtcttctacataataacttcaataaatatgaactagtataattattgtgttattggaaaattagaaattgcaggtgagcaaaaggcctttcttccaaacnnnnnnnnnnnnnnnnnnnnnnnnnnnnnnnnnnnnnnacttaaatgattcccacaatgctgatttaggcattttacattttgatatgcatttttaagctggt

SEQ ID NO: 317093 - DNA, 506 bp, Homo Sapiens
acattaaattctctttatgtgcttattattaggataaacatttttgttttctactcttttcattgtatatgtacccattgcatatgtagtggaatattacagagacattttgggaaggaaggtcaccccaccagattattttgaagaataataaccccccagaaatgctgttttgaagaataatgacaaaaatgcaaacattatatgtttgaaaagctatatttaaaataaaggcagtagccaatatcttttgagtatattaacatttaccataattcatgcaatgtgctaataattttatatgttatgttatgctttctattgccttctttaaaaagttccatattatctccagcttgcatttgtaacagtggtttcacactccttgggaataatttaatctggacacatataacaacaggtggggtgccctttcttttcagaatgcatgaaggtcgggaactacttgtgagaattgatcctgacataagaggccaggctcaaag

SEQ ID NO: 317094 - DNA, 742 bp, Homo Sapiens
  misc_feature (152)..(247): n is a, c, g, or t
aggctggtacggtccggaatttcgggatatcgtcgacccacgcgtcgggctcagagggaagagtggcctgtggctcttcaatctttatccaaacctggttctagcttcaggagccttggtcacctgagactttttatttattaatttttatnnnnnnnnnnnnnnnnnnnnnnnnnnnnnnnnnnnnnnnnnnnnnnnnnnnnnnnnnnnnnnnnnnnnnnnnnnnnnnnnnnnnnnnnnnnnnnnnatgagccaccacacgcagccacctgagactttttaaacagcaccagcacttctggctggtttgaaccttaaatgccaccacccaccagagaggaggctctcactagattctaaatctgttatttaattacttttcaattgaaaaacaaaacagacagaagaaacttattagaataaggccacctaggaatgttcttaacttttccattcagcttttggctgatatatgaaaatacaaataaatacatcctttccccaggtgcaaggctaaaccagcagctccaagggcttggtctacagtgctcagaaagacacactgccttaaaagtcaggctagtgccctagctccggtggcctctgcaaatgaggccttgacagtcgtcagtggacagacacatagtatccagcaccaggtcttgggccttcctgcttcccagagttcacaggtaggacgcatgtgagggggagcagtccgtacttctgtgggaagatggtg

SEQ ID NO: 317095 - DNA, 611 bp, Homo Sapiens
  misc_feature (146)..(146): n is a, c, g, or t
  misc_feature (162)..(162): n is a, c, g, or t
tgtatggagaatatacccagaaagcagcattggcctcaaagtacaattagtccttttagttcagagaactatcagcggctgcatggtgacaggtattgcaatctcagttacaacttaatgctctgttagggtgatgtatcaggttntgttccatggctttanaaaggacttagaaccaggcctttaaaaggcctatatggctgcctccttttagtaagcaccccttagcttcaataaggagttagaaataaagccagccaactttctgaaagatggtattctacagctgtagaagaaatcagaaagtgttggtacgttgttcataggaactgtaggaaaggttttcatttgcccttttatatgaacctcttgtatttgtttacttatttcaaacctggtgtagacacaaaaatatccccgcagctcatactgtatttgaatttatttcctggcaggctttctttccagattaattctgagctgccagtgaatttgcggggagcgtttcatatacagaaagaacctatcttaatcaaataacctgcgattgacagaaaaaattttctcattcaaaagggcaacattgctttctcttaatgcacaggttctgg

SEQ ID NO: 317096 - DNA, 942 bp, Homo Sapiens
tgcataaaaccacatattctaattaatttaactataaaatgccaagcaaagacagcagatttataatatagaacaaacaccatctgcaccaccttaaatcattgttacagatatatttctaggaaaaaaatacacctgaacaattctcaagcctagattctaagatgctaaagtattaactaaataggattccaaacagacccagagaaagttactgcataattatttaaatattaacatgtactgagttcagaaatataaatataataacacataaacacagtttacaaattcatgtcaccattttcctgtgctccatgatttcttcaatttggctacatacattgggccccaggctttgcccttatctggaatcactaagagcccacattcctggccagtgggagcaaatgtgaagtcgtgggagcaagtccttgctattcctttaatgtccataggcatgatgttaccgtgggagtttaaaatttcactgatcacatcttgattttctgccttggaaagcgtgcatgtagagtatacaagtatccctccaggacgtaaggccttaattgcagaccttaacagctctatctgtagaagaggcaaattcctcctttgacttatcctacaggatgccttctgagagtcagaagaaaacaaccagcttcgatcatttgaacacggagcatccactaacaccttgtcaaacatttcaggctgggcatctcccatttttctgccatccaattcagacactttaattacatttatcaaaggctgtgggatgaaagattccaacgtctgccttagccacctcaatctcagactatcatattcattacaatgaagataacctggacaagcacactgcagcagagctattaatttccctccaggagcagcacagagatccagaaccttctccccatcccttaattccag

SEQ ID NO: 317097 - DNA, 788 bp, Homo Sapiens
tactccttgtataaaattttattcactaatagaaaagaaagagaaatagtggaaaactgttaacatttaacacagcgtaaaatacattgcccattctaaatggtttgaggtcttaaagagtctcttccaggggtttttgaatgttcaattctagtaaatatcacagccaaagagttccaggcgaagtgcaatactttgattccatgttttaggaatgacacggataaacctggaaatgattggggggttgaaaaagttcttcacatgtcctttggtattagtatttccttcaaaaatcttgtccaccatggaggatttcagcctgtatggtttccattccactccctgctcactgtagtggatggtatagctctttacatacatttcagaggacagagacttgcagccctgtgttataattgccgttatcttcttgatcttgagtagatcaatttctagccactgcttattgttgtttgccttggcttgccaggcattcacacgtccctgggcattcagacgggcacggaagggttcccagtaatctccccaccaagatttcttaaacgaagaagctgtgatttgcttgttttctatctttccattttccatacccaggggtgtggaacatccatttacctcacaaccttgcagttccaatcgaagggtaggtctgttataggctcgagttggagagatcctaatatatctagccacaataggtgggtcaaactgattctcttttattgtagaggcatctgaattgccattaaaatacatcacattcc

SEQ ID NO: 317098 - DNA, 724 bp, Homo Sapiens
tcggcacagctgggttactgggagcccagattagcaagattaaacaatggtggatcttataatgcttggagtgtagaaaaacttgcagcagaatttgcctctaaaccttggatccaggtggacatgcaaaaggaagtcataatcacagggatccagacccaaggtgccaaacactacctgaagtcctgctataccacagagttctatgtagcttacagttccaaccagatcaactggcagatcttcaaagggaacagcacaaggaatgtgatgtattttaatggcaattcagatgcctctacaataaaagagaatcagtttgacccacctattgtggctagatatattaggatctctccaactcgagcctataacagacctacccttcgattggaactgcaaggttgtgaggtaaatggatgttccacacccctgggtatggaaaatggaaagatagaaaacaagcaaatcacagcttcttcgtttaagaaatcttggtggggagattactgggaacccttccgtgcccgtctgaatgcccaggggacgtgtgaatgcctgggcaagccaaggcaaacaacaattaaggcagtgggctaggaaattgattttacttcaaggttcaagaaggttaacggccatttttaacacaggggttgcaagttttttgttcccttgaaatgttttgttaaagagctataccttccattacagttgaggcggg

SEQ ID NO: 317099 - DNA, 777 bp, Homo Sapiens
  misc_feature (661)..(661): n is a, c, g, or t
gggaaagtgaggctgaattgaataagtatggggatgaatccttcttatttaaatttttgatacattgtccatcatagactttttacattaattgtgattttttaaaaatgttgcattaaaatagtatttatcttggttactgggttttttggcactccttaaattttgtgcccaaggtgagtgctttgctcacctcaccctagttacgttccctgtttctgtgatttgaacactagcgagaacaccactgtgtgcgcctccacccccatcacacaccaaacaacaggtggctcagacaccctgaatttgcacagctcaccctagctttccctaatttaggccttcatatcatagaatggtggcctggaccaataggaatgaaaacagcccaggggttttcccagagaataaagccggaaaagttttgattctccactggactgctgtgtttggatttgatctgttgttagattctagttaacacttttgtttttaaaaactaaggacaaatgaacaaaaaaccttgtatcatgtttgtttttatttataagttagccaatcccaattctgtttgctttattttcaaataaaaaaagatggaaattttgaggggtggtctaggggtgaatatggtaaaatggggctttaggccttatagctntttattaagaaataaattattttttttatttgggagggtaactatttattgaggcattgaggagatagtgaagtttggtttgcttcattctttcggggagggtcttggtgggatgg

SEQ ID NO: 317100 - DNA, 820 bp, Homo Sapiens
  misc_feature (619)..(628): n is a, c, g, or t
ctggtagacagtacacttgggaattatactgcaccaggcataaagagtaagttttctaccacagggacattttgtattcagaattcaatataaatatttctagtcagacatttccatggctacagatatttggttccttgatttatatgcatagaaagaaacagttgtcataactgtaaaaagcagtacttaataagtacttttaaatgattggaacagttttcctttaatattacaatactacttatttattggtttggaaactaggtcaccctacatgatgttttgatttttctcaaaggcatcatgagtactctgcttattctttcattcttgtatttttagccttctagttgagttagggaccattttatcagaaatcattttagcactgtaataagaaaagctctgttaagggtagattatataccataatgattttcagacttctttttataaaaaaggtatctggagactctgaacaggcacatgcatactcagggggaagggaacaaaacatggaggagtctgccaaagcacaaaacttccttctggtcctcactgccttcaaataaatacaactatttaaaggaaaaaaattatctcacactgtgatttnnnnnnnnnntcagtatcttccatttcctggagagtctttccaggaacctgtggcagggtcggagatcagtcgtctgtcttccgggctagcctacagaaagtccagttgtgctccactgtgttttcattggcccgctcactcatgtgatgcacccgggtgttgcggatcgtgaaaccttgttttgtaatgtattccctcgtg

SEQ ID NO: 317101 - DNA, 669 bp, Homo Sapiens
  misc_feature (105)..(105): n is a, c, g, or t
ccttgatgtctttgatgggaatcatcatatttggcaccatattagaaggaccattagccacacacggttgatatcatttggcatatccgggttcttgtattcggntagatcttgcagctgtgtgtcagctgaagacagcggtcaatgctgacaaatgctaagaagataattgataaatacatattgatatagatgaggcaggctgttacttggcagtggaatatcttcagcttccaaggtgccacacccaagtcaacaacaattttcactggtaatgccagagtaagcaggaaatcggctgtaagcaaattaattaagtagatgctcacacacctgtgattcgtattcttctgtataaaagcccaggttgcaaaacaacttccaataattccaacaaggaaaactaaataaaaaaaatacgtgaatggctccagatctttataaactgggcagaagaacgaactgtttgtcatcttgagggaaagtaaggatgactgcttattgaaaagaaaaaatttctaagactccaaggttgtgtagctggtaagatataaagccaggattccagctcagtcagtctgatctcagaatcacattcaaaaccactccaaaacactggggctatcttctgtgagcctcagcaagccttgctgcaagtcttcagagaag

SEQ ID NO: 317102 - DNA, 517 bp, Homo Sapiens
tgagccaccatgcccagccgaatgattcattttcaactgctgtctctgtgtagctgacttcttccatatttttctataagattttacaattaaattcttcctgatttaaatcttgttaccttgtctctatggttctaaaattaaatgcatcatcttctgtcataagccatatcccaatacccatctcgtgtattaatcccatcaatcattcaggtgtctggaatacaattctttagagtcatttaaaattacatggtccttttataagatctaatttttcacttaaaagctctttctgtttgatttttgtttccatctccattaccctcattctggtctcgggtcttactcatttatatgtgtatgtctctgtaatacatccaaccaggttttcctaccgtcatatcccctctaaagtgtagtctaaaccaagacatgacgtacaaccccagatccttcattgatttcctcattgcagattactttggcaactgtctttactgtgtgaatcagtttt

SEQ ID NO: 317103 - DNA, 974 bp, Homo Sapiens
  misc_feature (521)..(558): n is a, c, g, or t
  misc_feature (779)..(779): n is a, c, g, or t
agtctctgtgaatggctgtggtcagtgtcattcactgtcctctaatttttttcaggaaaatcccaccagtgcccagtaccacctcacccatctccacacgtattcctcaccggacaaactctgtgccgacatcacaatgtggagtcagctatctggcagcagccaccgtctctacatccccagtcctgctctcatctacctgcatctccccaaatagcaaatcggtaccagctcatggaaccacactaaatgcacagcctgctgcttcaggggcgatggatcctgtgtgcagtatgcagtccagacaagtgtcctcttcatcctcatccccttccacgccctctggcctttcctcggttccttcctcccccatgtccaggaaacctcagaaattgaaatccagcaaatctttgaggcccaaggagtcttctggtaacagcactaactgtcaaaatgccagtagcagtaccagtggcggctcaggaaagaaacgcaaaaacagttccccactgttggttcannnnnnnnnnnnnnnnnnnnnnnnnnnnnnnnnnnnnnattccatggagtcttttaggaaaaactgtgtggctcactctgggcctccctacccctcaacggtaacatcttcccatagcatcggcctcaactgtgtgacgaataaagcaaatgcggtgaacgtccggcatgaccagtcagggaggggcccccccaccgggagccctgctgaatccatcaagaggatgagtgtgatggtgaacagcagtgattctactctntctcttgggccattcattcaccagtccaatgaactgcctgtcaactcccacggcagtttttcccactcacacactcctctagacaaactcataggaaagaccaaggttgccaaagtgccagccgtgaacaatgtccacatgaaacacacaggcaccattccaggggcacaaagactgatgaacagttccctcctt

SEQ ID NO: 317104 - DNA, 519 bp, Homo Sapiens
  misc_feature (487)..(487): n is a, c, g, or t
ttttaagaagacaccatgaagctgaatatctgtttacaaaccaaccaaccaacccaaccaaacacatttctgagctgacaaaagatcttaagggagaagaaatgggcattcccatggggctcacagtccatttcctacctgatgaaggagggaactgttcatcagtccttgtgcccctgggatggtgcctgtgtgtttcatgtggacattgttcatggctggcactttggcaacctttgtgggtttgctgctgctgttgttgatgctgctcgagctgggtgagcactttcttttctttcctatgagtttgtctagaggagtgtgtgagtgggaaaaactgccgtgggagttgacaggcagttcattggactggtgaatgaatggcccaagagaaagagtagaatcactgctgttcaccatcacactcatcctcttgatggattcagcagggctcccggtgggggggcccctccctgactggtcatgnccgacgttcaccgaatttgctttatttctcac

SEQ ID NO: 317105 - DNA, 525 bp, Homo Sapiens
gaatatttctttaatattacatttaaatattctctttaaatacagcattatcacaatgtaaagaacctaaaggggaaaaaattattttcagagaaccagacaagctttggattcacattgaaaatactacctgtgtacagtatgtgagaaaggaaattggaaaataataagggttgtggtaataagagtcatttatctaggcctagactgggactgaagctatctgcttctatgatcagaggcctagctttcctagcaaccatgagctagaattctgtccaactcaggtagcaccagaagtgagatggactaggttgtagagaaggcctttcgcttgacaagacagttaatgctaaatgttaatatttagcacttaaaagtttgggatcagtgtgagtcacaactgtagagttaatgaaggggatggacttaaattaagaaactacaggttttcagaaacatatcttgtgggttggcaatgagcttaataattacagattcatattcctggtttgatcccaaaag

SEQ ID NO: 317106 - DNA, 633 bp, Homo Sapiens
cttagatacagtactgaaaatgcccatcaaactcgtcatcctaatccattctgttcacactgaaactcacattttctctaagtagtctattcagcagtagaaattgaaagtaaaggccgctctgcactgggtcttctttcagaaaggagcttggggaaaatgcaaaatgctttacagagaggagttaaaaccacaacagtcagtctttggtcagagcaatgaggtgacactttgatgcaaaactttgcttggtcagcaatctttataactggtactttctggatatgggatgaatttttaaaagatctgggaaacaacagtaagggggaaaaaaggccagagtatgatttttttaatggcatcaaaaaaatagctatttaaatatttgttattacaactactacatagatccaagaagtgaaaataatacaacaacaaatcagttgacaatgctgatttaagcatgccataggcatctttcaattatgactatgatcaccaaggtcactggaccagacaaatatccctgttctctggaacatatgcctcaggttacaaaaactaaggaaactaccacaaagattttgagcagctctattcctcgtgccgaatcctgcagcccgggggatccac

SEQ ID NO: 317107 - DNA, 746 bp, Homo Sapiens
gcatttattcatttaagattttattgagacacttaacccaaatctgcaggtggtagggcacatcttagaggggatgagttttaaaggatgggtaactgctagctgggcacagaggaggcattcatttcaaggagagcaaacagttgaaccaagtatttgtatgtgtgagtgttaggtggtaggggaggaagtggtaggcagaaaccagtcaccactaagtagctttaatgtatcctgaggtcaacgggatacctttaggaaattttagggtgggttaagagtgataatgataaagacagtaagctgtttttaattattaccacttggacacagttaagaatgtgctgcagtggctttggtgagatgtaataagaatctgaatgagaacagtaacagagggatgaaactaaagggacagatttgagaagtattaaagagagagaccagcaggactttgcccagttttgttagtgagggtaaagagtcaagcatggagcatatttcttgcttggataactgagtgctggcatcccatttgatcattcgtagatatgctgagtttcaggtggcttcaggacatccaagtggacatccagtaggattctgcagatgtatggaggcattccgtcactgttgttggcttgatcagataccctttacagatatagcaggtaatgtaaggattaaaatctttcaccaagtgtttcctttgggtagccattcgtggctagtgaagactggcttta

SEQ ID NO: 317108 - DNA, 1209 bp, Homo Sapiens
aatgggttttagcgggtcctagtctgctggcattgagctggggctgggtcaccaaacccttcccaaaaggacccttatctctttcttgcacacatgcctctctcccacttttcccaacccccacatttgcaactagaagaggttgcccataaaattgctctgcccttgacaggttctgttatttattgacttttgccaaggcttggtcacaacaatcatattcacgtaattttccccctttggtggcagaactgtagcaatagggggagaagacaagcagcggatgaagcgttttctcagcttttggaattgcttcgacctgacatccgttgtaaccgtttgccacttcttcagatatttttataaaaaagtaccactgagtcagtgagggccacagattggtattaatgagatacgagggttgttgctgggtgtttgtttcctgagctaagtgatcaagactgtagtggagttgcagctaacatgggttaggtttaaaccatgggggatgcaacccctttgcgtttcatatgtaggcctactggctttgtgtagctggagtagttgggttgctttgtgttaggaggatccagatcatgttggctacagggagatgctctctttgagaggctcctgggcattgattccatttcaatctcattctggatatgtgttcattgagtaaaggaggagagaccctcatacgctatttaaatgtcacttttttgcctatcccccgttttttggtcatgtttcaattaattgtgaggaaggcgcagctcctctctgcacgtagatcattttttaaagctaatgtaagcacatctaagggaataacatgatttaaggttgaaatggctttagaatcatttgggtttgagggtgtgttattttgagtcatgaatgtacaagctctgtgaatcagaccagcttaaatacccacacctttttttcgtaggtgggcttttcctatcagagcttggctcataaccaaataaagttttttgaaggccatggcttttcacacagttattttattttatgacgttatctgaaagcagactgttaggagcagtattgagtggctgtcacactttgaggcaactaaaaaggcttcaaacgttttgatcagtttcttttcaggaaacattgtgctctaacagtatgactattctttcccccactcttaaacagtgtgatgtgtgttat

SEQ ID NO: 317109 - DNA, 1096 bp, Homo Sapiens
  misc_feature (1052)..(1052): n is a, c, g, or t
gtactggccggaattccgggatatcgtcgacccacgcgtgcgagtgggtttcagactttctctcaggatttccgctggcttcaggttccggtcaggcgtcgggacagagcctgatccaggcttcggcggccggtggcagctctcgatcagctctcgcagtcggagaggcggctaaggaaaggtgccacagcagagacgcgaaggagaggccctagaaccttttcaaagaagaatggaagaaaccatgaagcttgctacgatggaagacacagtggagtactgcctgttcctgataccagatgagtcaagggactcagataaacataaagagattcttcagaagtacattgagagaataatcactcggtttgcacctatgctggtcccctacatctggcagaatcagcctttcaatcttaaatataaacctgggaaaggaggtgttcctgctcatatgtttggcgtgacaaagtttggggataacattgaggatgaatggtttattgtttatgtaataaagcagatcacaaaggaatttccagagttagtagcaaggattgaagacaatgatggtgaattcttgttaatagaagctgctgactttctccctaaatggctggatcctgaaaatagcaccaatagggtatttttctgccatggggaattgtgtattatccctgcaccaagaaaatctggagcagaatcttggttacccaccacaccccccacaattccacaagcattgaatataatcacagcacattcagaaaaaatacttgcttcagaatctatacgagctgctgtgaataggcgcatcagagggtacccagaaaaaattcaggcctcacttcatcgagcacactgcttccttccagctgggcattgtggcagtgctaaagcagcgccccagattggtggctgcagcagtccaggcattttacctacgagaccctattgacctgcgaagcttgtccgtgttttcaagacattcttgcctgaaacacgaataatgacctcggtcacattcactaaatgtctatatgcacaatggnggcaacaaaaggtttgtgcccaaacgggggaattgaatacaggc

SEQ ID NO: 317110 - DNA, 837 bp, Homo Sapiens
gttcagctgctttctttattagaaacaagtgagatgtattgagcagaacaacaatgcatttggtatttcctccccgaccctggaaatggatgcccccccacagcccaaagaaaagccaagacaaaaaggtgaagctcccccgtccctgttcccagacatggcacctgcctgccagccagtcagtattttttaatttaatggaatgaaattgtcctcaacagcctccgtaggtgtagtcggcttgcaggcccgccttcattttgcagcagagtaaaactgaagcctcaggcctcccctggttctggggaaggtgggccaggccatcagaaggctgcctcacaggtgggtaggcactgacgggagggacactcctgctccctcccctgatctaacatctggttcccctccttctcctagagtgcagctccatgcagttgtccaaggcctttgggcccttaggttggttaaatgctggtcgtctttggggaaagaattcaggaccccagggactcccttaggcttctgagagccagcaagtaggggggcgacagcagttagacgggagttgtggggaaggcctgacattttccataaacctggtgttaaagtagctgggtgtgggctggccttcaaataagacagaagcctcttcagaaataggcatgtgtggggaaacgagccctatacaggcctcgatccggagtggaggcctcctactcagctctctccctacacacagactggagtccgtggtcaaatgcagagtcaatccaaaggcaggaggtaaaggtcgtctttgaaacatggcagctgggaggactgggtggcagagggtgg

SEQ ID NO: 317111 - DNA, 656 bp, Homo Sapiens
taaagccctgggtaattttgtggcggaaccaagtttgggaacctgtgtaataaaagatttctaagggctcttcctgctttaacattctagttgacattgtaaatgaagttcccagaaatcaaaggagcgagggagggatcctagctgcaggaaaacggctatgcattcagagtccacaccgtttatgctcccattttactaaacggtccctcatagggggagggatagaacaggcaaccggaaaagaaggatgtggtatccacgaataaagcaggctaaaaaaagcaggcttttaaaaaaggcttttctaagcacgattttgcacaaaagaaccccttcttgactatatatatttgtgttcatccaactggattttgaggtggattcctcagacccgtatctggctaatgatggatttcaatatattttctctaagcaccccgaagcgttgcacgaaacctctaggttgtggcctgcccgccccgaggccaggtgaatccggctcagcagcagaggtgtctgcaattacaccctctaatcccctactgtcagatatgaccctttccgcacatacctgagggccctctggtaagattgatctcttcctcagtgaccaaataatccactcttccgttcatgttttacagctcgtctgg

SEQ ID NO: 317112 - DNA, 1078 bp, Homo Sapiens
  misc_feature (931)..(939): n is a, c, g, or t
tggaacagcagatgataacgttcactttcagcagtcagctcagatctccaaagccctggtcgatgttggagtggatttccaggcaatgtggtatactgatgaagaccatggaatagctagcagcacagcacaccaacatatatatacccacatgagccacttcataaaacaatgtttctctttaccttagcacctcaaaataccatgccatttaaagcttattaaaactcatttttgttttcattatctcaaaactgcactgtcaagatgatgatgatctttaaaatacacactcaaatcaagaaacttaaggttacctttgttcccaaatttcatacctatcatcttaagtagggacttctgtcttcacaacagattattaccttacagaagtttgaattatccggtcgggttttattgtttaaaatcatttctgcatcagctgctgaaacaacaaataggaattgtttttatggaggctttgcatagattccctgagcaggattttaatctttttctaactgggactggttcaaatgttgttctcttctttaaagggatggcaagatgtgggcagtgatgtcactagggcagggacaggataagagggattagggagagaagatagcagggcatggctgggaacccaagtccaagcataccaacacgagcaggctactgtccagctcccctcggagaagagctgttcacagccagactggcacagttttctgagaaagactattcaaacagtctcaggaaatcaaatatgcaaagcactgacttctaagtaaaaccacagcagttgaaaagactccaaagaaatgtaagggaaactgccagcaacgcaggcccccaggtgccagttatggctataggtgctacaaaaacacagcaagggtgatgggaaagcattgtaaatgtgcttttnnnnnnnnntactgatgttcctagtgaaagaggcagcttgaaactgagatgtgaacacatcagcttgccctgttaaaagatgaaaatatttgtatcacaaatcttaacttgaaggagtccttgcatcaatttttcttatttcatttct

SEQ ID NO: 317113 - DNA, 474 bp, Homo Sapiens
gagaaatttttttattgtatttgttttcaagtgattctggtaaccaaagtattacagttacagggcaagcaaacatttaagccaaaaaacaatcatatggcaaaggcctctgctttaatctactacatgagaggtcattgttactcatttccaaagctgttatagacttggaatgtggaattggagaggcttttcgaatgtagttagtggtgttcacaaaagaaccactgcctttcaacttggaccctaagaatgaacttatcacttccatttagaacttatataagcaaaaatatctgaaggcaaatatcaagccatgtttccacactcccaaagtatctcatttgtcatgagccatgagtgtcactttttaaactccttccctgaatgcccaatcaacaggaaagaagctgcagagcaagggcagaagagtctagaccaggtgttgggaactatagctcacagactggccac

SEQ ID NO: 317114 - DNA, 1049 bp, Homo Sapiens
gctgtgggtctgtggtggttgggggcataggccagtttgcttgtcaccactttttgcttaacagagcctttgtgggagcctaagagaatggaggagggcgtctctctggagccagaaaggtccaagggtcgagccactctccttgcttttctcagctgacgtctccttttctttggaggcgctggccgtttctgaaggtgctgattgtgtgctcgaggagctcccctgggaggacttatttagtgtttctgtgttcacctcagccatccgcttcctgctgaggagcagtagctgactgggtgcaggacttcatgtgctcaggccagtgggcttgctggcaggggtagtcacagtagctggtgttccaacagcagtaaaagatggcctccttcttgcagttggcgcaccactgcttcttcttggtctcatccaccgcctgctgcttctccaactccagctgcttcttcacctcggcgatgagccggtcccgctcctgctccaggctctgccgcatctccgccatggtcagctctaagttgtgtttcatttcggagagctcttgctggtgcagccactggagcttctctatctcgatcctcagcctgcgaatctcagctattgtgcttccagtagtgtttttagaaagatcgttgtatatttctgtcattgttccttttattgcatccatcattttgctagtgtacttggcaatatcagcggcgacatcagctgaggcagtggcgatgggcaggtcagcgttgactgaggacacaagggtgctcatggaccccgagctggtgaccaggggcgatgactgtgtgctggtcaccagggtgatggtggacgtggatgggctctgtgtgatctccttctgctggacagttgatgagttccacacgacccgctgcacggccggggcagtctccttcggtaaaagcggcctctgctttttcactgggcttcctgtggcggcgggggccggggccgtgacggtgaccgtggaggacgtgctcctcgtgccgaattcgccacccaggcctcgctaccta

SEQ ID NO: 317115 - DNA, 898 bp, Homo Sapiens
  misc_feature (26)..(26): n is a, c, g, or t
  misc_feature (345)..(363): n is a, c, g, or t
ggcaagaccgcacaggcaaggccgantgactctgtgcccactcctgttgttttccttgacaatctactgtgccactgtgctactaactcttgtttacaaaatttgattctaagttgaattgcttcattcaacacccccaccctccctcccctcgaggtggtacctaagctgtggatttgctaaatgaattaagcaacctagaagatacagagctaatgaattatcaaaatgtgattaatcccagtaaggaaacactcatttagtgtctgtatttttggtgtgaaaattatttagttgccagtatattctgaagaatgtcttcttgatcagtcagataagcttgcnnnnnnnnnnnnnnnnnnncatgaatcatgtttggttcctgtgaaagtccctggtccagggatcctcctcctttctcttttacttctgaattctgaaattcagttagttacttttgcctttcgctcttctatcacagccaccttgaccttgggtaaaacccaaggtctttccttctggctaccttcctgcaggtccaccctgtctgccattggtctcctctgcctctgactacatctgccaccaacaaccctcccctcacccctgccaggggcagacaggcttctcagcagaactgtgactgaaatcagagctgctgtctggggcagtgttaactacacagaggcacatcctgacagggtttgccccagagatctaaattccagaaggagggcaccacacctaggaaggtaaatccagtatcagaaggttgctaaaagattaaagatcaagaagcttggaaacatcccatgggtacaatgtcttagaaagtctttaagtcacataccatgaatttttgcttcattactgaccatatatgaccttggaggaactc

SEQ ID NO: 317116 - DNA, 363 bp, Homo Sapiens
caggttgtggccacgtgaattatttaacctcactgtgcccatgttcacaggcctgatccgtaaaatgcagtaacaccttactgttaaaggtgctaaggaaaaaagcattcagcatacatgctacagagcctgagcactgaaaaatgaaaatcttattgtggctacagatcaaaaattcatactgaaaaagatatttgtcatttaacatggaacctttccaatacattttaagggcatactgaaaaggctagtagtgaaaaacggcggtaacaatgagataacatactttgttatataaaagcctaagtttcatagaaaaaaaattctaatttgaaaagtcaacaacattaaaccctatctgcc

SEQ ID NO: 317117 - DNA, 594 bp, Homo Sapiens
  misc_feature (22)..(22): n is a, c, g, or t
  misc_feature (27)..(27): n is a, c, g, or t
tctccttcctaaagaccttgcnacacngcacatggcaatgcccccggcccaagaaactgacccgtccccggctaagcagaatgacaacagtactcaggcaaatccccacaatgccaacatcccactggtgaatccagtgacaatggatgaattcaacttactttagaagttgttattaaacaaactgcaaaatgtctactccgaagatgcaaatgtttttccttggcagatcctctctgtgcttgggattgacacaaaggctcaaaactgcaaaatacaaagatcaagtaatctggtgccccgctgtactgggtaaattaaattttaaaaagtggaggagaaatgctttcacattttacctacataaacctaatgtttgttcagttgcctgttttgcaagaatcttggactaaggtaaatgaaggcagaagataaagtgatccctgttcctttattccaagttaaagtttttaattaagccccatttgttatatgaaatgttaatcctaccaaatgtagttagataggcttgaattggacataggatttaaacaaacattttaatgagaacacaaaccactgactctggcttaa

SEQ ID NO: 317118 - DNA, 651 bp, Homo Sapiens
  misc_feature (18)..(18): n is a, c, g, or t
  misc_feature (144)..(144): n is a, c, g, or t
gggcaggtgaggacagcntgggggggaccaaggtggggtcattaaaatcttacaggacatacccatcttccattttaaacattatgcccaaatcttaaaaatctgtcctggacatctggagaaagacttaaaataaataattcnaaagcagaatactccaaaagcccgttttcactctgaggcctatatggttagcaataacatatttccctggctatttttttctttggccactgttggaattagcttgaattctcataaatccacaaagggttccagagcatgctaggtgtacaggcaaggacagcccacaatgaagaatagaaaatccaaccaagacttgccaataactaacaagctgacaactatggcactgcagttacatctctttcactggagagggctggagaaacagcagagcagagcccctgacaatcaacagtgaaaaattggccctggaatggatgaagtgaatcaagtcggcactatctatcaaatggagaaaataataaaaataaaacccacatctccagtgactacacaaaggcagcaacaggacatgtacagggcgatggagctgttctgtgtcctacgtggtggcaataatacgaatttatattacaattcgtactcgtgccgaatcctgcagcc

SEQ ID NO: 317119 - DNA, 585 bp, Homo Sapiens
caatttttgagttgttggattacatagtcaacgagcctcctccaaaactgcccagtggagtgttcagtctggaatttcaagattttgtgaataaatgcttaataaaaaaccccgcagagagagcagatttgaagcaactcatggttcatgcttttatcaagagatctgatgctgaggaagtggattttgcaggttggctctgctccaccatcggccttaaccagcccagcacaccaacccatgctgctggcgtctaagtgtttgggaagcaacaaagagcgagtcccctgcccggtggtttgccatgtcgcttttgggcctccttcccatgcctgtctctgttcagatgtgcatttcacctgtgacaaaggatgaagaacacagcatgtgccaagattctactcttgtcatttttaatattactgtctttattcttattactattattgttcccctaagtggattggctttgtgcttggggctatttgtgtgtatgctgatgatctcttacaattgcactgctgttcctgctccatgactggctgtctgcctgtattttcgggattctttgacatttggtggtac

SEQ ID NO: 317120 - DNA, 1562 bp, Homo Sapiens
  misc_feature (18)..(18): n is a, c, g, or t
  misc_feature (35)..(35): n is a, c, g, or t
  misc_feature (44)..(44): n is a, c, g, or t
  misc_feature (426)..(434): n is a, c, g, or t
aggctcaacctaattggnaataatgggaaaaatgnagaaaatgncctgtgaggataaagaaaatgttttggtcaatttttcctcagatttggctccccaagtcccccccatcagctgcttttccccttgtataaaagagatcaaaggaatatacagggatctattcacaggtccccacaaggaaggtggttggaagagtcacagataagggtgttgggtgagaagaggctggactgagtccagagattgaaattacaggaagccccattagtccaaagcactgaactcggtgtcctgtttctgccttccagcctcctcctcatcttcacctttccccctcaccagtgttgcttggctaaaccagtatttcttgtgtactaaagaaactgaaaagcttaccacaaaagcaaaagtagctttcatccnnnnnnnnnatttcatagtatatttattagaataagagattagatttgttaaacatctaggttaaaatggttaaaaggattttcatacaattttaggcactatacacgttgtttacaacagcattggtacttggatatggggaaagataaatccgacattttaatatcttgatcaatttgtgacattcaaaataattccatttaagaaacattaatcaaaacttaaagagacataccactaagtatcccacacagtatactgaaaataaatatagaaatacaaccagaagtctacagatcaccacagtagacagactggtgaagccccagctatcatggcagtgaagggctctggctagatttggatgtcaactgctgagttctacatgaaaagcaaataataataataaaataacatgatgtacactctctgatgctcattttcatagcagcaaagcatgcttcacatgcactgcctgtgaaggatctcacaaggctccctcctagagagaaagtatgcccagcaagaataaagtaccaccaaatgtcaaagaatcccgaaaatacaggcagacagccagtcatggagcaggaacagcagtgcaattttaagaatgactacccacattcaccaaaatttcactgtaattcagcctggcacaggttttgatcatcagcatacacacaaatagccccaagcacaaagccaatccacttaggggaacaataatagtaataagaataaagacagtaatattaaaaatgacaagagtagaatcttggcacatgctgtgttcttcatcctttgtcacaggtgaaatgcacatctgaacagagacaggcatgggaaggaggcccaaaagcgacatggcaaaccaccgggcaggggactcgctctttgttgcttcccaaacacttagacgccagcagcatgggttggtgtgctgggctggttaaggccgatggtggagcagagccaacctgcaaaatccacttcctcagcatcagatctcttgataaaagcatgaaccatgagttgcttcaaatctgctctctctgcggggttttttattaagcatttattcacaaaatcttgaaattccagactgaacactccactgggcagttttggaggag

SEQ ID NO: 317121 - DNA, 414 bp, Homo Sapiens
gtgtgagccaccatgtgtggccctgaacatgtattttctaaatgatgtttgcctcgaaaggaagcaattgtttggcaaccttgttaatgtgacctattactactagacttctaaaaagtgaaatttgtcaaaaggacattttttagtgcaactgaaggcaatatcaagcagtttaaatagttgttgatgcttatgctatgtactgtaattatttacatatatttactatcacagaatttataaatgatacaaagttttttgaagacaagatttttgattccttaccaatttaaaaaataacaaatacaattttaaaggtggcaggaaggtctccaaacagaaaagaaaacaagaactaattgtaggttccttagagagattttaagattattcttgctgaaatttttacttaaa

SEQ ID NO: 317122 - DNA, 853 bp, Homo Sapiens
catgtattgaagagtgaattttatttacactactagtaaatcccagctactccagttactctgatatatctcatcaatgacaggaaaaatatcttcttccagtatttcagttttaacaattgtaattaaattgcttggttataataagagttaagaagcaattaatgaattttttttggaaataaaaaatatgtatatacattaccctgatacctaggccaaaatatatctaacaacaaattttcttgatttatattagtcataaaaataaaggaaaaatatattgcaagtattttctttatagacaatttcaattagaaaacaatagtttaaggaaagcaatacagaggttcatgagaatggattgatatggaggcaagataagtatttaaaacttgacagacaacatactgtcaaatatgacgaaagaatatctgcctcaatgacaccatttacaggcagtaactagatttttacacatctcaattttctctcatattgaaggaaattacaggtaagttatgctcctaagtcagttaagaaccccttcttttagcttgtaaaatgtagccttttgatttgataattcctctacttttcacaatgaccgaataccgcagtagccacagcggcacccactcgtgcgcttgaatgtcaggaatgctttcctgaagagcttcttggaaacttgcttcagaaagcagttcttttggatcattgtgagtcaacagctgtatgtcaaattgtttagcaaatgcagtcaaatctggtggcatcacacagcaggaggcaagattaacttggttactatttggttttacctgtgcccactgatacagctgttccaactgcc

SEQ ID NO: 317123 - DNA, 565 bp, Homo Sapiens
  misc_feature (48)..(48): n is a, c, g, or t
gaacccccctcctttaagccttgtaaaaaaatgtaagcccttttgganttggaataaatcccctcctaacttttcccacaaatgcacccgaaaataacccgcagtaagcccacagcggcaccccactccgtgccgcttgaaatgtccaggaatgctttccctgaaagagcttccttggaaacttgcttccagaaagccagttcttttggatcattgtgagtcaacagctgtatgtcaaattgtttagcaaatgcagtcaaatctggtggcatcacacagcaggaggcaagattaacttggttactatttggttttacctgtgcccactgatacagctgttccaactgtgttttgtctagatcagaggtacctatggcaacaatctttttgctctgaactaagttttctaattcctcccagtaaggctgtaaatgctccaaggaaagattaactccatcttcaataggaggtgaagcaatgatcacagaatccagctgtgcaactccaaggactgaacaggccatgtcaactgcacttctagttgatgatgaagagtttgattcta

SEQ ID NO: 317124 - DNA, 680 bp, Homo Sapiens
ctagtatgtgctaattatgaattttattaaggtttattcaatgtcacagaggaaagaacggtttgtagttttgcttacccgcagtgctggcaggtcacagctgtccaaccatgatccattcacatgctctggccccgtgcccctcgtcctcccacccctaccccacaggacaccattaagccagggctgggtaacaacatatgctcaatgcatcttctcaggtgagaaccaaactcgagccacaacagcaaagggggaaaaagggtaggcaaagtaattatgtgctcccaaggcagtcatttagttgaatccataactggaaataaaaaggcatttatgaagtgtagtcccgcagtctgaatgtggaaggtggaagatccacacatttacctaagaaacactcaaaacatattttggttcagaattctaaaaaatcccgaattttccatgatcttcccaagacaaccaatgacccacttaaatttaaggcaaaaacacccttgaatctaggaatgtgcacatatgcaacagctaacatctggtaactctaataatgttccttatatgtttctgtgtttactatcatgaaccataggaagaagtactggaaaatttagtaagtgtggacagttaaaaacactggcccggcacggtgctcacgcctgtaatcccagcacttt

SEQ ID NO: 317125 - DNA, 1047 bp, Homo Sapiens
  misc_feature (84)..(84): n is a, c, g, or t
cttttggtcccctcaaaatttccctttccttcttctaagaggctctgaactccctcaaggcctctgaactccctcgtgcccttncatccccctctgagttccttccccggatgaggactgtctccccaattactatagtgacgagctgggaaaatatctgaatgcatgctgtcaccaaaataaacaaccttgggttcaggtttgccagtcattttcttcagaagttccatagaggtggacagcgttcccttgggagtaccagccaggtttatccagagatggcagtgcctcctgctcctcatcattctcgagtgtccggaaaggtctctgacttggtaagtgggagaagaaaccaggcttcaatgcatttgtaatcacaatgtcaaaaaggtctgtaaaatcattcccaagaatatattcgcagagaagtctacagtaatcactgtgagaactggtaattaacagaagaattttcccagcattctttagctgtcgaagccattttttcacagattcaggacaactatgtaaatatctgcctggatctctttttatttctggaaaatatattccacagttttccttaaaagctgacattttataattgtgttgtatagcagcaactatatccttccaaaaatcaaatgttttttgaccattgttcagttttgttaaatagtccaccaccctggcacacagaagagctcctggcaggtcaaagtagttgtcgtaaaagtaatactttcctgagcggcaagccattccagtgtccgacaagaagtgcttccactctttcttgccatatgcctctgccagcacctctggagtcatcatcttggtgccatggcttgccctgagaacagtgccattatttgcaagtttaaggaagttcccatcttctagatccaatgccaaacctttgcaacagaaatcccaatcctctggggtcacattgagcaattccttatcgtaccctttctccttaactaggaactgggcaaagctattataaatgagcggggcgctctcggacaggttgtagcgaca

SEQ ID NO: 317126 - DNA, 586 bp, Homo Sapiens
  misc_feature (31)..(31): n is a, c, g, or t
ggaagaactccctttcccgctgccctcgctnactccctggaacctgcctaagtcctccgtggggcatgagctcagttaaagaaagggtcccaagttctcttcccatgttgacgtccggcaccagctggtcagacacttccttagcaccatatgctgaattcgagacgctaaaatctgtagatacccaaggatggtccagaatttcctgcgaggtcagccgctctgagggctcccgacgcagaatgcttcggatgaggcacttggccttgggcgacagagtctctggaatgttgaactggccacgccggatcttgctgaagagggagctgggttcaatgtcatggaaagggtaccgccccaccaacatggtgtacagcatcacccccaggctccacacgtcggctgctttgcccgagtagctgccactggtgttcaagatctctgggcttacgtaagccgggcagccatgcttgtcggagagggaatcatcatctccccgcagaatgtaggcgtcttccaggctttacagcttgacccgagtcctctcttcgtccttaaagatgaatttccgcagcttgaggtcccg

SEQ ID NO: 317127 - DNA, 611 bp, Homo Sapiens
ttttccagaattttaatacaaaaggaattttcaggcacaaatagtcaccagataatgcataccgtaatttagcagacttaaccaaacaataaacacccctacaaaagggtcactattttatcactttgggctggacttttttccctatacatttttaatagtggtcacttttactttacttttagcattcaatttagacatttcaaccccaaatttaaaaaaaagttttatcaaacatttgttttgagaccaaaatttttataaattatttgacaaatcaaagcagaacctttaattgtagaacacaaatgaaaaataatatacaagaacccttatctcttcaacttcaaggctaatacctgggtgttggaaaactggccaaagataaataaattttactatatttatttttctgcactgggtcaagatttctattataaatgatatgttacttacgatactgtcgtttcaaaaaagggctttccaagaagcctttagtaaagttcttctatgctgggtatgtacttggttcctgtatgttttaatctgaactattcgagaattacttatttgttgaacatagtctattagaaaaaaatactaaatcgccg

SEQ ID NO: 317128 - DNA, 361 bp, Homo Sapiens
aattgatgaggaaatatcaacttggtgcactcaaggacatttacattatgatgaccatggggtttatgaacatttataactttttataatttccatattacatttctcatagtatggacaactttttgccactaactgaattcttcaaatactcacacgtgaaatttcaacagttttctgaatggggattagttggtgattgtttgtaacaaatatgctaatgctttagaaatgtcagtatttttgtaattatttctaccttcaaatatatatatattgtctttcactggataatgtgtgtagatttttacatgtgccttatttgacaatgcttatgtcttgtttttgcttgtctcatttg

SEQ ID NO: 317129 - DNA, 1212 bp, Homo Sapiens
ccaggttctttcctgatccctcaaagaaaatggggactagtcatttagatctttaatgatgtacaacataatacaaaacaaaccagagagagtgatttctatgagtaggtgttattcattgtgtcatcctaaagcagtgggctggaggggaagctgttcaaggagaacagaggtggagttagtgctggccaactaaatcatggcctgtctgcttacccattcaatgtgctgggaaggggccaatgatttcttaaactgtttcctagagcaggggctctaaaaccctgggtagccagaggactgtggtccaaaccaagccaaaagaaacaggctggggtagggaagcgtggtgactgcctggcagaaaaggcaaactctgggccccatagggaaaagtgcattctttgcacctcagagatattgcagaaccagtgttaacactatgagactttgttaggaggggaaaaaataaaaccctggaagaatctttcacttgaactcaacttgactggagttcagtccaccagtctcaggggaagggggaagcacctagctccacagcagcactgagtctggccctcccgccccatctccccagcccctctcagcaactaggccaggcttcagctgaggacataaacaccccagaaagactagggtagtctctccggagggctgaagtgggaaggacacttctcaaaatgcaaatgcgtttaatacggaaggagccaggacagttctgggggcactcacatgcccaaatcttcccccacctccccagctcagggcctaggctcacagagactggcgagcagtctccacacctgaccttctaacccccaaaagaaaatccggaagctgccccttctctttccccacaggtgggctctgcagggcctcccagggatggtggttctgcggcagggcctaggcagggcctggtctcagctggctcctgcccgagccatgaggtcttccaaagcattgtcctggtcattgttgtgtaatagcaaaacttccttaatgtctttcagctcaaagcccatctccttaaatttgctcattaactgaagaaactccatcatcttttcttctgaacactggtgcatttccagagcctcttccactaaaagagggtcgaagcccttctcacaaagctgtccatgtgcaaagagatagtcgagaatctgctcaatattctctcctttcttc

SEQ ID NO: 317130 - DNA, 475 bp, Homo Sapiens
ttaccttttagatttttattagtagttctctctgaagaatcaaaatagttagttagcaaattattttagattcaagactgtatatcctttgtatttagatctttaatgatgtacaacataatacaaaacaaaccagagagactgatttctatgactaggtgttattcattgtgtcatcctaaagcagtgggctggaggggaagctgttcaaggagaacagaggtggagttagtgctggccaactaaatcatggcctgtctgcttacccattcaatgtgctgggaaggggccaatgatttcttaaactgtttcctagagcaggggctctaaaaccctgggtagcagaggactgtggtccaaaccaagccaaaagaaacaggctggggtagggaagcgtggtgactgcctggcagaaaaggcaaactctgggccccatagggaaaagtgcattctttgcccccagggatttgcagac

SEQ ID NO: 317131 - DNA, 946 bp, Homo Sapiens
  misc_feature (23)..(23): n is a, c, g, or t
  misc_feature (28)..(28): n is a, c, g, or t
  misc_feature (71)..(71): n is a, c, g, or t
  misc_feature (130)..(130): n is a, c, g, or t
  misc_feature (148)..(148): n is a, c, g, or t
  misc_feature (150)..(150): n is a, c, g, or t
aacatgaaattgctgaagtccangggtntgaagcaggttttaatgtaacggtttcctgttggtaaaacagnccctctgaaaaggactgcgccaagtccccacgccccctgggaaccactgaggggtcccnacgcaggggccccagctncnttctggcgcgtctccccgaccatcctcgttttcctggctgtgggtacctcatggtgtctgcacctcacactcctctgcagcccagctcaatgaccatcaccttttcctttctcataggtgggcgtgagacaggagtgtgatgggccttagaggtagctgggggagtttttacttgaggttcctggttctagaaaagcccgttttcaaagagcccgttagggcctgcatttgcctggttggaaccctcggtgctcccagttagggctggagatgacaaagccacggcctgtgctaggagagaggaggcatcaccaccacgtgcccagtatcaaaaggtgctccttcctactgggcgtctgtttggacagtctgcttaggagaagaggagacaggccactttgctattttgaacactttcacctccttgctatttttaacactttcatcttcacttggaggagaaaaaaaccacttaggtttgctttttatacatgcagacgcccaggcagccgaatggaaattcaccaccttcaatcctgtgttcaggccctctgtaaatctgtctcccaattccagaataatgacagcctctcccatgctcattttgcagtctacagaggcttttcatagccctcatcttacttggccatcagcacagctctcggaagaaagaactgaagggccatgttcagagatcccacatcttgaactcgggtcttctgactgcgagaccagggatctttccatactaccctgaagctggtacgtctttgcaatggatgacagaaggaaatgc

SEQ ID NO: 317132 - DNA, 477 bp, Homo Sapiens
  misc_feature (51)..(51): n is a, c, g, or t
ctatggttcacagtgatttatgatgaccccatgcatcacccgtgcataagngttagggaaaaggagcacatcctgtcctcactggctcaacagcccagttctcctggacgagctgtccccataaaggcgatggtcacatgcctaccactttgggccattttcctgggttttttcagccatttctggttatgcaccatcatcctaacatacctaccaacgtatatcagtactctgctccatgttaacatcagagatagtggagttctgtcctccctgccttttattgctgctgcaagctgttacaattttaggaggtcagctggcagatttccttttgtccagggaatctttctcagattgatcactgtgcgaaagctcttttcatctcttgggctcctccttccatcaatatgtgctgtggccctgccctttgtggccttcagttacgtgataaccattattttgctgatacttatt

SEQ ID NO: 317133 - DNA, 1057 bp, Homo Sapiens
ttcctgtagagtatttatttatttactctataacagttcacattttaaatagtgcttcctgacaatataccagctggctcttctttaatagggcaataaggatagcaattcacattcaggggattagtttcaccataccacacatttgggggatggcaaaaacggggtctaaggaaaagggagggtgtttaagggaaagaggagggtaagacccttgcatttgtagaagtcattactatttctcagtagtggtcatattggctttgccggcaacctcaggatgggattagagaaagaaaggagcatgtcctatcttagacacctgggtgggtggctgcctgcaaggagaaggaggcttagggacacatttcacaagaaaccagcacccacattggtcagatgaagcttcctcaattttcagccaccacttacacctttctgtaccggctgcaagaggaagaagaaaactaaacttataatgttgtttggcaaggagagattcaaacttaccatagtcaaaagaatctatgttaagttagtttgcaaatacaccatgaagaattcaggtacattaagtttctctagcttcctcttatctttctgggatttgccctgcataaacacagtcctctgcccaaacaatcccaccaaaacaggtcctcagaaaacaacttcatgtttcactcgtgcgcagagtgtctggcttcccagaaagccttaacataacagagaaccaggttatgcccggacagctcagccaaaccacaggaccaccacccaagttttgggtattcagctgcctataaattaattcttcaaattctatactaaaccaaattaggtcccaggcccttaaactcaagtagattcaaatcccagaaattatctggaatcattcccatactctagaagtatcttcttattcctccaaagtcaagctggacccacagatgacttccaaactgttgaaacaaaatttgccttcaggatcttaaggcagaggcacccagaaacctgataaggccaatctacaggacaggcaacatgcatgcttgca

SEQ ID NO: 317134 - DNA, 1379 bp, Homo Sapiens
ccagaggtagggtccgtcccagagtccccaggttgcaggtttttcccagttcgcggacgttggtgaaacgcggccaagtgcctagcttataataccgactcctatagggaccccttttgtaccagaagctgggtacgcgtaagctttgggccccctcgagggatactctagagcggccgccctttgtttttctttttgtttattgctgtataatacttttattaaagttttatggaaaaaacccacaacatttctgtatgtatcatatcatataatttccaggtgtgtcagagtccagtgacaaattacgtttgaagaacagctttaaaatccactcttgtctgccactcctttatgaaatattgaaaagcagctctgtacctcagcattaaaggttacaaaaagcaccattaaaaagaggactcacatatttaattcccttcaaagtagtcttatctctcctttctgacagacacagagctgcactcattcgaaatgctgccgtgtaataccaaccaacatgctccaatgtaccaaaattcaaacaagtctcatttatgagacccgtgtagtgattaggactaaccaacaacagtgagctttggctgtcctaaaaccacaagctgggttaggtaagtgttttgtacaggggaacagaaaagaagtaagatcatcaatacctaatatatgacttaatgtaggtatcccttgaccatttaacctgacacctacaaaatccatagtgtttagtatttcacaccaatcttactgcaaaagtgctgtgctacatacaatcaattcaagttaactccaactaatattggaactaataaaaaattaatttgtaacaaagcttattcacttcaaagcacaactgagaaaagcaaatccagacaaagcccaaactagaatcctagagggattccattgctaagaattggactctacaagtaatagacttgagtttttctcttttttcccttctgtcttataatttaaatttggctttttactctaaaagtttgggttcattgcagaaatcacagtccttccatatccaattgtgattggcacttaaggagagacaaatgcttagatccaaagagttttgaaagaccctaatggctacccctcccaggtcctgcattccatgggtaactggagtcagcagcccctggtagaagacagcaagaactgggctttaaggggaatcacaataatgcaggaatacactgtacatctgctattaagcccatgccccaaatcactagaacgtgagaatgtagaaatctctgagaacacaatgtatttcaaacacacacagagactattgcatatcatttttagttgaggtcaaaattattaaagccctatttccc

SEQ ID NO: 317135 - DNA, 922 bp, Homo Sapiens
  misc_feature (558)..(578): n is a, c, g, or t
tgcttcgtgcctttgcaaagcttttatttcatgtctgcggcatggaatccacctgcacatggcatcttagctgtgaaggagaaagcagtgcacgagaaggaatgagtgggcggaaccaacggcctccacaagctgccttccagcagcctgccaaggccatggcagagagagactgcaaacaaacacaagcaaacagagtctcttcacagctggagtctgaaagctcatagtggcatgtgtgaatctgacaaaattaaaagtgtgcatagtccattacatgcataaaacactaataataatcctgtttacacgtgactgcagcaggcaggtccagctccaccactgccctcctgccacatcacatcaagtgccatggtttagagggtttttcatatgtaattcttttattctgtaaaaggtaacaaaatatacagaacaaaactttccctttttaaaactaatgttacaaatctgtattatcacttgtatataaatagtatatagctgatcattaataaggtgtataagtacaatgtattctaaaactgttaagccccnnnnnnnnnnnnnnnnnnnnntatccaagtgtcctcctccaccactcacgctggtgatcactgtgctctctgccagctgcgtggagtgacgggaggagggaatcactgtgtgtgcgagagtgcttcagactcaatttccaaaataattttcacccctctaagcatgtaaatatacaaagatggatccttcatagaaattaaaaaatcaatttgagctcatttcgaatacagaacaagtatggcacagatggaagtcctgccacgtttcctttaatgatgctgactcttgtatcacacaggccagcatgaagtttcttactcagactttacaggcattttccgtaattcaatcagtcctgctcccc

SEQ ID NO: 317136 - DNA, 687 bp, Homo Sapiens
  misc_feature (87)..(107): n is a, c, g, or t
tcggattatcacttgtattataaatagtatatagctgatcattaataaggtgtataaggaccaggtattctaaaactgttaagcccnnnnnnnnnnnnnnnnnnnnntatccaagtgtcctcctccaccactcacgctggtgatcactgtgctctctgccagctgcgtggagtgacgggaggagggaatcactgtgtgtgcgagagtgcttcagactcaatttccaaaataattttcacccctctaagcatgtaaatatacaaagatggatccttcatagaaattaaaaaatcaatttgagctcatttcgaatacagaacaagtatggcacagatggaagtcctgccacgtttcctttaatgatgctgactcttgtatcacacaggccagcatgaagtttcttactcagaactttacaggcattttccgtaattcaatcagtcctgctcccagcacaacacaggaggtgattcgagaataatcgcgagaatcaggcctgcttggcactattacaactggggaaaacaaaccagggcgcctccctggttcccagcccagaatgtttctgttgggtaactgctttctaaaggaactgggatctgagggagttcctagacttggagcactaaagacaagcgtggcggggctggcagcgcccgctatgagcacccctctgccttggtcctg

SEQ ID NO: 317137 - DNA, 2039 bp, Homo Sapiens
  misc_feature (149)..(157): n is a, c, g, or t
  misc_feature (229)..(285): n is a, c, g, or t
  misc_feature (1950)..(1968): n is a, c, g, or t
ggcggtaccggtcccgaattctcgggatatcgtcgacccacgcgtccggtgacttgttgaactttttaaaaagtgctacttttaaaatcccagatactctgaattttagaaaacaaactaattctgattgtgtcgtgcccaagtacccnnnnnnnnnaatgaatagggaccaatgccacattgctttttatatttctttcttttttaatgttgccaaaaccaaaagtannnnnnnnnnnnnnnnnnnnnnnnnnnnnnnnnnnnnnnnnnnnnnnnnnnnnnnnnccttaatttgaaagggacagcactgtgtatgtttataaactaaatgaagataagatattattttgtataaacattcatctgagaacaatcaaagcagtagccacatggtgctggctcctttgcagcacaaacctggtcattttgatgactgtacaacaggaagacttgaaaaatcacgtggattcatattaccaccgctctcatttcatggagtcttctgatcaaaaaagctcacgtcgtatttcttcttttcctttctcttttctagaaattgggtgtttgtaccagaatggaattttgcttctcggttatcctgtgcttcagatgattataatctaacccaaactagcatgtgtttctgcagtttgttacacacctaggatcatattgcattcatcactttaaacatcatgtttcaggttttggtcaatacttgacaagggtgcccaggacaggaagacgtgtactgctgagtgttccttcttgcccttttcagcagcttgcccagctcttgagtacagtggtggggactaaaaatgtgggcatgtggagaggggtatttgccctgggtgatcctgtttccctgtgctgtccccatgctgtgttggaggaggaagtggctctccttccaccaacaaagctcctgctctaccctcttcctcacatgtgctgcgacctctctcagggctcccccagccattccttctttccttcctgccttttagctctaaccacattaagctaagacaaggccagagggtgcgattgaatgagtattgagactgaggagaatgatagagagtgaagcagaaacaggagcgcagacctctgctgtagctttaatgcatacaaacatgtccctccgcacaactaacctgccctgcctctccatctcgcaccaaggctgcgtcaaagcacagaggctccccggactcggagggggccagagactgagctctggtcacctgttcattcctcggttagctggaactttgccccgtttccagtttcttatagtgcatgcttgggaaacaagatttaaggagcctctgttttggaagggctgtctgtgattgaacgtgaaatgtgtagtgccattgggaccacgaagggaattcttgcacatgctcgtgctggtgtgggcatgggactggctggaaacgtctgtatgcagggagccagggtgagggcagagtgtggtgacagccgaacttggagtaatgtccgtgtagaaaaaggaccatgttcttatccagccaatactgggagtgctgtctccacaatttcagggcatctgaatgtttgatgtggttttgtgtgtgtgtatgtatgtgtttaatattgaagtggatcatgagatgtaaagaaaacaataatggcaatgacttatattcaaatctgtatttgtttctttatcaatgtaatctgctgaggaccttttgtctaagattcagtagtgttttaaggttctgatatcgaattaatgaagtaaagttgttgatggtggtgaaacaccgtagggcatgtggttcaaagagaagcaggagggcaagggacagttaccctgatcttagtttgtagcttatgacttatttactgaatggatgcccagccaagctcagagtaggcgccccaagcattgtggattattttcctgttttgtcnnnnnnnnnnnnnnnnnnnaagccatgacgatcccagaagaggacagtgaattactcctaggtcggctcttatagagtggccatagtgtt

SEQ ID NO: 317138 - DNA, 1306 bp, Homo Sapiens
  misc_feature (467)..(477): n is a, c, g, or t
  misc_feature (1004)..(1023): n is a, c, g, or t
cccgtggaggatgtcttctcgctcagcgcattattctcccgcacaaaatgatatgccacacacaatagggttgtgggtttgtgcgatgacgaaatacaccaggcccccaatatttccccccaaaaaggggtgttagtgagaagagaaaagtggtgttttgtatgtgagaaaacagatatcaatggggtggggtagttccccacccgatggttggttttgaaagcggcgcggcgcaaaaaggggagaaaattttgttttttccccccgcgttttgttccccccgggggcgaatatattttatattccacacaaggcgcgccaaaggggggttggagaaaccgcaccggcggggatttcgaggggtctcaccacgcagccattgtgtgagaggggtttccccactttgcggccgaaaaatgttttaaaggaaatttttccacccctttcctcccaataaggggcccacnnnnnnnnnnncgcttaaatttagtattaaagggcttcgcctgggggccccccgtgggaagaatcccccggaaagggccccaccagaaccccctctggggattttttttaagaaaacctcgtgtttgccccccggggggggtttttttatttggtggggaataccaacgtccttgtgtcttggcccaggttcttctttggagaacagttttgggcccagtttccgcttcccttttgggggccgcgggcgccaaaaaaaattgttttaagaaaatttttttgaggggggagggggcgccacaaaagaattcttattttgaggatcgcgctacgtggttgttcgggtgggtcgcggtgtgattcggaggcgtccgccgagtgatgacgggtctgctttgttgtcttggtgtttgtttttttgtaatcaatgatttttatctctgaaaatggaagcaagtgttttgacagaacactatggccactctataagagccgacctaggagtaattcactgtcctcttctgggatgtcatggcttnnnnnnnnnnnnnnnnnnnngacaaaacaggaaaataatccacaatgctttgggcgcctactctgagcttggctgggcatccattcattaaataagtcataagctacaaactaagatcagggtaactttcccttgccctcctgcttctctttgaaccacatgccctaccggtgtttcaccaccatcaacaactttacttcattaattcgatatcagaaccttaaaacactactgaatcttagacaaaaggtcctcagcagattacattgataaagaaacaaatacagatttgaatataagtcc

SEQ ID NO: 317139 - DNA, 889 bp, Homo Sapiens
tctgtctttagctcttccagaaagaggaaaacacacggcacagaacctgaacgtgagccatattgacaggatgaccaacaattaatggcctcccttcagcattccaagaatgggagcttcagcaacctaagggagcagcatccctgtggggtaatggttagggaggtgggagggcacccattcaggagaaataattaggagtcagatatgggagaggtgagaagggagttgagcacattctgcttgggaaatacaaacacatgctcttttgttaattacgtcttgtgcataaaaggaaactttccacatcgttttaaggctgagagccaggccttgacctcctctgtgtgcccagtattagcagtgactttgctgggctgtggtggagcaggacattaaagacaccagtgactgtgcacattctcctgaatatcagctccatttagaacacatattagattctaaaaatatactcttaaatttgttctactcagtcttttgaaatatttcatacattcttaaaggcacacttactaatatataatatctgagagccattacgtgttgtccaattaatttccaaattgcgcatacatctcattatccacaatttcaaaactcttctgtaaacagtgtatgtcaatagcatgatgctttcaaactttgtaataattattcctgaaagttactaaagacacctaattgtttgtgtagtttgtaggggtacaaatttaatcagctagtcaagaaaataaaatttcattccagacaactttttgaaaagttggaacaatgttatgggctactggccaaagcactttgagactgacaggtgtttatgacctgtgcacattttccagtgcttttaccctccactgatttaacccca

SEQ ID NO: 317140 - DNA, 730 bp, Homo Sapiens
  misc_feature (33)..(33): n is a, c, g, or t
ccataccgttttccaagtcaagaatgaccaganagagtaggtagtctctcatatgtgtttagcatgtccactttttacttattgttaaattactcagtctcaaattgtacaatgcttgaaaccagatatgacaatttctgagattaaactttattaaagttacttttccagaaaattcagtaaatatggtaatataggaacaaacttaggctcataagccttttaactttttacataatctttaatgatgttgatcaggaaattctttcattggtggaattacttctccagtctccagaattgtatcaccagggaatattctggacttcttttcaactatgccatatggtttttcagaaacatgatacttcatgtaataatgaataatccagacaggtacaagtacatgagtgaaaacaaagatactctttttgtataccccatggaccattttcctccaaggggatttattctccaaaaatttattccagaatttctccataggccccatcttctgtgggggcagcaccggctcccgagggctcagctcctggtccttcagccatcgccttctcagctctcgcagctgctgcagccgcagtttctcatccggagtgtaccccgtcatgtcgccgctggtaccaacgcaaaaggacacggcgcaccctcgaactacggactagttacttaagcgcgctcccgctctgcaaagcgaccttgcgggaacccc

SEQ ID NO: 317141 - DNA, 638 bp, Homo Sapiens
tgagccactgtgcctagcccctagtcattttctctacatatacacacttacccacaataggattctactggatccactgtcttataacctactttttctatttaatattatactggtgacatcttcgtggtattaaatattcttcaacagtgccccaccccacccatcactcccacagctgcagtatactcttgtgtacctcacttctcaaaaggaggaaaagctcttactcgtggcttaaagtgttctctttaataataataccaataatattcactgaaaattaaggtatcaattccaaaggcgcggcacataccaatttctcaagaatcagcataagcatactctagaattcaaggtcaacatgggaagttcagctccctgtagatgtagttcaatccaagagccacattcatttatcttctggtgttaacaagtgaggaggaaatacagtctgaagcttaaaaaccaagttactgacaataattacggctgcatccaattgtcacacacaatgcatgaagcacaaaaggaatgagagcaaggaggagaatacaaagtgaaatgattcagtcgtgctttttctttctcttttgaaatgaggtctcattctgttgcccagactcgagtgcggtggt

SEQ ID NO: 317142 - DNA, 908 bp, Homo Sapiens
  misc_feature (15)..(15): n is a, c, g, or t
tgaaatcagcatgtntttatctggatcttgatggctactggaagacagcacattgcaatgaaagtttttactttctctgtaaaagatcagatgaaatccctgctactgaacccccacaactgcctggcagatgcccggagtcagatcacacagcatggattcctttccatggtcactgttactatattgagtcctcatatacaagaaactggggccaagcttctctggaatgtcttcgaatgggttcctctctggtttccattgaaagtgctgcagaatccagttttctgtcatatcgggttgagccacttaaaagtaaaaccaatttttgggataggattgttcagaaatgttgaagggacgtgggctgtgggataaaataacagtccggtctcctttgttcaactgggaacacaggagatccctctggtgaacggaatgattgtgtagctttacatgcgtcttctgggttttggagtaatattcactgttcatcctacaaaggatatatttgtaaaagaccaaaaattattgatgctaaacctactcatgagttacttacaacaaaagctgacacacggaagatggacccttctaaaccgtcttccaacgtggccggagtagtcatcattgtgatcctcctgattttaacgggtgctggccttgccgcctatttcttttatatagaaaagacgtgtgcacctacctcaagagggcgcctttgaaaacactctgtattttaacagtcagtcaagcccaggaactagtgatatgaaagatctcgtgggcaatattgaacagaatgaacacttggtcatctagtacctcaatgcgattctgagatatttgaatttcataaaattgtaactgaaatttaaaatttttagttcaatgtgattggtttcttt

SEQ ID NO: 317143 - DNA, 1461 bp, Homo Sapiens
  misc_feature (398)..(408): n is a, c, g, or t
taggtttctccagtacaatttattattattacattttagcttgcatttactaagtgtcatggaaatattatactcaaaataacagagctccagagaaagacagttaactaagaaagaacagtttcactttcttagcttgtcaactcctagttagcctgcttgcctccgcaccacagatgcttgtcttcttgtggttgttaccacaagccaaagcttgaatttacatgggcatcaggccaagtctgtaaatccgtgaagacaggccatcaactgcattgagggtacagccttgctgaagggtcctttcttgacagtcaatgatgatgaatctggaaaaactgtctattctcttaggagaagaaaatataccccacctaaagtcgcagctaccattaacnnnnnnnnnnnttagcaaagggaaagaatccaatggtaaggacagtaaatatactctgagaatagagtaagtacaatttacacacgctggagtaaatagtgaagcttctactgagttctactgagtctaagctcttttatttttaaaattctgataaaaatttactcaattacattttatacattaatatttagtgaatttgtccaaaaaggctatgtttaatttatgtgtaaaaataacaaaagatgtatcagtcagtctctgggcaataagaaaggaagaaagccttgctagaaataataaataatctcacgcaaaaggccaggtgacataagaatactacaataatcaatatgttttctttgtatttacaataaaatccatctgttaacactgtgatagaaaaaataatcagtccacatcatgtaataaaaacaggctttgaggatgattatacctcttataataaaaacatacaaggatttctcacagctaaagtacttttcaactttgacaactaatgacagtcatgggtgaaggtaaaactgacagagtactttagatcagctatgtcctacagtcaaggaatcaagggcattacccatttaccaagcagcaaaaagcactttcatttttccagaactatttaaatacagtagttgccatgtgatcagttaattttactttgtgagttagataaagtaaagactaaattgggaaactgcaataagtaatcaaaagtagctccaaacaacaaagccatcaatagaaacaaaaggcatttttctaggtgtatcatgcataaaaagaataattacataatattattaaatatattccttaatgaccagattaataaatgaggtaaaatttagtcattggaacaaataaactatatttaatcacttgtgttttgctgtcactgtttaaaataattaacttaatgtctaaaaactacatactcttgaatgtttgctttttagagccccttgtgggatattaaagagccataacaaattatctgaatataaattatcaataccaggctgggcacagtggctcat

SEQ ID NO: 317144 - DNA, 585 bp, Homo Sapiens
  misc_feature (70)..(70): n is a, c, g, or t
  misc_feature (78)..(78): n is a, c, g, or t
  misc_feature (497)..(497): n is a, c, g, or t
aaaaaacaaaatccaaatcctaagccctttccaaaggttgcctggaaaaccaactccctaattgcaaaancccaacanttccctaaaactccctaattttgttttgtttgccttgtaagaaacagccatagaagaagatgtaaagtgcctaaaatgcccaaggaatggctttggcaaaaccagtaaaggcgcgcccgggtcccgaggctaccctcatactggtgaaaggcaagaaaaccacaggatatttacaacacacattatatccccctcctgaggtggcccttccatgagtttcttactctgtaacagcagctatatacacactgtgcccagggttacatgaaggcagcagtcttgcatgaaggatgtggacaatcttaaggttctgcgttttgctagtcagacaggatatgaacaaaggacactggaaagacccccttcctttcaggctgtccttcgatgtggccaatccaccactcctggtcctcttcccntgtgacgataatcacttctccctcgatgaatgtgagctcgtcatcgttgtctgcctggcagtcataaatggtcttcactcgcactcac

SEQ ID NO: 317145 - DNA, 379 bp, Homo Sapiens
ttcctaaatgtttcaatgccataaagcttacattcccttgaagcagagtacaggaacccttagcaatatgctaccatccagtaggatataaatataaagaatctgtatcagcaaggtatgctcagggaatgtgtttgcagcccgtttcacggtagccgcttgagaggggatattggaagtgagtgactttctttgaaggctgcacagtacgactctgggtaccgtgtgtacatacatatgtaaggaataacgtttatgttgctcagaataggcactttttgaagccagtaaatctaaaagtaaagttaatagagcctatatttagtgctcatcttctcactttgctgatgtgtatgctgaacagaagatcacagatttg

SEQ ID NO: 317146 - DNA, 1012 bp, Homo Sapiens
  misc_feature (10)..(11): n is a, c, g, or t
  misc_feature (17)..(17): n is a, c, g, or t
  misc_feature (22)..(22): n is a, c, g, or t
  misc_feature (31)..(31): n is a, c, g, or t
  misc_feature (37)..(37): n is a, c, g, or t
  misc_feature (48)..(49): n is a, c, g, or t
  misc_feature (55)..(55): n is a, c, g, or t
  misc_feature (61)..(61): n is a, c, g, or t
  misc_feature (65)..(65): n is a, c, g, or t
  misc_feature (75)..(75): n is a, c, g, or t
  misc_feature (79)..(80): n is a, c, g, or t
  misc_feature (91)..(91): n is a, c, g, or t
  misc_feature (94)..(94): n is a, c, g, or t
  misc_feature (100)..(100): n is a, c, g, or t
  misc_feature (105)..(105): n is a, c, g, or t
  misc_feature (130)..(130): n is a, c, g, or t
  misc_feature (149)..(149): n is a, c, g, or t
  misc_feature (161)..(161): n is a, c, g, or t
  misc_feature (164)..(164): n is a, c, g, or t
  misc_feature (167)..(167): n is a, c, g, or t
  misc_feature (178)..(178): n is a, c, g, or t
  misc_feature (214)..(214): n is a, c, g, or t
  misc_feature (233)..(233): n is a, c, g, or t
  misc_feature (250)..(250): n is a, c, g, or t
atttttaaannggtttngtttnccccctcgngacganaggcaagggtnnccccancacctncctncccagcagtnacanncatccccactntgnctggcntgaanggtttgaccagagcggatcatgcantgaccagggccagggcggntggcaggggcgnccnccntttccattctntctcctaagcagcctgggagatgtgggcctaagctncggtgaggacgagagtctntcttggaattgggcctnacaggggagagtccagagacagggccaggaaaagaaggtgagggtgtaacgtcattcagagaccagctgcacccagggctcacctcctggaggcacctagagtgagcagggggctaagtcagccgacagtgtggctgcacagcccaggcctgtcccagcagaaggcatgaaccatcagcaaatgagtctcttttccaagaaacgaaaaggtcttgttcagagccggggccttgggagtgtcctgatgtttcaaccactgcgccctgccttcctgtctcgacgcccagggttccaactccaaggtggaatggccaacgtgtggcctcagtgtggtggccgtctggggtgggtgtgggctgcccgcctagtgaccctgggaggcagaagtttctttgcctttagggacaaacttcagcgagctgctgaatattcagaatcgggactgccccggcttggggccgtcgttcaggaactcgtggcccaacccattgccacacttgccacaggacaccttcaaggcttcagatctattgtgctccggacgcttggccacgctgtcggcgtgaatggtctcggtgaacgccggccatggagacgagtgtgcatacttcgagcggctggagaacagctcatagccacacttggcacacacgtaaacgccaggttcaaagtgattctggaaaacctcgcccccgaagaagctgcagaacgacatggcgccaccggaaccgcagcgcgcttgccgctgccaactgaccaaag

SEQ ID NO: 317147 - DNA, 1133 bp, Homo Sapiens
acatctgaatgtttcatttgtctatggatttccacctgattactccagaaagtaattacttaagatggggggtgatttcagcatcacccaccctcctatatggccaggcctccgagcatgtacagtaaggcacagtcaccacaccttgggaagggcctccctgcaggtgtgcactgcaggcctcagccctgtgctggttagagttatggagcaacagccgctttcctaagcagaagtgaggcaagctacttccgcacagattgtgaaacagggtttaggtttctcccctcgtggacgagaggccaagggtgtgccccatcagcctgccttcccagcaggtcacagaccatccccactctggctggcctggaagggtttgaccagagcggatcatgcagtgaccagggccagggcggctggcaggggcggcctccgtttccattctgtctcctaagcagcctgggagatgtgggcctaagcttcggtgaggacgagagtctgtcttggaattgggcctcacaggggagagtccagagacagggccaggaaaagaaggtgagggtgtaacgtcattcagagaccagctgcacccagggctcacctcctggaggcacctagagtgagcagggggctaagtcagccgacagtgtggctgcacagcccaggcctgtcccagcagaaggcatgaaccatcagcaaatgagtctcttttccaagaaacgaaaaggtcttgttcagagccggggccttgggagtgtcctgatgtttcaaccactgcgccctgccttcctgtctcgacgcccagggttccaactccaaggtggaatggccaacgtgtggcctcagtgtggtggccgtctggggtgggtgtgggctgcccgcctagtgaccctgggaggcagaagtttctttgcctttagggacaaacttcagcgagctgctgaatattcagaatcgggactgccccggcttggggccgtcgttcaggaactcgtggcccaacccattgccacacttgccacaggacaccttcaaggcttcagatctattgtgctccggacgcttggccacgctgtcggcgtgaatggtctcggtgaaccctcgtgccgaattcgccacccaggcctcgctac

SEQ ID NO: 317148 - DNA, 761 bp, Homo Sapiens
ttgtttgtggcagcaactcaacagattctgctgctgggaagggcctcagcgttcctgaagagagatgtaggggacccactggttgttgccccggctttcttcgcagtagctggccacttccaccaagccgtggctcttccaggcgtccgtgtgagggttcgtgaccaggagacaatgcaggtctcgggcctcggtggtgccctgggtctcggccggctctcccaggagctgcgccaggcgctgcatgcccgacacccgcacgatgttgatgtcgttgtcacagcagaaggactggatgagcgtgaagtggatttgcagggcgatgtcatcctcctcctcctcgtcaatggccaagaggcagaggaccacgctgtctgggtccacattcatcaacttggccgactcgtacacccccactgtgaggcgatcctggcgctgagcggccaccaaaagctcctccaccgcggcggtcaccgtctgcatcttctgcgccgcgttgtcgcacgccacgagctcttccagcgtcatgttgcaattataatccacagtggatgcggctccacggcagtccccagggagaaattgcaaaatccgagccagagagcccaaaaccttcccacagagctagagcgctcgtccaagaccttcgggaagcagcgaaatccttccagaaaaggcggaaaaatatattgcaaagtccttggcgaggataatccaggaagttgcggaaaccaacggtagtccgacgcttcggcgatctg

SEQ ID NO: 317149 - DNA, 1043 bp, Homo Sapiens
  misc_feature (45)..(56): n is a, c, g, or t
  misc_feature (153)..(153): n is a, c, g, or t
ggcggcggagtgttttgactcccccccatatttcgccccgcacannnnnnnnnnnnttcttcccctggtgtgaggggaagagaaaggtttcctttttttgaaggggcgcggaccttctccgagtttaagaagagggctctttctttcgccggntcgtggaagttcgcccacgccaccaatttccaaaggcccttttccacattttggtttgaacctcgttttccaccccaatggagcttccctgtttgggggagaaaaaaataaaggggcccgcccctgttcctgggtttttttcggcccccaattaaaggggggagggcccgccccagtttgtcccccccagatgttaagaagcgccccaagttaaaattttaaatggggaaggttcccacagggggcgggacaaaattggggcccaccaaaattttttctgggggagacctttccaaaaaggggtttttcttcccccttaagtgggaaaaaggaccaaattggaaaatcttaccatggtagggcatttcccccagttccaaagaattcaaaagaggaatattttcccccaatgacggtctcccaagcccccagaaatataaccacccattgacattactgcaggtggaacggcagtaagctgatctactactgtaccatgatgtaggatcagggaatgttctcagaaaccactcatgaaaaataggaggatgcctgggcaggagaaattctcggaatactttgagtttttcagataaagctgctgactttggtagcatacactggcgaagttcttttcctgtcatatacactccttattaatcaaggaattgaattccattagtctacaatcctttctcaggtcatcttttggcttacacatcatgatgtagaactttccatctgagccttttaaagaaatcttctttggtttctgaagagaagcaagaatttccaccatatcatcaaaccctgcaatataggcccaattccagctcgtgccgaatcgccacccaggccccgtacctaggaagtatacgctcgttgcaagc

SEQ ID NO: 317150 - DNA, 381 bp, Homo Sapiens
cttgaaagaaacatttatttatgatctttattggtgaaataatttcaaacaaatccagaacaggttctcacactttgagcctttagtgcaaaaacactatgccatgcgggaaataaaatgcttatccagtggagcgctcccctgatgcattgaaatattaggatacttaggcagaagacgacttatgtgacagaaatctgctcataaatctgcttgaaaaagggcatgataaacctcatattaagggttctcacaacataaatatgcttaagcaacttaattccaacttaatttcaaaacaccccaggaatcaactatccctttaaataaaaaaaataatcactcgtgccgaattcggcacgagcgcggcttgttattctt

SEQ ID NO: 317151 - DNA, 429 bp, Homo Sapiens
ggcagattatggcccctcctatatacatccttatgccaatcattcaaataaggtgtaacaaacatctgaagcattccttaaaagagggaattgccaaatacatttcgcctaaagaatcaaaatgctaaaaacattttcaactacgttgggtaaggatttattaagtatgggcccatacttttttaaaacattggccttttaacctgaacattggagagttaagagaaaaataataatagccagatttttccattcagtgggagccttgtacagaaagagcacttgaactaaatgtggagccaaataatttaggtatacatttgaccttgaatttgttagctacaatgaggctgaggacaaaccatctgatctctgtaagcctcagttttctcatctaaaaaatggatttcagccaggcacggtggctca

SEQ ID NO: 317152 - DNA, 719 bp, Homo Sapiens
  misc_feature (16)..(16): n is a, c, g, or t
  misc_feature (142)..(142): n is a, c, g, or t
tatttctcctttctcnacatcatatatgctttagaggtaagagaatcaaggtatctttatgcttatttgcacaaaccccaatcaagggaattgtgtcttccctcccccaactccgggatataattataccatgatatccacnactcccagtcacccccttggcattgtgtaagtccaggaatattcaagtcggatttgtcttttggattcctcatttttcctgattatccactcacaagatgactcagttgggaacttgaccatgattgtagtgctttctggctgggctccttccctcatcgggaagacagtgtgaaaagtaaaaaatactgaattctcttctggcagtgtgggtcatatccactgtctgggatttaaaaatgcctcttcatgtgtaaggcgaggtggtccgacctggaaaatgctcggtcgcatttttggcactggaacgggcggtgccccgtgtgtttacggtagtgcctggtcagttcatctgagcgggcgaatttccatccacagccgtcccagtcacagtggtaaggtttctcacctgtgtgggttcgcaggtgtgccttgagatgggcactctttgtgtaggttttgccgcagcccgcgtaatcacaagtgtgggtggcggtccttttccggggccacgatcgtcttcccctctttggcttgggctcctctggcatgcaggaaccgggtggcatgagctcttg

SEQ ID NO: 317153 - DNA, 362 bp, Homo Sapiens
agtcattcaacgtcaactattaaatattcagaaactttttacaagagaattgcaacatgtaagccctctggcaggaagagatgttactaatctgttttgtgtagagagaagtgctggctgacactctgcaaaacggagctgagctgtcagttatatgctccttcatatattttatcaaaccaagagtttaagtcctgccctataaatacctgtaaagcatctagtgtaaccactaccccaacctttcctgcctaattcttttgcctcttcgtggctccttttatcgggacttaaattggaattatgtcctaattttcagagagagaacattcattcattcattcagcaagtttccagtattg

SEQ ID NO: 317154 - DNA, 662 bp, Homo Sapiens
tgagccaccacggtcggcctattttgagcatttctttgtatgcttgttaggttgttgggagtcttagaaattattttaattctttgtctgtttttatattagtattactttcttttttgaactgattttctcatgtttcatgtatattctacatgttgatttcttgttgacttcatacatcgtaagtaacttctcccactttgtcatatgtctcttactttgttcatggtctctgttgaactggagttgtgtgaattcatagcacattgaactctctaaatttgttgtaatcagtctcaccagttttttttgccttacggtttgtatctgcaaagttttgactaactcttggtatttaacagaaataagcatcaccattaaccatttgggtcaaatagacctttttgtatttttatatttataagctattttactactaatttatagacacatgaataaaagtattatgaaaaacaactctattagatattttaataagaattaccttgtacatctctttgtatcaggtaaattttggctcacacacataaaagatgaaagagtactgtgatgtgtcctttgacataatgagggggtccagatatgggtgcggatattatatgatgcagcccttactggggtttctttttttcctagggata

SEQ ID NO: 317155 - DNA, 849 bp, Homo Sapiens
  misc_feature (185)..(187): n is a, c, g, or t
  misc_feature (208)..(209): n is a, c, g, or t
  misc_feature (212)..(213): n is a, c, g, or t
  misc_feature (215)..(215): n is a, c, g, or t
acccccctttatgttcacatgggcccccgaggggtgtttttccttataggagaaaacccaagtcttattggcccccatggtttccaccttacccctttgggggggcccgcggggcgccccaaaccggaattgggttttggaaaaagttttcttgaaggggcccgagggcgggccgcacaaggggnnntttttttatttgtgtgggatnnccnngnccaaaaaagtgctctttattggcatctgaaaaagaagtgcctcagccttcaaggctgggacagaagttggggaggagctgctctgccccaggctcaataccaatagaccttcttgtatttccgggtctccttgatccccatggcctccatcacctcctcctgcagtgtctttagacagggcacataggttctttctaaagcatcttccactgatgtgtctttggggccatcaatccacgtttcagggacgatgccatcagctctgggaaattcgggtttagggataattctccctgatcgtgtggagactcgtacccgctctcctgcttcagtaaatctccactcgatctcagtgggtttcctgtccataggatccacaagtttgacctggcggtggagcaagggggcttcactagggatcatggttccccggtaatccatggtcttgccaatgtagcggtaatgtgtgttcagccctcccacgaccacccagtttcgctgccggataacttgaaccactttgccctgcttcccggcatccttgccttctaggatctccaccgtgtccccacagaacagataccagtcttcatcagagatgggttccacaaccactgggcgccgcctgatcccc

SEQ ID NO: 317156 - DNA, 755 bp, Homo Sapiens
  misc_feature (68)..(68): n is a, c, g, or t
ctccctccctgccaggtgtcttttagaacaggggcacatagggttctttttaaaagcatcttcccacntgatgtgtctttggggccatcaatccacgtttcagggacgatgccatcagctctgggaaatttgggtttagggataattctccctgatcgtgtggagactcgtacccgctctcctgcttcagtaaatctccactcgatctcagtgggtttcctgtccataggatccacaagtttgacctggcggtggagcaagggggcttcactagggatcatggttccccggtaatccatggtcttgccaatgtagcggtaatgtgtgttcagccctcccacgaccacccagtttcgctgccggataacttgaaccactttgccctgcttcccggcatccttgccttctaggatctccaccgtgtccccacagaacagataccagtcttcatcagagatgggttccacaaccactgggcgccgcctgatccatggggggttcttcctcttgtctgcaacagagcctggggggctcatcccatagcggtaatgggggggcagagtgaccttggatgccaaggccagcagggcagaaagacgcatgcctggaggttgtaagaaatccctttgccagcaaaacgctcgaaaccttccttgtcagctctgcctctcggacgggcacctctagggcgggcggccctcacctccactttccgcggcacttcggattttcagcacatgggccctcagcgtccc

SEQ ID NO: 317157 - DNA, 816 bp, Homo Sapiens
ggaagaaggctggttttggccccaggggttcaatacccaataggcctttcttggtatttcccgggtctccctggatcccccatgggcctccatcacctcctccttgcagtgtctttagacaggcgcacataggttctttctaaagcatcttccactgatgtgtctttggggccatcaatccacgtttcagggacgatgccatcagctctgggaaattcgggtttagggataattctccctgatcgtgtggagactcgtacccgctctcctgcttcagtaaatctccactcgatctcagtgggtttcctgtccataggatccacaagtttgacctggcggtggagcaagggggcttcactagggatcatggttccccggtaatccatggtcttgccaatgtagcggtaatgtgtgttcagccctcccacgaccacccagtttcgctgccggataacttgaaccactttgccctgcttcccggcatccttgccttctaggatctccaccgtgtccccacagaacagataccagtcttcatcagagatgggttccacaaccactgggcgccgcctgatccatggggggttcttcctcttgtctgcaacagagcctggggggctcatcccatagcggtaatgggggggcagagtgaccttggatgccaaggccagcagggcagaaagacgcatgcctggaggttgtaagaaatccctttgccagcaaaacgctcgaaaccttccttgtcagctctccactttccgcggcacttcggattttcagcacatgggccctcagcgtcccctcccccgccacccc

SEQ ID NO: 317158 - DNA, 710 bp, Homo Sapiens
  misc_feature (28)..(28): n is a, c, g, or t
  misc_feature (39)..(39): n is a, c, g, or t
  misc_feature (52)..(52): n is a, c, g, or t
  misc_feature (88)..(88): n is a, c, g, or t
  misc_feature (95)..(95): n is a, c, g, or t
  misc_feature (100)..(100): n is a, c, g, or t
  misc_feature (151)..(151): n is a, c, g, or t
  misc_feature (251)..(251): n is a, c, g, or t
gggaattcaaggggctgctttttcaatnaaaagggaaantccttaccaaggnacttccaataccctaactatctgcccgaagtaactnctttttnaactncctatatcactatggttctctgaaggttgtcaaactggaagctgcggagcnaaggctctgacagcctgtggttccgtgagagaggaaggcaaagctctcctatgcacatcacctgtctcctctgtctttggtggagaacactagcatgggngctgccgggagcctcccacggtctctggatattccaacacccaggcggagatctgtgaccctttcctcactcccagtgcatttcatagacatcagcctggcatcaccggtttcacagctccccagagctctaagggacattgcctaattgaatcctcactgcagcccatcaggcaaggactattttcccttatctcccaagaaaagagtgaggctcagataagccttgtaaccagccccaaatccacagctaatatatatctgaagcagatttgcacttacaccaagaccctctggtaccaaagccttgctgcttttttcaagatgagaaatggaggcccctgggaacgcctggaaaactgaggcaagtggccttgcacccatacactagggttcccacgtgctgctaatgatgcaggatgctggtgctctgtcccagcccctgcaactcaccccctac

SEQ ID NO: 317159 - DNA, 735 bp, Homo Sapiens
  misc_feature (109)..(109): n is a, c, g, or t
tcaatgagaactgagcccaaggggtgataggtccaaggcccagaagtagtacaactcaggctgagctcggtatatgtattttaaacacaagcaagtactatcagttttngctatcaatggctaatacaacctggcaaacattttgatatacccattcacacaacatcaacagatgtttcagagcatccaaagtgaaaggcccagataattaactcaattagaatttgtgtctcttgtgaaagataaagagctattctggggtccttttaagaagttcccataaatagatccacataagcaggctctgcgttgcagggccttaccgagctttcaagaaccgttggctgcaactgtggccaggatacattaaatgcatcctgaggctgaggccctgcagcctctgaaggcggccctgccagcccctcctcccacatcctatgcacaaccagatccatggtgttagggagtgaaagcagcatttcagttactcagtcacccactggtccctagaaaatgcctcttcagacacttaaaatcccctcattcgaattaagcactggcattaaaactcttaaagatgcgccctttttgtagggcatcggttattttgcatcacgtccagcttcacacttgctgaatatgggattgagtatgagcagctgcatccagttatgaaagagggagaaaaagaatagctccatttcttttgaattccaggtcttctgggagcacgtg

SEQ ID NO: 317160 - DNA, 869 bp, Homo Sapiens
  misc_feature (726)..(742): n is a, c, g, or t
gcccaggggaaaacccaggtgtttcttccatccccggttggggtttttattaagggtggaaaggtggatttatccaatttggatggataagccaggcatactctggtaggcaccaggcattccaattagtactttcacaggtccagaggggggatctttttcccaaaagattttttcactaaggaagggtatgctagcagtggcattgctcttgatcccttggtaagggctctttagcaaagaagacaagaacgtccccatcagtactacataataaagtgcaatggtgataggcagtagtccggccgatcttagaagctgttcctgagattttaaactgtccatcaagtaaaaggtcaaatcttttggtagcctgcacatccagctggggttggacagcattcagagctctcacaattaatttcagattttccattctatcatacttttttttggttgtaaagaaagtcaaattgatattacccatatcatggtagactgttcctcctccacttcttctccgagccagttttataccttcttctctcattagattcaggttacattcctgccaaggattttgatgcctaccaattacaacagagggagaattctgccaaaagaatagaattggtttgccttctagattcatatggtcatggatccagtcttccacagccagattttgatagacatcattggaaattgactgtaaaatgagcccannnnnnnnnnnnnnnnnaaagccagctgctgggacctggcagttacaaagtaactggaagcaattcttcattgaaaatgggatcagcatgctgggcgtggtggcgggcgcctgtaatctcagctactcgggactacaggcacgc

SEQ ID NO: 317161 - DNA, 1230 bp, Homo Sapiens
  misc_feature (176)..(176): n is a, c, g, or t
  misc_feature (715)..(891): n is a, c, g, or t
cccactcattttttcctagactttattaattcaagattaaataggcttaaggtaagccaaaagagatgagcgtcaccaacccagcgtaattttatcagtgtctaagccacttaaagttattttccaaaaaataagttattcacccaaggcaaacaaagaaagttggaattgaatcntaggtttttatattttaactgtcaggtccacaggaacatccaaggctcaagttttgaatgtctacatgtcatgaagttaactatggcactagtggaatgtcgattactgaagatgaacccctagacacattcagcaagacattcaacttgcagaaggcagggaatttggagtggtacacaatcagataacaaggtttcaagctctagtcaaagacaagatgatattatacctaaataacaatttctaaggaacttgaataacaatctctaaggactcttgtcactatatgaagaacttaagtttatgactccacactcttaattaaaaggacagccacttaatcaattttctgcagtgaattattagactaacttcctagcatctggagattacagtatgttccaccttgaagctatcacaatcaagaccattacctgacatgcattcaacaaatattcgatgacaaacaaagtataaggttaattgttacagaaagttaggtcttctaacacctaagtgttaagtggactcaatgttnnnnnnnnnnnnnnnnnnnnnnnnnnnnnnnnnnnnnnnnnnnnnnnnnnnnnnnnnnnnnnnnnnnnnnnnnnnnnnnnnnnnnnnnnnnnnnnnnnnnnnnnnnnnnnnnnnnnnnnnnnnnnnnnnnnnnnnnnnnnnnnnnnnnnnnnnnnnnnnnnnnnnnnnnnnnnnnnntaccttataacttctcctaaatcacttttggctctaccacttctattcctatatggaagctgaagtatgttattactgctgttacatgactactcttctacattctggttctatttctgctaaattattcttacagtttttatcaacttaagttttttaaaaaactgcctttttagaactctgaaacagtatttaaaaattaaatttaaaaaattttaagttttgttcatcatatacaataaaattctgatatatgatgttagacaaattattagtcaggtaatttctgttcacctagtatcaatgctataaagaggttcaagtgaactttctttagtg

SEQ ID NO: 317162 - DNA, 806 bp, Homo Sapiens
  misc_feature (226)..(267): n is a, c, g, or t
  misc_feature (774)..(774): n is a, c, g, or t
cgtctttaaatctcttatttcaccctttttaactttaattcctttgtttcttttacttcatcttttttgggctttttggactcctttagttcttctttggcttcagaaattcttttctttgtccttaaatcaaaaactaaactttccaaggagctctccaggtctggtttggacttgtcttttagcttcccggcctttgcttttttctttttcagatcatctgggnnnnnnnnnnnnnnnnnnnnnnnnnnnnnnnnnnnnnnnnnnggggaagtatcttcttttgtctcactttgctgatcgctatcagagttcgcctcaaatatgtcgttatttaaggatagtctctgaatatccttcctgactgctttggctttgttctctgcaattttcttcctaaattcaagaagcacttctttacagtcctccaggtgaatctcgggctcccaggtatcatcatccgatgtatagcctttccagcgaactttgtaaagaactttacccccctcggtcttcatgtccaggatcttctccacctcgaacacatcctctccgtcctcctcactgtcgccaaaggcctccgctcctctcgcggctgcgtcattatcttcgcccactactccaactccttcttcgacttcggccaactcctcagtgctgtcggcagctgacacagggactgcggtcacccttgctccctccgcaacctgctccatcctagcagctccgcaaaccgccgaggaaaacccgctgcgacaaacaccccagcagccnccttgcttccgcgctcggccctactccacatc

SEQ ID NO: 317163 - DNA, 877 bp, Homo Sapiens
gtagcccctgtttaaactcttgaaccccagtcacagttttccagaagtccatcaggatagaattttcactaatcgccaaatgcccaaagcttagttctttcttagaaggaaaagaagaggtcaaatggacaggagagagcggagattggttgttctcaggggctccttccctttgcctgcttctttcatttgggacgccagaccttgacctggaagtgaggtcactattgggcagtggagtgtgagaaaggactttggcctgggggctgcaagttacagattaacacggggaggggtgaggagggacccagagggagggaaaggtggccagaggaagggacagctgacctgggcacaatctgggcttgaagggggcacaacaagagcgtctgtgagctggtgctgtctggagggatcttggctcctctccggctatctgaccttcctgaagacctgctcgcacactgcatcccttgcagtcagttccagatacagcatctctccctccagccagtgtctccagccccggttggggacctcccctcgtccgtccacgctcctgaggtcctcctcaaactgcactcccacatcaaactgcacagtgtagtttcggaaggtgctgagcgtcctcaccgtcatgtggttgccctggtgttcgatctccttgtccggcttcagcagcagcgcgatcttccgcacagccaagctgatgtttagggcttgcaggtagtcctccatgttcttctgcgagacaaagcggtagtagccagtgaggttgggaggcattgtgtggatgaaggtttcaggagaatgcaggagacagggtgaggaaggagggggtgttgtctggcaggtgaggctgagagattccagccag

SEQ ID NO: 317164 - DNA, 500 bp, Homo Sapiens
cccaaatatttttccatttgcagtttgctgaagctgtggatgcagaacccatgaatatggagggccaactgtattttgtaggcagttgaaaacattgccctggagctcaggagatggctctggctggagaattcatgccaagggcagcctggcattttcgtccgtccacgctcctgaggtcctcctcaaactccactcccacatcaaactgcacagtgtagtttcggaaggtgctgagcgtcctcaccgtcatgtggttgccctggtgttcgatctccttgtccggcttcagcagcagcgcgatcttccgcacagccaagctgatgtctgtgggggctgcttagggcttgcaggtagtcctccatgttcttctgcgagacaaagcggtagtagccagtgaggttgggaggcattgtgtggatgaaggtttcaggagaatgcaggagacagggtgaggaaggagggggtgttgtctggcaggtgaggctgagagattccag

SEQ ID NO: 317165 - DNA, 462 bp, Homo Sapiens
ttcggcacaggctggaatctctcagcctcacctgccagacaacaccccctccttcctcaccctgtctcctgcattctcctgaaaccttcatccacacaatgcctcccaacctcactggctactaccgctttgtctcgcagaagaacatggaggactacctgcaagccctaaacatcagcttggctgtgcggaagatcgcgctgctgctgaagccggacaaggagatcgaacaccagggcaaccacatgacggtgaggacgctcagcaccttccgaaactacactgtgcagtttgatgtgggagtggagtttgaggaggacctcaggagcgtggacggacgaaaatgccagaccatagttaacctggggaggagggagcacctgggtgtgtgtggcaggaaagggggaggtccccaaccggggcttgggagacattgggttgggaggggagagatgctgtttt

SEQ ID NO: 317166 - DNA, 1683 bp, Homo Sapiens
  misc_feature (972)..(973): n is a, c, g, or t
  misc_feature (1147)..(1147): n is a, c, g, or t
  misc_feature (1299)..(1299): n is a, c, g, or t
  misc_feature (1537)..(1537): n is a, c, g, or t
  misc_feature (1608)..(1608): n is a, c, g, or t
  misc_feature (1611)..(1614): n is a, c, g, or t
  misc_feature (1640)..(1640): n is a, c, g, or t
aacccggaagcggtcggtagtgcggcgctgtttaaagatggcggcggaggaacctcagcagcagaagcaggagccgctgggcagcgactccgaaggtgttaactgtctggcctatgatgaagccatcatggctcagcaggaccgaattcagcaagagattgctgtgcagaaccctctggtgtcagagcggctggagctctcggtcctatacaaggagtatgctgaagatgacaacatctatcaacagaagatcaaggacctccacaaaaagtactcgtacatccgcaagaccaggcctgacggcaactgtttctatcgggctttcggattctcccacttggaggcactgctggatgacagcaaggagttgcagcggttcaaggctgtgtctgccaagagcaaggaagacctggtgtcccagggcttcactgaattcacaattgaggatttccacaacacgttcatggacctgattgagcaggtggagaagcagacctctgtcgccgacctgctggcctccttcaatgaccagagcacctccgactaccttgtggtctacctgcggctgctcacctcgggctacctgcagcgcgagagcaagttcttcgagcacttcatcgagggtggacggactgtcaaggagttctgccagcaggaggtggagcccatgtgcaaggagagcgaccacatccacatcattgcgctggcccaggccctcagcgtgtccatccaggtggagtacatggaccgcggcgagggcggcaccaccaatccgcacatcttccctgagggctccgagcccaaggtctaccttctctaccggcctggacactacgatatcctctacaaatagggctggctccagcccgctgctgccctgctgcccccctctgccaggcgctagacatgtacagaggtttttctgtggttgtaaatggtcctatttcacccccttcttcctgtcacatgacnnccccccatgttttattaaagggggtgctggtggtgagccgtgtgtgcgtgtccctgctctgctgcccgcctggctgctctgtctgctgccccctccccccaggtgggtccccctgcttttcacctatctactcctgagcttccccaacagagagcaggtttgaggggccaggcntcttggaggcccctcctgcttcgttgggttctgcttccttcccatcttagctggctcaggggcttctatgggatcctggaagttcctaagggacttgcccagggtcccagggccacccacacttcatctgctccctcataggccccacctcnacgtcccggctgggccccagaccccagcttcctgccctccaccgggagtctgcatggttgggagtcctgggtggaggggcctttgtgaggctggacccggctcagggcaggtggaggagctgggcctcccacagggtgcccgggcagtgccatcctggtgggggagggcagccttcaaacgtgtggggtctacagtcctcaggtctaggcagggctgccggttctccacctccccatncgccccaggccccctgcctgtgcctgccttgcaccccctctgcttgggccacggtgtatctgcattgcctnccnnnntcccttcacctcttttcttccccgcnccctgcacattcggggtctcagcccccaggctgtgagctcctt

SEQ ID NO: 317167 - DNA, 965 bp, Homo Sapiens; identical to SEQ ID NO: 127656

SEQ ID NO: 317168 - DNA, 2015 bp, Homo Sapiens
attcttccagtccatatttaacatttattttactttgctgagcaagaatcatagacagctactaccacggctgcttcgtttggacaaaaataaccaggaggcatccacgggattagttacacggtatcaacctaccaccacagcagaatcaacagtgactcgctaattaacagaaccgtttgctagaaagcactaatctagttatataaatactgaaataggtcacatgcaaaacactataaacgttttgtgtgatgtacttttagttctccatagttttgtttggtataaaggaaatataatttggctgtgacgtagactgttgatgtaattttcaagttttcctgtatggggaaagttgccctgactgtggcccttttcaaggtggagcctccaacaccacgttggcagattcagactccgtgaacagtctaaatgagcaagtcagctgaatgccactttcagatggaagggaaatgagatggaaaacaacaaaaaaggactgccaggcggaacagtttccaaccgagttttcgttgagtgaggatccagcagccatcaaactcaaacataggggcccgcagggaaactggaggaaatacttcagagacagcaaagctgaaggtttctgtgctctgagggatccgagagtggatgtcccactcctgtatcctcagccagacacagaactagccagattcattagggaagctcggatgctctcattctataaagtaaggcccccagcagggcacgtacatacattgggaaagaagaaaccccttagtaccatgttggtcaaaggcaagagagagaattctatttcccatctggaatgtcattcttgtttacttcttccaacagtgaaatacttccacggccttcgaaaggccatcctttggacacatgtaaaaagctgtcttgttggcccgttattcccactgacccgtctgagtgatcacccaggagcgcggcggcagcaagcagagctcaccggatttgggacaaggattttaaaggcagctacaaagctgagctctatttgctgatgatagtctctgttcagctgtttaaaatgactgtctgactcaccatggtaatttttcacaaattaaaaacacattttgggttgtgcaacagtgttctcatctttccaggcaggcagattattttaatgctgttatacagggaattgggactctcggattttcttttttaacctttttatgcctttcagtaggggaagtttccttgaaagagagctgcaaatctcttaagtatcaacgtaaagaagccgatgacccaattcgggaggtggttcaagtgttctgttcgtttacaaaagcacagaccacgaccatggacacacccagtggaagtaaccacacctggtgtgttcctagaagctcacctgtgacagttcaacaagaacttactattccagaaaagtattacacaaagttatttaaaaaaatgtctgtacaatcgttaacacggccaagccaggccttgggttttgcctcttggtgcccggctgtgctgggaatgccatgaagaccagcggctggaaactgacttgggcatggagaagagactgagggagagggaggggacagcacgactgagcaagggcacagtgctggctgcctcatgggctccaggctccttctgccaggatgaggaagaggccccagagcagcgttacacaggaaatcaacctatttgctaatcctttggaaaaacgtttgtttctggtccacaaacagaaaatccaaacaggatggcagctccttgtgagggtggaggggagggcaccagatgctgtgcggctggaaattccaaggtgctcagaaccaggcgcctgcacctctccttatgccagaccacaatcttcaaagaggccggcagccatattctcgatggggaggtggacaaggccaccctgggagttgctttcaatctgtcctcacagatcaacaactccccgccacctccagagcattttctaatagtgt

SEQ ID NO: 317169 - DNA, 944 bp, Homo Sapiens
  misc_feature (31)..(31): n is a, c, g, or t
acaaggatctttctcttgtctcggctgggtncccggagtctaagtaggaatttatttacacggacactcaatcatagataaggcgctgtctaggatccacatgcgttccctggagctacttggcatcaggcttcttgtctccggcttcaagcttgagactctccgggggttggcgatagactgggaaagcctcccaggggctgttcaggtcaaatttgcggaactcttgggccaactccaccggctctgccaccacccgcttcacttcatcatcataacgtaactcaacatagccagatagaggaaagtctttccggaaaggatgtccctcgaagccataatctgtcaggatccttcttagatcagggtggttagcaaagaagactccaaacatgtcccagatctccctttcataccagttggctgccttgaacacagagacagcagactcaatgggcgtcagctcatctgtgtaggtcttcacacggatccgtgagttgaagcgcagagacaacaggttgtagacaatctcaaaacggttttgccgagttgggacgtccactgctgtcaagtcaaccagagatttgaactgtgcattggtgtgatccctgaggaaagtcagcactgggatgacgccatcaggatggatacagacctctaactcattgaagcaggacacctgaacttgttggacatacttgggcaagatttcagccacatactctccaaaagctgagagctgcttgtgggccacatcattccgtggtctgacagtggggcgcgtgtcggccccggcgctctcccgcctcaccggcagcaacagaacggagggtcgcccagtccccctggtcagcgccgaggcccccaagatcccgcgccaccacagcctggctaccgccgccgccgccatgttactcagatgcagactagccgccacccaggcc

SEQ ID NO: 317170 - DNA, 524 bp, Homo Sapiens
  misc_feature (21)..(21): n is a, c, g, or t
  misc_feature (35)..(35): n is a, c, g, or t
  misc_feature (45)..(45): n is a, c, g, or t
  misc_feature (67)..(67): n is a, c, g, or t
  misc_feature (88)..(88): n is a, c, g, or t
  misc_feature (99)..(99): n is a, c, g, or t
aacgggtctggccaaccaacnccgctttcaacttncatccatcantaaacgttaactcaaaacatanccccaagataagagggaaaantcctttcccgnaaaaaggatgtcccctccgaaagcccataatctgtccaggatcccttccttaagatcagggtggtttagccaaagaagactcccaaacatgcccccagatctcccctttccatacccagttggctgcccttgaacacagagacagcagactcaatgggcgtcagctcatctgtgtaggtcttcacacggatccgtgagttgaagcgcagagacaacaggttgtagacaatctcaaaacggttttgccgagttgggacgtccactgctgtcaagtcaaccagagatttgaactgtgcattggtgtgatccctgaggaaagtcagcactgggatgacgccatcaggatggatacagacctctaactcattgaagcaggacacctgaacttgttggacatacttgggcaagatttcagccacatactc

SEQ ID NO: 317171 - DNA, 1351 bp, Homo Sapiens
  misc_feature (120)..(120): n is a, c, g, or t
tcccagctctgaatgagctgctgtctgtgtggaacatggggttcagcgatggcctgtatgaaggggagttcaccctggccaaccatgacatgtattatgcgtcagggtgcagcatcgcanagtttccagaagatggcgtcgtgataacacagactttcaaggaccaaggattggaggttttaaagcaggaaacagcagttgttgaaaacgtccccattttgggactttatcagattccagctgagggtggaggccggattgtactgtatggggactccaattgcttggatgacagtcaccgacagaaggactgcttttggcttctggatgccctcctccagtacacatcgtatggggtgacaccgcctagcctcagtcactctgggaaccgccagcgccctcccagtggagcaggctcagtcactccagagaggatggaaggaaaccatcttcatcggtactccaaggttctggaggcccatttgggagacccaaaacctcggcctctaccagcctgtccacgcttgtcttgggccaagccacagcctttaaacgagacggcgcccagtaacctttggaaacatcagaagctactctccattgacctggacaaggtggtgttacccaactttcgatcgaatcgccctcaagtgaggcccttgtcccctggagagagcggcgcctgggacattcctggagggatcatgcctggccgctacaaccaggaggtgggccagaccattcctgtctttgccttcctgggagccatggtggtcctggccttctttgtggtacaaatcaacaaggccaagagcaggccgaagcggaggaagcccagggtgaagcgcccgcagctcatgcagcaggttcacccgccaaagaccccttcggtgtgaccggcagcctggctgaccgtgagggccagagagagccttcacggacggcgcctggtgggtgagccgagctgtggtggcggctggtttaaaagggatccagtttccagctgcaggtttgttagagtctgttctacatgggcctgccctcctgtgatgggcagaggctcctggtacatcgagaagattcctgtggatcccgtcaggagggacttagtggctctgccgccagtgagacttcccgccggcagctgtgcgcaccaaagactcgggagaactggaaaggctgtctggggtcttctgactgcaggggaaggatgtactttccaaacaaatgatacaaccctgaccaagctaaaagacgcttgttaaaggctattttctatatttattgttgggaaaagtcactttaaagacttgtgctatttggaagcaaagctattttttttgtcagtgga

SEQ ID NO: 317172 - DNA, 1012 bp, Homo Sapiens
aagattttattaaagcatggagctcagcacggagccagcgttcaacctgagagtgatctggcatcccccatccatgaagctgctaggagaggccacgtggagtgtgtcaactctcttatagcttatgggggcaacattgaccataagatcagccacctgggcactccactctatttggcttgtgaaaaccaacagagagcctgtgtcaagaagcttctggagtcaggagcggacgtgaaccaagggaaaggtcaggattccccacttcatgcagtggccagggacagccagtgaagagctggcctgcctgctcatgggattttgggagcggacacccaggccaagaatgctgaaggcaaacgtcctgtggagctggtgcctccagagagccctttggcccagctcttttttggagagagaagggcccccttctttgatgcagttattgccgccttagaattcggaagtgttttggaatccagcagcatcataagataaccaaactcgtcctcccagaggatctgaaacagtttctcctacatctttaaatgcatctagggaatggattcacaaacgatgtgaaaacattattgagtgttgtagccactagaatttttgttataaacttgtttatggagtttgactaattttttctattcaatttgtatttgttaaactcaagccagggtggaaagacactgcatacgtttgtattattagttagaaggcatgaagacttttttcccctgcttggagagtgtcataagttattgttttgcatatctactgcatgccaagcactttctgcatcatctaatttagccctcacagccactgggtcaagatgtccaattttccagagtaaggatagaggagtcaaattcaaatacaggttttctgacattaacttatgtgatgacttgatcgaggcaggcttttccagcatcactgtcctggttccatctctgctatatgggaatgaaaataaagaaacatatttcttggcttgtct

SEQ ID NO: 317173 - DNA, 431 bp, Homo Sapiens
  misc_feature (271)..(271): n is a, c, g, or t
tcataggctatagaattttgcatatgtaatttcatctactatgtatattctgtctcaaaaaccaagaatagaaaagcagttcaagtaaaaccacagctgcatttttgcctgcctctaggtatgtgagcttcaaagttggaagaaattaaggcaacatgctttgggaatctatggtgatctatagaaaggcaaagtttctgggactcaccttgactgatgggaaagacagactgcctgccagggcactaccctgctgtacccagtctttagntttaataaaggtctcattttttacttgtcaatgcaagccacattttcctattaggaaaatgtgaatgaaacaaagtgctcttcaggagcaaaccctgaattatactttgggttattctctgttcctctagcttggtgtagacatacaggtcaatacaaat

SEQ ID NO: 317174 - DNA, 417 bp, Homo Sapiens
ctcggcagctaacttaaaaaaatatttcagctttatttggggatggagacagtgacaggagtcagggtgaagggcaaaggagaggtgcttaaccaagctcattctattttcagtcgctcccacataggatcaaagtgatacctgcaggcatcttctgcttgttcctctctttttccaatgccttggaattgagagggaaaaagaaatgtctttataataaacactggctcacacttcagccccaagttctagtaccccagtttcaattacagtcacatatttatcatcaatctggaccagaagcactgccttgtcgatgtgggatctggtacctggatctctgctgcaaggcacccatcggtgaatcacatggccttccatgccctcctgcggactccagtctttccagctatttct

SEQ ID NO: 317175 - DNA, 1081 bp, Homo Sapiens
attagagaaaattcacagcattttattcaagttaatcaatttcattcaataatctgccatattgttcccagcaccactattactgttattatttctctttgaggaagaccaggtattaagaaatctggtttgaatttccatgatgcctaactctatggttaaaaatccttttccttaccaaaaaggaacttcttaatcaccagagaaacagagggaagactgagatatgtttgcagaaatttatctctaccagagacaattcatagttcataatctttcagggttgtgctttactttgggggctccgttttcgggagcgggttgtttcccataaatgtttgcttaatacaaataatttgccccactgtaccacagaagggaaatgagggctagtgtccccagaaagcaagcaggcagtcctccagggaagaagccctaatggctcctagtggtgacagagtcattctgcctccccagcctgttagcaataataaagtataactaagtgaacaggagaggtaatatctagcctgataacccatgggctagaatctctaaacagtaatgcttgtgttttgagtaaatcagagctggaaagacacacttttggagaagtgattgagaatagaaaggtatgaaaaagataaaggtttctcaccaacgaaaccacaaaaaaggtggtaccagtcaaaggtagacttgggcttttattttggggtgagggtaccccaaatgggttgtgccattttcacataaaaattggaatgataatgaacaagtgaaagtgaaatcagtttccctcctttgttcaataaacatggttagagcacctgtgtgcaagatagtgggacaggtgctgaggggaaaggtaaagctgtttaagctgtggccctgagctgaaggagcaatctagcagtgccatcaggccctgcacactgcagagcacagtgtcccaggggccaggtggagggaaggatcacttccggctgcagcatcagggaaggcactctgcagtctcccctccaggttctcagcgtgcctctatgcatgtgtgactgctcagcctgccccattccaggca

SEQ ID NO: 317176 - DNA, 2301 bp, Homo Sapiens
  misc_feature (772)..(772): n is a, c, g, or t
  misc_feature (782)..(782): n is a, c, g, or t
  misc_feature (1681)..(1681): n is a, c, g, or t
gagcggtgtccagcgcggtgtagccgcagccgccgctgtcaggcgcagcaacgggcaaccccgtagaagtcggtcggcaggtcctctccaacccgccgctaccgcgccgctgtgggagagaccccagcaggagcccaagggcagctacgggggcgcgaaggccgctggcgccgcctcggccagcccttcccgcgcggttccactgccttaaggatgacagtcgtagggaaccctcgaagttggagctgccagtggttgccaatcctgatactgttgctgggcacaggccatgggccaggggtggaaggcgtgacacactacaaggccggcgaccctgttattctgtatgtcaacaaagtgggaccctaccataaccctcaggaaacttaccactactatcagcttccagtctgctgccctgagaagatacgtcacaaaagccttagcctgggtgaagtgctggatggggaccgaatggctgagtctttgtatgagatccgctttcgggaaaacgtggagaagagaattctgtgccacatgcagctcagttctgcacaggtggagcagctgcgccaggccattgaagaactgtactactttgaatttgtggtagatgacttgccaatccggggctttgtgggctacatggaggagagtggtttcctgccacacagccacaagataggactctggacccatttggacttccacctagaattccatggagaccgaattatatttgccaatgtttcagtgcgggacgtcaagcccncacagcttgngatgggttacgacctgacgagttcctaggccttacccacacttatagcgtgcgctggtctgagacttcagtggagcgtcggagtgacaggcgccgtggtgacgatggtggtttctttcctcgaacactggaaatccattggttgtccatcatcaactccatggtgcttgtgtttttactggtgggttttgtggctgtcattctaatgcgtgtgcttcggaatgacctggctcggtacaacttagatgaggagaccacctctgcaggttctggtgatgactttgaccagggtgacaatggctggaaaattatccatacagatgtcttccgcttccccccataccgtggtctgctctgtgctgtgcttggcgtgggtgcccagttcctggcccttggcactggcattattgtcatggcactgctgggcatgttcaatgtgcaccgtcatggggccattaactcagcagccatcttgttgtatgccctgacctgctgcatctctggctacgtgtccagccacttctaccggcagattggaggcgagcgttgggtgtggaacatcattctcaccaccagtctcttctctgtgcctttcttcctgacgtggagtgtggtgaactcagtgcattgggccaatggttcgacacaggctctgccagccacaaccatcctgctgcttctgacggtttggctgctggtgggctttcccctcactgtcattggaggcatctttgggaagaacaacgccagcccctttgatgcaccctgtcgcaccaagaacatcgcccgggagattccaccccagccctggtacaagtctactgtcatccacatgactgttggaggcttcctgcctttcagtgccatctctgtggagctgtactacatctttgccacagntatgggggtcggggagcagtacactttgtacggcatcctcttctttgtcttcgccatcctgctgaagtgtggggggcttgcatctccattgcactcaccctacttccagttgtctggggaggattaccgctggtggtggcgatctgtgctgagtgttggctccaccggcctcttcatcttcctctactcagttttctattatgcccggcgctccaacatgtctggggcagtacagacagtagagttcttcggctactccttactcactggttatgtcttcttcctcatgctgggcaccatctcctttttttcttccctaaagttcatccggtatatctatgttaacctcaagatggactgagttctgtatggcagaactattgctgttctctccctttcttcatgccctgttgaactctcctaccagcttctcttctgattgactgaattgtgtgatggcattgttgccttcccttttgccctttgggcattccttccccagagagggcctggaaattataaatctctatcacataaggattatatatttgaactttttaagttgcctttagttttggtcctgatttttctttttacaattaccaaaataaaatttatta

SEQ ID NO: 317177 - DNA, 894 bp, Homo Sapiens
tttcctgggttccatgggggattttttgccttaggattaggccggtctccatttcaagaatatctttccctaaatagattgagggcagggatcttgtccattttattccaacttatttcttgccctggcacaaagaggtattcaacaaagtaaatgggtcatcaaatgggctttaaaccccacatgatgtccataggcattaaagtcagaaaccaggaaggtgaagggggaaatgtctccggagagctttataagtgagacactctcatatcattcaagctcagtcctgcttggggataggaggaaccatttaatgatctctgaatggtaccactgaaccagggatcaacgggttgggttagggtactggatgagtagggacaggaaaaattgaggtcaggaacctgacagtaatagccatggaataaagggaggatacctgaaaggcaggaagcctccaacagtcatgtggatgacagtagacttgtaccaggggctggggtggaatctcccgggcgatgttcttggtgcgacagggtgcatcaaaggggctggcggttgttcttcccaaagatgcctccaatgacagtgaggggaaagcccaccagcagccaaaccgtcagaagcagcaggatggttgtggctggcagagcctgtgtcgaaccattggcccaatgcactgagttcaccacactccacgtcaggaagaatggcactgcagggatgggcccccggagggagggtcaacactaggagctacatctctaagggcacccacttacatccaggaccaaaaggggagggggctgaagcagcctgccactctaacggcagactcatgctcctggatgtccctgcagagtcgactgccttcacctccaccctttcaggtcc

SEQ ID NO: 317178 - DNA, 395 bp, Homo Sapiens
  misc_feature (44)..(44): n is a, c, g, or t
acttttgggcctcaaattgaatcctccggccctcggtctccccnaaagtgctaggaattaacaggtgtgaagcccactgtgacccagcccacaatgtgttccttcattccctaagtcccagaaaggcccacccagggaaaggaaagtcctcacccagagaagagactggtggtgagaatgatgttcccacacccaacgctcgcctcccaatctgccggtagaagtggctggacacgtagccagagatgcagcaggtcagggcatacaacaagatggctgctgagttaatggccccatgacggtgcacattgaacatgcccagcagtgccatgacaataatgcctgcaggacggtagcggaaagcccaagttaggcctcacctgtgtctcttctag

SEQ ID NO: 317179 - DNA, 660 bp, Homo Sapiens
  misc_feature (482)..(482): n is a, c, g, or t
  misc_feature (530)..(530): n is a, c, g, or t
  misc_feature (621)..(621): n is a, c, g, or t
ccggccctattttgagaattcttataaccctcttcaatttctcttcctgaaaaggtcagtgtttgcattggcaatattaacgccagccactctaatcataacttgtttaattaagagtctctaaagagatagccattaagaaatttagtggacagttgaaaaatagatcttatcaaaggaacatgcctttttaattgaaatattagtgtgttgaaagaatcttgtttgaaccagcttgatatgaagcattggaattacaacatacactgaaagccttgtcaaaatggggaagcctattgccaattatggtatttttagctgttgggtgtgtactgttggcaaactcttggtttgcagttggtatgtttattttgaggaaaatggattgtctttcctaataataaagtagtaatgcccataagtgtaaatgctttactgcacttctgctgttactgtaattgaatgaaattcaaacttaatcntttgggcagtataaatttatttagtgattaagggtgttactcttaaanccgttttggggcccttcttttcaaacctcttttaactaaatggtagttcagaaaccaccggtgtatttcaacccaaaaccataataagtcngatgtggtgggatgccccctagtccagctactccgggac

SEQ ID NO: 317180 - DNA, 1140 bp, Homo Sapiens
  misc_feature (47)..(47): n is a, c, g, or t
  misc_feature (751)..(751): n is a, c, g, or t
  misc_feature (872)..(872): n is a, c, g, or t
  misc_feature (886)..(886): n is a, c, g, or t
ggggcttaaagaacaggcctttattatcatgagcaatgtgaagcagncagttcaagagctgggtgacttggatattggatatatccataacgagcatcatatgaaatcaatcaacacaggtaagtctctgcaggctatttgcagaatccttctgtgtcctcttgaacaaagctgattatttccatgccatttacatcaaaagagaggaaattaagacccttagtgggctgtgagaccactcacaacaccttttagggactggggagagaagagaggtctgcccgtcacaagcatgctggggtaaatggtaaacgcagtatgattctgccagatggtaggagcagatggctcctgccccagcaaaggccaatagccatttaaaaagtgcaacccagctgctgaaagcttctcacatacttggcactcccagggattttccccagtgggaatgtccatatctatgaagtttcacttcttactgatggttccctcccaatggctgctcccagagttccactctagggtgagctgttgggctgaacagagacagcacattgcttagactgctaaggcctgtgtccggtgtgaaattcccaatggcgggtaaggttcagcctccaggggaagggctttcctgcatctgctgcactcattaactactgctagttccccaccatatagtaagtcgggggcattggcctaagactttcccccacatttgctacactcttaaagcttttctccagcatgnaaccctctggtgccagaacaagtgtctgtttccggatgaaattctctcccgcactcactacacacataaggccttttccccagtgtgggctttccagtgcctgatgaggttgggtctttgnagtgaaggctttcnccgcacttgctgcactcataaggcttttctccagagttaactttctggtgctgaatgagtttggagatgcagctgaaagctttaccacatctgctacactcataatcactgctgtgaattctccagtgtacattaaggtgggagctttggctaaaggccttcccacattcactgcactcataaggcctttctccagtgtgagttcgttggtgcagaacaagtgtgtgtttccgactgaactctttcccacattc

SEQ ID NO: 317181 - DNA, 787 bp, Homo Sapiens
  misc_feature (129)..(129): n is a, c, g, or t
  misc_feature (132)..(132): n is a, c, g, or t
attcggcacagcgttgacatcagtgctctccagccgtgctgtcaccctcctatcttctggatctgccttcgggatggtcagtgacagcttctggaagctgagcacacacaggtgcacagccatgctgtngtnctggcctgctacggcagcatggcagctctggtggagccttctcccttgccatttggttcccctgtgccaagtagctgcaggctgcccctcaaatcttcatttgtcccttttcacttcctgcagaacaagcctgggttagagggtctgctggaaatggcctttgaagaccaaggataccaggatgtgtgcactctgtcgtgttctgtgatgaatgggaaacgtaggcttccagaaagccagctctcttctgaaatgtgacggacctaagcaggaagtcatccaggacaggagtggctcagtgttggggatggacgctgtcgcccagccatgctccaccagggccaccaatgtgtagttggctggtggtcttcgggcatgtgagacctgctcttcactgtttccaccccacttggtggcctccaggatggtagtggcaccctcagagccccatcttcagcatgttctgaagcctcagagtggaaattcctgctaaaggctctgtgtggacgcctttctcccgtgatctaaaggggacactgtactcaagcttttgacctcatgccttgtgtagtaattccttttgtttatgttttggcctttcctctttggcttttcatgtagaccagatatttgaaagggcagacgatggctagag

SEQ ID NO: 317182 - DNA, 599 bp, Homo Sapiens
  misc_feature (93)..(93): n is a, c, g, or t
gggccaaatgcttggagtcaagtttctttagtagtcccagcagccagattgaaatgatctattttaattatcaacaagtgtgtgtcaataganaattatctattgacacacacttccttctttctactaaccatgacctctaaacttctctttccatgctttgataaataaaaggagatttcttattaaggacaatatattatcttggcaattataatccttttattgataatataaacccagacaaatagtctatctgtaataatatataataaacataatggccatgccctaaaatcaacagcttaagttataacaaacttaataaaataaatggtaaacagaaaaactgctccaccaacataaggctaaggcaaacacttaacaatgttatttactccagggggatttttatctccctgcctgcttcctttttctttgaacaaatgtttttgtatacctactatgtacttgatactgggctactacagtgaagaaggacacaatctctattttcaaaagtgtggtctaaaggccaggcttggtagctcatgcctgttgtcccagcactctgggagggtaaagtgggatcgcttgag

SEQ ID NO: 317183 - DNA, 529 bp, Homo Sapiens
atgattttggcataccattagagaaaccatttgtaaaactcaaatgaccacataaagcttatcaaggagtctagattggttttgttttataccatatgggatgaagaaaatagaaatgtcagtagaactcattgagggtgctcttgccagctgctgaaaatagaagttggctactctcagaatttggtttaaagctggacagatttgctttgttatagggtaaagctttgtctaaagtcctcattttcttttaaaattgaataaaatttctgtatacagattcattgtatgtacctttattgcttcttaagggtccttgctgtatagacagtcctgcttcagaagttgctgctttgtttgtctaattgactcatttgtaaatgagcagaactgttttgttggtttttttccctaaatataaaagtccacacttcgtttgtgctataacctcaaactttgatttctaatgtcacacttaaaactgtgtggaataagacttttgccataaaaataaactatggagtccttt

SEQ ID NO: 317184 - DNA, 294 bp, Homo Sapiens
gagcttattacattacttctgagaatatgtctgccatatattcaaacctgaataaccacagcttgtctgtattttcaagtaaaaaaatgttccatgaaaaaaagtcattcaaattgcaactcaaacaactgtagaagtgcttttcttccagacaactatcatactatgacatgcagaagtgctttgttcatacattctacttcatatcatacagaatattaaaaagccagatactcggctgggcgtggctcatgcctcagcacttcgggtggccaaggtgggcagatcacctga

SEQ ID NO: 317185 - DNA, 1230 bp, Homo Sapiens
  misc_feature (59)..(60): n is a, c, g, or t
  misc_feature (74)..(74): n is a, c, g, or t
  misc_feature (81)..(81): n is a, c, g, or t
tgactcaggatctggtggaagtcttcgactcgttgcagctccgcttcatccctgtgtgnnaggatgagtccggnaggcagncagcatttgcaacagctcccttgacaaagtgcgtatttcattgatgtgtctttccatatatccgtaacaccgccagtcggtagtgaccagtgccattaggctggagacacccatctcaagggcctggtcctgagctggggaggctgacagtgaggattccttggaggaggtggaagaacgtggacatgttattccggggtgctgcctgtactggagaaaggcattcggttgatccccatccaccaagtcccggagagcctttagcatctggcgggttatgcagagggacatcattaaacaccatccctttcctgggggtttgctttctcactggtttctgctggtggctcaagaaactgaacgcctcggggggatgcgtcgttctgagagcccactgactgtccgagttgcgggggtgggtgattcggggacaggctctggtgccttcgagccaccggttctgcagctcctggaatgtcacagttgtattttacatgaaggtccttccctgctggcttggtgcaggttggaggaatgtcataaaccccctccggtctgaggtccggccttccagcttgtctcatgggaggggggaagtcatagtctttttccctaagccctgcttcatcccggcaagcagagggcggaatggcatataccccttttgtaggcgggatgtcatacaccccttgaggttttatctctcccactggaactgaaaacacagggccttttgctgatgagggagggatgtcgtataccccttgagtggtatgagaaggagggatatcatagacgtccttttggtatctggatgggtactcgtatacgtagccatggcctgtcctcacgggggttatcacctttttacccacgtggggcccactggttcccccaatgcttctctgcactgatggtggcacctgatatacctcttgttcttgggtgccgtggccagtggggacttggtaaattccctgattttggtaggaaggtggcacttggtagatggtgtctcggggagcagcctgtgggtttggcacttgatagagcttctgttggccaaaggtctgctgcatcagtccagaggcaggctgctcgtgactggaggcagtctcctgccctcgtgccgaattcgccacccaggcc

SEQ ID NO: 317186 - DNA, 485 bp, Homo Sapiens
  misc_feature (304)..(423): n is a, c, g, or t
tgagccactgtgcccggccaggtctgtgaggttttaaaccacctgtctgtggcactttgttacggaacccgagctgagtggtacagggaggaaggccctgtggttcagcgcattttacagctgaggaaactgaggctgcagtctccatctgtgtgtccttttgttgcttgtatgagtgaggtggcaggtttgggaatgaaaccacgccttgggtgccggggcttccacccggtaacctcccgtttttgggctcggggcttcggcaggaaggagtcccaaggcttagatggaggtgcggagggcnnnnnnnnnnnnnnnnnnnnnnnnnnnnnnnnnnnnnnnnnnnnnnnnnnnnnnnnnnnnnnnnnnnnnnnnnnnnnnnnnnnnnnnnnnnnnnnnnnnnnnnnnnnnnnnnnnnnnnnngtgacctgtgagacgggccataatcctcccagcctcttccacttccagcgggggcggcccac

SEQ ID NO: 317187 - DNA, 1821 bp, Homo Sapiens
actcaacttcttttttttattataaaaggtacacttctgtttatatttaaacaacaaagaaaaaagcatctacacacttaaaaaattaattcaatattcctaaatctattttaactcattttaaaatactacatacagaagccagaatgcagagttaagaatggaataaggtggggagaagaaggggaccacgaagaaaaacacttagacaattacttgtctgttgtgggtaaagcaacaggaatcctgggagatacaagaaatcagtaacaactttgctcataactgatattttcccctcatgtttgtttttaataacgtccatatgggtgctctctgtatgctcccttcactggcctagcaggaggggccttcagcgacggcctggtcccattccagtcgtcctggccataagcttcataagaatcttgaacctccccatgtccatagtcataatattctgagtccccttgactctggctgtaatagccttcgtagccttcgtaactttgttctgcgtatgtatcatcatatccatattcttcatatgtttctggtgcaggaggtggaggcaaaggtatcctctggatgcccgctgtccgtgctcttggtgctggagcacccctcacagtaggtgggggtggcacgcctcgagtcacagtggcacctctggtgatggctccccttactggtgtaccacgtaccaaagccccccgaggtggtccaacaccacggcccctgggaacaggtggtggaggaggtgcagctccccggcctctcactggcaccccacgtccacgagagggttcaggtactccattcaagtaggacagctctagaaattgctcctgacagatatcatccatcatatccggtactagaaatttcttgacttcctccatggcatgggccataagagcataagcctcacatgggggtccaaagacttcaatgaagacatgcagatccatattcaagtgggcatatttggggtctccacctttgcgcagctcttcctccttggctttgtctctcattgagccctttcccaatacagagatctttgcaccagtctcttcctgcagtcttttgattgtattcccttgtggtccaagaatcttccccacaaaattgaacttgggatactgcttgacaggtatcagcactcgctctttcagtttcatgttcttatgagaaaataaatccaagtaattctcctcatcatccttttttgagtctcctttctaaatgttctcaatttctgccgtcagcagctgcatggcgtgagtgaaggacgggtcgagcgagtccttctcggcccatgagttcgggcaggtacttgttctctggctccatcttgaccgaggctgtggccgaggggggcagcagcggggtcggcgctggcccgcccactgtcgcgtcgggacccgtggccgagggcggcagcagcggtggcggctgcgtggcgggcgaggcccgggcgcccccgcgggatccccctccgcctccccgggaccggtgaggcagcggcggctgccgagacggcgtctgacgcaccgaggggtgggcaccggaggggtccatggagccgctacggcccgaagaccggctcatgcgcgcggcggggtcgtcccggcgctgcatctgggaggatgtgcgatccaaggagcgagaaagcgacgcggcagcgacggaggcccgagcggcggttggcgggggtggcagagcgggagcggtagcgaccgaagccgacccgagcgccacgcaggcctcgttggttggggtagggtcgccccttagcggaagagggtattgtttggg

SEQ ID NO: 317188 - DNA, 1020 bp, Homo Sapiens
  misc_feature (167)..(196): n is a, c, g, or t
gggtatatgaacaaagcctcccgctatttttataaagcaggctggtacggtcggaattctcgggatatcgtcgacccacgcgtcgcggacgcgtgggtaatttttttaagtgtgtagatgcttttttctttgtgtttaaatataacagaagtgtaccttttataatnnnnnnnnnnnnnnnnnnnnnnnnnnnnnncacacaaacctgttagtttcaaaaatgacattgccttgccttaaaggttcctgaagtaaaggcttgttaagtttctcttagttttgatttgaggcatcccgtaaagttgtagttgcagaatcccaaactaggctacatttcaaaattcagggctgtttaagatttaaaatcacaaacattaacggcagtaggcaccaccatgtaaaagtgagctcagacgtctctaaaaaatgtttcctttataaaagcacatggcggttgaatcttaaggttaaattttaatatgaaagatcctcatgaattaaatagttgatgcaatttttaacgttaaatggatatacaaaaaaaacaacaaaattaggctgtgtaaaacctgacttttccattacgttgggtttttgaaatctagccccagaatactgtgtcgagagatacttagagggagggagtaggtttcgaaaaggtctgatggtggtgcggagggaaggccctcctgaatagagttcgatccgagtttttcagccatgaaaatctttcagcccatgtcctatcacttacattctccgtattccacacggacacgtctttcgccccttgagatccgcctcccaggacaggtcctcgggcgctgggccaaacgtgatcctaagtggcaggggcactctccaaatgtcccagtgatcagtttctcccctagctgacttaaggacgctcatcaaggattaaaccctcgcgttcataaccaatggttagcgccccatgtcagacaagactgtgccaacgagacataatggcaggacaaacctcaacaaggggatccggcc

SEQ ID NO: 317189 - DNA, 898 bp, Homo Sapiens
  misc_feature (102)..(102): n is a, c, g, or t
tcgtgtgtctgcctcgatatacatgcgagcgagtatttaatgcggtagagatggcgtgcaattcggggggagggacgcgccgggctacatggggggtggggnctccagatcaagaacagaatgctgttagttagtggttttccacctttattttggcttcacaacttcgccagccaaggaaatgttcttggcattgcaacccagttctcacatttagatgtatgggtgaaaaggtttcacaaaacagtatttgcctttactacatgatgcattctggcctactttattctgcttcattgctgtgtaatgctggtgaccacttgctaattgatttcccattttactaaatgggctgggacccacggtctgaaaaccctgccttaggctgcaagcatttctgtgatctctgcgagctactccatataggtaaacacacgcgaggtaaactaggaaacagcttctgcttttgcagattagaagtgaagttgacatcacgccaagtacgaaaaggctaaacagctgacaaaatttccacttgagcaaccctggggagcgcaaacatgaggaatcggggcaagggtgacttgaagaaagcactggcagatcacgcactttaaggcaactctacactgcacaatgtcaaataacctagcatggggcggcactaaatggctgcaggaaagccgagtcttcttccacatccggcggctcccctcggatgcgagcgctggcccagggtgtgtttacagaggtgagggcttcccgtggacccttctcgttgggagcgcttagcctcaggagcggattcagggcacaggcagaggacgtccacaaacaccacaggaagccgccacccaggggcgtggaaaggcccaatgcctcgtctgggattcacggc

SEQ ID NO: 317190 - DNA, 659 bp, Homo Sapiens
tgattatattaccagtttattacaccctctttgacaacaggtatggtctctgcggtctttagcaagagagcacacaaaacagcatgacttaacttttggtattatgagtagatgagaaattactatgaagataaaagttgaaactatataagcatgaaaagtaaaatttacatgaggaggaaaaaattccttaagttgtatgcacatggttaacgctgacttcacagtgtcttaacaatttgccaaaattataaacttgatgtaatccaagactgaagacagttaataaactgttttgaagaaacatgtacagaagtcttgtttgaataaaaaatacatattagtcacatataatcaaacaactgaaaatgaactgaggcattacattgagctacgaataacaggaaacacttgaaatttcctgatagaggaaagtgctcattctcacatcaaagtcctgggtgaggccagtcactgcacactacagcagaagaacaagctcccctctggttggttttgacagcagcatggtagctatcaggctgaatcaagaatacagtcactactagtatgaacaaaggtgcttactacacaaattagaccgtatgccaattccgtctacagactaggggagtcagagcatcacagaatattccccc

SEQ ID NO: 317191 - DNA, 354 bp, Homo Sapiens
catacaataattaccatgcactctgaatattttttttcttgttttatctgtcacgaatcactttgtcattcaatatgggagctttgccattttcactacttgattcctaatgctgttggaacatatgatttgtctcctatttcacatagagatcttgacttctgagatattccaattttaatgaacctttctactccatcatttgctgactatggattagggatactgatacctacttattggtaatatttagctgatttaggaaatgcatctgaaagtgtacagcttagcatctggtacacattgcatgctcaacacaattatagcttctatcattgatttcttaactggatc

SEQ ID NO: 317192 - DNA, 898 bp, Homo Sapiens
  misc_feature (1)..(1): n is a, c, g, or t
  misc_feature (27)..(40): n is a, c, g, or t
ntgacaccttgtgcccagccttgtacnnnnnnnnnnnnnnattgtagctctgtatagcacttggataatgtctgggtgtctccttaaccatcaaactgttctttatttaaaatgtttaattaccgtttagaaattctagtcctcaataagtgggtggctcatgctattgttgttcctaaagctaagctttgctgggaaggaaatgacctatagtttcttaaagaatcattaatccttataggattcctgagttactgttttgttcctccccactgcttcccattcctgagttttgtaattcctaatccttctataatttctattaccttcaccatagtcattctttccttacgcaaagcccaaggaatgagctgctgctactttaaagtgtggtcattatgatgaatgtgaaaagagttttggcttgttctaaataatttttacaagttatggtacagacagttgttacatatcaaaaaaaacctgtttattgaaacaggaaataaaaaagggatcttttacattatagaattaaaactaattttttcttgtatataaactaattggtttgattttaaatatttctggcttttattaatatgtcttaattttgagtttgaaaatgttaagtgcaataaaaacatactagtacagattttgttttgttccaattggcatactctggggatgatcacttaaaaaaacagattttacataatgcctacttctggtagatgtcttatgagattgttctgctttttctaagttacttagatgttggatatgtacatagctgtttcttgttctgtatacatttctcaaatgtacacttgtattataataacctcccagttctaggggatatttgtgcaataaatacacatgtcaacttggaaaa

SEQ ID NO: 317193 - DNA, 665 bp, Homo Sapiens
tacagctaagattcatttcatacgttttgatgcttagctgaaaaattacaataaattctccaatgaaattatgtatctttatttaatgaaaatgcctgctgcgtaccaaggtatgtactagggcatctggggtaagtaaaaacaaacacatagagcctgcctggagaagctcatggtctgatggaaagataagcaagaagagttaatttctaatcaatatgataaaaaggtcagagagcagtttctgaaaaacatgtttttgagttgagtcctgaaagacaaggagatgttagtaaagcagagaagggagaattcattctagaaagatcagacagtgtgtggggaagggcagagtctgcggccccatgagacaaagacacagctagagagattgactaggccatgtcggaatgtcctcttattttatacatacataagcatatagatacatatagccaaagttacctttttaatgatcttttttacccagtgtattctggaggtcgaatggtcacgatatgaacatctccgagaggttgtgtttggcaaaagtgaagatgagcattatcccctttggaaatcagtcattggagggatgatggctggtgttattggccagtttttagccaatccaactgacctagtgaaggttcagatgcaaatgg

SEQ ID NO: 317194 - DNA, 1363 bp, Homo Sapiens
  misc_feature (3)..(3): n is a, c, g, or t
  misc_feature (9)..(9): n is a, c, g, or t
  misc_feature (11)..(11): n is a, c, g, or t
  misc_feature (23)..(23): n is a, c, g, or t
  misc_feature (76)..(89): n is a, c, g, or t
  misc_feature (352)..(385): n is a, c, g, or t
ttntatgangnacactggtcaangaatgggcagtgggtaccatgtgactgcacaatcattttggatttgtggctannnnnnnnnnnnnncagccctagatagatatcaacaaataagccctgggaattttggactccctttttccctccaaattaaagccacaattccaggcctcctttcagtttgaacactcactaaatttttgctgcttatagctcatcagggaaacttttgcagaactattcctggaactattccatgtggtgccttgggatttgagtctaatttccatgtttctctcactctcaaaactgacccctcatttatccactcatttattcgttcacccacnnnnnnnnnnnnnnnnnnnnnnnnnnnnnnnnnnacagactttccttgagtaccagattcatacactaccgtattatagctccatagactctttctcactcttcagttcagtacagaagaatattgttaaggctatgtgtttccttttccaggtaacgcctgtgcattttaacagtgggcttcaccaagagaatgtgaagctttatgaaagaatggtggaggttgaaggatttttgaattaaaaaaggaggtcttttccaaatagacctcatgtaggatttgggaggtggtgacctccaatttcttattgcccccaagttacactcttctttgctcttcagtgtcatggaaaagaatgcgctgttttatatctacccttgtcagtaatatgagtgcaagttttgttgcacaggttttttgcagctttctctttctagagctcagcttggaggctctgactggatattgccagtgtttaaaatcagagtttgaagtgagtggatgtggcaggagaaacccttgggtttttactacacttgggattgttggatattatatttggaaaaataaggatgcttaagagcctaaagagcatacatgtatgctgggtcacagaattgttaggaatctacatctccacccctcctctcccaatcatactttcttggccttgaatggatcctggcagagctccagggagacatctggggtccgtattgccatgaagcccctggggctaggactccctagccattccttctccactcctggcaggctgagtgaaataaaggacttgttatttcatctcgaggcctaccggagagccttgccttgcaaaggcagacagtcagtgaggaagactatgtggcacatgaagacaccagaggtgttcctcaggatcaaagtatgtacaagcctttgtgaatattttttccttctcacttggcaaatacaattcctgagatcaataacctcatctttttaattttttcctcgtctttttaactattta

SEQ ID NO: 317195 - DNA, 1522 bp, Homo Sapiens
  misc_feature (489)..(489): n is a, c, g, or t
  misc_feature (847)..(1004): n is a, c, g, or t
  misc_feature (1007)..(1008): n is a, c, g, or t
  misc_feature (1019)..(1031): n is a, c, g, or t
  misc_feature (1074)..(1166): n is a, c, g, or t
  misc_feature (1213)..(1244): n is a, c, g, or t
  misc_feature (1327)..(1341): n is a, c, g, or t
  misc_feature (1361)..(1392): n is a, c, g, or t
  misc_feature (1399)..(1407): n is a, c, g, or t
gccgagcggagtctctttgttgtcaccaagtgaacatacttctcatggtgggttggacagtaatacatgttagagggtcagaagcttctggtttctgctgtttgctttaaatacccttggggtttttttttaaacccttacaaggggagcatcagctttggaaagtgtgactctgtaggagtgtagaaggcagtggtgtatgatcttagcctcgtcctgatgcctgaatccagccagctgttgctctgacccacagcaatagagcaagttacccatcaccagcatttgtacagagcagggaattctggttttagtccattggtagcattgtgtgtatgaggagattcaacaccacagacagctgcaggactcgatatccatggcttcttttccatcacaaaacgggtagaaacacattcactgcttcagggttctaatctgtgtgtctccttatggactccattttctgtaagctactctgtaactttngatatttgctgtattttctttctttaaaagatttagatgtttttttcagcaagctagcccatacaaccattgtatctctttctcttcagtatggtttagagccccagatcagttagtaggctttcgttgtcttctctttcaatacatgtacatctttactgtttgaaaagtgttacagctgtcaaagaatcttcatggacctgaagataatttcttgtgaagttgaatgcaagtgtactgtcattcatagtgtttatatcaaaataccaggaatcttcacttttgctaccttgatatagcattgggctatcatgttacaacattgaaatacattgatttattaaaaaatacttttatnnnnnnnnnnnnnnnnnnnnnnnnnnnnnnnnnnnnnnnnnnnnnnnnnnnnnnnnnnnnnnnnnnnnnnnnnnnnnnnnnnnnnnnnnnnnnnnnnnnnnnnnnnnnnnnnnnnnnnnnnnnnnnnnnnnnnnnnnnnnnnnnnnnnnnnnnnnnnnaannggggagggggnnnnnnnnnnnnnaaaaaaaattcttaaaacctttttgggggcgggggcccccccnnnnnnnnnnnnnnnnnnnnnnnnnnnnnnnnnnnnnnnnnnnnnnnnnnnnnnnnnnnnnnnnnnnnnnnnnnnnnnnnnnnnnnnnnnnnncgccccgggggggcccaaccgccgttttttctaaaaaaccccccccnnnnnnnnnnnnnnnnnnnnnnnnnnnnnnnntgtctttaaaccaagggggcccccccgggggtttttttaaaatatatatccccccccgcggcccgccgttggtttttttaaannnnnnnnnnnnnnnaaaaaaatacaccaaaactnnnnnnnnnnnnnnnnnnnnnnnnnnnnnnnnacaaaannnnnnnnntgggaagacatcgtgtttcccccgcgggggggttaacacaacccacctctttgaaacccgggttggaaaataataatctctctccccccccggggggaaaaaacacggcgccaac

SEQ ID NO: 317196 - DNA, 440 bp, Homo Sapiens
  misc_feature (89)..(89): n is a, c, g, or t
  misc_feature (353)..(353): n is a, c, g, or t
  misc_feature (358)..(358): n is a, c, g, or t
  misc_feature (365)..(365): n is a, c, g, or t
aaagtattttttaataaatcaatgtatttcaatgttgtaacatgatagcccaatgctatatcaaggtagcaaaagtgaagattcctggnattttgatataaacactatgaatgacagtacacttgcattcaacttcacaagaaattatcttcaggtccatgaagattctttgacagctgtaacacttttcaaacagtaaaggatgtacatgtattgaaagaggaagacaacggaaagcctacttactgatctggggctcttaaacccatacttgaggaggaaggaggataccaatgggttgtatgggcctaggcttgcttggaaaaaccatccttaaatccttttttaagggnagggnaaatccngcccttttatcccaggtttccggggtggcctttccgggattggggggtcctagggggggccccccggttggggcc

SEQ ID NO: 317197 - DNA, 603 bp, Homo Sapiens
tgaaaaactaaacgaaactttagagaatgagctggtacaactacccttaacagaaaacatacccgcaattagtgagcttcttcacactccagcccatgtcctgccatctgctgctttcctgtgctccatgtttgtaaattcattgctgctgtctaaagagactaagaggtaaagcagttcttaagacaggtttggacactctcttttgggaaacaggatcgtttgtgtttatccttttttagagtattcttccactgtatttctttttatttcataagttttaaaatagatttaaaggctataggattattaagtcaagtaacatacattgaaaataagtttcaaaaaagatcttgtatgtgtgtgttttaagggcttggtacataatttaaaattacatgtttgtaaattcacctgctcttttataaataacccataatttttaaagtgtacttagtaacaaaattcttcatttactttgtgtgattatatttctacataggtgtcaaattagaaagttactgtttagaaacatttaatagtgtttatattttattctgttattgttaaagtgctaaggaaattcctgaagatgtagatatg

SEQ ID NO: 317198 - DNA, 447 bp, Homo Sapiens
  misc_feature (14)..(14): n is a, c, g, or t
ttttgtgaggcccnggattaccctaataccaaagccaggcaaaaacattacaagaaaggaaaactacagatcaatatttcccagtgaacacagatgcagaaatccttaaaatgttagcaaatcaggaatgcaagccttgttcaacatttgatattcagtgcaatccattgcatgcattagcagttcaaagattaaatatgatcatatcaataggtacagaaaaagcatttgacaaaatccaatatccattcatgataaaacctctcaacacagaaggaatacaggagaacttactcaatttgataaagaactactacaaaaaaccctacatctagcatcatccttgatgtttccaactaaatgctttcctactaagatcaggaacatggcaaggaacaccactcttttcagcattgtactggaagtgctatctaatgcagtgatacc

SEQ ID NO: 317199 - DNA, 1753 bp, Homo Sapiens
  misc_feature (203)..(253): n is a, c, g, or t
aattaaaatactgttatacccagtggaatgcggcagcaatcctggtacagggtggcataacaaaacagccatgtttacattttaaatatttacgataacttaaacatacagacacacatcatggtctttggcagaaaatgttcacagcacaaaaaatactttaaaagaaataccaaatattaatccaaaatatattaagttgnnnnnnnnnnnnnnnnnnnnnnnnnnnnnnnnnnnnnnnnnnnnnnnnnnngctttgtaaacaatgcacatgaaccaaatgtatttttcagctttaaacaggggtaggggaattttttaaaaaaaattgcaattgtccagcaaatgcaaatgtttaaaaaggaaacttgaggaaccatggaaataaaacaacacataccaaacctaaaaacgataaaggaagaaaacaaagaatcaaggagaactaaaaacggtaaagacaaaactgctaaaacccaccaatagctcctggggctgaagtgagggactctttaagaccagaagtcaaagtcactgctgctagcaggctgccatgtgggtgtttcaccccaattccaaagcatctggtcctgctttagggcgctgggcatgggtagcttgaggagccagcctcctgggcactgttttgtgatgggggctccattcagaggactatttgactcttgtagctcattaactagttttcaactgctttgctcctctcccaaaccctccaggtgggaatgaagaccacttatgctaacaagacatcttccagtttctcagagagaactggtaccgggtaggggccaccgaaagcccacctgggggcatggcagatgtctgttcacggtggctcatttcatctggctcagggtttatgaccaaactgacaggatgttccagggacaggagctgtggagccacttcaagaggctggtggtgggggtcccgtgggcatttatagggctcaagatagaggaaaaggcagccgagatcctgggaatcgagcagctttaacatccacgggccaggaacttgaggaggaggcataactgggaggccagtcagaagtttcagaaactgacagtaggaagaggggagcacagcccatggagacacatcggaacctgcaggcctcagtcttctgttccacaagaaagggaattatatacaaactgcgcactgtctcccagtccacttaaatggcccctcacccacagcaagtgagaaggtgaggctgtgtcttctccaagactaacacccttaatagtccccaaaaaattcaagtcttagtatcccaagaaggcagtgaggaactgaagagcagatgacgttggctggaaccaaacttagccagagaacaatatggctgacttgattagtgaaccagtccacctggtgtccacgggcagccgtccgtggaaattagttccccaaaccaacacagccactccctccctgcctgactgacaactggcagggcagagggagctcagctcctttctgagctgtcagttgctaccccagtagcaggccttgggcaagaagtcaaggctgaatcctcattctccataaggcccggaggaatgtgggctaagaagcagagtcttctgggggtgccggtgctctcacagctctcctctcccctggggtcctcctcctgagctcctgggaccagatggtcaatgggagtgagtgtctggctggggaaagggacggagcagcggttgacggggctgctgaaatggct

SEQ ID NO: 317200 - DNA, 456 bp, Homo Sapiens
  misc_feature (65)..(65): n is a, c, g, or t
  misc_feature (131)..(131): n is a, c, g, or t
tttttcaaactgctttgctccctctccccaaaaaccttcccaggtgggaaatgaaagaacacttnatgcctaaacaaagaacatctcccagttttcctccagagaagaaactggttaccgggttagggccnaccgaaagcccacctgggggcatggcagatgtctgtttcacggtggctcatttcatctggctcagggtttatgaccaaactgacaggatgttccagggacaggagctgtggagccacttcaagaggctggtggtgggggtcccgtgggcatttatagggctcaagatagaggaaaaggcagccgagatcctgggaatcgagcagctttaacatccacgggccaggaacttgaggaggaggcataactgggaggccagtcagaagtttcagaaactgacagtaggaagagggtagcacagcccatggagacacatcggaacctgca

SEQ ID NO: 317201 - DNA, 2320 bp, Homo Sapiens
  misc_feature (11)..(11): n is a, c, g, or t
  misc_feature (34)..(34): n is a, c, g, or t
  misc_feature (1682)..(1682): n is a, c, g, or t
  misc_feature (1732)..(1732): n is a, c, g, or t
  misc_feature (1735)..(1735): n is a, c, g, or t
  misc_feature (1853)..(1853): n is a, c, g, or t
aaggaatccanaatggtggggcaagaaggggcangggcatgggggaaagacctattcccagaggcccctatccccccagttatttggctgtgatttaggagttaagttctcccgcaccttaaaaatggacaacacacagctttcctgctatataattaaagtatggaatgaaacaggaaaataaccttcggattttatcaaacttagagctaaagcagacacagtaagatttttttaatttgccagatattcttttaatgagaattataaaagaccaaaaacattttttgcaaactgcctttttaaacaaatgatttgcttttaattacaaatactgtgcatgacgatgccttcttctgcaaaaccaataaatacaagaacaaattttaaaatatgtgatttgtccaagatatctgaaaaaggaaacaaaagcctgatttgcagtatttataaaaatcaatttattctctaacctttcaaagattaagctcaaaggtgtgactcatctgtagaagacagaaagagagcaccttatagatgctttaaatagcttttgattatttttccgatgtcacctttactttctggaactcatggcttcacaaaatagctgattttaaaatatttctaatgaactgattaatgggggaaaagaaaatattgaacacgttataaattttttaccataaacaaatatgcatatcaaaagatactaactttaaaatggtacaaaaaagggaaaaccctgaatttacagaaaagtcaaatttatttaatgaaaaactaaaattaataaaaattagcaaatacacacaaaaaaagcacacagcagcactatgtattgactcacaaagggaaaagcagtggcccatgaccactcaagatggcttgtcagttaaaggaaaaaaacccaaacacgcacacacccacgcaggcacacactcccacgcaaaaacaaactttttcaacaatacaatcaatctacaacaaacacaaaactcagaattattttacaatgcttcctttcttaatacaaaagatgcccatcttgggtgtatatacatatattttttcagtggtttactgttgacttatttttaaatatattagtgttactacatgcaactgtttcctgtatttaacagcctttctttttatttaccttcatgtgtctagcttccacctaccggaaagagttttaggttggcagacagatgggtgccttattttctgtgaaactgaagttttaaacactggccagaaaatgtttgattgccatttcaacacatggaaatagttacattgatgcctaaattgccattttctgcaaaaagctgtgcaatgctggtgtcaaagactagacagtcgctattcataatggctgttgcaattccttcatgaatagatcgaggagtcgcttcccaagtcaatcgtcgcctatgaccatttagctcaagtcggtaagcaaaattttcagcttgcttgcgtgttcctatcagctgtacgattgcgaagaactgctggtgaccatcgtatttttcctgtttctctaagactaacatgaagtgaaagccaaaacaggactgcatcatcacccagtcaacagcaccggggaggtttaatgtctgtaggcaaggaaaaactatatcctctccctgtagggttgtaatggacttatgctnatgcatcagatggggcattacagcatccagagagccttgccatttacagnaancaccagggcacggacaggaataaggcctaaactcacagagctcttcatggtctgctttttctgtgtgtggcagagttatttcacatccagaagacgcatatttacaggggaaaagtantgaattagccactttctccatagccaagttgcgaatggatcccaaagggccccggcaagttggacaacatgtgagctttgggcgacagttgctacaaacaagatggccactctgacattgaagaatgggcggtaacacatagtcaaagcagactggatattcaaaatagactcgccaagtcattgttggatgcagttgtgccagtcagggcaggcaccctctgggatggtggacacttcgaggtaccggtaggtaatgctgtagcagtctgacggctcatttctgtgggcggagagcgcgcctcggaccccggtcctggcaccaacgcgctccgtcgccaacccccgccaccgcgggcagcgccaccgcctcttcccggcgccgagaccgacgggacaccctgggccgccgccgcctctcgagagcgcgccccgcaacggccgccccggctcccccctggcctcgtg

SEQ ID NO: 317202 - DNA, 688 bp, Homo Sapiens
  misc_feature (225)..(226): n is a, c, g, or t
acaaaaatgaaataattgaaacttataatgtatcatataaagtgatagatcttattacagtatatcacaatcattagctatctctttactatttgacaataaactactaatctcaacttgtcaaaaagaacaatttaaaacaatcctgtactctaaacataaaaatacatatgattcaatattaccaactgattaaactgcataattactctcaatttatcagtnnccatccactctttatggttcatatttagtttcataagtgctcattaaaacaccatgtgaaggtgagaataaatgtgactttggaaagcaatcttaaccaatcatctgtgaagatacagtaacaaaccttcctattgtgaaaaaatggcagatacagtctccatacacaaaaatgatactaccgaaaaacttcaagtgttaatgctcattgctttatgtgccattaacacataagcaaatcaataaatataacagcatcaagttattccaggatgatgacagtattgcactgatctattcatatgttcttagctggttcttcctgtgaccaataaaatattcatgatagccggctaggattacaaatatactttgtggccacaaaatggaatacctctaaacaccccatatgaagatcaaagctacaatcttggcctcacaaagaatttaatctatgggccag

SEQ ID NO: 317203 - DNA, 510 bp, Homo Sapiens
ttttgaatgtaaaacaagtaaactttatttgggagatggggtgaatccatcactggttactggaaccctgagtctgcattttctcctcaggaaggcggtctgaaatggagtgggctgtgtttggcaagggttgtagtggtttggaatctctcacctgcttggctcccgagctgggcctcaggcctgtctccccagagtaaatgcccgggatcattgaggaagcgttggctgcgctggcatgttaggcaggtctgtacggtccagcgctgtcccctgcagcgtctctggcgctgggtgcaggtgaggcccgggacgaggagggaagagcagcctcgacagagagtcctcttcaccgagggatcccgccgcaagacgagccgcttcgcaatggtcctctcagtgtagcagtaaaacctcgccagcgcctggttctcggggtcctgggcaaggacacaatgggcggcctggtacaggaagttgagcctctggaaggcctcctcgtgccgaaaa

SEQ ID NO: 317204 - DNA, 902 bp, Homo Sapiens; identical to SEQ ID NO: 129976
  misc_feature (280)..(280): n is a, c, g, or t
  misc_feature (294)..(303): n is a, c, g, or t

SEQ ID NO: 317205 - DNA, 1333 bp, Homo Sapiens
ataatgttccgggtctccaaaaggtcccggaatttataattattctcccaaccaattttcttcagggtcatttaaagctttgtctaaacagctggggtgggtggcccaagggacatccaccatctcttgggctttaattctgcttccaaaaataacttcagtggccccagaaaaatcagcataggagtgaagcctgttatcgcctgtcagttctacttgtgctgtatcagatcgcaatttccattctactgttccagtctgaaaagttggactacttgttctaatagaaatgctatctacttttaggccaactgacccacactcaaacttccaggaaatataagcaaaagatgatccttcctttcgggccaaatataccatgtgccagtctgtttcaacttttctgaatatagattccattttccacacgccattctcccatccagaaatggtttgattgttatttgaaactcgaacataacgatctttcacaatattgtaacaaaggtggagctgtttagaaatcttctcattttcacagggaataaacaaggtttcttttctctgtagacccatttcacctcgggctactctccaagccactgacccagatattcttcccccaagttctccaggtttaggggttttgggagatataaattcaacaagctccacaattatcctctggagaagttctttccttctgttttctgacaaaaacagttgcctctgcttattaagcccattaatagtgtctcgaagtaatgcttctttaaccttagttcttctggcaatcacctcttcatgtttgcaggaatatcgccaagtgacatcaactacctcatcttttgaaaatgctatgacataggaaagcttcttgccccatcctatttcataaaggagtggcttgtcacagacatcttcacatgcatcacagtgcagccaccgctgctgagaaggagaatagacttctgtccagacatggtctgtgtaatcccaaacatagcgagcttcaaaccctacagctcggcagcacagtgtaaaacaattggcccactcgccacaccgtccacatcttgtttccaaaagtttctcagggttattatatcttgggaatcgattgctgaactggcaggcatcacagtaatgatcttccacttcctttgcaccccacttcagctcatcatcactgggcagtaatgatctatctctagacctagtctgtccaccacatttgctgcacaaaacgttattcacccagtgaaaaaattcttccttaaaccagtgcaaaagctccagcaaaagaaaatcctcatcacttatattgataccc

SEQ ID NO: 317206 - DNA, 1864 bp, Homo Sapiens
  misc_feature (133)..(133): n is a, c, g, or t
  misc_feature (306)..(306): n is a, c, g, or t
gggcaaatatacgagatcataggcaaatatagttctgataatcgactatggcggatcgtgaggactagcaaggtcagacatgcgaggtgtaactgggcgtgagagaatcagtggagaagtgcgtggtgtaganactgatagaacataggagaacaacatggggtgtgtagcggaggtggggatggtcacgagagacgagtgaacaggcagaatgagaagaccgtgtgcgggcatattgggaatggcgagaacaaggcgacggaggtaaagtgagtggtagaaagcgaagacgcggcgaatcatganaggcgggaggactgcgggaggcacacacgaggggcggttgatgtttgtgggcgagacagcacaagacatgaggaaaatggtggggggtgggcggagcggatatacattgtgtagagaaagggtgtagaagtgcggagtgcgcaaggttcgtgcatgagacacaaagtacaagatgagtgacggtcataatggcgaataaaggagggaaaaaaataaagatagtatggaaagaaatgagggtaacagagaaatggcggaagggagaggtcaggtgacgtagcgaacgggaggtaggcgaaggaaagcgacaaatgggggggaaccaggtattgggaagaagggtataaggggggaaaacaaaacaaaacaagggggagtagacgttcaaagggcgaagtagtgggggatatggtgacagaccagtaaggagtaggaggttgtgttggctaggagagcgtagcgtgaggggaaaaaggacaaggtgtgtgagcggtgtaaaatggataaggtgggcaacgggttatgggaggaggaagagacgagcggttaaagggttagtgtgtcgggaagtgtagtatatgaggaggaggatgaaggcgatatagggacagcgaagggcagttaatggggttgtatggggcgaattcgtggttttttttgtattagaaaggacgttgttactaaaaagccacacaatatctcatttagagaatatgcttaacaaaatatacatcttaaaaattcagcactccagaatgctttttcaggtgtttccatttgagaaataaagaataaaaattggtaataattatagacacaacttcatacaataatctggataatatgcaagaagcatcatgttgactttcagatatttctctttgtggctaacgaaccacacatcaaaggatggaccaaagttcagatgtacacagtccagggcacctccaagcacagtggcagtgcccttggggattttctttccctcagtgagagacacgggggatggggaggagcccaggagtgtcaccagaaagtacacaacccagcttcttacccagcctgctgccatcatcaactatcaaaccatttgctcctctttgcaagaggtgctcctttagaaggtcccaataatttctgcttatattgttcgaccagctggttgaagcgggtttccgtcttatttcccttagcttttttcctagatacctgctcggacgataattgctgcttctcctgcttccactggtttatctgtggctttggctttttgggatggacgggcttcactttgcctttgtcccgcaacctgattttggggcctcggtgtgaggggagcgccaggacctttcttctcttctttccatcaggcagctccacctgctccacttcagccttggtctggaacccggtccatgaggtagagcccgcctttctcttctgctctgggggcaccttgctttgttcctctgtgtggtgttgagctgccttctgttgctggtcttttgcaggctctggttgccccttctgaggctcaccagttgcaggcttggatctc

SEQ ID NO: 317207 - DNA, 588 bp, Homo Sapiens
atacatttcttaaacaacacatacattatgtaaaatataagaattaatgtacattctcaaggtcagattcagtgacaaaatgcactacccgaatctagtaacacatttactccttgctgcatataagtggcgtgtaagaaatacagggtatattgttttgtgatccatgcagtaaatgttcacaaatatcaagcaaacaactagacgttcttcagctactaaaattaactgtcccagtcacaaaagacttaacaaaaataaaagcatggatggttacatcaaaaccatgctggactgagttcgtcctggaagagctggttggcagggccacaaggaaagcactggcagctgcaaattttcctcttcatatgtgactgagactattctcttcttacatggctttaccccataccacaggcttttgctaaagaggcatttcaggtttcaaattaaaacaactgacctttagtgaaaaagcagagaaatgcctctcttgagtttctgatcctagaaacagcttgctataggtccttagggcaaatgccaggagtcaaagaaactgtagaacagtctcaggatgtaaacaat

SEQ ID NO: 317208 - DNA, 726 bp, Homo Sapiens
  misc_feature (150)..(283): n is a, c, g, or t
gtggggggaatccacaccccttatttaattccccgggttttttttgggaaaacaattatgggcccctgtttcctttcccctttggggccccgccccgccaaaagaaaagttttaaaaaattttttggggggcgggggcgggggccccagnnnnnnnnnnnnnnnnnnnnnnnnnnnnnnnnnnnnnnnnnnnnnnnnnnnnnnnnnnnnnnnnnnnnnnnnnnnnnnnnnnnnnnnnnnnnnnnnnnnnnnnnnnnnnnnnnnnnnnnnnnnnnnnnnnnnnnagtgcttgatatttattgaaaataatgccaatgctttttccaggtagtattgaggagctgggctgagtgcttgtttgttttgtttttaagtactatttgtccaaatgcacacatctgtgggactgctgcaattttgaaagaaaaatgacagctgtgtaaaaccagtgcataggaaaaaagaagtgtcaacaatttggctgccaggcacaccgcgcccctgcagcaatctggtggggcaggggaggacactcggagtaggtagaaaactaaccaggctgaacggccccttcaggggttggtgagctgtccaaatcaatgtctgaaaaggcatagccaactctggcattttccaggttggtcctgatctcgaaaggtggtagtctgtaggtgggatgtggtgagtggatgtgaagtggcagcatagttctctgggaagatgtaag

SEQ ID NO: 317209 - DNA, 367 bp, Homo Sapiens
atgagccactgagcccagccccattcttcttttaagatgtgatttcaagcataacaccagtatacccaatacacaggagaagaggctgtctgatcaatgctggctttgggggcaagagtcctttctgttcggcctctgctttcatcttgtctgaacagaaaaccctcagatctctggggaactcagtgtgaaaactttgaatccaggcgggggcccccaagaggcgatggccatgagggcagggggtgggtggggaggcttcgtgggctcacctggttcacgatttctttccctttcagggcccggctgtagttctcgtggatgtactgctccttccagtcctgtgagagggtggggggcacatcag

SEQ ID NO: 317210 - DNA, 1042 bp, Homo Sapiens
cggctggaccggtccggattcccgggatcaacttctggggcgccctgagccccgatgagtactacgcccgctccgaggactacgtggagctggtgcagcggaagcgagtgggtgtgtggaatgtaccatacatctcccaggcctatgtgatccggggtgataccctgcggatggagctgccccagagggatgtgttctcgggcagtgacacagacccggacatggccttctgtaagagctttcgagacaagggcatcttcctccatctgagcaatcagcatgaatttggccggctcctggccacttccagatacgacacggagcacctgcaccccgacctctggcagatcttcgacaaccccgtcgactggaaggagcagtacatccacgagaactacagccgggccctggaaggggaaggaatcgtggagcagccatgcccggacgtgtactggttcccactgctgtcagaacaaatgtgtgatgagctggtggcagagatggagcactacggccagtggtcaggcggccggcatgaggattcaaggctggctggaggctacgagaatgtgcccaccgtggacatccacatgaagcaggtggggtacgaggaccagtggctgcagctgctgcggacgtatgtgggccccatgaccgagagcctgtttcccggttaccacaccaaggcgcgggcggtgatgaactttgtggttcgctaccggccagacgagcagccgtctctgcggccacaccacgactcatccaccttcaccctcaacgttgccctcaaccacaagggcctggactatgaaggggggtggctgccgcttcctgcgctacgactgtgtgatctcctccccgaggaaaggctgggcactcctgcaccccgggcgcctcaccactaccacgaggggctgccaacgacctggggcacacgctaacatcatgggggtcctttgtcgacccctggcactcaaccactctgccaaactgccctgcatgtggccccttttttaagggggcttggcccccgtcccggggt

SEQ ID NO: 317211 - DNA, 581 bp, Homo Sapiens
  misc_feature (72)..(80): n is a, c, g, or t
  misc_feature (113)..(128): n is a, c, g, or t
  misc_feature (133)..(134): n is a, c, g, or t
  misc_feature (136)..(142): n is a, c, g, or t
  misc_feature (146)..(190): n is a, c, g, or t
  misc_feature (195)..(316): n is a, c, g, or t
gggggaaaacaccccctttgttttttcccgggtttcttggggaaaacattttgcccccgtttcccccctttnnnnnnnnnccgccccccaaaaagggtttaaaaatttttttnnnnnnnnnnnnnnnnccccnngnnnnnnntttnnnnnnnnnnnnnnnnnnnnnnnnnnnnnnnnnnnnnnnnnnnnnttttnnnnnnnnnnnnnnnnnnnnnnnnnnnnnnnnnnnnnnnnnnnnnnnnnnnnnnnnnnnnnnnnnnnnnnnnnnnnnnnnnnnnnnnnnnnnnnnnnnnnnnnnnnnnnnnnnnnnnnnnnncaattatttaatattgtcacactgcaataacaaattttaaaaggaaaatagttatgtataaatgaagagcagaccttttacactttttcttgaacaaaattagaaaacattttttcagttaaaaggatacaaaatatatgtagcaaaataagctacaagtacttgaacataaaaggtgtccttgtatttggataaaacttttcctagagccttggcatcatccatatctctgggaaccttcatattcactctttcttcttcaccc

SEQ ID NO: 317212 - DNA, 1091 bp, Homo Sapiens
  misc_feature (590)..(590): n is a, c, g, or t
aagtgcccttaaaggtcatcaaatgcaagctaatacttctacctaagtctcctcatcaatcatttaatattgtttacactgcattcacagtttgtgtgttaaccacttatgtaatttatcaaatggcatatttggaaatgtaagggagaaacttggtttaggtaatactctatgtatcagttacccattacatgatttattttcatcattatttgcaacgccacacatcttgtagttttctgtgtagtctctgcatgcagtctacttcagcttctagtgctgtacatatctatatcttctgggtgggactgcccgtgatccatgagcttggggtcaggcataaactgggttgcacctgaagtggattctgatttggtctttgcttcagagctgagttctgttggcaagggcactgagtgtttcaagacgtgagttggtttttgcaggtacttctatttcggaagaggatcctagcttagttttttctttaggtttagggagtgactcttctttgctgctttttgtccacaatgatttaactgctccaaaaatttgctggcttgtagcatataccttttttgctgttaccnttagcaattattacggactgaactgggtagcaaacagttgctcctaaagtggccagtcccagaggataagtaattttcttaaacttggaaccttttctcgctgaaaccaagcccgccaatcctgaaactgtaataactcccattttcggaagaaaatctcgaggaggattcttcagatagacataagcatcttttccaaattgtactgtatccattatcccatttttcacaaagacataaacacccttgcaccagccaatgtaacaaccagttgcagtgcggatggaagcaaagcccatttgtaaatgaccaggctgctcttcaacatatttagactggagcggtggtgcagtatatatggggagctgctctggtttcactagctgctttttggattcctcttgtttggctgcatgtacacttacagatgcatatatcagacctgcaggcatggttgtcagttttcccatcctgatggccgccatgtctacaaccctttcg

SEQ ID NO: 317213 - DNA, 2149 bp, Homo Sapiens
tcgaatacaaagttatatttattttcaacaatgaaaacaacacaacaaagtggagtcaatccactaattttttaaatctaacacaatgcttagcacaaacaatactcaataaataacacattaaccaagtaacattattcttaacactctctagagttgtgtgcgcgttttaaggaaaactgaggggtaggtaaagaaagacatccggcagacttgactgagaagggctccaaaaaaagaacagccaaagagcagggtacccaaatactaagttagcaaaatgaatacagcattttcaaagcagtctagaaatcagagctcactgggggaaatgacaagggtttggggataatccgtgttcaaggcctcataattaaatcttctcctatttctagattctttatttggaatctatcccaatctaaaggagcttctgccaaaggacaggagattacttatgctgcctgaaatggcctatgcctcctaaatttcctttcactttgtcactactatagcaagggttccattccaacaatggattactactatgtagactaactcctgtctgatttagatcttcctttcataaacacattgatacttgttcaaggacagctgtaaatacatccaatttcttttctttttatccccctctacaactctgcttggctacaaaaatctaggactcacagagcaacagcagcgatggtcagaaaataagtgccagttccaatgcaagaactctctaaagttcattggtcacaattttttttaaccacctcacctaccatgacttttttcttttctcattatcttgccaattatttctttcgaaattcaatcctccgagctacattctgagcaccaaattttttgaccaatgcctctctggtatcctcatcatctttttgcaaatctatgtcatcttgtcgggaccaaatgggatatccatcagctctctgaccagacgctaagaaggcggaagtagcctccagctcaccactattttttaggaaggcctgtgtaactgttgatagatccaagttaaacttctccattaactgccgaatgatcttaatggcagctcccacctctggttgagaaactttttcttcttcttcttcttcctcctcatcaggctgtgtttctgagtcttcctcaggtgtgggtggatcatcatcacacatagttatatgtatttcaaaatcaggagggctctcatccaccacaacctcctcaaactcccgggtggcttccacaagcatctttttgactgcttcttcattctcctggatttcttccttcacatactcttcttcaggcaaatctggagttctcttattctgtggttccccgctatccgcggcctccgggtcctcctccgccttccgcttgagcttctgggaggaggggctcaccggcgcgtcccccagcaggtacttatgctcctggccccgcaggtgcttgaggtagcggtccttcagggactgccacgagtgctgcgtgagcgagctcttctccatcgctttccacaaggcgttaccggtgacggagctgggcgagcgggcattttccttcacgtaggtaaggatggctacgtcgtccgcatccgtgaaggcgatccgcccggcgtgccgctgcggctccggctccgcggcgccctcggccagggccccgggctttgcttccgagccggtgtccgccgccgaggcggggcccagccgataggcctccagctccagcctctcgttgcgctccacgcagtccaggatgtactgcgtggagatgaaatcacccgaggcctcggccagcgcctccccgggctgggccagcagcacggccccgggctcctgcactcggcacacggtgccgccgccgtgcaggatgagcgtcgacagccgacgcttggccgggctgggccgcacgtagaaggacatggagctgccgtcgtccctcacgaacagagtcgaggaatgggtgggcccgttggggtctttgcccaaatccatcgcctccgccatgtctgacgccgagcactactagaagagctaccccctcgcgagcgccctcgtgccgaattcgccacccaggcctcgctacgggagagggaggaatgtgggggggtggttaggggtaagagggtaagggg

SEQ ID NO: 317214 - DNA, 1177 bp, Homo Sapiens
gtaaatacgggcttttattcactgccagctccaggatggaaggagggggtgaatcatgcacagccttggtctaccctccaacactaggcagtgctggacaggggactcagaaagggaagcagagtgggctgttgatgtctggaaagctccctcaccagagtgcccagtgggtcacacagcatcatgggggatgagctggggctggagtcggctgtatctgacaccagaccctccattcaagctcccttgatgacaacgcccgcaacagggtctggctgatgctccgttctgccacgactcctggctgggtgatcgtgggacaggtctccgcccctcgctggggtctcagctgctttgtctgtaaaatggaggtgatgacaccacctccagctttctcaaggctggctgagggagaagccacgtaaaagcgcttggcacacagtaggtgcttaataaacagtcaatgcccagagccacacagtgaagctgaaattcaaacttgagcctcgactgggttttctggcttgaaacttcatcccagagaggctctgaacatatggagggaacccctaacaggtgtttcagaacacatcacggccaagggcttactctgctgggcctcaaacacacggcatcttgtccagggtagactggacaaggccaggccaagcagagcctgaggggaggggacactgagtgtttctggaagtagctggacgtaatcccgcaggactggcatagtggagcgtgccccgagacagccgagcatttctggaggctgccttggcagttccaggtgaggcctgtaccttcctttatcagtgcccacctggggagcggatgacccctctgcccagatccggtgaacacctattcatccatcaaagctccagctcccatatcccttctccaggctgaagccagcaggattggaggcagactctatatatagagcaggcactgcctgggcatggcagctatgatggtgggaagtggccttcagaatccagtccatcgctgggattacattgttttgtgggtgagaggaattgtttacggacactccaggttgtagccgaactgggccggtacaggtgaccaggtgacttcaactccatcccctcaaatgggtaggtgtggggaggggaatgagaccaggtaacacaaaacacttaaa

SEQ ID NO: 317215 - DNA, 547 bp, Homo Sapiens
  misc_feature (53)..(53): n is a, c, g, or t
tgcttgcataatccaacctttgtgaatctatcagtcttgtaagcccaacacanccatcatgtagcacttataggaataaaagacttatggtattagaattacctaaagatggggaagaattctgaatttgaaggtggaaaatcaacagtgaattgtagtaccactccagttgcggagagatttttcaccagttccacctctctgactctaaagcatgctgcatggtatccaagtgaaatcctggatccccacgtagtgctgttaacatcagacaacgtaatcagaatttactcactacgtgagccgcagacacccactaacgtgataatactttcagaagccgaagaggaaagtctagtactcaataaaggaagggcgtataccgcatctctaggagagacagcagttgcatttgactttgggccattggcagcagtcccaaagactctatttggacaaaacggcaaagatgaagtagtggcatacccactgtacatcttatatgttggaaagctgttgggtccattgcccatgcatcctgcggctg

SEQ ID NO: 317216 - DNA, 913 bp, Homo Sapiens
tcccccaatgccctttgaggttgcgcaaagctttcgtcacaacaacggtgcagcctgtttcgaagtcccagaagcgcgggatgtagttgcccaggtagttcaactgcagccccacagcaggaaaagaaggcatcacgctgagctcagatgtgaggacagaggcagtgagttcatagcaggccccaggaaggtggccctggccccagggagacaccaaggctccatccaggttctggaagatacggcagcggtggtccagggtgatattgatctgctccctcttctccgggtccaagaagatcttggtgtaaaacagctgatcgctgtcgctgtcctggccctcccactcggccaccagtttgctgaggttgggggcataaccgatgaagcctccagagcccaggaacctcttgccatcggacaccaccggatacttggtctccagcctgcggtctgggtagatgagctcctcagcagagaagaccacctggctcctggcctgccggaacttcttcaggagctcccggggccccgatgcaaacagcacgtcatagctgtctgtgaagagaatgaccagatcttccttgtctgcgtgcttctccagagctttcttcagcagccggactttctgccctccacctgccgacgtccccttctccacattccagtcctcccctaggccaagcgcctggatcttgtagttgaagaactgagctgagcgcttgaagcgacggaatccctcggtctccttagtggccaccgtgaggactaaaaggttgtcctccggcttggcgtcgcctttcgcttcggccagcagcagccagcccagcagggccagtagcagcaggggccgcatggccgaggtatgggggacgatcggccgacccggcggcgctcgcagggctggaaactt

SEQ ID NO: 317217 - DNA, 2956 bp, Homo Sapiens
  misc_feature (2938)..(2938): n is a, c, g, or t
cggtggtttaaatgacctttaatagaaactctccagtttctgacggtctgtccctctcttcagaggcatccaggacagggtgacccagtgtggtgtgtggacctgtcactcccctccccacaggcaagtagaagatcgagctgtgcacagatgcctcttctgtctcccaagaggttctctggagtcgctgtctccaggggactacggtttgctctcatgaccagccatggaggcagaagtcccagactcagggcagcccttggagtctgatccaggtgtctttaccccaaaacttgaagcagaagtccctggtgcaacacctgtgcctgggagaagctctggccatggcttctcacccagacagtctttctgggcaacttggggaagcccctgttctgctcaagtctcaccccatggaagaggtgggggaagggggccttggtttttcaggaagacaggttggagagcacgagtcactacaaagcagtaaaagtgaatggtgtctccaggggctgggtccagaacaccacggagagccccagccataaaggtgtgttccgcctctggcctgcaggaatctctttgaatctctttgattggtggctccaagagcaatgggaagtcaacagccaggaggctggactgggttccctgggaccccgaggtcccagaggctgctgggcagtggttgtcggcaaagaagaaaggtccaagagggtcaggcctggccaattagggatcgacgaaggagactgcgatgtagcgggtgcccctggtggtggggagcccctcatggtaatgcgtgagtcgtccagggtgcatgagggtccagcccttccttggggctcggatggaacagttgtagcgcaggaaccgacagcccccgccctcgtaatccaccccgactcggttcagggcgatgttgatggtgaaggtggaggcatcatggtgtggcatcagtgagggctgctcatcaggcttgtagcggacgacaaaggccaggtcaaactgggccctggtgtagtagccggggtagagcttctccgtcatgggcgcaatgtactccagcaggaatttgtgccactcccgctcaaagccgatctggttcatgtggatgtcaatagtcggcacgttctcgtagccaccctggatgcggttgtccttgttgttgcccagagaccactggccaaagtgctccatctcctccaccagctcatcacaggccacctccgtgaagatggggaaccaatagacatccgggcagggcgtctccaccagcttccctgccagggctttggtgtagttctggtggatgtacttctccttccagtcctcggggttgctgaacacctcccagaggtcgttgtgcaggtgggtggtgcggtagctgtctagggagagcagatggccaagggtgtgccggttggtcaggaacatgaacacatcctgctgccggatgttggcacagaaggccatgtcggggtccagcttgctgtggtggaagagatctgaggactgcagctcaccccgcagggcactgcccttgatcaagtagatgtttgaaatatagggcacattccagacaccaacacgccgcccctgcacaatgtccacgtagtcctcggaacgggcatagtagccatctgcactgagagccccccagaagttcgaccacagcctcccatgccgggtcatcagcggggcaatgacgttcttgttctgttggatcagcagccgcaggctgttgggctcggtcagggccacgtcagcatccacgctgaagtagtaggtgcagctgcggtcctgccggcacaggtctgcgcccatgttcctggcatctgcattcgccatccgcacctcagggcccaccagcttcacagactggtactcgctgccatgctgtgccaggaactcttccacctgagccttgtggtgctgctcgtggttgtggatgaaaagtcgcatgtgtttctgggggtagtggagccgcaggagccgctggaagaacagggacacaaacggcgtgggctgttcgatgaacacgccgaccaggaccgtgggcagagcttcatccccaatgcccttgaggctgcgcaagccttcgtcacacacggtgcagccttgtttcgaaggttccagaagccgcgggatgtagttgcccaggtagttcaactgcagcttggttggcccgttgccatggatcaggaccgggagggtgtcataggccaggttcctcgctctcacatggcccatttcaaacttgagcacgacctcatccaaggctccatccaggttctggaagatacggcagcggtggtccagggtgatattgatctgctccctcttctccgggtccaagaagatcttggtgtaaaacagctgatcgctgtcgctgtcctggccctcccactcggccaccagtttgctgaggttgggggcataaccgatgaagcctccagagcccaggaacctcttgccatcggacaccaccggatacttggtctccagcctgcggtctgggtagatgagctcctcagcagagaagaccacctggctcctggcctgccggaacttcttcaggagctcccggggccccgatgcaaacagcacgtcatagctgtctgcgaagagaatgaccagatcctccttgtctgcgtgcttctccagagctttcttcagcagccggaccttctgccctccacctgccgacgtccccttctccacattccagtcctcccctaggccaagcgcctggatcttgtagttgaagaactgagctgagcgcttgaagcgacggaatccctcggtctccttagtggccaccgtgaggactaaaaggttgtcctccggcttggcgtcgcccttcgcttcggccagcagcagccagcccagcagggccagtagcagcaggggccgcatggccgaggtatgggggacngatcggccgacccggcgg

SEQ ID NO: 317218 - DNA, 328 bp, Homo Sapiens
gagaccctgtctttaaaaataaattaataaaaataatgtcaccaacagttccatccacacctcagaagggcagcctctgcccaataagcctttctcagagtgtacaaagcaggatgaaaggacgagagtgacaagcttccaccagtgttcatttcccctaccccaatcacaatgttgaaaggaagaagcttttgctaaaccaacctgacaaatgggtaaactgaggttcgggaaggcagggtgagaaagaagtggcacaacaggaacacgaactgactccactggactccatggcctgagcttgcttaaacctcgtgccgaatcctgc

SEQ ID NO: 317219 - DNA, 507 bp, Homo Sapiens
attatctcaaaatgtgtatttaatggccattccatcaaaataaagcagaatcccatttcaaaactattatatgtatatatatttttaaggtgcattttcaagttttatttgggtttcatttcttcttggcttgcctgaggtgttcttgcaggtacaattaacacaaaatgttctgagggtagtagcttttcatgcactgaagaatgagatcctaacaacattgcacatcttggatacattagaaattttaaaagccatgtgtaatttcagaaaacttaataccgtcatgaaagacattttcaacacaaaatttaggcactctatactttggaatagccataaaatattccaacaagagttaatgcactttgtgattacatctactcaaagataattctcaatttaaatctatacttattaaataacattttaaattagagcccattaaattttgataattactgtgaaatatttgcagcagtgtgttgtagttaaataatgctgaac

SEQ ID NO: 317220 - DNA, 1063 bp, Homo Sapiens
  misc_feature (215)..(215): n is a, c, g, or t
tttatgataaacaccttttattatatctcagtgtgcaaaaatacaaattatcttaaaaaaaatacagagcactctcgctatggatccaggcaaagacaggacaaacaaaaattccctaacagatgacagtgaacacttcggtggattgaatctgggaactacaatagccctgctctcattatactatgaagccaaattaattcaactttgataantgatacacacttaaaactatgaaaaccaattaagggcacagtatcattcaaaatttatagacagaagagcaataatcccgagaaaatataattaaaatactctgctgaacatggaatgacaccacatttgtaacttaacactggcaaaatttggaatgattatagcataaaagacatggtttttctgaaaagtggacagggaggtgtggtatataggaaagtggctcacattcaagactcaagtttattttttaaaagatctcttctgcattagattctaggtttcttttttggtttcaaaactgggtctacaatccataaaaatgacattaatggagatcttaaaaacaatctgattataccagcagtttggtaacatatcggtagagctgttctgtaaatgcttcaggggaaaatttttccttcactctggctcttccagccaggcccatggtggcttttaaggaaggttcacggatgaacttttctattgcttctgagaagtgcaccgggtcaggctcacacagaaaccctgtgacactgtggtcaatggactccaagggtccacccgaattaacagcaatgactgggcactgcatgtacatggcttccagagggacaatgccaaagtgctcattgcttggtgtgtaaagcacacacgtgcagctgtggaggagggagattttctgtttgtctgagaaagacctcaagaaggtcacatactggccaaggtcggactgttggaccattttcttcaattcctgataatgttccacattctccaggactctctcgtcataaccacctgccacgatcagatgaaccctctcccaatcttgggatgtccc

SEQ ID NO: 317221 - DNA, 463 bp, Homo Sapiens
  misc_feature (68)..(126): n is a, c, g, or t
gcatgagccaccatgcctggcccaaaggtctagaattttttaaaggtattcatggtgactcaggaatnnnnnnnnnnnnnnnnnnnnnnnnnnnnnnnnnnnnnnnnnnnnnnnnnnnnnnnnnnntataatttgaaagaggtgagtatgtactctgacttcagctctcaggttttaagattttataacctggagcagattattttaaggtgattagtagggtctgttacaggttttcttttggtcgtgcacttatagtcttcatttaattcctcatagaatcccagtcacctttatatatcatattattggaagagattcatcttcataatctccagatttttcacagtgcctcacagagttaatcatgccttttggagctagaaggactttagaacttatctagatatgctcctttatattataagtaagggaatagaatcaataagacagtttctgtcca

SEQ ID NO: 317222 - DNA, 447 bp, Homo Sapiens
atagatctcctacgtatttcccagctctgtcacccaactggtaacatggactttgggcagaaactgtcttattgattcctattcccttacttataatataaaggagcataactagataagttctaaagtccttctagctccaaaaggcatgattaactctgtgaggcactgtgaaaaaactggagattatgaagatgaatctcttccaataatatgatatataaaggtgactgggattctatgaggaattaaatgaagactataagtgcacgatcaaaagaaaaactgtaacagaacctactaatcaacttaaaataatctgctccaggttataaaatctgaaaagtactataatgattattcttgtcataactggtcccactaatataatttttaaaacctgagagctgaagtcagagtacatactcacctctttcaaattatatg

SEQ ID NO: 317223 - DNA, 416 bp, Homo Sapiens
ttgacagtttgacatttttattgttattaatacccgaataatgcattgttatttttataaactccatggtggcaaacatttttcctttatttggattaaaagtaggtgtatttgttacttcccctcattaccctgggctggaactcagggtctttggctggggagcagggactggggtgaagggaagcccatttgccgagtcctttcccaagtggcagaggagccaggccccagagctggtcacttggcaatagcacagtcaaggtttgggcaaagcctcctggcctccattcccgcctgggaaggcaggatgctcccggagtcttccctactggagaggcggtgttctggaatacagagcctggagactttgtcctggacttactcaggggctgtaaatggaagtacacttgtgc

SEQ ID NO: 317224 - DNA, 851 bp, Homo Sapiens
  misc_feature (124)..(124): n is a, c, g, or t
  misc_feature (198)..(207): n is a, c, g, or t
  misc_feature (209)..(214): n is a, c, g, or t
  misc_feature (216)..(222): n is a, c, g, or t
  misc_feature (226)..(227): n is a, c, g, or t
  misc_feature (229)..(238): n is a, c, g, or t
  misc_feature (240)..(282): n is a, c, g, or t
agaaacccttcggtttttccccccgggcgtttttttatgtggtggggaattcccaagcctctggtcatgggcccaggattttccttgggaaaacaggttatggcccaggttccctttacccttntgggggcccgcggcgcccaaacgaaatggtttaaaaaagtttttcgagggcccgaggcgggcccccattttttnnnnnnnnnntnnnnnntnnnnnnnaaanntnnnnnnnnnntnnnnnnnnnnnnnnnnnnnnnnnnnnnnnnnnnnnnnnnnnnncacacagacacagaatttatttctggacgcattctgcaggctggaggtcccggcaggcacagggctcacaccttgggttttgcaaacacctcccagccctccagccggcccatcttgaccagggaggccgctatgccaaagtacacgcaggcggcggcgccaatcccgtagttgtgcgtgcgtgctcccagagtcaggcctccggcgcagccaccgaggaagtagttcagggggtcgtcgggcttctcgcggacatgggcgctgatgcaggtggtgaggccaaacacggccccgacagcagctgcagtgaacgtgtattgtccaaccttagccactccttcaaggaaggtgcccggaggattgagtgtgactctgtaggcagcggcggtcaggccagcgacgctggcaatactggtggtgctgtaggctttgcggtggcaatcggtgccatcggggatatcccagtactgacgaaaaaccttcggcgccatagcccgcaatctcgatcccgcaccacggaccccgccagctcgggaagcgcaagggcagccgcggctggctatcgcccc

SEQ ID NO: 317225 - DNA, 693 bp, Homo Sapiens
ggggcgcaaacactgtttattgagtggcaggcacaggagaggtagctggctccggtgtggaagcagaggtggcaggtcatgccagggtgctgtgggcatctggcagccagggccatgccccccatcctagggggacggcacaagctcactatgacaggagcagcaaggagccggccagaggagggggtagccacgacccccaggatcctgggcaagaagcggcagacaaacttggcacaggggcctagggtgagggggactggggcctgggtattctgtggggagggaagggggctcacgtctgtggggtggagtagagactgtggtggtggccgcctggtcctggcacctgggagaagagcagaggagtggtcttcgtctggctgcccccataccagccccgtcacgcccgatggcaccataccagctcccagagcctagactgcccgacatactggtgctctcaccccggctgtgctcccaggagcagccctcatcttcacagtgcccagcccggtcaaagaagtaggaccgagaggcaaagacctgcccattgaggatgtggctggtgctcaggtcctgtgggggccggtgcacccggaagtagcccaccagcagggtggtgggcagtagctcccacacgaagaggatgaggccaaataccaggtagcctttgttccccaggtcattcac

SEQ ID NO: 317226 - DNA, 477 bp, Homo Sapiens
gttgagaagcagtctcatgactttattccttatatttcacattggcagcaggcctgcaatgaaatatggctcattttttttggtcttgggctttgaggctaaagagagggtttagcagaggatatcataattcctttttgtggatacagaagaaccttaagcagttgccaaaatcaggtagaataagacaagtattggtccactctcagtaactccaaggcctcagagtttttccttagcttctggggaactggtatctacaaggaaatcaagaggcctagtcccctaactgctttcggagcacgttgtgggaggtgcagaccaaaggtgagtttacacatcagtgactaaagtttcctgccactaagcataagaagtcactcatgagcagcgtccctaaaccacagctacaggatgtgggcacaagcccttgtataattgttggccaagagccaatgagcattcatcccctcgtgc

SEQ ID NO: 317227 - DNA, 1026 bp, Homo Sapiens
ctttctgggatcatttctcttgatgtcataaaagactcttcttcttcctcttcatcctcttcttcatcctcttctgtacagtgctgccgggtacaacggctatctttgtctttatcctgagatgaagatgatcgcttctgtttctcctaccataactgaagaaatttcgctggaagtcgtttgactggctgtttctctgacttcaccttctttgtcaaaccttgagtctttttacctcatgcccctcagcttccacagcatcttcatctggatgtttatttttcaaagggctcactgaggaaacttctgattcagaggtcgaagagtcgctgtgatttttctcctcattttgctgcaaaattgcctctttgctgtctgtgctctcaggcaacccatttgttgtcatgggggctgacaaagaaacctttggtcgattaagtggcctgggtgtcccaggcccatttatattagacctctcagtatagcttggtgaatttccaggaaacataacaccattcattcgatttaaactattggaattgtttttctctgaagaaggataaacacagctaacaaccatcacattcttttctactcctctgagaaatttgtctgttcctgtatagtttctccttggatctgttaacaattcacatagtcgctgaatagtaaaagggataccattaaatccagtgacaattttcagtattctttccttcatttcatcaaagggaatatattcgacattagggttgggaggacctcttggctcaggagctgaagttctgaaatcatccatcactttctccagtttgaaaataaaatagcctttaaattgggaccactgaatcattgtttctccagtcttggctacatgacaaagaaactgatccaggacaggacaaacttcctttttccccctcttctcaaaatctttcagcgcctcctggagcctctcgacgtccatggcttcccggagtccctcacagcctccgcctccctccgcgggtctcttggggaccggaa

SEQ ID NO: 317228 - DNA, 718 bp, Homo Sapiens
  misc_feature (29)..(29): n is a, c, g, or t
  misc_feature (41)..(41): n is a, c, g, or t
  misc_feature (54)..(54): n is a, c, g, or t
  misc_feature (63)..(63): n is a, c, g, or t
  misc_feature (74)..(74): n is a, c, g, or t
  misc_feature (80)..(80): n is a, c, g, or t
aatgtctcttaaattcccaactccaatcngccaacctcccntttcctaaagctnaagaacaanaacgctcctanggtccnagcccaggcatctctccaagaaaggggcttgaagagtttcggggcccctgaatggagcggctcacttgctggccgtgaacgccctggtttcccgtgatagctctcccaaggatcagggcgtgaatgtcatgtgtactttcgtaggtgttcacggcctccaggttcatggcgtgccggatcacgtgatactcgtcagaaatcccattcccccccagcatgtctcgggcctggcgggcgatgtccagggctttcccacagttattcctcttcagcagagaaaccatctcgggggcagccttgtcctggtccttcaagcggccgagctgcaggcaggcgtgaaggcccagggtaatctcagtgagcatgtctgccagcttcttctgaatcagctggttcctggccagtgggacaccaaactgcatcctgtcgagggcgtactgccggtctgtgtgcaagcagaactccgaagctccaagcacgccccacgcgatgccgtaccgggcgttgttcaggcagccgaagggaccccccaggctggatgcaccagggagcacattctcctctggcacctccacaccgtccatgatgatcatgcctgtggctgaggcccgcagcgagaacgtgccctggatctcgtg

SEQ ID NO: 317229 - DNA, 637 bp, Homo Sapiens
gctcctgttcctgaagtttaagagcgagggtcctctcttgctctttcagcaactggaccctgtcgttctccatcttctcagtcagttgtttcacgtgttcttgataactccttgctgaagcctgtgcagattcagcttttacacgttccacttcaatctccttttctttttctgtgagagtctggtctgtctgtagaattgcatcggtcatagactccttggatttcaagtatgtctgcagaatctcttcagcctgtatccccttcctcggttcctcatagtactttttcttcaggtcttgtagcttctgaacaaagagacgatagccccctggtttcgaataaattcccgccttcacttcttcttctagaggactgaaaatgacctgaagtaaagctgagcaacgatctgatgatgcttcttgattctgtttacaaaagtcatcccgctttttttctagctgggccgctaatttcttttgaaatagatggtccacatctttgaaggagttcttgatgtagacttcagtggcctctctctcactgtccctgtgcaggtccagcagctcctggagggtttctgcgggcagctgcaccttctggcccatctgctggtcatagtgggcaatagccttttg

SEQ ID NO: 317230 - DNA, 1529 bp, Homo Sapiens
  misc_feature (39)..(39): n is a, c, g, or t
  misc_feature (70)..(70): n is a, c, g, or t
  misc_feature (77)..(77): n is a, c, g, or t
  misc_feature (84)..(84): n is a, c, g, or t
  misc_feature (89)..(105): n is a, c, g, or t
  misc_feature (114)..(114): n is a, c, g, or t
  misc_feature (117)..(117): n is a, c, g, or t
  misc_feature (119)..(121): n is a, c, g, or t
  misc_feature (129)..(129): n is a, c, g, or t
  misc_feature (152)..(152): n is a, c, g, or t
  misc_feature (192)..(192): n is a, c, g, or t
  misc_feature (256)..(256): n is a, c, g, or t
  misc_feature (268)..(268): n is a, c, g, or t
  misc_feature (274)..(274): n is a, c, g, or t
  misc_feature (834)..(848): n is a, c, g, or t
aagatcatcttctctttcctaggacttttgagagataanagaaagtgtacatatactaggtaaacttaanatctttnttaaatntgttnnnnnnnnnnnnnnnnntcccatatnctntnnnggggaaanttagaaagatttcatagtatgantttgaagaattagaaaagactataataagctttaacattntaaataataagtaatttaattatttcagtttagttacacagcatcttttaaagttcatctttgnaaattatacgtngctatnaatacattgtgtatttggcattatgtgaatttgtttaatccagtgtcaattgtctaatggtctaaagtgtcccattgaagttataatctggatgaactgaacaataagagaagttttcttcattagcccaattaggtttatcactcaattcctactcctgcccatggtttcttccaccttcctctggagaacataaagagattttagatctctgtataaggtggtttgctttagcttgaaatcatcagtgaggattatacatgggcaatgtccagaaatcacattattgctcatagaccgtgtagtcttgatctaatggataactgtacattgtcttcactaagaagctagggtggttgtccttgatattgggacattgtagacttggccagaccaatgcccaaatatttcccaagacttttacctaagactctgctcagtatccatttgtctactgctggtcatctggaagaataaacttctcctgagtggtaccagcttatgagatttcctgagttgatacagaggtaaatgcatctttgttgcacaatttacagtcnnnnnnnnnnnnnnnaagaaaaaacatgattttgatcattgtaccacatgcctttataaacttttggtgttatgatgcaagatctaattattatcaaatgtagtgacgcttgttccaaattctaaaattgtttcaattatgccttggttaggggtgacaggaaggctctggtctttagcttatggtacatgcctttcgtcgtctcattttcgtctggagatcctgtatctcatttttcattattctgctttctttttgaaatccctcttttagtagttgctcctgttcctgaagtttaagagcgagggtcctctcttgctctttcagcaactggaccctgtcgttctccatcttctcagtcagttgtttcaagtgttcctgataactcctctccttctgttccatcatctgctcattctttctttgcatttcctgcaacatttttgctgaagcctgtgcagactcagctttcacacgttccacttcaatctccttttctttttctgtgagagtctggtctgtctggagaattgcatcagtcatagactccttggatttcaagtatgtctgcagaatctcttcagcctgtatccccttcctcggttcctcatagtactttttcttcaggtcttgtagcttctgaacaaagagacgatagccccctggtttcgaataaattcccgccttcacttcttc

SEQ ID NO: 317231 - DNA, 681 bp, Homo Sapiens
gtttggaaagatgaaaaatttattagaaaagatctttaaatggcttttactaaagcgtcatttaacaatttttcatattatagaaacagcttttcatggatggtgtgactgggtctgtatccaaacccggttcggttcctggagccaacggcgtagttaacactcagcctcttgcagttaacactcagcctcttaactgggagtggccctggagcaagtcgctggaatgttcaagctccgcgtcactcatcggtaccaagttgatgatctctgcctagggttcttcgccaccctcaggctcaagtcccaggaggcctcctccgctgacttgggtgaacagctctgagttccggagagggttcggtctgcggagaagcgcgcgagagacaagcatcctcaaggttctggtacaaaatttggaaaatggacctggcgttgaaatctttactcctcgtttaaaaagaccatcgaaagggaaaaaataaaagaaattgcagtttatatttttgttatcccatgaaaaattagctgcagtgttttcctcttcatgccaaagagattaatatttacggtgaagacttttccaggaagtcgtggttttcttcggtcgtccgcgccgcagcccccgcgggcgagcgcacctgcctcgtgccgaattcgccacccaggcctcgctacctt

SEQ ID NO: 317232 - DNA, 1322 bp, Homo Sapiens
tatataaacaaaatactttattattgagagagtaaaggcccaattacaaaatttttatacttaagatctgtttattaccatgccaatggtttataaggactgtagtttccataactgttaggctgaaccccatgaaactccttctttgtagataaaagccagcctaatattggcaatttcacgtggttcaacctcacatacaatgagccactgcctaggattcttttggcagcaagatgttcccagtcacatgtctgtttatattataaacagatgtccaagtgataaatacatccctcttgagaaaaacatcctgtgcttatgtatactgggaatggtcttttgtgggtattgaggcagcgcagtctggctttgctcttcccagcttgcccggccacccgattcctcagtttcatcacaggaggattctttacagatgtcagccacccgtccaaggccacgcagctagtaaacagacaagcctgtcggactttgaaaccaacttgaccgggtcatttataaaggccgggaatacacatgactcaggtgctcttttgagacggctacaaaagtctccattttgatcaaaacgttttctccgaatgaatggctccgatgctttctctttcccatcttaagtccccgctctgtgcctcagaatagtctgtgtccaagaaaataagaatcacgtcatcttgctgtggacactgagcaaaaaggagcagcatgctattaagatggttgagacacacgagtgaacaaagatgggacaaactgtgcttcgttcaagaggtttcatcaagacccgtaccgccccccgtccttcagctctgtacagtaactttaactttacattagagctgagataaaaataaagctttcttacaaataccattttttttccagtgaattacttttgcagtaaaaatagctgctacataaatccctcctgatctctgaaaaggagttgcatatttccaaaaataatattcttattttaatcacacagaagaacgtggagcacaggaaggaaatgtctgggtggtcagagagaggtgagctgtcggagaaacacagttaatctaaaaaataaactccattttgtgtataatctgacttaaacgcatgcaaagaagtggaaaacatatgccatttgtcaagaaaaatactgctttatagcttttactttacaattaaaggagaaagcagaggccagatataagcccagataataacatttaagtttctcataaaaactcccaaatgtacaaagtccttgccagacaaccaaggcaagaaaaccccccaaaaacaaacaaaca

SEQ ID NO: 317233 - DNA, 699 bp, Homo Sapiens
gtgacatcattaaaataggttctttagtaaggaataaagagagatttgttaaacgaagacaacggcttattggtcccaaaggatctacattgaaggcattggaactcttaactaattgttacattatggttcagggaaacacagtttcagccattggaccttttagtggcttaaaagaggttagaaaagtagtccttgatactatgaagaatattcatccaatttataacattaaaagcttaatgattaagagagagttggcaaaagattctgaattacgatcacaaagttgggagagatttttgccacagttcaaacacaaaaatgtgaataaacgcaaggaaccaaagaaaaaaactgttaagaaagaatatacgccattcccaccaccacaaccagaaagtcagatcgataaagaattggctagtggtgaatactttttgaaggcaaatcagaagaagcggcagaaaatggaagcaataaaggctaaacaagcagaagccatcagtaagagacacgaggaaagaaacaaagcatttattccacctaaggaaaaaccaattgtgaaacctaaggaagcttctactgaaactaaaattgatgtggccagcatcaagggaaaggttaagaaagcaaagaataagaaactgggagctcttacagctgaaggaattgcacttaagatggaggcagatgaaa

SEQ ID NO: 317234 - DNA, 837 bp, Homo Sapiens
  misc_feature (288)..(288): n is a, c, g, or t
  misc_feature (297)..(297): n is a, c, g, or t
gaaatcttcgttgattttattcctactggggatatctcagtattgaacaccattaatagtgttggccccaaaacagctcttcactaggcctctcgacttcttcctttgatttgatttccagaccatttctggaatgaagtagttgcactctctgggataagctacaggttttcacagcctctcaaaatgtggcaccaagaaccaagcacactactcaaaatcactttatctaaatcactttagaattcagtggaatttttgccttcctagtgctggatgagatgattnttgcttgtnctcgtgttaattacattcatcttgagcttacagtcagcagacaccctttccttgaattattttctcatataaactcgatttttaagtgaagcctcaggaatcctatacagtatagttaaattgcaatcctttttgtagcatttagcaaactaattaatgcactttttattttattagtagtcttttttaaaactatagactattgtttatctttgtgaaataattaagtaaattattttctgtttatttctttttaatttttgtagtactggagaaaatgaaactgggattgacccatcaagatgcttggctcaataagaaaaccacgttaggagcaacctttgtatattggagacttcagagtaaccagcaaggaagagaaatcttaatcttcaagtcaccatattttccaaatattacatggtacctgagttctgcttccttggatgtcattgcttaaatatagtcttgaagggcttgttttgaaatattgtatatattttttcaaatgtatacattgttaataaattaagaaatgag

SEQ ID NO: 317235 - DNA, 1881 bp, Homo Sapiens
  misc_feature (166)..(166): n is a, c, g, or t
  misc_feature (186)..(192): n is a, c, g, or t
  misc_feature (444)..(452): n is a, c, g, or t
  misc_feature (1424)..(1528): n is a, c, g, or t
  misc_feature (1559)..(1559): n is a, c, g, or t
gggggggagaatccccaacgccctttagttccaaggccccagggtttttccttaagggaaaacagggttagggcccaagtttcccctttcccttggggggcccccgccccccaaaagaaatggtttagaaaatttttttggggggcgggagggggcccgccaaagntttggttttgggtggggggnnnnnnnggttttgtcaaatgttttattgagtgtagacatctggagtactgtaaaacatgcattatctgtagattcaaaaaggagcaagccacattgtcctcactgtcaaatgtgtcaggcttggcatacatgatggagattaatgaagtatcatgagagtaatatggttcctgaaaagcttctacaatttggagtagggtcttaatcacgtgaaaagcaaagctgttcacatttagtgaacctgcatttcatggagtnnnnnnnnntacacagtattttaattttaaaacaaataaaaataatttgtttgtcaaagattcccatctccccaactttatttgtcgcattggttttcagaaattttaattttttaaaaatcagatgccttttggaagttgtatgtttatctgagcaataactaaattttatttcttcttcggttgttgaggtgtgttaaatttgaagaagataatatctccatcttcaacaatataatttctgccttgttgtctgtactttccagcagccttgactgcattttcagaaccttcctctttaaaatcttcgtatttcattacttcagccataatgaatcccttttcaaaatctgtgtgaatctttcctgcagcctgaggagccttagtccctttcctgatggtccatgcacgcacttcatctgggcctgcagtgaaaaagtattctagttggagtgctgcaaacccagccttaatgatctttggcaaagcactttgtgtcatgttcgcttccagatacttctgtctctcctcagcactcaattcttgcaacttgagttccaaggccccactaaaaggaatgaccaaagcacctgggtcatacttgtccacccactctttaatttttatcaaccatttgtttttctttctaatgtagtctttttcagaaagattaaccaagtagaccattggttttgaagtcaaaaataagtgtttattcaacacttcaatctctttgtcattccaatcatgatagaagcgaacaggtttcttttgatctataacccaggattttactttgcacattatatcatattcaggttttagttttttatctcctcctctcacagccaccttttctagtttatctataatgggcccaatcatttcctcatctttaagctgaagctcttcatgtattatttctatatctcgaataggatctacacttccttcaacgtgcgtgatatcatcatcttcaannnnnnnnnnnnnnnnnnnnnnnnnnnnnnnnnnnnnnnnnnnnnnnnnnnnnnnnnnnnnnnnnnnnnnnnnnnnnnnnnnnnnnnnnnnnnnnnnnnnnnnnnaaactccgtgtgttagatgaaagatgccatnacaggcactaatatgagataaaaaagcattccccaggccctgcccattgtgagctcctttcacaaggccagcaatatccaccacatttagaaaggcaggaattttgcttgctggtttgtggtattgacaaagaaagtcaaacctttcatctggcacaggtactctgctctcattaggatcaatagtgcagaacgggaagttttctgctgaagcctgactattggttaacacattgaagaaagtagatttccgtgctcggcctgggcgatgacacggggtcccagcggcagcgagagaaaggtcctgccggcagctggaggcg

SEQ ID NO: 317236 - DNA, 660 bp, Homo Sapiens
ctcatttcttaatttattaacaatgtatacatttgaaaaaatatatacaatatttcaaaacaagcccttcaggactatatttaagcaatgacatccaaggaagcagaactcaggtaccatgtaatatttggaaaatatggtaacttgaagattaaaatttctcttccttgctggttactctgaagtctccaatatacaaaggttgctcctaacgtggttttcttattgagccaagcatcttgatgggtcaatcccagtttcattttctccagtactgggcaaacttgtgaatctgttccaccactgcagcaaaaagagcatggacactctcatcaatcagactctgcatgtaatgcacagcctcttcatccgacaggtctaagcggaatttatcctgaacctttttcacagttttatctggttcaagtgcaatatctggaatgtttgcatcaaccatcaaggaaaacaagttcaaaatcagattagaataccttcgcaggtggaggaaagccgtgtaacactgtttacggaactcttggtactgctcactctgtgtgccccccattccttctaccatttctttattcagcttcattggaagatttggaacctcactgaaaattggtattgttggattgccaaatgttgggaaatctactt

SEQ ID NO: 317237 - DNA, 861 bp, Homo Sapiens
ctttctaatgtattctttttcagaaagattaaccaagtagaccattggttttgaagtcaaaaataagtgtttattcaacacttcaatctctttgtcattccaatcatgatagaagcgaacaggtttcttttgatctataacccaggattttactttgcacattatatcatattcaggttttagttttttatctcctcctctcacagccaccttttctagtttatctataatgggcccaatcatttcctcatctttaagctgaagctcttcatgtattatttctatatctcgaataggatctacacttccttcaacgtgcgtgatatcatcatcttcaaaagcacgtgttagatgaaagatgccatcacaggcactaatatgagataaaaaagcattccccaggccctgcccattgtgagctcctttcacaaggccagcaatatccaccacatttagaaaggcaggaattttgcttgctggtttgtggtattgacaaagaaagtcaaacctttcatctggcacaggtactctgctctcattaggatcaatagtgcagaacgggaagttttctgctgaagcctgactattggttaacacattgaagaaagtagatttcccaacatttggcaatccaacaataccaattttcagtgaggttccaaatcttccaatgattgggggtggtttaattccatcacctccctttttagggggcatcgtgctcggcctgggcgatgacacggggtcccagcggcagcgagagaaaggtcctgccggcagctggaggcggggaggaaggaggagagaacgcaggcccgtcccctccgccgagcggcacgcacgacggcggcgacagccccc

SEQ ID NO: 317238 - DNA, 478 bp, Homo Sapiens
ctgtcatgtgatatgaaacagggaagcagatgcctttaagtcaggatggggacaggcccttgggcctttcaagattattacagacaactccaagtagctagaggcctggccttacccccactgggtaaggaggagcttgagtcacaccatagatccagactatctggctgacccgaggagaaggtctctgggacagtctcctctctttccctgactctcttaggcctgaggagaaaggctggggtctggagatgctggtcttgctggggtcaggcccaaagctgatctcacccatttgattcctatgggccggtactttgcaaagctgttacatctgttctccttaggaaggaaaatccccctgctatcagtggctggaatgggtagaggacctctaccacagcaaggatatccagggactatccatgtggccatagggaagcaagtgctgttttgtccctttctagctttgtggcag

SEQ ID NO: 317239 - DNA, 587 bp, Homo Sapiens
acagaattcgtatttgttaaaccagggatccatatggtatctttctttcatccagtgaatcttcgcatcgaaaaacttcataatcctgaatagagatagtacaattttgagcaagtccaagattttccattgtctttaagtccataatcacttttctatttcttccatctatctggaaattagttggggagttatattttgtaacatcacaacaaaacagtgtttctggtgtacatagtcctagtttccattctgaaattttagtatcttgaagtgcaaaaaggatgatggaagcatactttccttcctggtaactctcttctgcatatgctccaataatatgatcttcactataaatcactgttagagtaggcccttgattacaacatctgtcaagcaaaactacacattacggaatccatggacactacccttatagagaaggctaagccgcttccctccaaaatgattttgcaggatcttttcgtgcaaccatgtcaaacgagttgtcactgccatacttcttgatctgttgtactgtctgtagtatcagctagagctgagggtagctgctctgtctggatagc

SEQ ID NO: 317240 - DNA, 1228 bp, Homo Sapiens
ccaagtaatttttttatgttaatctgttctgtgcttttattttacgaaaaagctaatggcaaatctacattaaactaagttgaatacaaagtcttagtgaagaaggcctggtggtctcgtttacaaaaatggccagtgtcatatttgggcttaaaatttcaagaagggcacttcaaatggctttgcatttgcatgtttcagtgctagagcgtaggaatagaccctggcgtccactgtgagatgttcttcagctaccagagcatcaagtctctgcagcaggtcattcttgggtaaagaaatgacttccacaaactctccatcccctggctttggcttcggccttgcgttttcggcatcatctccgttaatggtgactgtcacgatgtgtatagtacagtttgacaagcctgggtccatacagaccgctggagaacattcggcaatgtcccctttgtagccagtttcttcttcaagctcccggagagcagctgcttctggggtttcaccatcatctatgagacctgcagggaactctatgcagtagccccccattggtggtcggaactgtttcaccagaacgatacactcatagtgaagtgttctctgcagcacggggatgaccgcgacaccatccgcagtctgctctttcctggttgtacgtttcactgattcccaagttctagttttaccagtaggatccatgtacgttgttttttcaagcttgacccattttccttctgaaattaactcctctgaaatgatatactgtttgccattctgagaagattccgttggttcttggctctccattttcaaacgagtctttacagccctcaggtgagaagttcacctccaaggtgtaggggtgaagaacggaagaggacgaaataactagctggaggcagcagtgtcagccgatgccggtgccacggctcgaaacaccggcgcctctcgcggtgctaaaaggatgggcgcgcaccctccttccggcatccgtagaacccccgcctttgacctagcttcaggagattactttccgggtcagcgtgcgtttagggcgaagacggagttgtaaacttcttaaaattcctctctcgacacttcggtaattcctctttcgagactaaagctctttttgtatgcgtgtgtgtcaagcgtatgccccgggattctcctccgcttccttttctcggtcttccttcttgctttagggaccggaagagtcccc

SEQ ID NO: 317241 - DNA, 1805 bp, Homo Sapiens
  misc_feature (25)..(25): n is a, c, g, or t
  misc_feature (31)..(31): n is a, c, g, or t
  misc_feature (50)..(50): n is a, c, g, or t
  misc_feature (62)..(62): n is a, c, g, or t
  misc_feature (69)..(69): n is a, c, g, or t
  misc_feature (1617)..(1617): n is a, c, g, or t
tagcttatctataactctattctangtgtantttatcactccatctttanttttataatcangagacangttgttcaagtaactcttgtaactctctttccactgagtctgatcattctggttttaaggacaggtaccatcctgtccccagcaccttccacagagcagcttgataaatactagttgacttgaaaagatgagccatggcacatcctttcatcacctcgggaggtgcccgatgtcttgagtcgtgacacccggcgtatgctgacactgcttgcctccagtaggttcttttgtcctcttcccttttcacccctacactttggaggtgaacttctctcctgagggctgtaaagactcgtttgaaaatggagagccaagaaccaactgaattttctcagaatggcaaacagtatattatttcagaggagttaatttcagaaggaaaatgggtcaagcttgaaaaaacaacgtacatggatcctactggtaaaactagaacttgggaatcagtgaaacgttacaaccaggaaagagcagactgcggatggtgtcgcggtcatccccgtgctgcagagaacacttcactatgagtgtatcgttctggtgaaacagttccgaccaccaatggggggctactgcatagagttccctgcaggtctcatagatgatggtgaaaccccagaagcagctgctctccgggagcttgaagaagaaactggctacaaaggggacattgccgaatgttctccagcggtctgtatggacccaggcttgtcaaactgtactatacacatcgtgacagtcaccattaacggagatgatgccgaaaacgcaaggccgaagccaaagccaggggatggaggtatgttctgcaactcctggtggccgagcgtgtatgacttagtgtagtggtgatggctgcagccattttgggttgttttggtaggctcttgacgttagctttgttttcacttgcactttgtctgtttagagtttgtggaagtcatttctttacccaagaatgacctgctgcagagacttgatggtaagcattctccagaccgccacccagtttctccagttctccccgtccccatcccagcaaactgggtactaaatataactccatttctttatcttttttgtatcactaaagtcaaatgcctagcaacttgtaaaactgcaggtgaccactactaattttcctttctgggtggcacagagtttgaaaataagagcaaagcattctgggtcaagtgcaaacttttggtagaggctttttctcctacagaatggcccagatgacattcctgctgagtagccaaaacgattctacactttaaaccttcagtccatagcaatgcaaaggtgtgggtagataagctgttagcttttcctcaagtatgctagtatgagggatggtcctttgtggaggctgtatgttcaaggagaaattgatgatgctccttcaacaaatacttgaggtatttcctgtatactccgtgtgatatgcttttcacataataaaccaaaccagctgtgtggcccttagaaatcactggtcatgtagatgctttgtataattcttggccacccatcttttagagactntgtaaacagtaagcttatggggagaaaagtcctttgataaaaccacgagaggagatactgtatggagacatgaggagatactgtgtggagacgaggagatactgtatggagacataccatggggcccttcaaggagcacctctgtatgggctggggcaatcctttcactcatctagaaaggagcagcc

SEQ ID NO: 317242 - DNA, 581 bp, Homo Sapiens
aatttattttagatgttatgctcttttctttgttctgccttactgatttatttcttaagttagagtacacatcgagtctggccagaatatagtgccacgtagctatgcctattgctaggtcacattaagaaagtaacttcatattgccctttcaactgcagtaacaccatcctggaagaaaaatggaccctccagtcaaagctgtctatatatgagagggttttagaggaagtttcccccaaaagattctttgttctgtaagtgaccccttgatgcaaggagtgtttcccagccctagaaataggaagcgcagccacaggcatggggattttaaaatcacgcttcagagacagacatcttggtgtttcatgttgacaccaaactgaccgtccctttgaatgaggaccagccacagttggcactgagaattccccccaactcagggcagtatagagattttgtctctggtttcatggcttagtggcaagcaataccctgaggttcccagcaccaagtgttcaaatcctagctaaaatcctctctccatgctcggtaagtccatgtggcacactttataacgg

SEQ ID NO: 317243 - DNA, 637 bp, Homo Sapiens
tgagaagctgagctgtttaatcacctccttggccagactcaaggcggtggctgtccccgaccaacacacctggaagccattgagagcagctggagatggagtggcagctggagttacagggtgggggtggggagggggggctcctgcgcctctgactgtcatctggcacttctgcccccagggcctgcttcagctctgagaggttcctggctggtctgaggggtgaggaaccagaaggcagaaggcgagtgccctcgcatggcaggagaatgaccctgaggcaggggcagccactccccacatggcctatgttgagggtgcggcactgtccacaccgtggtgagggacagaggcacgaggctggggaaaggggagaagtcggcgggggtgggagagggggttacctgggtcccaccaccagtctggaattaaccagcagaagagaagggctgcccttgggaacatggactcgtccccagtgacagttcctggtgatgggttgaccttggcaacagaccctagcagcaggcagttgtcctgacaagagggcggtccctgtcgactgtccctggcagtttcctgaacggagggagggagttgtctcgctctcgttctctgccgtctttgctgcctcgtg

SEQ ID NO: 317244 - DNA, 527 bp, Homo Sapiens
gccaattccgtcttgcgaggtctttacagtatcggcaacacagttaccacttcttctcttagttgatctaccttgccaatacacatgaagttcctttataccctgatcggagttagaccggaagtattgttcgttctaagcttagcattttaattcatttggaatatcacatgtaaacgtggatctcatctttatcacagtgacatctagctagtctttccatcagcagttattaatatttctttctttccattggcttattaatttcagttaacctttctacttggcaccacagtatattcaggaaggttgtttcatagcatgttttaaggatttggagagcaaggctcccattttttccccttaaattaaaaaaacttacatctttgcttgctttcctaaataatttattacaattatgccatattccacacagcaaccagttggaatgttaaatggagctgtagtaaatttcatactaatgtcacatattggcatttctgtggatgtagctttatattttaaca

SEQ ID NO: 317245 - DNA, 1167 bp, Homo Sapiens
tacgcaaaatttcacattttaatatgcttagaaggagtttttaaagaagtagaaatgatttcgttggcctctgactttcagtgatgaaaatgcaaccatgcagtcccccctttgcagaagggcagttcttcccaggctttctggaagcaggggcttccgaggagtctccacccacctcacagaacactcactatgagccctgcacagacagcaggattcacaatctccaataggggatgggcaggggcagcccttaaaacttgaagaggtcgatgaagtgctgcggagacacaggcgtgaagcagctgtcagggtcggccgccgtgcaggggtgtcctgagtccttccaaaagagaatgctgcagtgccgacagaaatgcagtgtgtctccgtactgctccttcgctgggtaatgtttctgaagtgcaaagtacatcaacttccattcaatatgacctttttctgaaaggatcaaatgtctacaaaactgcttttcagcaaaatggtactgacaaagcttcttccacagctgtctgtcttcactaagcatatacaacgtgggggtcacctggcctaaggtgatgatgtcccatccgtctgagaaccggtataggatgttgttcagcatgtgcagaggaaggtcactgagggtgaggccattgttcacttgcttagtcatctgaagatcctgtagctgttgttgccaggcgagaatagtttctaatcggcaaatccaaatattgatgtttcccactaatacagacttccctactcctctaataagaatgcagagggtagagcttaggtcttgcagaagatctttgattaagcgaggattgtggtggtcatcaagaaccttttgaacgattttatccaaaatgttgaagtaattcttctgtgccacgccactcaatgaagttaactgggattttgcaattagctgcaacagtttgaccacataattgaaccttcggatatcttgaattgcacttgagaagtctaaccgattaaaggattatcccaaggtgcaatagccatgcctttcctttgtgctttctttatggacatagatccatttttcacgataaaaactttgagtatttgtgtcatttctaaaatggtcctttttcctttttttcgatgcatattcatgctcttcattattga

SEQ ID NO: 317246 - DNA, 564 bp, Homo Sapiens
  misc_feature (433)..(433): n is a, c, g, or t
  misc_feature (448)..(448): n is a, c, g, or t
  misc_feature (513)..(513): n is a, c, g, or t
  misc_feature (535)..(535): n is a, c, g, or t
  misc_feature (551)..(551): n is a, c, g, or t
gttcaattatgtggtcaaactgttgcagctaattgcaaaatcccagttaacttcattgagtggcgtggcacagaagaattacttcaacattttggataaaatcgttcaaaaggttcttgatgaccaccacaatcctcgcttaatcaaagatcttctgcaagacctaagctctaccctctgcattcttattagaggagtagggaagtctgtattagtgggaaacatcaatatttggatttgccgattagaaactattctcgcctggcaacaacagctacaggatcttcagatgactaaggcaagtgaacaatggcctcacccttcagtgaccttcctctggcacatgctggaacaacatcctattaccggtttttcaggacgggtggggacattcattcaccttagggccgggtgacccccacgttgtatatgnttagtggaggacagncagctgttgggaggaggttttgttcagtacctttttgttgaaagcgtttttgtaggacttttgtncttttcggaaaaggtctattgnattgggagttggtgtntttgccttcagga

SEQ ID NO: 317247 - DNA, 1514 bp, Homo Sapiens
ttttataagttcttcatgaggttatgtttactacaaatttttattgttaatgtttctcatcctgaaattatgggatacagcctagcagtttgtcctcacttggcagagtaggtaaccctggctctcacactgagcccccaagagtccttttggttttactggtgtcagggattacagtcagcaaaccccactcatttacagggtcaggtgtacagggctgagctggagggttagggtcagggcccctcaggaaactctggtctggcacagcagcagcagggatgccactctccctttgtggaatccttcttaatacaagagtgagaagcagaagagcaaaccacaaaggaattccagctcagaccccaaagtacctgggagagctgcaaacagccatggagataagagaggcggggagggaacacagtgactgagtctgagagacagcaaagcacctctccagcgaaagccactccgagatgcagcctaacttcctagtttgcatcagcaagatgagcaggcaccaccatggaaagagcacctggggtgtagctggttaccacagctcagccacattccccagaaacggaggtcagccctccatggcccaggaaaacatgggggatgaagggttggcacctgcagtgaccagatggagatacaatgcaggcagctgctaccatgcttggtgaccagggtacaagcccctgatgagcttgccatggcagccaaggacactggtgccggaggaacgacaggggcctgcaaagggacatccgaggagggggaagcaagctgggagcaagaccagcccagctaggtttcagggcaacagcaaagccccagagacatggaggcagatgagtcaaccttgctgggtgagaagtgagcttgcactgcatagggcaagaagaaggtggaccccactcctccaggaggctgacagtctcagccaggtacaatggagggtccaggtcacaaggaagggggctatggtgagcatggatggagaaaggtaggcttgctgtgtggaaggaaggaggaggggaggggaagggtgagcaaagtggggctgcaggcatcaggctgtggctgatctgtggtcagcctggagctcagaggcagttctggattgacaggacacatggtgtggccacacaggtggggggacagtgatcccatagtgcccagggagtgactgggaggcagaaagattggaacaggacagagaaggggcaagaagcacatggctcatgctttaaaggtgtttttatgccaagacaggggggcgaggacctcatcttgaggtgggaagaagtcgttgccctgccagtccagtggtttgaacatgaatccagcccagtggacagggaaggcccagggagaggtgggtagggagggcatcctgcagaggctggggacaaggaggatggcacagaatgccatcacagccaggggagtctggcagggcttggcggaggcgccaaagttaccagcaagctagaaggcaaccc

SEQ ID NO: 317248 - DNA, 809 bp, Homo Sapiens
gtatgttttaataaatactgcgggaaacattgcccaaacaaacatacccagtgacttcaacagtttaaaaaatgcaacaaaagttctgctttataacagttataacttattttctttttacaatatttaaatacagaaagcactcgccagctattttgtaatactgcccaaagcataatgctgcatcaatcaaagcatattatgttggtaaaatgtctgtattttatgggaaatgactggaatcgaattttcttgcagagacaagacaaagtgcttgtaagacatagaactgagtgttgtaattaccttaatctctcctgccacgatttaaggggagcacagcttcaacacttcaaaaacgaagcactatcatgggaaagaaagctcgttttcaacaagcgccaacaataaacaggtcagatctggtttcttctctgaaagaatctctaaaaggaactggtcaaaaatatctgtaaactattttaaatgcttattattttacgtaacaacagagaccaagtgctgaacacagaccttggctgcgtctgttcagtgaggttttagcaatgacactctagaaatgccctagtgttatgtcaggactgaaagtttatcatataatcttccactagggattctctaaagcttgggtaagtggcatcttctctcatcaatgttcatttaatgaaaagtgaaataaaccaacagattatcagatgctgtcagttttggagcttcaacccaaaataatagtccttttgctttgtatttttggtaacttaattccagacagctttactcacaaactg

SEQ ID NO: 317249 - DNA, 702 bp, Homo Sapiens
agtcttaacgagtataagctgtttttgagggctgtagcccgactacataatgagcggtgaaagcggctgccttcccctctcctgacaccagcaagggggaggcaccatcaccggccctgccccatcatgcatccaatgattactagcactagaagccaacggcaaaggaccccgcgcgcttgctcggtgtttaatccaggttaagctatacacgtttaaatacatgtcggaggttacatggtctcatgcagtccctgtgatggaatgactcttgctcagtgacctcctgcagcgaggctggtccaaagggcaaggttaggtagggcagagcacttttaaaatgtagtccgttagcaaagtaggcaccttctcattatcctccttcatggcaaagagaatgtttgtcagcatctgcaggtcttccactgagggaggagaggctttcttctcgtaaggaatgactgtgttcagatactgtttgtcagttcctgaggagccaaaggtctggcggatgccactctgcagaatgttggagatgccttccatgctgaagcgctgtgggggagagagactcaagaagggcaaatgcttcttgctacactgtcaccacacccagggacctctcagctaccaggctgtcccagataacgccccagggttctgtgactagacagtaagtgtaagacactggcttacagagac

SEQ ID NO: 317250 - DNA, 393 bp, Homo Sapiens
  misc_feature (89)..(89): n is a, c, g, or t
  misc_feature (114)..(114): n is a, c, g, or t
agctgccgggcggtcctgccgagctgtgagggcaacggaggggaaataaaagggaacggctccgaatctgccccagcggccgctgcgangacctcggcgccgacatcgcgacanaggcgcatcttgcacgccaggaaggtcccctctatgtgctgctgagccggtcctggacgcgacgagcccgccctcggtcttcggagcagaattcgcaaaaacggaaggactggaaatggcagaccatatgatggccatgaaccacgggcgcttccccgacggcaccaatgggcttgcaccattcaccctggcccaccgcatgggcattgggggcagtttcccgagtcccccattcaccacttgcagcagcagccccagcacgcttttaacgccctaatg

SEQ ID NO: 317251 - DNA, 622 bp, Homo Sapiens
gggcctgggtcactttttgtgggggggtggggtgggttattcacataacttctgacttcactcttgatgtggagagagacgcacagaggttgagagcactggggacatttttgaaactccagcaggcttcatcttggtagatagttcaacagtggacttgagcatatttagtattcagaaggaattttagtattcttttccagaagctgaatgttaaccttttctgcagccctcaaaaataaggagtgtatcagaatatctaaggctggaatatttttcatttagttttagttattaatgatgtctgccatgggttcctttcctctgttgagcatgggcaatgatgaagactttctttttgacttgccagtatgtaagtttcaaatgcagcaagctgacttactgctgggaagggctggctaaccatctcataaaacgttctgattacacaaatgccagcgtccacagtcttgatgcataccttgaatacagaaggtctgactcccccttaacaatatgaaatgaagagtctgaaataaagtcccggctttagccgggagcggtggtgtacacttatagtcccagctacttggaaggctgaggtaggaggttctctgaagct

SEQ ID NO: 317252 - DNA, 435 bp, Homo Sapiens
  misc_feature (123)..(123): n is a, c, g, or t
aaaaagtctgggagctccccgcggttgccgcccgcttctagacatagtgtattcccggggctgcaaggaattcgccacagggaaatttacaagtcctacttcaagattactcaaattagaacntctgggtttgagctcaaccagcttgtgtttcatatgagctttctggggtgattctcacgcacactcaagtttggagagctcttgtcctagatgaagaggaacagtgggatccagggcccaggtgagtgcacatgcccttgcacaggagggaggtgcttctttcgggcgcaggcacaaatagatttgtgctgcatggttgtgaagttgatgggctttgttcctgatgacatactttttctttttgaactaggaagcagttttgtccattgaatcctgagatgagagtagggttgggctgggtcagtagcttat

SEQ ID NO: 317253 - DNA, 506 bp, Homo Sapiens
  misc_feature (414)..(414): n is a, c, g, or t
  misc_feature (426)..(426): n is a, c, g, or t
  misc_feature (441)..(441): n is a, c, g, or t
gcgaccaccacttgatgtctgaggataccttccatctcaacctacctcgagtggcgagtccagacaccatcaccacgcagagaggggaggtgggaggacagttagacccctgggtgggccctgccgtgggcaaggatacccggtggcttctggcacctggcgggctggtgacctttttaatccaggccccatcagcatcccacgatcggccttggtaaccgccgcggtagatcatttttatcccgcccagggagtgtgatgcaggaagaccacatgcgctcctggcttttaaacctgttcctgactgttctcttactgccgaaacccttgactgttatctcggactttgcaggagttcctttccctccgaacgctgctccatgcacaggaaaagggcattttgtacaatggggncttcccgggaangcttgctcttaagtnccagaagccggcggagctctggctttcgtgtttttggttttctccttcccaaggcagctggattg

SEQ ID NO: 317254 - DNA, 986 bp, Homo Sapiens
atgggcagaggacaattttgtccaacaaaaaatggcttccccttgaaggaaaattaacccttcaaagagtgggcccttgttccttccatggcaggccattgggcccaagttggccttcccacccacaggggaaaatttccctgcaaggtggctacctcctaaaaggcccaccgaaaaaacattccacgtcaattattccagggggctgtcatatattatgaaaagcagctccacgaagcctccatttcttttgaggaatgggtttatccactcattatcacaatgttcatttccgagcaaaacaacagcaagatgctggagtttttgaatttgcactaaattttgtgcataaagtaaccactgggtggcataaaagatctttgctttttctcttccatttaaaatgagtaccacattattcacatcaacggagaagtaccctggtattacagctggaccagtgatgaagctgtactgtgttcttcctacgattgactttccttctctccattgagcagtcacatcgctgggatcaagtaagccttcaaaaatatgctcccagagatacaagccaatggcagctttgccccagatttgtacactgagatctgtttttcctttcgtggatttatctaatatttgaaggctagttttaaatctgtgttgttgctcatttttttcatctccttcccaaggattccattcttcactttccaaagtggactgttctcggccgcgtctctcccgcgcgggggccgcccccttcctgaggccccgcggggacccggccggcgcctggcggcggcgcccgaagaagacgtggtaggcagcgtagagggagaataggcagtacagggcgataagaaacgagcagagccgcttccgcgtcagccgcatcccactcgggcttccagtcaggcatccaccgccatggagcgggcggaaagagaatccgcgacaccggcggcgtccgaggcaggcccagc

SEQ ID NO: 317255 - DNA, 577 bp, Homo Sapiens
  misc_feature (63)..(74): n is a, c, g, or t
cacattctatgttaaagaaatatgtctaaagcgcattgtaaaccactaatatttacaatagcnnnnnnnnnnnngctcataaaatgcattttggccatgtttcagagaatacttaacaggtcaacatcgttctgtgttgtggttggccttgtgtcttacatacaggagatgcctaacatctaataaccaagagtttcaactgaattatataaccattttcttcaatacttacatgtgccaattttaggcagaaaccacagtatgatattccaggtggtgtggtaatcccaaccttgaaaaaaagcccaacgaatgtaattttttgttttctaggtacaaagcataaaaaactagccccaggtaaggcaaacaaaaagtcaataaggaaatctggaaaaaaaggccattgcagttatacacaaatctgttcatgttgccaaacaaaatctcatggctgaacttctgtagcttgtgaggtactaacaacttacatgcaatgtatgaaaaagagacgccgtgtattcagagttttacatcctgaagacattaagctggtctattttcaagttaccaatgc

SEQ ID NO: 317256 - DNA, 874 bp, Homo Sapiens
  misc_feature (129)..(137): n is a, c, g, or t
gttaaggttttccaatatttgaataaaaaggggaatgttgccaaaaaccatgttctttgcctccaaaccctggccgggggttttctctgggtgtgaagggaaaggaaaaatccagcgccaaggtgccannnnnnnnnaccgtcccaaagtcctcccagggaccgatcctggggggccgttccccgccctttccttagaagagagccttgagggaagaggtttcttgagcatttggttttgatgaagattttaggaagaaattggtgtgtggaattgtcaatcttctctcgaaacttgagctgaggtcggatgatattttttgcatgaagcagccggaaagtttcagattttgcttttttgccatattctgctgccttacggttccagctggacactaccgttttggggacctgcaagccggcagggaggacaggctgttgattcttgtttacacctgaggcttcatccagtaaaatacccactctctccagaattacatcattggcatcaactagtaaatcaaacttgtcttccagctcagtcactttacttcgatccttaatgttgctgcgacacccatggtactgcattactctgctcatgcactgaagcaacctgtctccctgtgtttcgcaaaatgcttggaagccaggaaaacttcggtaaaaatcatactcatcgccaaactgtggtaggcccccagatgccttggtgactgccaccacggacccaagagcaaacttcacaaagctgtcggcgtccgggaagcctggcagcaccatctctccgtcggatttggttgcgctggtcgccgacaggaccctgggctcccgggtactgggtggcgccattttttcagcctgcacggctcccc

SEQ ID NO: 317257 - DNA, 1457 bp, Homo Sapiens
  misc_feature (583)..(583): n is a, c, g, or t
  misc_feature (1354)..(1380): n is a, c, g, or t
ttttagaatccagaaatggtgttccatttattcactgaaaaagagagagattaggccttcttcattcattttctccattcttgccaaactccctcccctcattttttccaaaataacaacacactgagaaacatgtttgtacaaaaaccacatattattcccccccctcacaaaatcaggtggctgaattacaggaataaaaccagatcaaagacatgaaaagaaaaagccaccacttatactgaaatataacagtgttaagaattcaggtattttgtagaattattactatagtaaaaatatttccacctggatcttttaaatttgaaagtgatcacattaaagacctgaggttacaagggaccacagtatgaaccagaattccattttccttctcggactccaggggaaaaaagaagtatttggaatgagtttcctttgggaaagactggcaggaagtaggtaaaaccctggccattgtcaaaaggcactggggtctttctggagccaaatgcattggaactaagctccagtaggaataaactcattctcatttccactcccaagagtccagatcaaaaancagaaaggaccgaggtcttcctcggttacccgtattccagtactctgatggtgaccagggtacacctggttagaggcaaaacttgagggtttgaaagggcaaatctcaattgtggttttatttttttgctttctgatattaaggaaaaaagttctcaagtgttttataaacacctccctataccctctcatatgtaaagctttagaaaatatatagaaaaagatatccaaaagatgtccaccttgcattctaaataatgaaactgccacttgagaatgtgaagtgagaaagccaggcgctttggaaaccaagctctaccaaaaacaccctttccccacacatggaaggacagaagggagggaaggacaagaggaaaaaaccgggaactctcaagtcacttatcagcaggggtaaatacgagctcaaattaaggcatttttgtggcttgtcctctggaatggcattctaccctcccagcctgagcaccccaaacctcaaagcatgatgctctgactgccaagtgagttccttgttaccctcagcatctctttgaaaaccctgtgatagatggaatgtgagatctcagaaatggaagggagaaggtataaggagctaatatcctgcttcacttttcccgtcccatcctaaccttaaaagtaccggttgacgaaattccactcctggctactgtaacaagaggtagtttggggacttgtacccccagccatcctaaccaagtttcatgagctaaaatatttagcactatctacnnnnnnnnnnnnnnnnnnnnnnnnnnnaaagagggagaaaaaaatgcacacaagcagcgacgcgtgggtcgacgatatcccgggaattccggaccggtaccgcc

SEQ ID NO: 317258 - DNA, 933 bp, Homo Sapiens
  misc_feature (702)..(736): n is a, c, g, or t
  misc_feature (856)..(865): n is a, c, g, or t
tatttttacctcttttgaacttctaaatcggtccctttattttcttaaaacatttgctctcttttttgtttacagattaaagaagtatggatcaattttagtcagttgataatttcatttaggaaacattgtcttgctcattatagagagttaagactgtgcataaaatactgaagtgcctcttttttattaggctcatatgtttgttcttgcaaagcgagatgcctattgtgattggtgttagatctgtaagaagctgtgttttttccacaagaataatcgacgaccagtttgagagcatctctcgcgttctttttctgtctgcttactgtccttgacaatgtgatcctgcacagtatcaggtgccagttatgcgtccctggaaggttggctcttatcagcaagtcctgcagatatctcttagataaaagtggtttgaaagaaaaggtatatttttcttttttgtttaaaagtaaaataaaacctccagttacactgtgcattcccctcacgtaaaaacaagacaaaaaccctttcctgagttgctcggcatgcactcctgtgctgtttcatgcatgtggatgttccttccgtttgttcctgtggaataactgagtgtgcctgatggcagaacacactgcagtgttatcagtgtctgcatgttttttaatagaacaggtttacttgatctgtcatctgttnnnnnnnnnnnnnnnnnnnnnnnnnnnnnnnnnnngctaaatctataatctgtgtcaatcacttatacctatcaatcatccgtatctattcacctgtcctctatgtctgtcttctctcagtctacatccatctagccttctgtcaatcatctacnnnnnnnnnnaatagaacaagaagtttacttatcaagtcttgaaagggggacatgtttcaattggtgttcaaacatgt

SEQ ID NO: 317259 - DNA, 771 bp, Homo Sapiens
cagcttgtattagaaccttgaaatggtgaagttgtggaggttttctttgttccataatacagagacaagttcataatttttagtataacagctaagttgacaaattctaagtttcctcaggtaaatagtcgtaactgtccttttccctagagaagtgcttgctgggatagtaaaaacatacaccatttcatgacttctgcaaatactttccagcggaagtcagtgtaggtttgtttttggctaacatggtcttgctgcgcaggaatgtaaacactgtgtttgaaactctggaaatcacgtgtgtggggagatggggacgcttcccatgttgtggggagctctgtggctgtgatggctgcagttgccgtgcctctgttggaacgccaagtgcctgcaactcacgtcaatcatagaattgtgacgcacagttggcaaaatagttctttatgctatttctcaaaattttgaggacaaacccagattgggattggaatatgcactgtaaatcaaatttttcttatctacaaagactaatgtaaaaatgattttttcttctgtgcctgattaaattaactgtggtttttaatataaatatttattggtgtgctttggggaggaaaaattatcttttcttgaaaggaagttatcaaagcaaatttattatcttcacaagttaatgggagaatgtggttttgattctgggtgtttgaattgtgtaaacacacagcttccttgtgtgaagagagttgtcctgtgctccttctactgtac

SEQ ID NO: 317260 - DNA, 714 bp, Homo Sapiens
  misc_feature (12)..(12): n is a, c, g, or t
  misc_feature (35)..(35): n is a, c, g, or t
  misc_feature (48)..(48): n is a, c, g, or t
  misc_feature (465)..(474): n is a, c, g, or t
  misc_feature (594)..(628): n is a, c, g, or t
ttgaggcacggncaactgcagcccatcacagccancggagctcccccnacaaccatggggaagcgtcccccatctcccccacacacggtgatttcccaggagtttcaaaacaccagtgtttacatttcctgcgcagcaagacccattgttagccaaaaacaaacctacactgacttccgctggaaagtatttgcagaagtcatgaaatggtgtatgtttttactatcccagcaagcacttctctagggaaaaggacagttacgactatttacctgaggaaacttagaatttgtcaacttagctgttatactaaaaattatgaacttgtctctgtattatggaacaaagaaaacctccacaacttcaccatttcaaggttctaatacaagctggaatttttgtttgaacaccaattgaaacatgtccccctttcaagacttgataagtaaacttcttgttctattnnnnnnnnnngtagatgattgacagaaggctagatggatgtagactgagagaagacagacatagaggacaggtgaatagatacggatgattgataggtataagtgattgacacagattatagatttagcnnnnnnnnnnnnnnnnnnnnnnnnnnnnnnnnnnnaacagatgacagatcaagtaaacctgttctattaaaaaacatgcagacactgataacactgcagtgtgttctccatcaggcacact

SEQ ID NO: 317261 - DNA, 535 bp, Homo Sapiens
  misc_feature (96)..(150): n is a, c, g, or t
  misc_feature (223)..(237): n is a, c, g, or t
  misc_feature (269)..(269): n is a, c, g, or t
ttggtaatttcttttaaggtgtaaagcatcacattttcttcactctttgggttttgttgggggagggagagaaaagataggcttttgctttgtcannnnnnnnnnnnnnnnnnnnnnnnnnnnnnnnnnnnnnnnnnnnnnnnnnnnnnngctcaagtaatcctcccacctcagcctcctttgtagctgggaccacaggcatatgcgaccacacccaactaannnnnnnnnnnnnnngtggagacagggtctccctatattccgcagcntggtctcaaacaactgggctcaagcagtcatctcacctctatctacttccgaaagttttgggattacaggtgtgagtcactgtgcccagcctcctcactctttgtcgtgtggatttgacttttgaaaaatagccagatatatttagaagggattttagaaatggtttgtcttactaatcataacttggtagtttaatatttttatttgtaagccacagcttaaacccttcagaatagtagttaattatgtagtctttaaagtcaga

SEQ ID NO: 317262 - DNA, 917 bp, Homo Sapiens
  misc_feature (67)..(75): n is a, c, g, or t
  misc_feature (591)..(601): n is a, c, g, or t
aatcagaattttaatataaacaggtcattatcccatattttacatgcagaacgatttcaatattccnnnnnnnnnggcgtcttctgtacatggtgctacttggctcttgtaggaaaacattgaaaaaataataattgagctgttggggggttttgtgtttctgagttgttttctgcaaaagctgcagcacatttgatcctgcgttgccaacgcacagggccgaggccacccaggcacacaaagggacgaggagaagcaactttcaggcaaagtgtaaagactaaacaagctgttcctgaatatgtgcatggatgcacacttattttgaggctcttccttccttctccaatgggaccaagagccccagatttgtgatctggtttttaacaaggattttcagtggcccgcacccagatagaaatttggctggtggctggttctggaccttgactagtatcagaaggtaaaagtaagctcaaaaagccattgtgtcccctcccctcactcccatttctcggggacccttaaggaaatattcaccttccattgcactccctgaaagtccaccatgttcttttgtatgttctaggnnnnnnnnnnngtgctgacctgttcttttcattcccaacctcacctcgcatataaattaatattctgaagaacatgctggaagattttctgaagtgacacccctctctgtgtaccatgtatataaaatcggcattccctgttccccatcctcaacaaaaccattgtttctgaagagcctaaggtgtcaaggactcaccaggtgacattcaaaggacatttaaccctaaacttccacccactgtgaaggagagaaatgattagcactgggactacagcacatccatttaccggatgaccagcgcaagtcatatgctgatgacgctccc

SEQ ID NO: 317263 - DNA, 430 bp, Homo Sapiens
tttggtgtcccctcccctctgaagaagaagctgttcatttcctgtaacatctgtcacctgaggttcaactcagcgaaccaggccgaggcacattataaagtccacaaacacgccagaaaactcaaggctgtcgaggctgccaagagcaagcagaggccacacacccaggcccaggatggggctgtagtgtccccaatcccaacgctggccagaagggatttatctttttccacatcgacgttccaagtctcccggctgtcgagactcccttgagtctgaagagcctacactcccaggccctcgacggggctgtttcgacccccatcccaccgctggccaggaggacagtgtgaaggagagaaatgattagcactgggactacagcccatccatttaccggatgaccagcgcaggtcatatgctgatgacg

SEQ ID NO: 317264 - DNA, 508 bp, Homo Sapiens
attcggcacagaaaccagtcatttatatttcaattgaagaaatcatcagcacacactcactcctgttggaacaccaggatgcaattgcccctgagaaaaatgacttactgagtgaattgctggggtcgctgggagaggtgccaaccgtggaatcttttcttggggaaggagcagttgaccccaatgaccctaacaaggcaaatacactaagtcagctttcaaagaccgagatttctcttgtcttgacaagcaaatatgacatagaggacggtgaagctatagatagccgaagcctcatgataaagaccaagaagctgataatttgatgtgatccggaaccagccagggaacacattgacagaaatcttagagacaccagcaactgcgcaacaggaggtagaccatgccacggacatggtgagccgtgcaatgatagattccaggactccagaagaaatgaagcatagccaatctatgattgaagatgcacagctgcctcttgagcaga

SEQ ID NO: 317265 - DNA, 1998 bp, Homo Sapiens
  misc_feature (845)..(845): n is a, c, g, or t
  misc_feature (1042)..(1042): n is a, c, g, or t
tacaggtgaaccatagtctcactttatttcgaattttaggactgaacagaaagaaggttcacagatatttcttcagggaaggaaagtgggcaaatagcacaatgaggcaaaccacacaatctagacgtactttcccgggtaaacaaactgggaagcccagagctcacagaggaggagagcagagcttggggtggcagagaggtgttcattgggaaggagtcaggaacacaagagaaatgttcatgagctcatccaggatagagaggactcttggggaaggggacctccttccccatgctgtctctgccccaagcccttaatgaagcaggggagggaagtttgtccagaacctcatctggttagacatttgcagcaggaatagggagggggtggaggcagagccactttggacatgggaaatcacagttgcagtagacagtgagctctagtcactccagaagcttgacataatttgcagggaagagtccaaagtggccatggcaacgtccccgccaccagccctcgtccaccatctcaatgtcagtgattacgtcgtccggatcaaaggaaagctcatcacttccctctccttggtaatcatatagagccacagctgagatccccagagccacagccccagccccagccccagccgggcagcctgatgatccagccagagcagaagaaaaagaagaatcttcaggctcgagcacctcctcatagtccccctctggttcatcctcctgctcatgcctgttcatctcctcaacgtcctcatagtcattctcaggctcgggctcaggctcgggctcaggctcaggctctgcttcgtacactggctcttncctccacctggaggccttccagagtcctagggggcagagctgggggctcctcattgtcctccgggagagtctgcctaatgggcagcaagggcactgggtgttccctgctggttctcacaggctcagactctgatgatggaggagtcccaactggaggccaggcctctgaggagattttcttgggcagtggggccggnactgctggctcttccatagctatcactggctgtggagcctcagggctcctctttgtcacagcctttcgctcctgttgcctcctggccccctgctgtgccttctcctcttccttctcgcttcctcttctcctcggccatggactcatttttcgccttcggcccacgggccccactggaggcggcttctatgggcgtcgtcttcttttaggctgtggtcggggcctccatttcattgaagccgacagcgctcttatccactcggtccttctggattccatactggccaccaaagcccttggcataatctctctgggactcgtgtttctccgtctctcccttgtagtcatatcccagggctgctttgtcccatttatccttctccccccgtaccggccaccaaagccacgagagtaatctttctgagatgtgtgcttctccacttctcctttataatcaaagccgactgctgacttgtctgccctgtccctctcaactccgtacttgccccctgggcctttggcggcgtccgtctggggggggtgcttctccgcctcggcggcgtgctcgtggcccgctgcgctcttgtccgttcggtctctttctgctccgggccggcctccgtagccctggggtgctttgggccctgcctccgtctctttcttcctgggggcgtcgtgctcctctggtgctttgttcctcagctggtgggtgttggtgtgttctgtgcgtcccgccccctcggtggtcttggctccccgtcgttgctccttttctgtgttgtctttcccggggtcgggatctgtgtccccgtcctcaccctgggtctccacggttacgggcacttcttggccctcttctgtcttccacttctcctcctgtgcaggcctctgttctaggcgcccggctcctcgcgtccgccccgcctccctctctggctgctgccccttcggagtccc

SEQ ID NO: 317266 - DNA, 344 bp, Homo Sapiens
  misc_feature (31)..(31): n is a, c, g, or t
acaaagaggagccctgaggtcagcaagccangtgatagctatggaagagccagcagtaccggccccactgcccaagaaaatctcctcagaggcctgggctccagttgggactcctccatcatcagagtctgagcctgtgagaaccagcagggaacacccagtgcccttgctgcccattaggcagacttctcccggagaacaatgaggagcccccagctctgccccctagggactctggggatctcagctgtggctctatatggattaccaaggagaggggaagtgatgagctttcctttgatccggacgacgtaatcactgaacatttgagatggttggacgag

SEQ ID NO: 317267 - DNA, 551 bp, Homo Sapiens
  misc_feature (386)..(386): n is a, c, g, or t
  misc_feature (430)..(430): n is a, c, g, or t
  misc_feature (507)..(507): n is a, c, g, or t
  misc_feature (518)..(518): n is a, c, g, or t
  misc_feature (527)..(527): n is a, c, g, or t
cttcagtgcatctgggaagatttctacccgaccaacagttccttcagcttccatttcgcccctcatttatccctcaacccccagcccacaggtgtttatacagctcagctttttgtcttttctgaggagaaacaaataagaccataaagggaaaggattcatgtggaatataaagatggctgactttgctctttcttgactcttgttttcagtttcaattcagtgctgtacttgatgacagacacttctaaatgaagtgcaaatttgatacatatgtgaatatggactcagttttcttgcagatcaaatttcacgtcgtcttctgtatactgtgggaggtacactcttatagaaagttcaaaaagtctacgctctcctttgctttnctaactccagtgtaagtaatggggtcctgctcaagttgaaagangtcctatttgcacctgtagcctcgccgtctgtgaattgggaccatcctatttaactggcttcagcctgccccacctncgttcagccanctctctttntcaagttgggctgacttcccacac

SEQ ID NO: 317268 - DNA, 842 bp, Homo Sapiens
  misc_feature (161)..(161): n is a, c, g, or t
  misc_feature (329)..(329): n is a, c, g, or t
cttcggaaaaggatttaagaaattttccccccaatttggccatcatccccttgaagtgcccggtgattactcaggctcatatatttgggagaatccttggaaatactgtccatatctcctgagcctaaagagccattcatgtgatgtgactccattcctcntaatcccacccatgggaccatctgacccaggacccattgaaaaattaggtctgttaggtccaggaggtactgcattcattaaagtatacatgttatcaccagagtggttgaatctgctggactaggcatgatgggtgttcctggtggccctccacctcctggaggacntacataattcccaggagatgctgaggagtatggtattgaattggcatttgttgggtttggccaaggtctaccaccacctggacccatgttcattccaggcattccagggccacctaaagcattcagtgggggtctcattgcacctccatagttctgtggtcctaagggcaccattcctcttggaggagtcattctctgcattggcccacccatatttggatgtccttgttgtcgaagttggatccattccactggggagtaatggctgacttcctgggacacctccaagtgcctgattaggtatcctcaatgggggccttggacctccagggtaccgaggtgacataaaaggctgaaagaaccctggtggtacaggacctactggcatgccatctcctgggggaatgtttcctagcactggactgggagctgctgcagcactcaccaccaagaatgtaagaatcctggtggttcccccaatgtgatgtttttttcccatcttatctctgatcc

SEQ ID NO: 317269 - DNA, 428 bp, Homo Sapiens
  misc_feature (11)..(11): n is a, c, g, or t
acctacttatncaagagaaaaagagaccaaacaatttccttaagtacccaaaacaaaagaatagatgagcccagtgtattttttaaagagccagtggttaaacagaaaactgacagtgtaactttgtaaaattatatgttaacttacgtaatcatggaaggcttttgcttcacttgagtgttcacatgtttcacgtctctctggagctgcacagtagagatcccaaaatacacaccaccaagaatgtaagaatcctggtggttcccccaatgtgatgtttttttcccatcttatctctgataaaaatgtttgagctgatttctgagctcctacatggagcagatattcatatacgtagagtgctaacttctcccgggcctggctgtcggacgggacggcgctgctgttactcttgccctgtgccgaat

SEQ ID NO: 317270 - DNA, 973 bp, Homo Sapiens
gggggaaagggccccacccctttggttaaaaaggatgggcccatggggtttttcccccagggatttaatttcttttaaaatttccaattcccaaattcccaattcaaaaatttttcaaatgcctcttgggggtttgttttgatttattaaattgttgggtctaatttctagaaggtaatatggaaggaacagttggctaagaatagccgagaccctccaaaggaagaacaattttgtggtgatactggagacagaggtgaaattggttacaattatgacaaaatgtggaggcatcttggtttttatcagaccttttcctaaagttgcagtaatcaggactgtactgtactgctacaagattagacaaattgatgtcagtcagaatagaaaccatcaaaagacccacacacatacacaaaaatttaatttatgaaagaggcagtgttacaaatcactggggaaaggatgaacttttcagtaaatagtgcagagacaaccacttcgaatatgaaaaatgttaagttgaatttctaactcataattttcacaaaaatcagttcaggacagactaaagacaaatgtgaaaggcaaaactataaaatttccacaaggcagtaaagaatatatttatgactttgggtaggaaaggatctccccccaaaccaatttgtattcagctttatatgatactttttaaaaacatttactttcagcaggaaataggcaacaatctataacattttacaatttccaaactcccctcctccaaaagtcaccgtaaaagttaacaagatatgtcgttgctgttttgaacaagaaagattttcagagagggtggacacttcacatgaggcatgtatgagcttttctcaggcccactttgacatggagggactaaagtaaaaccagcaggatgaatccacaaactgaaaacaggaatcttggctcttttaagtgacaccatctcgatgtc

SEQ ID NO: 317271 - DNA, 881 bp, Homo Sapiens
  misc_feature (820)..(834): n is a, c, g, or t
ccaaagtgctaggattacaggcatgagcactgcgcccagaaaataaacacattttataatttgtatgtggaaacatgttactatagaaagcattttaacggtacgttttaaaggtccactgttaaatagtagagaatgaatccgctagcgaaaatgtttttagggagaacagctggatcaaaagggcttctttggaattaggttgttttagtaacttctgttccaaagaaacacaggtctgatattgctaagaactgaaatcggaggagccagaggcctttttcagtccaggccaacattgtgcacggccactgtgggactgacaaccgggatagctcaagttcgaaagaccaggtttcaaacattataagttccaggctttgcaagtctttattctctggggtaatatccagtctttctgttattgtctcttaaaattctcttccatggcccacattaagggagtttgcagagagtgagggaggcaaaacttgaaaagggcctgcaacactttaaaccttctcaggttcacccacatgaaacagctgtgctgagtgtgctgccggtgcccggggagcttctctgactgtgacccggcagaggcttctgtggcggtgcatgagcggccctacagtggagggttctctttggaaacaaacagccctgcttggtttcagtttgaggccacttatcttcaatgtgacatttcttgccaagccctgtgacactccccattgatgactcccataggtacagataaagttaagaacaggaaacagaagggtaggatgcatagggagggagagaagccctgaaaacnnnnnnnnnnnnnnngaagcatggaaaacaaatcttttatgccactccagccataaataaaa

SEQ ID NO: 317272 - DNA, 837 bp, Homo Sapiens
  misc_feature (54)..(54): n is a, c, g, or t
gatgggaacgctgagctcggggactcggccccccgtggtgcacttcgcaggcgnctgtgcgtgtggccactgagaaccaggcgcggctggagccaccacagcagcttttgtgatgcctcccgtgaaagcacgtcatagttctccttaaatgggatgtccctttcctctggaggagcagcgtcttccccagaacagttagcatcacttctccgatacagaggataatgctgcaggaggacaggggcagacgtgggcagcagaggcccaggtccacaccggctggagccacgtgcctctcgggagcagttcagtctgtgagaaacttcaatgagctctgcttctgtttcagagcagatgccacagccatccccgttcagcgccacgctgttgaccatcacaaagttaatgcctttccaagaaaacagtctttcagagctgaacactttctcaaagcgttctactttgtatgtgttcatctcataatggaagccaatgtcatggtttccagcaactaccttcagctgtacatgacttgggtgtctgaacattttctgaaaccgctccacatcatccgcccaggcctcaggggtgctccacttcccttcatcaaagatatcccccaggatgaagacgacttccggctgcagcaaccacagagctgtctggaacgctctctccatctgccattcccttcgtaatttgtccagccagtggcctaggaattccccaagcaaatgggtgtcagccaaaaacatggctttgagcacaggctcacgtgtggtctgttcaccatcagaggctgtggttttcacttcaggccaattacactgaaagatc

SEQ ID NO: 317273 - DNA, 529 bp, Homo Sapiens
acttgtcttcaaaaactcccacttctcctaaaactcttgtgaaatcgcacagttttgcacagcctcctgagtttgacagtggagttgaaactttctctatccatgcagagaagcctaaatatcaaataaataatatcagcacagtgcctaaagctattcctgtgagtccttcagctgtggaagaggatgaagatgaagatggtcatactgtggtggccacagcccgaggcatatttaacagcaatgggggcgtgctgagttccatagaaactggtgttagtataattatccctcaaggagccattcccgaaggagttgagcaggaaatctatttcaaggtctgccgggacaacagcatccttccacctttagataaagagaaaggtgaaacactgctgagtcctttggtgatgtgtggtccccatggcctcaagttcctgaagcctgtggacgtgcgcttaccacactgtgatcctaaaacctggcaaaacaagtgtcttcccggagatccaaattatctcgttggagc

SEQ ID NO: 317274 - DNA, 891 bp, Homo Sapiens
  misc_feature (214)..(264): n is a, c, g, or t
ttaaattttaaaatcctttatttgtgctgataaagcatgttaaatacattaaatctatttacactgtacaaagcttttaaagttctaaaaatcagatttttatctaaatgaataaatttctctgtattgttaaaaccattctacttaactgcattgttctccaagtccctccagccaggaggcacggtaacaatgtgtcagatctccacactgnnnnnnnnnnnnnnnnnnnnnnnnnnnnnnnnnnnnnnnnnnnnnnnnnnnaactggaacaaggaccaccttgctcctactgcattatagcttttgatagtatttgctacttgaggaggaggctataccttgtctagctcaatacagtttatgtttcagacactataagtatgatacccaaatgcttcatgagtgaacaaggtcagcagatcaccctgagaacaaggaagacacaatttccttataggctaatgattataaaaatagaaattaagagctccccagaaacaaaccacttagtcaaaaaggaaggagttttgactttcttctaagccaagtactcaagtttaagacttattggcctatttaaaaattctttctatgacttctaaacaatgatgggcaagtgacaaaaataatgtaatcatcttcttccctcattatatattaaccaaactaaaaccaaaaggaatgaccaagctataatccaaaaaaacctagaaaatcctgacaggaatcatatagaacatctctaagaaaaggattcttggcttaagcaaaatattagagcagagaaagcaaaactcatgtcctctcatgcagtccggcaaggcccccctgcccagaaccctcctctctgagtcacatggatgagcagacagaagatctggacacagc

SEQ ID NO: 317275 - DNA, 428 bp, Homo Sapiens
ggctagtcacacatgcatggaagctggtgatgcagaatgctgtggggtggcgagttcatctggagactgtgccagcagccacatctagtttttgggggtggtcatggtggctcggcacctcctgctccagtgcccatgtccagtgctgacggtggtgatgcaggctctggcatcctcacactgggagtgtgagttgggctccagttatggcagcacagcataatgtcctgcccattttctgagcctggttctttggcttttctgggaatcagtgagatgccaaaggcctttaagtaaactcgatttaaatcagctgaagtctgtttcatctgcttaaagctaagaagccgacttttatagagatgttcctctgtagttatccaaacatttgtattcattcttctggcccctgaaagttctacttcacc

SEQ ID NO: 317276 - DNA, 518 bp, Homo Sapiens
  misc_feature (26)..(26): n is a, c, g, or t
  misc_feature (36)..(36): n is a, c, g, or t
  misc_feature (51)..(51): n is a, c, g, or t
gttgaaaattgaattgggaacaaaantaacaggtangaaggtggcctcctncaaataaaaaaaacaactaggaaaagtccagagttgaactgttttccctcctaagggctgccttagctcctacagaaatacagcaagggccttccaatcctaacctgtttaactgggaaggggaacaggagtacagggagaaggaaatggtccagatgaagctcatcttcccatcatttggcacccagaggaagacggggaggtggagactgtaatggggactgctggtattgcctcttctgtcttttcactgttgatcctattggccaaatcaggtgcacacaagtatcagtgttgctgcttttcttctaatccttgcaggagagtcagatgtccatctcgaactgagcatcatccccaactgcatgtttcctgtcgtgattgttcaagttgttcaaattgtttacttctactttggagtcttcaattaaggtgccagggctagtgactcctgggctgtgccgaat

SEQ ID NO: 317277 - DNA, 1138 bp, Homo Sapiens
  misc_feature (29)..(29): n is a, c, g, or t
  misc_feature (59)..(59): n is a, c, g, or t
  misc_feature (67)..(67): n is a, c, g, or t
  misc_feature (134)..(134): n is a, c, g, or t
  misc_feature (527)..(550): n is a, c, g, or t
  misc_feature (1096)..(1096): n is a, c, g, or t
aaaaatcccctagccccacaggggagagncacctacaccccaaggtgagcggtaagacnggccaaanccttgaagacctttttttctgttgggagaatggaaagcagaaagggaacgccaggctctttaatgtntccaagtcagctgtgcctcacacaaggctctctttttagcctactaagtaacatacctcaagactttgtatctgtgcagcattttatggaaatcactggtgacctataggatattactaaattatttcaatagctttatttttttcctacttggattctaggtggacattacagagttgaattcctcactaccccctcccgctgtcatttgttttattggaaaacttcatgttaactagagtgtacaaaaagtctgtttcctgctgagccaatagtgatttgtttgcatatcacctaatgtgaaaagtgctcatctgtgaactctatagcaaattatattttagaaaatactttgtgaggccgggcatggtggcagagcgagactccgtctcnnnnnnnnnnnnnnnnnnnnnnnntataaggatgtaaaagaagcaatttgcttgcacatctgaatatccttcttgtgtctccattttcactcttgaaaactgaaagcaatttgacttttatttttgtttttctaaagaacagctaggtgaaaggaggttaagctgattgtcactctgcctgcccactacctactccccaccatggtgtttcatgaaacatccccaccacctgaagtgatctttttaatccttgtgatagtaaatgcattgataattaacaggaaaaacatgtttttaaataatctacaaatgagaacccaaatggtagtgttttgtttgacagaagtaaatcaaatattatggtttaaatataatgcaaaatttcaggacagttaatttgggcttcccttaccctaagagggtttttcttataataaggagaagaggtgtggttcaaagaaaattaagagacaaaaccttcaggtacataatgcatgaaaatctttaaatgcctgcaaaaattaagttctggtataataccagccaattctgaattagcccatgccctanaagcattttaacatttaagggttatcttatgagtcctatgaa

SEQ ID NO: 317278 - DNA, 423 bp, Homo Sapiens
  misc_feature (86)..(86): n is a, c, g, or t
  misc_feature (170)..(170): n is a, c, g, or t
cccaaaggccaggctgggcccctcaaaacaagggcccccccttttaaggcctccctaaggtaaccatacctcaaagaccttggtancctgtgcaagcattttaatgggaaatccactggtgaccctatagggatattacctaaattatttccaatagcctttattttttntccctacttggattcctaggtggacattacagagttgaattccctcactaccccctcccgctgtcatttgttttattggaaaacttcatgttaactagagtgtacaaaaagtctgtttcctgctgagccaatagtgatttgtttgcatatcacctaatgtgaaaagtgctcatctgtgaactctatagccaattatattttagaaaatactttgtgaggccgggcatggtggcagaagcagtccgttttcaaa

SEQ ID NO: 317279 - DNA, 921 bp, Homo Sapiens
  misc_feature (26)..(26): n is a, c, g, or t
  misc_feature (38)..(38): n is a, c, g, or t
  misc_feature (655)..(655): n is a, c, g, or t
ccccccttctgccttcgttctaatancccctatcaaanatacgcaccgaggcctgggtggcgaattcggcacgagggacctggtgtcctgcgcctacaggtggcccgaggcatggagtatctggcctccaagaagtgcatacaccgagacctggcagccaggaatgtcctggtgacagaggacaatgtgatgaagatagcagactttggcctcgcacgggacattcaccacatcgactactataaaaagacaaccaacggccgactgcctgtgaagtggatggcacccgaggcattatttgaccggatctacacccaccagagtgatgtgtggtctttcggggtgctcctgtgggagatcttcactctgggcggctccccataccccggtgtgcctgtggaggaacttttcaagctgctgaaggagggtcaccgcatggacaagcccagtaactgcaccaacgagctgtacatgatgatgcgggactgctggcatgcagtgccctcacagagacccaccttcaagcagctggtggaagacctggaccgcatcgtggccttgacctccaaccaggagtacctggacctgtccatgcccctggaccagtactcccccagctttcccgacacccggagctctacgtgctcctcagggngaggattccgtcttctctcatgagccgctgcccgaggagccctgcctgccccgacacccagcccagcttgccaatggcggactcaaacgctgctgactgccacccacacgcccctccccagaactccaccgtcagcctgtacccctcacccacagcccctgctgggcccaccacctgtccgtccctgtccccttttcctgctggcagggacccggctgcctaccagggggcccttcctgtggggcctgcctttccccccactcagc

SEQ ID NO: 317280 - DNA, 1137 bp, Homo Sapiens
ttaatgcggttaccttgttctaagtttttacggcccccttggtggccccggcacaaaatgacaaaactggcttggcgtaccatctcgggacagcacttggtcggcaacgcactgtttcggattattaccactggcacaacaaatgggggcagagtacccttacatgaggcccgtagcactgacctcctactgctgatccctgaggaacaggcacctgccacagagtccaggcttaatggtgaagcaaacatgcctacccgacagagaaagctcaggaacttctcactgcaatgcctgttcagtggctcccacgcgctgcccctccagcagtcctgttgcaggagggtttggtccaacatctggaggggatgaagtgctggcagcaaaagatctgcctcctttgcacctctcaccagcagttggagaggagtggagggagaggtgagctgagtgggtgaaggcaggccacacaggaaggccctctggtagcagccggctccttgccagcaggaaagggggacagggacggacaggtggtgggcccagcaggggctgtgggtgagggttacagctgacggtggagtctggggagggcgtgtgggtggcagtcagcggcgtttgagtccgccattggcaagctgggctgggtgtcggggcaggcagggctcctcgggcagcggctcatgagagaagacggaatcctcccctgaggagcacgtagagctccgggtgtcgggaaagctgggggagtactggtccaggggcatggacaggtccaggtactcctggttggaggtcaaggccacgatgcggtccaggtcttccaccagctgcttgaaggtgggtctctgtgagggcactgcatgccagcagtcccgcatcatcatgtacagctcgttggtgcagttactgggcttgtccatgcggtgaccctccttcagcagcttgaaaagttcctccacaggcacaccggggtatggggagccgcccagagtgaagatctcccacaggagcaccccgaaagaccacacatcactctggtgggtgtagactccggtcaaataatgcctcgggtgccatcccctcgtgccgaattcgccacccaggcctcgctaccttacccgtgggagtactgcc

SEQ ID NO: 317281 - DNA, 1240 bp, Homo Sapiens
caccaggagctctgactaatgggtaaatctctggtaacgacccttttaaaaagacatgtaaatatatactcagatttatacactttgtgttttcttcatagctatatacagagcccccagtttggggctgggccccaggtccacaacactgcccccaacctggccttcgcctcaccatcctctggtaccaggcatttggtcagcaaagcaaactagtatcggaattaagtaagccactggcaccacctatctggggcagaggtcaccttcaatcgaggcacgaagcactgacctccctactgctgtagccctgaggacaaggcacctgccaccagagtgcgaggggcttatgggtgaaggcaaaacagaccaaaccgacaggagaaagctcaggaagctctcacttgcatgcctgttcattggctcccactccctgccctccaggcagtgcctggtggcagggaggggtgttggtccaacatctgggaggggatgaagtggctggcagcaaagatctgcctctttgcacctctcaccagcaggtggagaggaggtggagggagaggtgagctgagtggggtgaaggcaggccacacaggaaggcccctggtaggcagccggctcctgccagcaggaaaggggacagggacggacaggtggtgggcccagcaggggctgtgggtgagggttacagctgacggtggagtctggggagggcgtgtgggtggcagtcagcggcgtttgagtccgccattggcaagctgggctgggtgtcggggcaggcagggctcctcgggcagcggctcatgagagaagacggaatcctcccctgaggagcacgtagagctccgggtgtcgggaaagctgggggagtactggtccaggggcatggacaggtccaggtactcctggttggaggtcaaggccacgatgcggtccaggtcttccaccagctgcttgaaggtgggtctctgtgagggcactgcatgccagcagtcccgcatcatcatgtacagctcgttggtgcagttactgggcttgtccatgcggtgaccctccttcagcagcttgaaaagttcctccacaggcacaccggggtatggggagccgcccagagtgaagatctcccacaggagcaccccgaaagaccacacatcactctggtgggtgtagatccggtcaaataatgcctcgggtgccatcccctcgtgccgaattcgccacccaggcctcgcttcct

SEQ ID NO: 317282 - DNA, 354 bp, Homo Sapiens
ctcaatcagatacaaaaacaggaaattcgttaaaagtaacgtttgtagaagatactagttgaggaggagagacttttgagaaagcctgtgtgtgtttgtgacactcttgtgaccgtgccaagcttgcaggtatgtcctggatgatgaatacacaagctcagtaggctccaaatttccagtccggtggtccccaccggaagtcctgatgtatagcaagttcagcagcaaatctgacatttgggcttttggggttttgatgtgggaaatttactccctggggaagatgccatatgagagatttactaacagtgagactgctgaacacattgcccaaggcctacgtctctacaggcc

SEQ ID NO: 317283 - DNA, 728 bp, Homo Sapiens
gtttccaatctatgctacaatttcacttttatgtgtaccactttatgtagacatttacctgaatatttaacatattaaagacattcagagggtaccctgactcacacataacctttaagtaaagcatatctgcttattcatcctgtcgttgtctcctccaaagagaggcaacatttcagaaaataagtgggtttccatggtttctgtctctgagttacattcttagctttcaaacaatattgtggagtattttgccttgtgccctgattaataccttaggaggaaatgttcccaggggaagcctatattgaacgtctccttctgaatcactttgcttaaatagagtttcaatttgcctcccaaaagagccctgcgcttactgcgaccactgaaccatttactgcctgattgtaggcacaggtgcactgatttttcagtccaaatatccatgtgcacacatttatacctggtttagaaatcttgtcctaacactttgcttgctctcctgtatccaatagcccacacccaaaatgacacccccagtaagtctccataggaggtatgcccccagcaacttgttcacatcctgggttcttctttcctatccagctgccctgcagttgtccatgacctcccttagccaaactgccctgtgccaagctcccggccagacactctacttcttgaactgtgtccaaagacctctgactttaattggagcacacaga

SEQ ID NO: 317284 - DNA, 407 bp, Homo Sapiens
tttttttggttttacatttgtgagctaccaactagcacaaaacatgttcatcttccttttctcacaacaataggaaattgttagaaaagtatagaaaaagttctattttttcataaggcaaatttaatacagattttgctatgaagttgaaaaaaacagtaaatgaaaaggtatgtgctggctgcttggggggcaaggctcataaatcactgtacgttaagagcacgtgctgaaacttcatggtgccagtcacgtaattttgtgtatttgggactaaagacgtgaagggttatcttttccctgtggacatacaaaacaccaaatcaaaaaagagtgatagaagagtcatacgaaatataaggaaaaaggttctagactaattccatcatgcagaaaacatgccttat

SEQ ID NO: 317285 - DNA, 223 bp, Homo Sapiens
  misc_feature (213)..(213): n is a, c, g, or t
ttttaatacacatttgtatcttgaccttttcacttgtttttctcaaatatttcatttctgggccccatccattacagggttaccaggaggcaaattttatctacataaatattcacatgaaaatagtaacttacaaaaagagaaaaaataaggcagcttcataacacaattattcttttacacttttaacaatataacttctcccgttcagantaaatataca

SEQ ID NO: 317286 - DNA, 399 bp, Homo Sapiens
cccaagggtacatcaccgtggaggatgactatgaacatgactctgctgatagaggcacagactatactggaagcagagcgagccacctgcaaggagagcacaagaagacgtactgagcattggagccttggaactcacattctgacgacggaggaccagtgagccttcttccctgccttaacagcggcatggggcttcttctgcccttcgtactttacgctgtgcatgtgatatactgagacgaaattgccctggcactttttagactttgttgcttgaacatgcacagtgcatcaatcttcgagctcccactgttgctgcctgccacatcacacagtatcattccaaattccaagatcatgacaacaagatgattcactctggctgcacttctcaatg

SEQ ID NO: 317287 - DNA, 409 bp, Homo Sapiens
ataagccatgatttctgcacgatggaattagtctatcaccttattcattcacttgagcatgattcttcgaccacgggtctccatgatgttgacagtgtattctcacagggaaacgatcacctttagcgtcttgagtctcaaatacacaatccagcgtgactggcaccatgaagtttcagcacgtgctcttaacgctcagtgatgtataatccctgcccaacgagctgtcggatcatcccttctcatatactgcggtgcgcagcttcataccagattctgtgttgattgtcccttatgaaagcatagatcctttttatatacttttctaacaatctcatattgttgtgagcaaaggaagatgcacatgttgtgtgttagttggtagctcactaatgttagtgcattacac

SEQ ID NO: 317288 - DNA, 528 bp, Homo Sapiens
ccgaaagccacatcagcgactggagcggtacccaaaggtggaggcaagggtgtaaccaggtcccggaatgggggcaagggcaagggcaaggctgcagcagctgctgcagcctctgctaatggcggacaggctttcctggcagaggtccctgattctgaggaaggggagtccgggtggactgacacagagtcagattcagactctgagcccgagacccagcgcagagggaggggaagaagacccgttgccatgcagaagcgcccctttccttatgaaattgatgagattctgggtgtccgcgatctcaggaaggtccttgccttgcttcagaaatctgatgatcctttcatccaacaggtagctttgctcagtctgagcatcactgccaattattcatgcgatctagagacaattcgcaaattgggaggcctcccaattattgcaaacatgatcaacaaaactgatccacacattaaggaaaaagccttaatggccatgaataacctgagtgagaattatgcctctaac

SEQ ID NO: 317289 - DNA, 727 bp, Homo Sapiens
cttgtgccgaccaggccacattgctcagcatcgctgtgacctgtgccctctgactggaccagagttagaatgagaggtggctgcgagtgtgaactgactatgtgaagtctgaacctcactgatgaacgatgcttgtagagggcggcggtatgagaagctacggagagctgagccgttcactgcagtgaactggaggtatatgttacgaacataactctgccagtgacatgcggagacgggtacggctgttagctgcatgtggcatgctagaccgatatgactgactctacatcctagccacactagaacattcgcacgccggcaacgcctatatcacagcagtgtaacgctcgttacaacacttacacaaacaagcaacccgatatatgcactacacactactctgtttgagatgatctgacacggtgtgttcacatagagtatacgacatggcaatgtgctgtgcacattgcagcgacacatggacatatagcgttcttattcgctttgcagatgtgactcataccaagtgtatttcacaggacagaagactattgatccccacagtttcatggtaatgagacaaagccggtttacggattcttgcgcccaattttcgcagaattttaaaattatgtcggctggtgaattactgaaaagggacaatgtagcgcttaaggacttcggcactttcttttaattctctggtttgcgagtgggctcaatg

SEQ ID NO: 317290 - DNA, 620 bp, Homo Sapiens
ctgtgattctcatttgccatttggtacatttcatcgcatccttctaagaagccaagagtacatgccgatgatgcaccatttgcaatttgttctcgagggaatcagcatacagctgttcgtctgtcacttgggctacttttgataatgcagtacagtggccagataaggtcgtgtgggagagatgcaagatttgtgtcaggctcatactgttgactggatggactttaatgaagagagatatgacagatataactcacattcacggttgtcgtcatggtgtgcattttgcaaggtatgaaacctatgaccaagttgtcagttatcgtaaggccacacgaggtgatggtctgtatctgtcacggacgttacattcaaatgattgacatgtctgcccataactagcatgaactctgaagatgtgatagcgctgaaaatcgattacttggcatcgtactgaacgcatgtggcacaccaacaccaagccattctggcggctggtcattctaaggtccacttaggggacaatcgggtgatccaactaatttgtgaatcagtggacactcatggtatgtatgaggaatgagaggaccatgtggggacccagtctatatgacaatggg

SEQ ID NO: 317291 - DNA, 1075 bp, Homo Sapiens
ggaggggccagcccgtttgccgaaatactgggggtcacgcttagggaagatccgaaataaaaatttcctccccccgaaattccgggtgtggctcgggggcaaaggaaatttagggggttcccttttccacccgggtggcggttcttcggggggagagggaatcctttttaagggaattcttcaaaaggcattaaggaaaaaggtggactaccagttgcccacttcttttttccattgaggggtatcggatgagtcaaaaatgataatggtccacttccggtcagtttggcttttggacttggaaccatggtagtctcagccggctggtcatttccaatattaggacgctgtaactcaggaatggataatagctcctccccaaacttgctcaatgtcttgttgcataccgtctaaatcaacaggggctacttgagcaacagaagtttcaggtggactgagcctgattagtagcaatgaagactgggctctggatgtgcccggggaatatcaggaccaaggtgactgaaacgtagccgaagaaacctcattgtcatctacaaacgggaatgtctgcgccaaaagctgcatgcagtcatcaaagtacaaagcatctgatttgggaatgtgggcaacctgggagtagttggcagatccactggtttctgactggatgtgctgggctggctgaattgggagaaattcacctgtctcttcatctagttgtaactgagcgaaaaaggctttctcttgctccttttggagttgttcttgtctttccttttcaagttttttctgtttttccagctcatactctttccgtcgctgactgaagtcaaatacttctcgacttactccaagatctatatcttgcctccaaagtatgtcaatcaaatccatgtcctgctgggacgggagtcccggcggcggcagctccaagtccatcatgatgagctgtggaccgtgtgttggggctccccgacggcggccctgttccggctgccgaggcgcggcgcggacagggcggctctggtggcggcggcggcggtggcggctgcgtcttcgtctgagaacgcca

SEQ ID NO: 317292 - DNA, 1155 bp, Homo Sapiens
  misc_feature (596)..(626): n is a, c, g, or t
gtgaaaagtatgatttcttaccacttaagtatgattgatatgatccaacaaatttgatcagaagctgtaggtaaatcctcttctgaagccaaaatggtatattaaatataatttattggtacttccattttctcttccttcttacttgcctttaagatcttataaaaaagaaactaaaagttaatatttagttgcctatattatgtaaccttttaactatatataaagtacttttttggtttctttctcaccacttttattcaaaagtacttttaacataccaatacatagtctgtctgatgggagtataaattggacagtaaggttttgtcttaataaaatgaaatttgtttctcatgatatgaatcttgcaggtaagatgtagggtttattgaaaatgtgtgggttaaatgctttcaggtacaccaattctttctactaaattgagctctatttgaagttctttggaatctgtggtgaaaaataattttctgatttccaaatacattaagagcattaaatgaatattaatcacctttaaagtcttttataaaaggacttgtattggtttttggctgcatagaggggttgaatannnnnnnnnnnnnnnnnnnnnnnnnnnnnnncttcttaaagaagatgtaattcacaaatagtttagctccctagcgctcagttgtagaatagaaaatagaacattattcaagttaattgaaaggtgaggtttttatacccccactaatgctgtgtatctgtctttcgtttgttaacattatttgcttaatttctttcaactcacactttggataatactatcaaaaactaaggctaaacattccttgtgtatctttaagcatgcttctcctgaaatttaactacattagtagttgacatttgtatacatatatcctaatacaagagtaggataaggtggaaatgtaatggcctgagggatggtgaagcattcttttagtatttttcatcatgttgggctcctagattgtactggggttgcccataaatcaaaccccatactcttagaattcattatattatggtgatatccgaacctagtgaatggtatgcttgggtgttttccattgagagcggatggacctctttataaagttggttgctgcaaaatccagatctttc

SEQ ID NO: 317293 - DNA, 811 bp, Homo Sapiens
gaataaggaaattcttttaataggcaatttttctcaaggaatgtggccaaatagcaggaatacacatggccctagatatgcagtgaggcggtctggagcatgaaattcgtcctagtgggggcaagttgtgcctgtctttaggtgttttagactcaggttgtagacagcccagctgaagtccctgccttcctcctcgcccccctactcacaggaccagatctttctacgaccccactcagtattcagccaacatccatggatggaagctgaagattctgaggatatgagagaatattgggggtctggagttctgcactctggctaagggatggcctgggaccagcacaggagagtgggggcgctgggcagtacagacacagaaaatgaggccacttccctgtggactgccgtaagaaggccacacaggaaagtcttgtcctctcatctccctttgaatccagatctacaggccatgagcacacttttctgaacccctcggtgaagaagctctcacatgtcagcagaacccaggtgcgctcccattgatgcacgatgaaccaggatgaggcccagcaggtgctgacccaacttgaggcggccagaggccaagtcccccaactgtcctcttggagggacaaaaaggaggcaccctgcctcacagatgtcccaaatgtgagcaggatgtggacactggcctgaaaagaaaatggtagattgttaagatacaaaccatgggagcccctagaacctgacctatcctgcctgtctccttctcctctctctctttccctcctcaaacagactgtaaggc

SEQ ID NO: 317294 - DNA, 609 bp, Homo Sapiens
  misc_feature (190)..(199): n is a, c, g, or t
gacacatagacacattcactgtatttattaataatgacactcagaatcgtgagtatatctgttctttccaaattattaatctattgatccaatataattctaatgaaaatttcatttttttcatgaaacataacaagctgatttttaaaaattatgtgaaaaagcaaaggatcaagacaagaggcttgtnnnnnnnnnngaattgggcagggcagaggggaagcaagagtttggtctctaagatattaggatgtaatatgaagctaccatcactaagatgagtagtattggctcaagggtagacaaatatatcaatagaacataatagagaactaagaaatagagcacattatattagcaagggtaatccttgattatgctataatcactaataaaacctgaaacagctttacttaatacaatatagggttaattctgtcttagtacgtttgggcagttataacaatggaggctgtgaagttcatgacaaagcaccagctaattcttgtgtttggggagggactatcttccgcatagacagaacctttccgctatatattcacatggtggaaaggggaagggatctcttttttaaggtcactaaaccca

SEQ ID NO: 317295 - DNA, 878 bp, Homo Sapiens
tttttttctgccaacaaatgtttattaaacacctatgtgcacagcaaggagccaggatcttcatctccactgcagttcatgcttctggagagctgtccaaaagctcgggttgggctggtttgaggcctgggatccagccccgaggtgaagatgggaggaccagcccagccccaagagctcccagccttcagactcctgggtggccttgactggcagcaacagccttaataagtattggagctggagaccaaacccaacaccattttccaggaggggctaatccatgaccaaggtgcttatgagagcatccttcctgggccttatgagagcatccttcctgggcccttctcttgccagaaaaggccgtggatggcagacctgcaggtgcgccctggagggagtggctgccgaccggcctcccacagcgttggctcttggcctgagcctttgcctctctctggcctcctgtgatatcacacccagggtagtggtcattgtctgtgttctcagggacactgctacgtgttaaagacttactgacacagaattaagactttcgagagaggaactgagaagggaaaagttggatgagaagtgggctcctaggaaagtgagtgagtgtgggacaaacatggagtgtgtctgttcctgccaacttccagacccaggcccaggaggaggcactcccaaggcctaggtgacttggaaactgggaacccactatgggagcagaggagccatcagtggtgctgcctggatacctcaagagcaggccatcctccagtgacaggcagtctcatgggaatggcctcccctaggatttgaggagggcgtgtgtcaaggggcagtcacaaggaagatccccataaccctttggc

SEQ ID NO: 317296 - DNA, 851 bp, Homo Sapiens
cctgtggattggaactctgtgggaatcgctccttattctgatggttcactcattcagatgtccttgatatttggggatatttctaaaacagctggggagaaaaatggactgcgaggctccggtgttggacgtgaaattggcagtgagacatccgcctctaagcccagggaaaagcttaaattgtggttctctgtctctagcaccgtgatctttgaaatgcgttattgattttcttctttcttctgggaaatgcaatgcaggtgaacttgtaagtgttgaatcctccctctcctcactgttcaatcagactgaggcctacttcctttctgataagaaatatggaactgccattgctcagtagggaaaatgtcctttctacaagcattcatatttcaataaaaatctgcactttgtgagttgagccccctcaaagagacctacagaccctgcccatgagcatctcccatcccacactcatcatttccccattttcacccacttctgctcctgtgcaaaccagtactatccttttctgggggatcctaggcagaagcgatgtcaggacaaaggcagagaaggcactgccaggtcctgcatgccagtaaaactactcatgtcagctgttctgcaggatcccatgagaaggtgagtcaccagaaaatgcagtttccacatcctgatgatttcatctccctaccccaactgatcaatttctccaattttccagcctctcaccctccacaatccccttaaaaactgtagcccagaactctctggaatgatgaatttgaaggtttgctcctgtctcctcactcagaagcctgtaatcattaaactctttctctgatcaa

SEQ ID NO: 317297 - DNA, 958 bp, Homo Sapiens
  misc_feature (504)..(504): n is a, c, g, or t
gcgaaagaatgtattgctcagctacctctgaaacttgaatctgaagtgatggagaatggggataacttctcagtgggggaacggcagctcttgtgcatagctagagccctgctccgccactgtaagattctgattttagatgaagccacagctgccatggacacagagacagacttattgattcaagagaccatccgagaagcatttgcagactgtaccatgctgaccattgcccatcgcctgcacacggttctaggctccgataggtttatggtgctggcccagggacaggtggtggagtttgacaccccatcggtccttctgtccaacgacagttcccgattctatgccatgtttgctgctgcagagaacaaggtcgctgttcaagggctgactcctccctgtttgacgaagtctcttttctttagagcattgccattccctgcctggggcgggcccctcatcgcgtcctcctaccgaaaccttgcctttcctcgattttantctttcgcacagcagttccggattggcttgtgtgtttcacttttagggagagtcatattttgattattgtatttattccatattcatgtaaacaaaatttagtttttgttcttaattgcactctaaaaggttcagggaaccgttattataattgtatcagaggcctataatgaagctttatacgtgtagctatatctatatataattctgtacatagcctatatttacagtgaaaatgtaagctgctttattttatattaaaataagcactgtgcctaataacagtgcatattccctttccatcactttttgtaccagtttgcctgaactacaaaatctgggtcttgctatcaaaactggcaagaaagactaacattcttctttccccccctaacctgggcggttcccccggtgaccaggaatccctcgggcggcgccccaaggattaccctgt

SEQ ID NO: 317298 - DNA, 884 bp, Homo Sapiens
  misc_feature (137)..(158): n is a, c, g, or t
  misc_feature (160)..(167): n is a, c, g, or t
  misc_feature (170)..(217): n is a, c, g, or t
ttgtctattgccccgggtttttctttgggaaaacacgctttgggcccaagtttccccttccctttcggggccccgccgccccaaaccgaatgtttttaaaaaaatttttttgaggggccgagggcggccggcccagnnnnnnnnnnnnnnnnnnnnnntnnnnnnnnaannnnnnnnnnnnnnnnnnnnnnnnnnnnnnnnnnnnnnnnnnnnnnnntttttacattagtatttacatttatttaacgtatgcagtttacacactcattattaaacaaaattggaatgcaaacaaatatacaaataccataagcattatcaaataaaataactggcactagtgttataagcatattaatggacctggtagggaaaagtgatggaagaagactgcagcccatggcatttttctttttaccaaaagaaaacgctcagtagcaccataatggtaatacttaaaagaaatacataagatagaacattttaactgctatcattgaggttaacctgcttttatttaagtgaattatacaggaaattaacagtacaggcagtattttggccaacttctgcttatgtcagctgaacattgtccataaacaaaagcaaaagaaaataatgctaatcatacatggaccttttgtacttggtacaagttctgcaccgtgctttgatttcatggttggagaagatatgcatgtgttaaaaactgaggttatgtaaagttattcactaaagcctgagtgtgtctttggtaggctaatactttttcagcattattaatcacattcatgtttatctatttcctgtatttttatatataatccaaggtgaccagagaagacatggaaaacaacacagcaaaatcctcaaataactaggcc

SEQ ID NO: 317299 - DNA, 763 bp, Homo Sapiens
  misc_feature (94)..(94): n is a, c, g, or t
aaaaatacgttagtgtctttattatactgtaggcttacttccccaaactaataggtataatggtttcagttgtttatcacataaagcatctatntagaccagccccaaagtagtaatgaaccatgagacatgcccatacctctaaaggaaaaggaaaaatgatttagttaggtgttccacttgaacctatgtacaaatacaatgccgctgctcatgccctgagtgcatctgtcagcatatggcagtttttgagcaaaagcaggaaaaaacccacccaggaaaccaaatttggaaagcccaggccataaaattatgtatatcaaaataaaaccaagaagctttgggattattcacaatcttccttctaaacctggccctcttttcctgcctcattcactcattgggtggtttgacttcactgctagtttcctctaccccatgaactgctctgccatgcatcatagggtaaggaaaagcagcagtgccacagccataaccaagatcggcaagacgggatagagctttaatgctacctggaggtctgcctgggctgactttgtatcccgcagctttagttgtccccaaaggtctgcctggacttgtcttaaatccagctgctttggtggttcccaggggtctgcctgtgctggtccggtatcctgctgatttggtggttcccgaaggccggccacgcttaccagatcggttgagattcttctttttctttagttcatcttttacctcgtgccgaattcgccaccca

SEQ ID NO: 317300 - DNA, 538 bp, Homo Sapiens
  misc_feature (243)..(286): n is a, c, g, or t
gagaaaacctgaggatatctcaggaagaagcctgtcagtgtgatggacagctacaggagatgggtctgaccccagggttctggtccaaggacagaggacagtgagggacagggctggggccaaaagaattaacagatctgaggctaggaaaggtcacaggggaggtagaaaggaaaaggcccaaaggccagcttaatgatacacgtgaggacaaaaatccaaacaggaatcagcctcatagcnnnnnnnnnnnnnnnnnnnnnnnnnnnnnnnnnnnnnnnnnnnntttgtggctcaagtgcaggccacagggtggaaggaagacttgctttagttggccaccgtcgtccttttgcatgacatctttctcaacacaggcctttggcagtgggaaggaagaggtgggaggcacaggccactcctggaatgcaaggattggcttctctgggtcaaacctcccacctactgctcctggaaggaatggtgttctgggtgtaatctctacttggacttttgccaactgcccctggcagtcccc

SEQ ID NO: 317301 - DNA, 1188 bp, Homo Sapiens
  misc_feature (567)..(590): n is a, c, g, or t
  misc_feature (783)..(783): n is a, c, g, or t
  misc_feature (803)..(803): n is a, c, g, or t
gaagtcttgtataactaacagcatccccaaaacaaaaagtctttggggtctacactgcaatcatatgtgatctgtcttgtaatattttgtattattgctgttgcttgaatagcaatagcatggatagagtattgagatactttttcttttgtaagtgctacataaattggcctggtatggctgcagtcctccggttgcatactggactcttcaaaaactgttttgggtagctgccacttgaacaaaatctgttgccacccaggtgatgttagtgttttaagaaatgtagttgatgtatccaacaagccagaatcagcacagataaaaagtggaatttcttgtttctccagatttttaatacgttaatacgcaggcatctgatttgcatattcattcatggaccactgtttcttgcttgtacctctggctgactaaatttggggacagattcagtcttgccttacacaaaggggatcattaagttagaatctattttctatgtactagtcctgtgtactgtatagacagtttgtaaatgttatttctgcaaacaaacaccttcttatnnnnnnnnnnnnnnnnnnnnnnnncagtttgatcacactattttagagtcttaatgccaagtcagcagatttgctttatgaattacagggactagaaatgcccacattcaggaaatttgtaataacattgtctagacacctatcctcattctagtagaaagtgtgtaccatactggtaaatatgtgtgattgccttgaccttgaaaaaggtttgaanttctgaatgttaatacccantccttgtaagtaagtttgtaatttccaccataaattatggtaaatataaaactccagaggttgttcctactcccatacagttcacactgattgtgacacattcttagtagctagtgtctgttctagtcactgcactggagtctacgagccggaactcgctatatgcacgtgtgtgtgtccgtatgtaagaaagtgtgcaccgagtgactgaatggttgagatgaattggaatgctgaagactaacgaagaaactagagactgatatcgagcattctgcccacctcgctctgtatttaattaattgtgctatatgttgctttaacaacccattgagcagtcagggaatgtgagtaagcttgctgccaaaggtatctaggaaagcat

SEQ ID NO: 317302 - DNA, 423 bp, Homo Sapiens
ttatcttgtcagttatttattatgtgtcattctaaagactagcacatttacagcatacatggctttgaatgacctaagaatatataaaacagtaactgtatgtttatatatatatagtaatactgcccaaaacaaataaataaaggtatcataatgcactaagcttggcaaatacaattgtgtagggacaaaactgtattatacaatatttttacatctttaaaggaaactaaaggcaactgtgctctgtaggagctctgacagaatccacattacattcccagttttccatagatctcttttctttttaaatggggaggcatcataaggaacactggacggaacctctgttttacggtaacctgtaaaactgccttccctgcacctctgaaaacccaaagctcctacagaagagaggagctg

SEQ ID NO: 317303 - DNA, 925 bp, Homo Sapiens
  misc_feature (723)..(735): n is a, c, g, or t
ggtgaagatccaagtggtaggagttccataaccaccacttcccacctccatcccttctcctggaacccacctgctggtctggacagaccctctcctggtgaatgccagaagggagccgggggcctggtgggcttgtgcagggcctgtgaggtctgagcacaggctgtacctgccctaccctaactctcctactctgctatgctgccttgcaaggcatatctccaaagcgggtgatttcagggccagtaaccaagaaaggaccttaggtaataggataaggggtcagattcggcagcagggtcacctcctccaagctgggccatttcacagtgacttcccatttccctcttctgaaccttgagtctctaagtaaaggctccctggttctcttactggccagtgggctagtggcccaggagggaggcaccccatgtgcttggctgagctgtgggccttcctcacttcagcacctgcaaagggagaatgcgatgggagacacggccccaaccagagaccctgtccttctctggcccgcgtctgaggaacatctttaagactgtggattgacaggagtaatgcccacttagaaacactgtgtgactaggatcaaaatgccccggaatcttccttcgtgtcagcaggcacctggtttaaaccagggagtaggtgaagggggtgggtgcttgtcataagcctaattctcaggaggattcatgagtctgnnnnnnnnnnnnntcacaggcttgattgaggggactcattttgctgcttttttcccccagctgttaagccaagctgacaaaacttttcagaaatgatttttacagaaacacaccagtaaatgacattttcaggaattaaatagacacttgcagggcgattgccataaacatcttagttgcaattctccagggaggtgttctgc

SEQ ID NO: 317304 - DNA, 475 bp, Homo Sapiens
  misc_feature (173)..(173): n is a, c, g, or t
ggcacgcacaattcaatctccgagacattccccagactcatgcagagccctgggccttctctttggacctgggactcaagcaggcagcaggctcaggccacctccttgctcttgggacaccagagaacccatcttggctcagtctccaccttcctggtcttgggactccctcnttcagctgaagctgagtatgtccagggtggtcttgagccaagggtcgaagatgaaggcccttgccctgcctcccttaggcctggctcccctccttaacctctggccaagcctcaagggcgtctcttcctgggggctttaccaggagaagactcttccacctctttttgcctgaatggcctttgggcacaaggtcagaggctggatgtggaccaggccctgaacagaagccatgagatctggactcacagctgcccccagagcccaggcaatggcactgacgcttcccattaaagctccacct

SEQ ID NO: 317305 - DNA, 807 bp, Homo Sapiens
cgtccactctcgactgccgcgacgccgggtatggcccgacgttccagcgccatccattttcagggctagttgattcggcagtgagttgttacacactccttacggattccgacttccatggccaccgtcctgctgtctatatcaaccaacaccttttctggggtctgatgagcgtcggcatcgggcgccttaacccggcgttcggttcatcccgcagcgccagttctgcttaccaaaagtggcccactaggcactcgcattccacgcccggcctccacgccagcgagccgggcttcttacccatttaaagtttgagaataggttgagatcgtttcggccccaagacctctaatcattcgctttaccggataaaactgcgtggcgggggtgcgtcgggtctgcgagagcgccagctatcctgagggaaacttcggagggaaccagctactagatggttcgattagtctttcgcccctatacccaggtcggacgaccgatttgcacgtcaggaccgctacggacctccaccagagtttcctctggcttcgccctgcccaggcatagttcaccatctttcgggtcctaacacgtgcgctcgtgctccacctccccggcgcggcgggcgagacagggccggtggtgcgccctcggcggactggagaggcctcgggatcccacctcggccggcgagcgcgccggccttcaccttcattgcgccacggcggcctttcgtgcgagcctcaccgactcgcgcacgtgttaactcccgacgcgtggtcgacatatcccgtaattccggccagtaaa

SEQ ID NO: 317306 - DNA, 579 bp, Homo Sapiens
  misc_feature (237)..(237): n is a, c, g, or t
  misc_feature (376)..(376): n is a, c, g, or t
tgcggagggatgggactggggagtcagctgctcatctgcaggctaatggcaggaaatggtcatatttggggtttttccctaatttttttaaacaaaaattacattacaagatccaggttcttcccccccacactcaatcaagccagccctctcctcttctgtcacgtaaaggatatttggcacactcatgcgtcattcattcacaaaacacaaacccaggactttctgcctaaggcnagagcacaagactcacagcagcaccgaagcgcatctgccgtccgggccctgccaggcttgccaggctgccagtggtaactgtggacctactgcgtgccacgtgttttcatagactcatcccatgctggcaacagccctngcaaggggctttggctctgccacagggcaggagaggaagttgtagcgcctagcgagagttccagccccagacgcccacctgtgcctcagggcaccgcctgccgagcagagaaggcacagcagccgtcagagtccatgagaggtgaaaccacacagcagggatgtccaatatcagaactattaatatcaataaaagtataacct

SEQ ID NO: 317307 - DNA, 518 bp, Homo Sapiens
  misc_feature (22)..(22): n is a, c, g, or t
  misc_feature (34)..(34): n is a, c, g, or t
  misc_feature (39)..(39): n is a, c, g, or t
  misc_feature (115)..(115): n is a, c, g, or t
  misc_feature (415)..(415): n is a, c, g, or t
  misc_feature (491)..(491): n is a, c, g, or t
aaccccaaaaaccccttgccanggctgttgcccnagcanggggaatgaaatcctatgaaaaaacacgtggcaacgcaaataggtccccaacagttacccactggcaacccctggnaaaacccgcagggcccggaacggcagatgcggcttcggtgcctgcctgtgaattcttgttggttttcccttaggcagaaagtccctgggtttgtgttttgtgaatgaatgacgcatgagtgtgcccaaatatcctttacgtgacagaagaggagagggctggcttgattgagtgtgggggggaagaacctggatcttgtaatgtaatttttgtttaaaaaaattagggaaaaaccccaaatatgaccatttcctgccattagcctgcagatgagcagctgactccccagtcccatccctncgcactgcttttccctgtcctgggtctgttctgttacatggagttcctgggggaagccctggggaccggcatcttnccagggctcactgctgttgaaagtgaa

SEQ ID NO: 317308 - DNA, 396 bp, Homo Sapiens
  misc_feature (179)..(195): n is a, c, g, or t
tctaacatgtagtttgtgaaaatgttagcattggaggaatgttaattgaattgcatttaaccaggccaactaccaatttacaggaaacaaaacggcaaatgaacatggtaaatgacaccacagggatacagtcatcaaaatccagactgggaaaccttccacaaacaaattgtaaggcnnnnnnnnnnnnnnnnngactaagaggaatctatattttaaaatagattaaaaagacacagcaacaaagtaacaatttgtaaactttatttggatcctcattcaaataaataaatataaaaacaaggatgatctttatgggaaaattaggaagttaaacactgactagatatgtatatacacatatttttagagacagggtctcactatgttgcccag

SEQ ID NO: 317309 - DNA, 401 bp, Homo Sapiens
  misc_feature (367)..(367): n is a, c, g, or t
cccattcacaaaatggaatttgagctgcagaacagctcatgtaaactgcatggcagtgataacgaagtacagtggctcagataaaggtcttcacaaggacgttcctgcaaaaggcaaaagaggttgtaaagtattcatataagcagaggtgaatgactacacagttatatccactgtcactactgggaatacctggttggctaataactctttttgcaattggatgagattacgaagtgttttggtttaaggtacagcttgtcattcttttactttcgggaacgcagggcattcttttgctgagcactaatttggtaaaaactttaccctttctgccacgaactttggacaggatgagtttcccgtntttaagagctgataaagactagtaagcagactcc

SEQ ID NO: 317310 - DNA, 931 bp, Homo Sapiens
  misc_feature (60)..(60): n is a, c, g, or t
  misc_feature (922)..(922): n is a, c, g, or t
cccattcacaaaatggaatttgagctgcagaacagctcatgtaaactgcatggcagtgantaacgaagtacagtggctcagataaaggtcttcacaaggacgttcctttctgccacgaacttggacagatgagtttctgtttttaagagctgataagactagtagcagactcctccctagaaaagtaaacaacctttagaactagctctaagaccaagtcccatctcaagctaaaccccccatacctcccattaataacccacccatccccccaccattaggggaagtctattactttgagccattattttaaggaaatgggtcaaaggaagataaataaaagggcaaaaatttatattcacagtacaaataatgtgctcacttccttcaactgggagccatcaatagggtgtcaatttaaaacaattcatctccagaaaaaccaagttcagcttaactggactagttttggctcaatatattaagaaaaatgtttaacagaaaactggactttaagtaactatatggatgtaagtaaaatctgttcttacctacccgcatagcaataaaacctttcctcctggttctgactgctagtcctaagagtcaggtgtgccttactcttgtctgcctccttccttgcgatgatcactgatatttcactccctcctagctttcatggagcgtgccgtggcctgcccctggcttatctgtactccacataccacaagtgtctactctcagctgtagagtgtctgagctcggagccattcgcgctatacttgctagcagttcctagtagctgaacatctctcctggatctttaaaggcattgtcacgaatcctgaggtatctgcaaactccctcaatagttagggttccacctgctattgcaaactcagccagtatcatggaactatcncccatgctt

SEQ ID NO: 317311 - DNA, 1210 bp, Homo Sapiens
  misc_feature (19)..(19): n is a, c, g, or t
  misc_feature (55)..(55): n is a, c, g, or t
  misc_feature (171)..(254): n is a, c, g, or t
  misc_feature (287)..(337): n is a, c, g, or t
  misc_feature (414)..(443): n is a, c, g, or t
  misc_feature (901)..(998): n is a, c, g, or t
aacatgtttttaaagtggnaagaaacttggattaagaaataaacagaactcctanaatcccatgccaatgagttacccaccttcactcctcactcgaagacattgcactgccctacaccatggcccacatctatcactaacacagagccttaagacttaggagctggctgnnnnnnnnnnnnnnnnnnnnnnnnnnnnnnnnnnnnnnnnnnnnnnnnnnnnnnnnnnnnnnnnnnnnnnnnnnnnnnnnnnnngctgggtaacatagcaagaccttatctctctgnnnnnnnnnnnnnnnnnnnnnnnnnnnnnnnnnnnnnnnnnnnnnnnnnnnctgatgagcattccctgtgtgtagtatgcgatcttcacagcaaccctgtaaagtaggtgagacagagatcatagggnnnnnnnnnnnnnnnnnnnnnnnnnnnnnntgccgagaaatgtacattgtgggcataccctgaaagccccacccaccaggtgagaccatcaaaaattctaaagaaaggaaaagtcaggaaaagaaacacacatcaaaggctctcaagcagaccttacaattgaaaaactgctgctttgtcatttaacaaacacatttttattctctgttaattacttaccggggttctaggactgactgagaaatacgggcttctttctattggtcacattcacagccaacatttcctctgtgccaggtcagaaagacagtggtcaccttcgtgaataatttccttgagcaaagctgctctcagccttgaccaaagcagcctttccaggggctggtctatacccatgatctctcttctctggcacacagaaagtgaatggtcagactcatctcttgaatggcaagccacgtgtttattacatttcttgttcaccagannnnnnnnnnnnnnnnnnnnnnnnnnnnnnnnnnnnnnnnnnnnnnnnnnnnnnnnnnnnnnnnnnnnnnnnnnnnnnnnnnnnnnnnnnnnnnnnnntctgctaggtaggccagtcttctgtccaagggtgtcctaggaccaggtcatctcagccatgtggggttgccagatgtttctgcatgtggataaagatagataggccaagggctatgagggggcagaataagctagaaattcccagaactttggtcctagaagggcccttaagaatcatccaggctggttgtggtgcctcacgtctgtaatcc

SEQ ID NO: 317312 - DNA, 540 bp, Homo Sapiens
aagtaggaggtggggaaataatatgaaaaacggcagtttttggtattaggttacaataaatttaacgaatggacagtttgcaaaatataagggtttctccccctttagtgctgcagacaagttttactgcctaagacgttgaggctgcaacaatcatgagcttggtattagtagccatccatgataaacataattaattctcaacttaaccatctataaaatatgtagtgttcaccatcaccctgactcaattcacttctctaaatgtctttggtagaaagcagccagaccccacgtgggtagtgatgtctcttgtgagacacttttcatttctgccaaaactagaaataccaccttcctttactttcattagcacctcaaagtttgcttgctggatttctttaaaaatattctgccaaaagagttgaaggcactgggggtttacagcaagtattttctctttaaaacggtttattacttcaacaagcaaagagcaaaccaactggagaaatgtatgttttttctttttatttatcaagc

SEQ ID NO: 317313 - DNA, 1358 bp, Homo Sapiens
acatcagttttaacgggaataaaaagtaaaaacacatttattagtgtttcacatagctgccatgatggcaacgtgactgtgacttgcataaataatacactcaaggacattccacactccttggtggttccagcaatgcgatttactaaataaaaaagtgactattcccatgaaagaaagcatcaaaaactagttttgagaaagaagatgaaaggctcaatctctaactcctggatgccaggaagcagagtttttcagaatcaaaaacaaattaagagctcacagccccacccctcaggggtcacataagttggtactgttgcttgtaactaattcatgattttagccttttctttactcaaaattaaaactaaggacataacacccttcaaaaatacacataccctgagacagatcattaccagaatctacacagggctttgctatttaggtacagttagtacaattcatatttaaagtaatttcataaaaataacaactgttccaatcttacaagtttcgtttcctcctatcatggtcaccaaagcaatctctattgttaggcaagttgaacagctttatttcttaagagctttgaattgttttgtattttctccaactgatctatttctttgggtaatctagcaatttcttcttccagctgtttttgagtaatatcaacttgttggcacaggcgagcaaaagtggtagctatttgttgttttacttggtgactgcagtttgcactcgtggagctaacaatcatcctcagtttttcagttgcatagtttacaaactgctgtttaaaggctcgctccttggcatgggtggtccagctcagtctttcataaagatacaaagctccatacatagttaatgaaacagataggagtttccagcctatagttttccaaatcactcctccaacaataatgatgcccatagaagttctagatgtaacggacgccaatcctgttactaatgtaatcatgagttcttcctgtgatgcattatctggcgttgctggagtggtaggagcagtgggagtagaagctaaagatctagggagctgaaagataggctctgataatcctaggagcaccctttgagcatttctagggcccaaaaatcgatgtacaagggaagaccagcccagggaaaaacgaaatacaatatcctcttgaaaatctgaacataacttgtggtaatttagattataactgagatcaaatttcttgcaagggatcagtgtatgtagtttatcctgtataccagctggaagtaatggcttcaaattttcaataatttcttgctgggtctgaagcactaaggcgtttacttcatcggtgcatcgatcc

SEQ ID NO: 317314 - DNA, 1016 bp, Homo Sapiens
  misc_feature (22)..(22): n is a, c, g, or t
  misc_feature (62)..(62): n is a, c, g, or t
  misc_feature (72)..(72): n is a, c, g, or t
  misc_feature (77)..(77): n is a, c, g, or t
  misc_feature (105)..(105): n is a, c, g, or t
  misc_feature (129)..(129): n is a, c, g, or t
  misc_feature (136)..(136): n is a, c, g, or t
gggtggggcaacccacctaatnaaagcggccaaatgcaagccctagaaataaaaaccaggcnagaaagaaanatggnaaagggcaacacttgcctgaagtctttncaacccttcatctttcctcccaangctgganactttctgcccctcaaacatccgacttccaggttccttagcttttgaactcttggactcacaccagtgatttgtcaggggctctcaggcttttggccacagactgaaggctatatggtcagcttccctacttttggggttttgggacttggactggcttcctggctcctcagcttgcaaatggcctagtgtggaacttcatcctgtgaccgtgtgagtcaattctcctaataaactcacttttatatacacatatatactattatttctcttgctttagagaaccctgactaatacaggatataaagttgaattgttagtcatttatttctgattagttggctaatgctatttattccataattaggtgtttcctctaagaatgtacaatactgaaattgttacacattaaatgttatacatactaaagtctacttttgaatttctttgttttgtaaatgcatctgctaataatgttatgaatattacaacttatgataaaattctgtgcatgctaccccacttacctgacagctacatttttcactccctgatcttcttttttctgaaccaaatgtctactattaattcctagataaatttgaatttattttaaagtttttgtaaaagtagcagatttttcattgtaattatcccaccagttactctatcaaataattgaagaagacacattgtgtttaatagtattcaatcttcctatccagaaacttgctagggacctataactacataaatagtctattatgattgattttaaagtgttacataattttcttcaaactttttcttactattatatgtagatagcttatatttagttatttagtaccacaattgtgaagtgaatctactgactcact

SEQ ID NO: 317315 - DNA, 581 bp, Homo Sapiens
  misc_feature (55)..(55): n is a, c, g, or t
  misc_feature (87)..(138): n is a, c, g, or t
  misc_feature (398)..(409): n is a, c, g, or t
tccttaataacccaaagtttcctgttcctgtaagaccccagcctacttgggaggnctgaagaataggaggatcccttgaagccccannnnnnnnnnnnnnnnnnnnnnnnnnnnnnnnnnnnnnnnnnnnnnnnnnnntgacaacctccattattggcacatagtcaatgttttacttcccatgccctgaatccttaagaaactaggaacctagaaacaaaaacaacttttcataaccacatcaaatattgctaatttattccttttgttagattcactaatttttaacattaaaaatgacttgtacactttacaaattaaaacattagatcacaaatgaaaatatgctccagacatctataggcatctgcttttctttatactctactaaatacatnnnnnnnnnnnntcttttaaaaacagaaaatataatctcataccaccccctacttcctctatgtctctggatccctggtaaaacagctggcagccttttctgtttccatagcaaccacatcatcattcagttggcctgacaacactttggttgaaaaaaaagaagagatcgcgccaaataatat

SEQ ID NO: 317316 - DNA, 874 bp, Homo Sapiens
  misc_feature (484)..(512): n is a, c, g, or t
  misc_feature (655)..(655): n is a, c, g, or t
  misc_feature (682)..(682): n is a, c, g, or t
ttttattaagaaatatcacatataaaaaaggtttataaagaatagtaaaataatactcctgtatctaccactgaagttaagaaacattatcagcaggatgatcattaactcacaatctaaattggaacacttgagaaagaaatgtagtgctattaaaaattgtatcagtatactaagcatgaactggaaatcagaacctttatttaccagtggctttacaagtaacttggttaccccctgaagttcacatcccctcttcctactctcaagaggtaaccaataaaaccaaatatatttatctattctactgttaatgaacatttttttgttgttgttattgtggaacatccctgtacaaatctcctggtacacaagtaaagattttctctacagtacttacctaggagttgaaattctcagttgtagaataaatgtgtgttcaattttaatacacaatgtggcagtaggttaatcattcacctannnnnnnnnnnnnnnnnnnnnnnnnnnnnatataacctacacctctgtaatctgttttgattttaatatattggtgacaatctaatgttttccccctcaaataactaattttcgtaattctatatgttgaataatcaattcttttccagttggtttggcatgtttcccctanaatcaagttcttatacaaattataatntgctttagccctacctattgtgttcaattaggttgctagtattaactatatattatgatgacattaccaatcaatctagtacaagataatatacagcaattaagtgaccagaaggtttgtgtccctgaatttactgtcttaatatctcctggccaaaggctgtgacaacttaagtctccttttcctttatca

SEQ ID NO: 317317 - DNA, 979 bp, Homo Sapiens
tttttgcttgaaggagcgcaaaatattttattcaacaatttgcaatgtaacaattctcatttaggaaaaatagccgctcccgcctggaggaagcttcttgaatcaaaagtcgtggcagtcgaccccagaacagcgggcagagcgaccggaagaggtcccaggattcacacgagctgaccgagggacagagagggctgccccgtcacagggactggcctttctccaagtgacaaggacaaatggatccagcgggacacgcctgtggaacattttggaaaacatcctgggtggtctgggctaaatgatcaagtgaaacagaaagccaggaaggatctgtgctaattccacattctacaatttctacacttaaatttaaaacaccaaacagtttgtattcctccagcagaacctacagaaattatctactgatttttattagtatttaaatcttttcttcagtctctttagacttgacaagaatacgaagagtttcagaacagtcagagaagccttaaagctttgcatcagtgagaggaggcccgtctctgagttgaacagggttgagtccaccaggagctactcaaagtctcagtgtggcaaaaacttcggggcagaaatactaagttcccagagctgctgtcaaggaaactgtgttaagatactctccccaagtgctaccaacctctgaaccaacgtcccccaggggagaaagtgggtcatgtggattgtaccacgaaaagtgctcacggaaagtgcagccttttagagaagtgcatccagcttccttaacagtgagtctaaccgtgctcctacacacgaaatgaagcccaaatcaaacatcacacggtcagttttcaacctggatgaccaccctgagccatcatgtcagacagccggctctctggggctccttcccagtgactgggcacacggtgggcagtccccagcgctttgggtacacaaaatcacccatggtcct

SEQ ID NO: 317318 - DNA, 828 bp, Homo Sapiens
  misc_feature (265)..(453): n is a, c, g, or t
ggttcgctctgttggccgtggctttagtaagcacacacctgcctgctactctggttatcgtggcgacggcaggtctggattgccagacaggtttttctttttacctcgaggctttctctgaagggagtcggagcatttaaaaggcggcctcaaggtggattgagtcgggggaggattagcagtatttgcttaggttgtaaaaccgcgactttatctaataaatcgccattcaaggtgcaaatacaaacttggaacagaggtggannnnnnnnnnnnnnnnnnnnnnnnnnnnnnnnnnnnnnnnnnnnnnnnnnnnnnnnnnnnnnnnnnnnnnnnnnnnnnnnnnnnnnnnnnnnnnnnnnnnnnnnnnnnnnnnnnnnnnnnnnnnnnnnnnnnnnnnnnnnnnnnnnnnnnnnnnnnnnnnnnnnnnnnnnnnnnnnnnnnnnnnnnnnngtctcgatctcctgacctcgtgatctgcccgcctcagcctccctatatgttttaaaatataaatttattcttataaaaataaatttaaactagattgaggtagtaattacaacagtccagcacattatggataattaatatttatatttatttggctggtttttcttttatagtaaactttatgccttaatgaacatttatcagtatgactcacttcattcagtcattgaataactatttattgaggctgtatactgtgctaggtaggcatggaactacatgcatgatcaaaatgagacagattcctaacatcactgagattatacacagcaggggaaagaaaatattcaaacttcaaatagtttcttcatccaa

SEQ ID NO: 317319 - DNA, 1473 bp, Homo Sapiens
cacattaaacattcaaacatttattgatctttttatcaaactatgtgaaggaatggaagattaaaaagaaaggaaatcctttctcatttaagagtagaaatggagctctagtagtcaaaacgaccctcaagttaaaagagtccctaaattgttcagaatcagctactgagatttggtaacagcaaaccacatggtctttcctctggtatatgattaggacagaaaccttcttgttgggccaatgactgcgcaggttttgatgacatgaggaatacaataagttggccattgtatgaaagggaggcagcaggacctgagcttgtgcccttgtcactttctgtatgaggccaggagggtggagcttgatgacatctcctaacaatacccacatgcacatctctgtcatccttaaatcactgagtcttggacttcaggttctccttgtgccggtccacaagggaaccaacccactccaccgttttctgcttggcttcctcccagctgtagagtggcttatatgccagatctcgctgagccttcttgtaagagaaggtgaacacgctatttgacaatgtgactgtgtggcggttgaagggcggttgataggtgtaaattggcctgagtaggaagctcactatttccagcaggaagccaatccagtacatcagggataaaggaaggctccatctggaatcaaggcggaggccgaactctttgctcaggatgtaattaaggttatcatagctttggtgaggcgtgtcatctgagatgtaatagaattgtcctcggacacttggggccttcttggggtcccgcagagccctcaaggccagaatgtgggcccaggccacgttgccaacatagactgggttgactgtagagaactttccaacacttgacaggatcccattgttgttcagggcctcatttatactggcagaaaggaatgggcctccttccccatagatatatgtgggtcttaacgcacaagtgtacaaggtatcaccattttttagattccacccattagccgccagcacagccttctcagcaagctttttgctgtacgggtatggagtgggccatgtgttttccagaggctcttcttcgtggccgttctggatgatttccttgtaggagttgggcccggctacctctatgctactggtgtagatgaagactggcacactagcttggacacaggcctccaacaggagctgggtacctttcacattgacattcatgatagactctctgtgagtgactccgaagacatcaatgatacaggcggtgtggatgacgaccgacacgtcctggcaggctctcttcaggaatggctcatccagaatgtctccttccagcactgtcagcttgatcttgttctggagttctgtgtgagcagaggttaggtcattggaatgatttctgtatctagctgagaagttttctgataaaggtgatgttacataggta

SEQ ID NO: 317320 - DNA, 561 bp, Homo Sapiens
  misc_feature (22)..(22): n is a, c, g, or t
  misc_feature (39)..(39): n is a, c, g, or t
  misc_feature (95)..(95): n is a, c, g, or t
ctccctaaacaaatacccaacngccacatctctgtccancccttaaaaccactgaatccttggaacttccaggttcctcccttgtgccgggtccnacaaagggaacccaaccccactcccaccgttttcctgccttggccttccctccccagctgtaagaagtggctttatacgcccagatctcgctgaagccttccttataagagaaggtgaatacgcctatttgacaatgtgactatgtggcggttgaagggcggtcgataggtgtaaattggcctgagtaggaagctcactatttccagcaggaagccaatccaatacatcagggataaaggaaagctccatctggaatcaaggcggaggccgaactctttgctcagggtgtaattaaggttatcatagctttggtgaggcgtgtcatctgagatatagtagaactgtcctcggatgcttggggccttcttggggtcctgcaggccctcaaggccagaatgtggccccaggccacattgccaacatagactgggttaacattggataactttccaacacttgagagga

SEQ ID NO: 317321 - DNA, 457 bp, Homo Sapiens
gtgtatttgtgaaattatatatatatgagtgtgtataatatttcctttatccactggtggacacttaggttgattccatatcttggctatggcgaatagtgctgcaataaacatgagagttcaggtatctctttgatatactgagttcctttcttttgcatgtatatccaatggcgggattgctggatcatatggtaattctgtttttagtttttttgaggaatttccatactgttcttcatagtggctgtggtaatttacattcccaccaacagtgtacaaggtttccccttttcccacatccttgccagcattctgggatgagatgatatctcattgtagttttgatttacatttctctaattgcaatcagatttcatctgattggagatgttgagcattttttcatatatcgtgttggttatttttatgtctttggagaaatgtctattcagat

SEQ ID NO: 317322 - DNA, 392 bp, Homo Sapiens
ggaactacataatgaaagatgcttgaaatgcttttgttatttcaggcaaatcaaattaaatcagactatcaaactacaagagaaccttagtcttttttgtttttgtctaaacatgttagtttagtgatgtcttggtgaactgtgagtgaactgtattgatttttctaatctttagagaccttcacacagcatgagggctgttggcattttgaaaaaggttaataagtagaagcatacatgttttccttttgtttttgaaacttgtttgtaaacataaataaatatgcccttttattaaataaattcatggcaatgttttttttctctttgaccacaattggaatacatttcaagatggtaacagccccatgaagtaccgctttaattccttg

SEQ ID NO: 317323 - DNA, 1146 bp, Homo Sapiens
  misc_feature (50)..(50): n is a, c, g, or t
  misc_feature (288)..(288): n is a, c, g, or t
gggaccccccagttcattttccacaaatttttaagacccacagctgccgnctgcagtttctggtttgtaggtgacgtggagggaccttggtctctttctcgtggtataggtaacggccaccaactctttccagctctggggtgactgctgcgtagatggaagtccacgctccttcatcgggggtcttgaaaagcaaccagccgagaagcttcttcgccagacgggtggcccagaacacgtgctcgtagaggtccgtgttgaccactccagggggtccaccacgttggncgttcacgtggcttcccttcagccgcccagcagccgctggaggtggtaggtgaacaggacaagggccagcttgctctgggcgtaggctgcgtggggtgagtagcaggcactgctctgaaggtcatccatgttcagctcagcgacgtaatgggtggcagaggagacggtgaccaccctcgcactgtggccaggggacccagactctttcagcgtatccaagagaaggttggtcagcaggaagtgccctaggtagttcaggccgaaatgttcttcgaatccatctctggttttcctctgagggaccatcatcaccccagcattgttgatcaggacatggagaggaatcttcttcatcttgaacttctgcacaaactgccggatggaagtcatggaagccaagtcacagtataaaaattccaaattttaggaggaaatgatggtgcacgcctgtagtcccagctcctcgagaggctgaggtgggaggatcgcttgagttccagaggcaaagccagcccgggcaacacagcaagactcacgtctctttgtcgttcaaggtttcttcttttattttgcttacaacttgtttggctttgctgtcattatttccagctatgataacatgcatgccaagtctcgccagatgcttcgctgtagaatagccaatgccatctgtccctcccgtcactatagcgacacggtcaggtcgtggggggaaaactggctccaggaagcccccgcggcagcgccgcagcagctgcgccaggatcaccgcggcgcctaccgcgtagacccgcagggccgcccgcgccgcagacaatggcgacatggctgccccggccgcgccgccgccgcttccgc

SEQ ID NO: 317324 - DNA, 450 bp, Homo Sapiens
  misc_feature (347)..(371): n is a, c, g, or t
ctgtgtggacagcccaggttgatcccaggccttggtgattcaatgtcttttctatttacttttggttctttttaattggtttaaagtgtgtagtatcttcggtctatgaacctgcacagactatttagtcataaactctacaaatagcttaaaaggaaaagggggagaaacaagttgtattatatttttattgttggcttaaaaaaattacttctttaacctccttaatttgtcagtttgtgggaggtgaatctcaatggcatcaaaagttatagtcttcttacacttgttaaaaataaagtgtttaaacaagtttgtttccattcacaaacttactcccaactacnnnnnnnnnnnnnnnnnnnnnnnnnccagaatccatcctccttcctcattgtctcctaatggagagcagcaatcctttccatccagaccattgtcacacaaccg

SEQ ID NO: 317325 - DNA, 472 bp, Homo Sapiens
acagctcatttatttctcagatagtcctatgaaacaaacattgccaatgccaatttcacgggtgagaaaatggaagcttggaggagtgaaggaagttgcccaaggccctatagctagtggatggccgggctgggactccatcgccaggcctgcagtcctttcacttctgccacgctccctggggagtgaaggcagagggaggcgttttcatgtccaagggccctgtggaggactcaccataggagggtctcaggggccatctactatcatcttttgaagcctgccaagtgccaggcatgcaggtgtggggacagggttatgacccaatatggacagagtccatggagtagtagaagccatagaatcagcaagtatatgtgggtcatggggcggtaggtcccatgaaaacattaagtagggtaagtatgatggtgctatgtttacagagagtcaaggaaattggaactcgtgc

SEQ ID NO: 317326 - DNA, 629 bp, Homo Sapiens
accacactgcagctgtatgaccctgtgagtaaaatgagtatcaatttaagttgccacagaatcattcaacttaattattctttagaatatttacacagaactactgtacctgcaaggtcatcatgcacttgtcattcccagatgatagactacaaactaaggaaaaaacatcattggataacacattttcatacagaaaaatgctcaacattgaaagttactaaagcattccaattttaaaaccactctttgaagtggcagtatcttagctatctaaggctcaattcagcagagacgcataagagtacagtggtcaagagcagactctggtgccagactgcctgggcgcaaggcctagctgtgccacttacaagccacgtacctgcagaaatattactcaaaatcagattccttgtctgtgaaccgagggagcggaacttaagtgagctacacaatccttccagctttaccaattcatatatagggagataatgtaaatgattttgaaccactgtttatataaatatttaaggctgctttcatgacatgtgaccataaaacctgcagccgagctcaatgtccaaaagtaatgaagtggttaattaaatgtcacactctcgagatgtgca

SEQ ID NO: 317327 - DNA, 1706 bp, Homo Sapiens
  misc_feature (16)..(16): n is a, c, g, or t
  misc_feature (75)..(76): n is a, c, g, or t
  misc_feature (146)..(146): n is a, c, g, or t
ttagattttccaactnacacagtttattagtaaagtatctcaacaattctcagagcagtaaaacccagggcatcnncaacattgcatgcgtgactagaccagcaagaagtcctcaacttgcaccagtccacatggcagcaggggcnagtggtgagtcctccggagcccagtgcctgggcctgactggccccattgatgagtgagctggatgacagggccgctggagataggacaatcggctcacagggtcctttcatgtccgatccccttagaattccgagggagccacaggaactggggcggtcgtgcaagcgtcggcatgaacaggggtctgtttggagtctgaatgctctgctgcctctgggtggcctcagccacactgggaacgactgtctataaccctgggaactcgaagtgttccatgctcactcgggaagcactgataaccttccccataggggaaacgactcacaaacacaggactccgtcagtagtttctgcagagaaacttaaaatcatgaaaagggtcatcaatcaacagatctcagaagtcactgtgcagggactactgagggccgcgagaggaagtgcaaacctcagctgaaaagcaactcagggtggctgagtgagccctcacttcccggaccacccgcacgtgcagccaacacttcccaactacttgggccaagtcggcttttcgcctccaagtggaggctgctgggtctcttcggtctcctcctcgcccaagtcctgtttctccctctgggcgtcgatccacctttgcggtgggatcattttcttcggcccatgggggggggggccaatgagagcctcaatgtcctcatagtttatcacttccttttccagaagggcgtttgccagcgcctgcaacttgtccaggttgtcctgcagcaccttctcggtgtgtctgtaggccttggccaccagcagtcttgcttcatggtccatcatctgctgcaggccttggctgaaggggcgccgcccgatgcccatgaggccctcctgcgcctcagggaaggagatgggcccgatgccaggtgccatcccaaactgcttcaccatggagtaggcgatgcgggtgaccttcctcaggtcgtcctgtgccccagaagtgacctcgttgaaggacagtgcttccgaggcccgtcctcccagggccatgcacatccgctcaaacagctgctccttggtgaagaggtgctggtctctggggagcatctgagcaaagcccagggcggcgtttgtccgaggggttatggagaccttcatcacggcctccgtgtgctccagcatccagcccaccaaggcgtggcccgactcatgaaacgcaaccactttctgttcttccttggacaggatcttgctctttttggcagtccctgcgaggacgcgctccacggcgtactcgaagttgagagtgtgcacggaagtgtgtccctcccgcgccgcgtgcagcgcagcctcattgcagatgttggcgatgtcagccccactgaatcctggtgtcagctctgccagacgctgggagtaaaaggtgctggactgggtcagcttcaggctcttcaggtgctgctcaaaaatctcccgcctctcctgcagcgtggggagatcaatgaagacgtgccggtccagtcggcctggcctcatcagagcaccgcctcgtgccgaattcgccacccaggcgt

SEQ ID NO: 317328 - DNA, 1053 bp, Homo Sapiens
  misc_feature (122)..(122): n is a, c, g, or t
  misc_feature (133)..(133): n is a, c, g, or t
ccaagggggttttccggaggggccccggtcccttccccagggggccccatggcacattccgtttacaaaacaagtttgtttccttggtggaagaggttgctggttctcctggggaggcattntgagcaaaagnccccagggcgggcgtttgttccgaggggtttatgggagacctttcattcagggccttcggtgtgctccagccatcccagccccaccaagggcgtgggcccgactcatgaaacgcaaccactttctgttcttccttggacaggatcttgctctttttggcagtccctgcgaggacgcgctccacggcgtactcgaagttgagagtgtgcacggaagtgtgtccctcccgcgccgcgtgcagcgcagcctcattgcagatgttggcgatgtcagccccactgaatcctggtgtcagctctgccagacgctgggagtaaaaggtgctggactgggtcagcttcaggctcttcaggtgctgctcaaaaatctcccgcctctcctgcagcgtggggagatcaatgaagacgtgccggtccagtcggcctggcctcatcagagcaccgtccaaaatgtcagctcggttcgtggacgccaggacgatgacatggtctgtggtacccattccatccatttctaccagaagctggttgagcgtctgctcctcctccgtgttggagaagccggacatggtggtggagcgcttcttgcccaccgcgtcgatctcatcgatgtagacgatgcagggggcccgggctcgggcttccttaaagaggctccgcacacgggcagcgccgaggcctccaatgacctccacgaactctgggccggccatcgccaggaagggcacctgagcctccgtggccaccgccttggccagcagcgtcttcccacagccgggggggccgagcagcagtgcgccctttgggaccttggcgccaagctggaggaagcgttctgggctcttcagataatccacaaactcgcggacttccagtttggcttcgtgcattcctgcctcgtgccgaattcgccacccaggcc

SEQ ID NO: 317329 - DNA, 1405 bp, Homo Sapiens
  misc_feature (467)..(467): n is a, c, g, or t
gcccatcacggtgtcccgaagaagggttttcctataaaggtctaacctgggttgaggagcccaatataaaggaaaacccttgcgctaaagagccgccttccaccccagggctgtgaattcaaaagagagggtgggagggcaggcaatagtcccaagtccagggcaaggctttacaaaacacaaaacatcggttttttccaaaggacagctggagcattcctcagtggaagggcccatctggccttgccttccttccaaggaaggtttccaggcctcgaggggtccgtaagtttggtcccgggaatagtcccaccctcagttccgacttggaagaacctctttctccttccagccgcttaggttttggcaaaacttgtagacgaagtcgccggccatccaccgttccaaggatctcccgtttgtagtagtaccctgggtgaagagaaggatggtcagaggtgctttgncaggaaatgggccccaggctgccagcccgcccacctggccgcggttacccccaggtaacccatgcccactggtctctgcctgactaagctgagcctgactcacacttcctaaactcctctgttcttcacactggcaagcagaagctctttccctacactggcctgtaaccgtgcccaggacacagggctctttgcctttgcttctttgtatcctatggctgtgactggggtctgatcattaaattacatgacttttaaggccagggagctgggcacggtggctcacacagccccattcctggagcacactggggattcacacctcagcccttggagccatcccaagagtaggggcaggaggtagcattcacaacacccttgtcctggtatctgacacctccctctgcctgtcacagccccacaacccccagcacctcagtcactaagtctcagcctctagccctggaatttgcctagagaccctcctccctgcctattcccccatttgtctaacaggcccttagatggatctgtctcccactccgtgccccatcccaccccgctgagacccacctgtaccctccaatgacatctgggggttgctcagggtcagtaccaagtcatcggccccaaaggtggcagcagggggaacagaggccagggtggagtcctccgagctgtacatcgcactgaagtagttgctaaaaatgttgctaatctcacagtttgcagccatgaggctacctgtgggtagggggagagaggatgaggttggtgaggggacgagggtcctctccttacactcccagctactctgctttgcccaaccctgggcaagagtagcccccaggggcaggaagatcagcaactctgcggacaccctctcttcaagaagggctccaagatctcagaccagggcaggaccacaggagcaccag

SEQ ID NO: 317330 - DNA, 1946 bp, Homo Sapiens
  misc_feature (111)..(111): n is a, c, g, or t
  misc_feature (1111)..(1111): n is a, c, g, or t
  misc_feature (1215)..(1215): n is a, c, g, or t
ttttttagaaaaagcccagaaggcactttattggaggtctctgcctccattcacaggagaaaggagctgggagccccatcctaagggtcccagcatcagcccactggaggnctggaacagtccagcactctgtgggagaggagtggggaggggaatgttttagaaaaaatagatctctatgtacatctgacatatttatatagcacataaattagggagtgctctgacccctgcccgtggagcccaagcactgagcagggaggtgaacgccagtccagaaagaaggtgctggagcccctgctctgtcctctccatcacggtgctcccctagggcctccccaggcctccttggctcagtccagggtgtctgcaggaggaaggtgttgtctgcatttagtgtctgagactgggtttgaggaggcaccagataaaaggagatacacttgcagctataaagtcagcttcaaaccccagggcttgtaattccaagaggagggtggggaggcgaggccatagtctccgagtcccaggacgatggctgacaatacaccaaaacatcagcttctctccacagcacagctgggagcattccccagtggaggggccatctggcctgcctgtcctcccaggaaggtttgcaggcctcgagtggtccgtgagtttggtcccgggtatagttccaaccctcagttccgactctggagaacctcttcctccttccagccgcttgagtttttgccaaacttgtagacgagtcgccggccatccacccgttccaggatctcccgtttgtagtagtacctcatggcccggctcagcttctcgtaggtcatgttgctgttctttttcttttggccccatagttgggccacagcctcggagcgcaggaacttgaagacgccttcatgccgattctcccacttcatgaggccctcgttgagctccgggtggatgaggatgtcccggatgaactcccacaggtgggtgcctctgggcgcgtgcttgctcttcttgccctcgagacagtcccagtactctttgctcagctttcggggccggcctcgtttccgcttcccgtgcttgggatcccccttcttgcagtcacgaaaanccatccgctggggaagagcttgccatccagtgggatccagggtcccacgtcactttcccaccgggagtctgaggagtgggagctccgagaagcacccagtcccntgcggtggagacgtcagagctggccgggggagggggctcctgcgccacaaagctgccggggtggtaggggctggcttgctgaccgtcgtccagcagcttcctgggcaaaggggctgccctggtcaaagggccctgggtctagggcctcctggaaggccatgccatccttctccagcagctcaatgatccaactgagctcatcagaagagctggaagtgaggtctcgcagctgggcatggagttggtcccccagaggcccaaagaccagacgcagctcctcaagggcacaattgcagagggtggcgccatccatgtcacatcgtgagaagtcaatggcgcttgcgtcgtacttgttcttctccacttggtagctgatccagtccagaacctgcgtcttcgaccagaactggggctgttcccccaaccagctggccttctctgtaccctccaatgacatctgggggttgctcagggtcagtaccaagtcatcggccccaaaggtggcagcagggggaacagaggccagggtggagtcctccgagctgtacatcgcactgaagtagttgctaaaaatgttgctaatctcacaggttgcagccatgaggctaccggagtggcggagtccggctgtggcaggcaggccggcaggcgggagagaaatccagttccgccaggtagcgctgaggtatctggccgctgcgctcccatacccggctctaaatagagcctgg

SEQ ID NO: 317331 - DNA, 353 bp, Homo Sapiens
  misc_feature (247)..(256): n is a, c, g, or t
gcacgaggcccattttatccactccaggaagtcatcaactccagtgtcttcaggggccatgcaggtaatgaaggagtacagtggcctggggaggggatgtgcccagtggaaggaccgtgccactcctgatgggccaccctcctggctctgcctgctggggaccatctgggaacatagacccaaagagtccagatcatccaggttttcagggcaaggcggaaaactagctttatgttaaactcctgannnnnnnnnnaacactgtccagatattttaatggtcagaacatacctatagagcttccagtttgttctcctggttgtaatgtgtctaaaatacaatacgtttgtaat

SEQ ID NO: 317332 - DNA, 1762 bp, Homo Sapiens
  misc_feature (1740)..(1740): n is a, c, g, or t
ttcatggcatcgtgttgtttactcggtacaaccagcctgttgtgaaaagggcccgccccctttccagaggcagaaacttgctccaagaggtcggatgctctgccagaggctgcacagcaccagggtgtggaatgtccaggccctgcccatctcagtgcccctccccgctccccaccggccagcacctgctgtcctggactcctggaccttcggtgtcatccttgtccccaactctaaacacagagctactcactcccagccctcccctgccacatcctcctgcttggaacagatgagcagccctgggagggctatggtttcgtggggtcgacgaccttgcccagaaagaggacactctgggtgctggtggaaaagatcaccacaaggaagggccggttgaatcgcaggatgtggcgattggtctgggcagagaagaatttgatcgcgaagctggtggctgctgcagcctcggtgccagcctcatccacgtccaaggtggccttgtggaaacttttggatgcctccagtttttgctgtttggtgatgccggataagtcagcccacttggagaacagatccgtgaagcccagcctgggcaaaatctgatctaatacataggagccagaaatggagaacttgggaagatgcaactctagcttcttgtaaaaattcctcttccgcaacaagttgttccacctcattagcatctctggagtcagaacctcttcaatctccctcattttgccttggttagggagaatgaaaaacacggttgcgtctcctttgtaatccatccgtagcaccgagcagggcaagtatctgtcatgaagataccagtgatgctcctggtcctgcagcatcatgggcacccggactgttgtgttctcatcaacatagaagtctttgggagtggtccttgaggaaatgaatggtttctcccacagggctttgaagtaaatgtaattcaccagcaccatcaagacgtccttcttgagctcactgaccaaatccacaatcttccctcgagtttccttcttgacgtggtcgttgataagctggattgtgcccacagtgtcgtagaagttggtgtggaagagtttagcctcatagacggccatggtgtcattcaggaattttgcaaggaacttcaggttgtggctcaggaacagagcactgcccacgcgtgtttccagcccatggccggggaggttgagagtgtgcaggaggtgctggaagcccctatggacatcggactcagacagctcggtgaggttgaagcccaggccctcaaggatctggctgcggctgtgtgagcaggcccccagggaaagcatggcgtaggccgccgagatgctcagcggggagaaaaagatgttcttccccggggtctccgaagcgatcaggtagtagaagcggaaggcaaagtcagcattggcaggggctatcttgaggctgggggagccctcacctgtctccagaatctgctggtgggagctgttactgcaactctcaccatcatgctcaacgtgcagctggccatgagaaagggccagtagtccaaccagcaggaggagcaggtagtcgataagatgcatcctctgcactctcaggcctttagcaagagtgacaaagtgtcccagcttgcctgggacttttctggttttagccctgaaaatatatcccagaagaattatcagtcttgggcaaagtggaacagttggtcaccctccctctagagtntctcgtctccattgtctcaagg

SEQ ID NO: 317333 - DNA, 481 bp, Homo Sapiens
actggaagaggaatttttacaagaagctagagttgcatcttcccaagttctccatttctggctcctatgtattagatcagattttgcccaggctgggtttcacggatctgttctccaagtgggctgacttatccggcatcaccaaacagcaaaaactggaggcatccaaaagtttccacaaggccaccttggacgtggatgaggctggcaccgaggctgcagcagccaccagcttcgcgattcaaattcttctctgcccagaccaatcgccacatcctgcgattcaaccggcccttccttgtggtgatcttttccaccagcacccagagtgtcctctttctggggcaaggtcgtcgaccccacggaaaccataggccctcccagggttggcttcatctgtttccaaggcagggagggatttgggcagggggtagggcttgggagttgagttaggttttgtgttttaggagttgggggacaa

SEQ ID NO: 317334 - DNA, 1246 bp, Homo Sapiens
  misc_feature (25)..(25): n is a, c, g, or t
  misc_feature (65)..(65): n is a, c, g, or t
  misc_feature (113)..(113): n is a, c, g, or t
  misc_feature (395)..(395): n is a, c, g, or t
aacccttaaatatgtcggggaacangtgggtggcccacatcaagaggaattctggttctggtaanatggaagctttctcttttcaacaggtcccaaacacaggtggcagctcnaacttcctttcagggggctcagacatggacggggtgagacagtacatgtggtagccacgatcgcagtcatcacagaagagcaactggtcgtcattctcggaggtgccgcagatattgcaacatttgcactcgatgcactgccagcggtatgtcttcactgccgccatcatcacgggggtaaattggagggcaagattggatgccctgagcggccaccagtcagaacaggacaccagctcctcgggttgtcccgtcttcttgttaatctttgagtcccccagngcagaagtcacagtagttgttgggcaaggccaatccatcaggaccctttttggatttctgctcctcagacctctgggaaacaggagtgggtggttgagagtcttccttgtcctcgccctcctcctcagccaagtgggagtgggcatagtggtaactgaggcctggtcggttcttgtaacgttttccacaaatgtcacaggcatagggcttatcccggtcctccaggatggaagcatccagcttcttacgggcactgcccacacccttacccttggatttcccctttccccgacgcttgggagtatcttcttcatagtcttcatcatcgaggtcatccaggaagtcatctggttctaggatccgctttcgcgctcgactgttggtcacaggaaactcgcccaggctgtcatcatcaactcggggatccggggcacctcgcttctccagggggtcagtgcgcaacagagcctctaaactactgccatcctgagagatcagcccctccttcttcagggtctggtctgtgtctggcttaatagatgggaaggaaagtcgtggatcctcagggggatgggctcgccgctttttccgccagcgccgggcagggtaggagtacagctgtccggaggccaatcctggaccccggtgtcgcttttccatccagatgtaacaattgctctgggctactccggtctgtgagtccaagaaaggcaggcgcacgctgcgctcagcacagaggcgagcattgtaattgtggcactgctccatggcatctttgtagtactgctccccaaggagcttcactacattctccaccacagccgccatcttccctgttcctctgcctcccc

SEQ ID NO: 317335 - DNA, 408 bp, Homo Sapiens
attccatggtgaggtttaataaattttaacattttccaaatttggttgacttgaaatacatatccactcacacatccatgtccatctgaagcttgtatctccctgaacccaccccaaaataattactatatctaaagcatgttaccttcatttgtatttacactatgaccttatatttaccatttatagagagtacagcatattgttttgcagacttttaaatttgacgtaaagaatatcacataagttttgctttggcttttgtttgtacacaattttagatttattcatgttgtatcaaatggctctaatttaatcaactatcttgttatactgtgcaaatatgcaacttatttatcctttctcctatggtcatttagattgttgccaatctttcaactgtaaaaa

SEQ ID NO: 317336 - DNA, 1365 bp, Homo Sapiens
ttttcatttgaaaaattgtttaattcactgccaacatttattctttttagtaggacacttcaccccctttgttgaaaaaatctggtaccctggtccagcattcctatgtgtccacagctggctagaacagtccccctacctggggccatgcctcctgcaggccacagtgctgctggggcccacagtgggcgtccatgtttgagaccctgagcaatgcccaccagacagaggctgacccagttggaggctatctccaactcctgaatgccccaaaacctccaagttcttcagatataagaacttgtctctctgccgtcccaactgggggagacaagggccttggaagagggaatgtcagtccacctttattgggcgaaaccctgcagtgtaactgttttaaataactcgtgccctgccccacccagtgcccggggggctcagacgatcatctccagctgccgggcatactcgatgacctgtttggccagttctgtggagggaatggtggtgtcttccggcttctgctgctggctggcaaaactgtagtagttgttggggcccaggacccaccctcgcttcttggcgtagtctgtcatctttttgggtgtgttgaagaagaggatccgggtggcctcagtgaaaaggattttctcgtaggccttctcgatgcacccagcgatctcatccctgatagtgtcgagcaggatgtcaatgaagaaggtgtagctctcggcggggatgttacccttggccaggaacactttgttgtagctgccctccatcaggtattgctccagggacactgggtgcttgatgtagacattggtctgtatgtccttggcaggcagccgctccaactccgtgtggaactcagccacccggttctgggacagcaggaagaggaggttgaggcccaagagctggtgcatataggctgactcggggagctgctccttgtaatcaaagtagtagcatttgagctgggccatgtagcgctcgaaggaggggatgtccttgcgtaggatgctccattgggccccgatctccagtatgtcacgggccagaattagctgctgtttggtcagcttggtccctgtggttggcaagaagttgagctccagaagaactagcttgagtcgacccagctcttccccgcacttgctaagattggggcttttacggttccactcgcccttgagttgctcgtacatgccggtcgcggcctgcagaacagcgcccgaggttgccgcgggcccggagctcgagaagcctgccgccccgttcaccgccgcggccgccatcttgcgtgatgcggcaagcagaccgcctgattctaggcagcgccgcctacaaacgcttgcccgg

SEQ ID NO: 317337 - DNA, 607 bp, Homo Sapiens
  misc_feature (89)..(89): n is a, c, g, or t
tctgtaaggaagtgcttctataaattcttaggtttagagatgataccatctgggtacctttgcttgaaccgtgcaaccacatctgggtntagtaggtggatcccatccagttggtttccaagggtgatccagttgggttgcacattgtgtggtcgtccaaataactcaatcttgcgagtgccaggagatagtctttcaatcatgccatagatttcatctggtttatgactggtggaacgaacctcagctacgatcacatcacaatccagaccctggttgaaagccttggggatttcctttgacaccaaccaagcagtgttccttcccatggttcaaccagtgacctgtacggcctgtccgaatgatgcgttgcagttgatttgtcttcacccaaataatttcatctacccgttcatacccccagaggtttagacattctctccccaactccatggccctgcctgtgacccagaggaagagaaagccatcatcctgtagtacgggtatgttgagcctgcgcatctcatcatctgtcagggtcccatagggcagttccatgtgaatatcccagggtgggtcagccatcacaactgcaaacttgcccaag

SEQ ID NO: 317338 - DNA, 782 bp, Homo Sapiens
  misc_feature (468)..(468): n is a, c, g, or t
  misc_feature (757)..(757): n is a, c, g, or t
acaatacaaatgtttatttaaataaagaagaaagctattgtacaaatatcactcttcaggtttagcttacagagccatggctatggattcttagctctgtaaggaagtgcttctataaattcttaggtttagagatgataccatctgggtacctttgcttgaaccgtgcaaccacatctgggtctagtaggtggatcccatccagttggtttccaagggtgatccagttgggttgcacattgtgtggtcgtccaaataactcaatcttgcgagtgcccaggagatagtctttcaatcatgcccatagatttcatctggtttatgactggtgggaaccgaacctaggaaataaaaactaagctggtttttaagttacacaagattgcaattctaggccctttcctattatgtttatgatctaaatgagaaaaatctgggatgagaatacaccccaacactgaataaccnggtgatccccaacaaaaatgtggaagctttggaggcctgagaagcacatacctcagctacgatcacatcacaatccagaccctggttgaagccttggggatttcctttgacaccaacctgctcaccacagataacagattaccttatgaaaccacacctttgaactttttctcagtaagaaatcaaatgattcttctttgtgctccacctattgaattgggccccactgctgctcaccaagcagtgttccttcccatggttcaaccagtgacctgtacggcctgtccgnatgatcgttgcagttgatttgtctc

SEQ ID NO: 317339 - DNA, 304 bp, Homo Sapiens
gcacgaggagaagagggttccccctgttctcttcagagcacctcatgccagtaaaggctcagggcttccccattacctgtatgcacttggggaatctagaagtttgccttgcttgggagcgtttttattacattatattttgggcttgtaagagtttttttagttaagattttcatgtcgcttcccatctaagtacttcttaagcaatactttctttatacactgtgaacacgctggcttttaaaatgcactttttttcagaacattataaaaactcaccagttggctgggcatggtggctcat

SEQ ID NO: 317340 - DNA, 835 bp, Homo Sapiens
  misc_feature (13)..(13): n is a, c, g, or t
  misc_feature (68)..(68): n is a, c, g, or t
  misc_feature (96)..(96): n is a, c, g, or t
taccagaaagaanaaaatatatctacatcttcaaatgatgaattcatatcaccaagtttaggaacatnttttttatttgaccatctggaattcctntcaaacactggggtaaacacttcgaagaaattatcctttgcttcacttttagaaggaactgagttatcaaaagtaggatctacactgttaaatgctcgtcttttcattggatcagataccatttcataagctttagttatgcaagtgaagtagtcattatctccttcttttattggttcaccagctgctttccgtttgtctgggtgatgttttaaaaccattgctttatgagctgctttgatctgtctctgtgtagccttgtatctcacatggccaagtccaagaactgcataatgatcttggttcttccagtctttgggatcaagtgttttcagcatgggaaactcttccaactgcaattcttcatcttctgattcctcggataactctttcttatcctccagttcctgaaaagaggcagaagcatttctgtttctcctcttaacaaaagcttcaaaccatcttcccacaggttcaacttgacagagtgtagaggcagaggtcagagcgtgggtgatggcggtgccccggccgtccgcggcgcttggcagaagcagcatgatggcgccgggtctagcccggtgggcgcagcggctcacgtcccgggcggagggcgcttagggtcccctccagctctacctctcactccgagcctcgcgccttggctctaagacgcccaggaaccggcgcatggagacgaccagtaagcacttccgggatggatctttcgtggtgtccc

SEQ ID NO: 317341 - DNA, 442 bp, Homo Sapiens
ccagaaccaagatcattatgcagttcttggacttggcccatgtgagatacaaggctacacagagacagatcaaagcagctcgtaagtacttagttattttgaaataatcaaatatcttgtataggaacaggctggctatgctttttaaaagatatacagtatcatagtctgcagccataactacatttaacagcatgtgttatattgtcataacaagcaaaaaaccacggtctcccctgccttcagaatcagaagaaagcaatccattttacatatagactttcccattagggataagaaattaggatgggtgtgtgtgtgtggatacaaaatactcctccaatggcaagcttttaaaaaataatacttcacctctctttagaagtatagcagctgcacttagtggatactgcctttttattgtttttctcatgccgaatct

SEQ ID NO: 317342 - DNA, 473 bp, Homo Sapiens
aaaagaataaaatttattgtactctcctcgccccagggtgcccctgggaaagcctgaggctacttgtacgcgttggccttgtgcttcggcaagaaggcgacgctggggggcactggcccaaggagcatctcgctgatgcggatccagtcggctgccttctggctggccatcagcgtctccaggtagtcgcggcccaggtagtagggcggccgctcgttgatcctctgtgggagccgctccagcagccccacgggcacgtaccggcacaggaaggacagccactcgagcagaaagcgccgggtcttctccacgccctggtgttccgagccccagtgctccaggccgtagttggtgaagtcccgcagatagtccaggcgctcggacgacgagatgtcccagtgccgctgctccttgatctccgtgaagagccacggcttgagcagggcgccacgggcaatcatgatcccggtgac

SEQ ID NO: 317343 - DNA, 1294 bp, Homo Sapiens
  misc_feature (474)..(474): n is a, c, g, or t
aaacaccggtgtgaccgcgcaaggccgccaacgcgtgatccgatcgccgcaccgcccgcccgccgccgtcctacggccgcacgccatcgtcccgggcacggccgggaccaaccgcgcaccccctccatataggcggacgaagttgggccgcgcgctcaacggggggggcgggctcaggtggcgcgggcaccggctaccccgcgtagcagcacactggggactaacgtgcggactcgagctgtcggccgccccccaacatccgcgggggggctgcgggggcgcctttcctcgtcacgcgggaggtcgccggcggtctgcgcgagaagtaggttaggccggcgtgtttctggggcgacttccggcgaagcccccccgcctggttagcaaaaaaaccggggttccggaaccccgctagaacccaagcgccgtttcattccgtcttgccgcgccccgacgaaagaggcctggaggtgntcatgtttttctcttggtggggtggagagaaggataagccatttattaaccccacgcccctagcaccagctgtcaccttggacttgttggagatgcaggggctagaaaggaaatgacagagtgtacaggccccttcgaccccgtgtcccataggtggtggcccccagacacaccctctctgctggcagtgcagaacatgcatcccaataccctagaggagaaacaccaccccagggagagccctttctgctccaacctcctgggcaggtcccaggttggggcagcagccatctgcaggtgtttgtcaggcctggccacacatgcggacagaggatacgactggggtaccctagggtgtggggagggtcggcctggggtcagggggcatgaaggctgtgttccagactcctcctgcccccaatcctctgtgcccctgctggagctctcctagcttctctgatctgtgctcctgtctttggggagctgcccggtctccaggaagagccagaggttgttgcatttctccgactccactctcgtcaccccgtagctgaccacagagcctgcaaccacggccactaggaggctccactgcaaagggtatggaaacttcctctgaatgaacatctgcaagccaaaggccatgccggtgcctgtgacgaaggtgaaaacgcccttcatgaaggcgtgtgactggcatgcggcatactccccgagtcccgggtgcttggcagccacggcgtcgtccacccgggacagacccaagttcaccatggttggcagggctcggggagcgggcctgcgcaggcgcaggcggaag

SEQ ID NO: 317344 - DNA, 342 bp, Homo Sapiens
  misc_feature (141)..(149): n is a, c, g, or t
gtgttgagctcccaaaaggcttaaaacttgctttgtgaatgaatgatcttaaatgactagtgaagatgatcatggggcatttgccacattaaagaactaaaatgaaatgaaaaagccatgactcctcacttaatgcgattnnnnnnnnntctgatgtggtaaattaacgccacatatcatagtgtaattgggtaatcaaagttcgggggaattcaggttctcatgggcaccctaatagtgtgtagggcagggggtcctgagaatgatggccgagtcgtagaagatgtgcatactgtgggctagtgatagggtaggagcccaaatcgtcacacatagtcggcc

SEQ ID NO: 317345 - DNA, 626 bp, Homo Sapiens
  misc_feature (413)..(431): n is a, c, g, or t
ttgcttagatgagcagttctttcatcacaaacgtctttgctttataaagttgtcttttttaattagccagaaagacccaattttatccatggcaagaagtgagcagaattggtgactgaatattgacaaatgaccatcaacaaagacatcatcaacaacaaaacatcccataatttaaaaatttttaaataaatataaaagttattcctaaagaagccatctgcataacaatataggttgtaacctgcactcaacagctaaagtaccattggaagaaaagaaaaaactgaaacaagaaggccataaacagtttcggcaacaagcatgatacattgcaacctttttaaaattaaatgtacaccactaggaataaaaagctacttctcaagtgtgtcctgggagataaggtgatnnnnnnnnnnnnnnnnnnnaggagggaaaacatgcatagaaagtcctgtctgagttttggggtaaaacagccttgacaagtgtgaagtagctgactcaggaaagcaaccagatgggaagctgtgacgtaatgtgatgaactccaggttcaagagtcacacatgttgtaagagtgcatcccgggccggccgaggcgagccaagctcactgtggtg

SEQ ID NO: 317346 - DNA, 542 bp, Homo Sapiens
cggcacgagattttcttttattctattagtgcttgaagttactgagttctgaagttgttgagcttctctctgctttgctattgatttgagcaagttcggagcacctggccctcaaaattattttcataatcatgctaagacatgacactcaattctctcacaagggtacaatggaggtttccagaggtcaggtgcctgaggtgatgtcatcaccgtaatggcttaatggcatgtgtgcttgtatatgattgtattcttaaaatttcttttttcctccactggtttctcctgagaaaatgtttttaaaatttctgagttttaattgcaaatacagtaaatatcagttgatatatcctacataaatgaaagctaagtggcctcagttttaaggtacagaggggttctaagaccaaaaggcttaagaattactatagtattggattgaatttgcaggtgttttcaggaggctaaggtgggaggatggcttgattccaggagtttgagcttagcctagacaacataatgagactcaatatcatata

SEQ ID NO: 317347 - DNA, 1001 bp, Homo Sapiens
aacaagttgaacatttccacatgattacacatgtttatatcacagtattacacattcccacagaatataccttgcagagtgtacacctgtgtcccacactgtaatatcactgttcggccacaatatatgtcaaacttaagcactgcacagttcacaacttttgggaaagtgttatagggaactgtatcacaggtaaccgtgtcacacataaagtgtagctcctctgaactggtgtgatcgtgtctctgctgaatggtggtggggatagctggctccacccacacacacttgttttaattaggctgggtaatgtgcacggagagcaaagttcacagactaaggagcagtcagtcggatatttgctttgctgccaaagatttaagccaagatttaattatctttgcacacgtataaagattttgttcccttccttatagcaatatattcatgacagtccatggttacctacatcagatactgttcccttccttttagcaatataatcatgatgtgccatggtactaagtgttcttgggttacaggtaggcgcggtttttaattaatctcttaaagcactgcaattactggcaagacagctggtcttaagcagttttgtgactgcccttttcatccactacatgactattccggcctttctggagcacttttgaaaatctacttgactctgtccacaagactgaggaaagtgaaagcaaagtcccgggaaagcgggagatgattcagcccggggttctgcccctcgcccctccagcagcctctacagttagggagctcttgaactgttctcagcaggggcccccaaaaagtcaacccttccccaggtctgcgttcttcgggagaacaccttctgctggaaagctgctagcttacctgagctcagccgtgctccacctagcttaggcaagttaaataaggccaggagagagcctttaatgcgttttaaaagcgacagaccctctctcctgagtagctcgggcctg

SEQ ID NO: 317348 - DNA, 578 bp, Homo Sapiens
tagcaatataaagaaagatttattttcaaaagtagcaaaacttgtttgaaaaaaatatatatctttaagtgaattactttataaatgtgactgtcaaagtcagctatcctatgatctacattttacaacatattgtacaaaagatacattgataggctcttatctatttatatatttataattacatattgcacttggaccagcaaggcttgcagagtcattcacggtagaagttaataaagttaaatagatgggaatctttgtaagtacaattgatctcctctggtttggaaacgaatctcctcgtcgttgtaaagtgttctcgcggggtgggacagagagaggagcattgcgagggggaagcagagacagagagcactgagggcaggggtcgccttcccggggcccgctccccccgggagcgcgcctttcccagactcgcacctccaaggtcaggacgcggtggttccacataagcggctcgcggtcaccacttctttcaggtcactctcgggtttcccggccaccataaagggccacgtcaggttgaccgggtgaatgtacccgttctcgtattt

SEQ ID NO: 317349 - DNA, 785 bp, Homo Sapiens
  misc_feature (172)..(172): n is a, c, g, or t
  misc_feature (348)..(427): n is a, c, g, or t
tgagccaccacatctggccccaagtccattacttttagagggattagcctaacagaaagtttcagttgtctgctattgttccagctactttgaactaacttgaggggggtgtgcaagaagctgtgtgatgtgatggggcagtgtttaactggcctctgcgagggccttaagnacccctttagaattaacaattgtagacagtatctcctaaatgccaggcatatgtgaagcatggtgcctggtagaaaggagaaaacagctcccccatacggcggatggggcccggggagtcttgaccaagagaaatccggtgtgcagcggaaaagtggttggttatattggggggcnnnnnnnnnnnnnnnnnnnnnnnnnnnnnnnnnnnnnnnnnnnnnnnnnnnnnnnnnnnnnnnnnnnnnnnnnnnnnnnntctagccctcccaccttagccctttaatatgcaaacgtgagctgccatgatgtcctgaacatgtatgagttatctggaggcggtcatgacacttggcacaggtggtgacaaggagaagagggcaggaattgccatgttgggtggacctagtttctaacggttagaaaagaaatggttcaggagttgcttcttattacaggaaaatttccactgagaacctttactcctttattccttttactcctttctagttgcctaaaaagtatttctttataactcctatcttcgtaataggcagatcgtctccaacatccctaagctggtgtcaccccctttatttcacagagaaggaagagaa

SEQ ID NO: 317350 - DNA, 1115 bp, Homo Sapiens
  misc_feature (265)..(265): n is a, c, g, or t
aatttaagcaatatgagtgtgaaaataatacagaaacagcctgcagagtcacgcaacttaccaaattcacactagcatgagtgcacattttcccttctgtgtatcaccttctgctcagtttacccaaagcagtttataaagtttatgaccattttggaagactggctgataacatttattgacttgggctttgaggaaattattttcaagagaaattaaataacgactcatagtaaacaaatacaaaacaaaaggcttttttttntttagtttgtttcacagtatctaaaatggcagagatttcaggaaagtctaatcacacttgaccatgagtgttgagttgcttttccttcctctgaggccaagagttacttatatccaagaccgtgaagaactctttttgacctgttggatatgatcttgtgactgggtcgaggaaaatgaactcccagggttgttggagtagagctgtttccaccaaaagacagaactgtatgcagctaataagagctccagcacagtgaagatgagcatcaccactaggacacctgttaaactgacactggtcaggagacaatctttgatttcatatattggataatagtactccgaataaggcaatgaggatagataatccatttctgagccacaatgttgagaggcagtcctcagggctaccatgctgtcagcaaggaggaagaggcctgctcctgcagtaacagaaccagagataattgagagggatccagtaatgccaaaacacagagctccctaaaaatgggtaccccagacatccaaagtggtggaaattgcctggattgaaagtgggaggggtagggagcaaaaaccaagatggcccccagacttgaaatcaacaggcaacacaggatctggactgtcccaagaacggtggtttctgttggcagcccgttctgcaggtaatcttcgttttggtacatgtgtccaggtttctctctttgagggatagtgatgccctttggtgtaaagctgtgagaaacccccatggtttgggattgtaatagcatgatgctgatgatgctgctccgggggctgactcctccttctgtcctccccttggcacaattctgtgtcat

SEQ ID NO: 317351 - DNA, 679 bp, Homo Sapiens
  misc_feature (33)..(33): n is a, c, g, or t
  misc_feature (40)..(40): n is a, c, g, or t
  misc_feature (61)..(61): n is a, c, g, or t
  misc_feature (66)..(66): n is a, c, g, or t
  misc_feature (137)..(137): n is a, c, g, or t
  misc_feature (395)..(406): n is a, c, g, or t
ccggagcagcttgccctccaaatggcagtgagncctggtnaccggcagggagcaggcctcntcccnccttgctgacagcatgggtagccctggggactgcctctcaacattggtggctcagaaatgggattatctancctcattgccttattcggagtactattatccaatatatgaaatcaaagattgtctcctgaccagtgtcagtttaacaagttcattttcctcgacccagtcacaagatcatatccaacaggtcaaaaagagttcttcacggtcttggatataagtaactcttggcctcagaggaaggaaaagcaactcaacactcatggtcaaagtgtgattagactttcctgaaatctctgccattttagatactgtgaaacaaactnnnnnnnnnnnngcttttgttttgtatttgtttactatgagtcgttatttaatttctcttgaaaataatttcctcaaagcccaagtcagtaaaatgttatcagccagtcttccaaaatggtcataaactttataaactgctttgggtaaactgagcagaaggtgatacacagaagggaaaatgtgcactcatgctagtgtgaatttggtaagtcgcgtgactctgcaggctgtttctgtattattttcacactcatattgcttaaatattacatattagggattg

SEQ ID NO: 317352 - DNA, 806 bp, Homo Sapiens
  misc_feature (538)..(647): n is a, c, g, or t
gccactatgaacaatgcaataatgaacatctttgcacttttgtgatacctcctgcatttaattatctcacagtgatgtatggaagtggaattattacatttaaatctatgacacttgaatttagatacacgttgctacttttagaaggaatcctatataaccaagattctttatgtttcacaaaagtctccagactgatgctatcatctccaaacaccacagtctgagaggatgctttgtccttccacattcgccttgaggagatagactggagggacccacagctttcaagacagctctaaaatccgtgctttgaagataaatcatgacatggaggtcaacagctctgcccagcaattttctgtattacagaattagagtaggaccatggggttctaatgcaagattcagtctaattgcacagtatttgttgagagtagactctgtaagactgagtgacacaccaggagaatgcagaacattgaggaaaatcacctcaatgagggaaacctaagaatggttttacccaattttcttnnnnnnnnnnnnnnnnnnnnnnnnnnnnnnnnnnnnnnnnnnnnnnnnnnnnnnnnnnnnnnnnnnnnnnnnnnnnnnnnnnnnnnnnnnnnnnnnnnnnnnnnnnnnnntttcaaaagcacacaatcttccccaaaagtcatgatctaaaccaaggtgtctacctgttctcgcagcctggtcctgtgtgctgtggctggggatcagctcacctctggggagcgctcagctggaacctcccactggctgttcctgccagaacgatcttg

SEQ ID NO: 317353 - DNA, 1663 bp, Homo Sapiens
  misc_feature (299)..(307): n is a, c, g, or t
  misc_feature (419)..(419): n is a, c, g, or t
  misc_feature (426)..(475): n is a, c, g, or t
ggccttagagagggcagttttattgtctcagaggggcagggctgagggagggagctgaggagcaacatccccccaggccccaaggacacacacactctgtccttcccatgggccatggctctgggagcgacccacagaagggagaggaggctcaaactgcccccaggccccagggttctcaggtcagggagttagggaggaacatgaaagtgacatgcttcttagatacatcagcggctgtaaccacagggctgagggggcctccttgctctggagggggtcttcgtccatccttggtnnnnnnnnntgcccagccccttttcaggcctaagaacagtctctaagagggtcaggagaactgggcagccgctaggacagcgtactacaccccggacagggaggtgagccacaggcttgtnacagacnnnnnnnnnnnnnnnnnnnnnnnnnnnnnnnnnnnnnnnnnnnnnnnnnnaagagtgcaattgagagccttgggccaggacgctagaagatagggatgtagttgtcgattttggcgcggtggcgctgggcgatacattcagcgatccacacgatgttgcgacactcctgctccttgagcttcacgaaggcatagaagacaccaaagtggaactggttcaggaaggccaacttgttcagctttacctcgtgctcaaagaatcggtcctccagcgtcttgtctccagggttgctacctgcaccctcgaagagcagcttgtactccgggtagtaatcggccacgttcttgacctgttcatagtcgtcagcccgagccagctgcgccaggccctcagggtagagccgcccacagtgtggaaagagcttggcacggtcctctttggacagctctgtgccgaaagaattgatggtgatgatgaaggcgcggcggtctgcttcaaactccaggatggggcacatggcatcagccgtagtcccgcccagtagggtgcagaacttgtagaaggactccaggtaggccttgtagagggtgttgcggatgatctcgatgttcatctcgtcaaggtcctgctctgaaatgcagtcctggaaaaaagccgcaagaggcgtgtccaccagaatggcattgtagagctcagcaggtgtctgagcaatgttcacggcctccatctgctcgaagctgcctagtgggtggcacttgggcacgagctcagcgatggagcgctggtgcagcgtgcctgtgatgagcaggatcacgttgtcgatcatgtaactgtaagtaatgaagtctaggaagctggcgagtggctcataggcatggttcctcatgtggcggaactccaccaccatcttctccttgagccggtcatcgatgactgacaccgtcagaggtgatgcctcgttggccaggaagttaccataatcagtgctctgcagatgcagtttcaagtcctctagcgtctcgcactgcaccaggttgaggtagtcggcctggctgagcaccccggccttcaggccgcgcaccagtccctccaagtagccattgtccacgttaaagtaaagctccgggaagaacgacatggctgctgcgggagcggcgggaccggagaaccaggaccggccggcacgaatcgcgactccccaggtcagctgacgctgcgtcctcagcgggctgtcaagt

SEQ ID NO: 317354 - DNA, 1751 bp, Homo Sapiens
gttctgaatatgtttgtatttaaatatgtcccagataataaaatagaaagaatgcttgatctgatctgagagcaggagcaaagcctttctgaagggttgcctggcactgtgggtttcaggcagggcctctctgcagctgcctcatctccatttctttctttctggcttggggctgcactttggctctgactccgtgccttctgctgggagctctcctcacagggcttacttgagggatgcttcttttgaggtggaagttaaccaacgttggttccgcaggacccacggtcacagttactgtctctgggtcatacccaggtgctgtggcactaacagtgtagatacctggaagcagcagccggaagtaatcaccatggtcacctgaagtgacatcatggttaatcccactgacagaaatgacagcattggcgagattattgtaattctcatcaagcaccattcccttgatgccctggtgaacctgttccaggaactggattagggcttcccgattacccagccactcccgctgtaactcctcttcggggggaaacttgtcgcaactcagttccagcgtgatctcaaagcagttggtatggagataattaaagtcttgcattcccttgctgagagaataccaggaagccccattggtgatgccatctgggaagtaatctccgcagttccaaccttggaacatccatccatgtgcataggagtagaccttggccagcttctggaagagcttgtcgtcaggcgtgggggtgctggcggtgcggcggacccctcggacccggtgctcaaaggacttgtcatacgggtaattggccaccaccgcccctccgtggagattggctgaaagaacaaagttgaaggagtgcatccaccggatcaccgcccgggtctcgggttccacctgacttttccagttgtctggaaggggcaggtggtggttggggcctccgtacttctcgttatagtagatataggtattgagatcagggaagttgcggttcaggtccactccatttgcattgttcctgccaactagatacccaggcttgtttgggccctgggcagcagccacctcgtagccgtcggggttcatggatggcaggatgtgaatgcgcgtgtcctggatgagctggacgatgcgctggttcctgttccggaactcctcgcacagaaactccgacagctgcagcatcagctcgcggcccaacgcttcgttgccgtgcatgttccccacatacttgacctctggttccaagggctcgtggattccagggtggtcgctgaactccagcacgtagaggtgtctcccctccacgtgcgcccaatgctgtagacccgcgtgatgccggggcattcgttttgcaccttgtacagcgtccgcacaagatcatcatagcggtggtggcgaaaggtcaccggggcaaccaacttgaagagaaggaggaggtggaggaagactgagagcaggtctgacatcttgctgggctttttcaaagagagccactgaaacgcgccccacctccttaaacaacctagcctcttcacccgccaaaatccaaggtccacctagcttcccgcttgtaaacaccagtccaaattggaagacgttcccagctgtccgtccaaggctggaaattctttatgtcgttctggaatagccactcatctctcctccctcactccctttctttctctaatccaggaaagccttttgaaaggttttttgcacttcccca

SEQ ID NO: 317355 - DNA, 1111 bp, Homo Sapiens
  misc_feature (15)..(15): n is a, c, g, or t
  misc_feature (148)..(148): n is a, c, g, or t
  misc_feature (192)..(192): n is a, c, g, or t
  misc_feature (216)..(216): n is a, c, g, or t
cttcccatcttcttnccctggtaaggtgttgctccagttttccctttgaatcccaaaattttctcttgggtcttctgatgaatcatgtgagtattttcaccctcattcaaaagaggatgtcaactgctccatagaaacgaatcaaatncactattttcttccagaatctgggtgacttcttctggaaggggncatggctcgaacactgagcgtggncaagtttattgggagttgttatggtgattagcccgtcagagtcaacttggattccttcagggattttgctttgatcttctttcatttggtgtatgactgcaactttttgctgtttgcctatttcttcattgaccatgtcaacttttgggggttttgtgattgtttctctgaatggaataataggttcagatacactgatatgaatctttgcaaacctttcttttaagtcatccaggcatcgctgaaggtggacttctcctgctgtgactaaaacgtgctctcccgtttcctgaattaaaatctggacacagggatcagcctggtttaacagtttcattccttttacgagctgaggcatttcacttggatgttttggttcaacagcaactctcacaacaggagtggcttcgaagttgagtggtataaatggtgggcaggatggcaggctacacagtgttgcagatttcagcacaaaatcttgaaggcctcctattcctagcacatttcctggaggtacctcctctagatattccagttcccttcccatcagaagatacaggttttccagagcacagtatgccatgtgggggactttgggggaggccatctggtggagctgagaagcctaatggtacccttcggtaaaaactcaagaggactgtatttgggccccaagacaaaaattttctttcttcttcgagccacaccactgaacacccggagcaaatgcaataaaagactcttggttgttttcttcctggagcacaggtttaggggtcatactttccacctgttgctcgtcacctcttggctcgtctccttttggacatgtttcaatggcactcccatcttgggtgggctccaagggtgcctgtccctgtgctgctgcaagctt

SEQ ID NO: 317356 - DNA, 702 bp, Homo Sapiens
  misc_feature (339)..(339): n is a, c, g, or t
  misc_feature (348)..(348): n is a, c, g, or t
  misc_feature (359)..(359): n is a, c, g, or t
  misc_feature (390)..(390): n is a, c, g, or t
  misc_feature (413)..(413): n is a, c, g, or t
  misc_feature (474)..(474): n is a, c, g, or t
  misc_feature (488)..(488): n is a, c, g, or t
  misc_feature (515)..(516): n is a, c, g, or t
ggaattcggcacgagagacggcagaggtctctgcggcgcggtcctcggagacacgcggcggtgtcctgtgttggccatggccgactacctgattagtgggggcacgtcctacgtgccagacgacggactcacagcacagcagctcttcaactgcggagacggcctcacctacaatgactttctcattctccctgggtacatcgacttcactgcagaccaggtggacctgacttctgctctgaccaaggctgtgatggccatagcaatggcgcttacaggcggtattggcttcatccaccacaactgtacacctgaattccaggccaatgaagttcgganagtgaaganatatgaacagngattcatcacagactctgtggtcctcagccncaaggatcgcgtgcgggatgtgnatgaggccaaggcccggcatggtttctgcggtatcccaatcacagacacaggccggatggngagccgcttggtgngcatcatctcctccagggacattgatnntcttaaagaggaggaacatgactggttcttggaagagataatgacacagagtgaagacttggtggtaggccctgcgaggcattacactgaaggaggagatgagattctgcagcggcagcaagaagggaaagttgcccattgtaaatgaagatgatgagttgtggccttaatggccgaccggaccga

SEQ ID NO: 317357 - DNA, 1119 bp, Homo Sapiens
  misc_feature (1038)..(1038): n is a, c, g, or t
  misc_feature (1045)..(1045): n is a, c, g, or t
  misc_feature (1057)..(1057): n is a, c, g, or t
  misc_feature (1068)..(1068): n is a, c, g, or t
  misc_feature (1110)..(1110): n is a, c, g, or t
  misc_feature (1113)..(1113): n is a, c, g, or t
ccgaggaggtgtgctggatcccttttcagaaaagccgcttctcatacgaatggaggctatggacgccaccttccacctgggctgaggacgttctcttctcaaacttaagctccccagagtacatcatggctcggacttgggtcaagctcttggcaccaatgtcctggcatgagtgttggatgccagcaatcaggtaagggacaaatttgtggattgaccctttgtcctgcacagcaccagacactccctgggccactttgattttgtcagcttcactgaaatatctgttctggctgctgaggtgcttgtccatggcatcgagagaacccataccgcgatatttctttagccggatcccatcggaaaagaagtattcaccagggggcctcagtggtggcagccaggagagagcccatcatgactgtggaggccccaagggccaaggctttcgcaatatgacccacattttggattcctccatcagcaatgaccggaacaccaaagcgccgtgcatactctgacaccttgtacactgctgttgcttggggccgcccacaggccagcacttcctgcgtaatgcagatggagccacttcccatgcccacccgcagcatccacacctgcatcaatgaggttcttggcctgggcagcagtgaccacattgcctccaatgacttggagattagggtatttgtctttgatgtacttgatcatattgatctggaagatggaatttccctgggaagagtccaaaaccactacatccacaccagcctgggcgagcaagtccagcctatacttgtcatcctcatgagtgccaatggctgccccacacagcagctgtttcttggcatctttggaggctagtgggtagtccgattcttcttcaggtctgtccgggcaatgatggccacaagctcatcatcttcatttacaatgggcaactttcccttcttgctgcgctgcagaattcatttgcctcttcagtgtgatgctgcaggggctacaccaagtcttcctctttgtcatatctcttcnagaaaantcatgtcctcancttgagaaatnatgtcctggagagatgtgccacaagcggtccatccggctgtnttntattgg

SEQ ID NO: 317358 - DNA, 995 bp, Homo Sapiens
  misc_feature (197)..(197): n is a, c, g, or t
cctatggccctcccaaatgacctttggaggattgagggggtattttttcttttgatgtcccttggatcatatttgattcgggaagggtgggatttcccctggggaaggagttccaaaaccccttcccttccccccccagcctgggcgagcaagtcccagccctatatttgtcatcctcatgagtgccaatggctgcncccccccagcagctgtttcttggcatctttggaggctagtgggtagtcccgattcttcttcaggtctgtccgggcaatgatggccacaagctcatcatcttcatttacaatgggcaacttttcccttcttgctgcgctgcagaatttcatttgcctccttcagtgtgatgcctgcaggggctaccaccaagtcttccctctttgtcattatctcttccaagaaacagtcatgttcctcctctttgagaaaatcaatgtccctggaggagatgatgcccaccaagcggctccccatccggcctgtgtctgtgattgggataccgcagaaaccatgccgggccttggcctcaaaaacatcccgcacgcgatccttggggctgaggaccacagggtctgtgatgaatccctgttcatatttcttcactttccgaacttcattggcctggaattcaggtgtacagttgtggtggataaagccaataccgcctgtaagcgccattgctatggccatcccagcctctgtgactgtgtccatgggagaggaaaccagtggggtcttaagagtgattttcttggtcagagcagaagtcaggtccacctggtctgcagtgaagtcgatgtacccagggagaatgagaaagtcattgtaggtgaggccgtctccgcagttgaagagctgctgtgctgtgagtccgtcgtctggcacgtaggacgtgcccccactaatcaggtagtcggccatggccaacacaggacaccgccctcgtgccgaattcgccacccaggcctcgctacctt

SEQ ID NO: 317359 - DNA, 1332 bp, Homo Sapiens
ggatcccatcggaaaagaagtattcaccagggcctcagtgttgcagccaggagagagccccatcatgacctgtggaggcccccaagggccaaggcctttcgcaatatgacccacattttggattctcccatcagccaatgaccggaacaccaaagcgccgtgcatactctgacacctttgtacactgctgttgcttggggccgcccacaggccagcacttcctgcgtaatgcagatggagccacttcccatgcccacccgcagggcatccacacctgcatcaatgaggttcttggcctgggcagcagtgaccacattgcctccaatgacttggagattagggtatttgtctttgatgtacttgatcatattgatctggaagatggaatttccctgggaagagtccaaaaccactacatccacaccagcctgggcgagcaagtccagcctatacttgtcatcctcatgagtgccaatggctgccccacacagcagctgtttcttggcatctttggaggctagtgggtagtcccgattcttcttcaggtctgtccgggcaatgatggccacaagctcatcatcttcatttacaatgggcaactttcccttcttgctgcgctgcagaatttcatttgcctccttcagtgtgatgcctgcaggggctaccaccaagtcttccctctttgtcattatctcttccaagaaacagtcatgttcctcctctttgagaaaatcaatgtccctggaggagatgatgcccaccaagcggctccccatccggcctgtgtctgtgattgggataccgcagaaaccatgccgggccttggcctcaaaaacatcccgcacgcgatccttggggctgaggaccacagggtctgtgatgaatccctgttcatatttcttcactttccgaacttcattggcctggaattcaggtgtacagttgtggtggatgaagccaataccgcctgtaagcgccattgctatggccatcccagcctctgtgactgtgtccatgggagaggaaaccagtggggtcttaagagtgattttcttggtcagagcagaagtcaggtccacctggtctgcagtgaagtcgatgtacccagggagaatgagaaagtcattgtaggtgaggccgtctccgcagttgaagagctgctgtgctgtgagtccgtcgtctggcacgtaggacgtgcccccactaatcaggtagtcggccatggccaacacaggacaccgccgcgtgtctccgagcctcgtgccgaattcgccgcacaagtcatatataaaagaaaggagagggggtgacgagagaacggagggaaaggga

SEQ ID NO: 317360 - DNA, 934 bp, Homo Sapiens
ttttattcggaaaggagggatttccccgggaaggagtcccaaaaccccatttccttccccccccagcttgggcgagcaagtccagcctatacttgtcatcctcatgagtgccaatggctgccccacacagcaagctgtttcttggcatctttggaggctagtgggtagtcccgatttttcttcaggtctgtccgggcaatgatggccacaagctcatcatcttcatttacaatgggcaactttccctttcttgctgcgctgcagaatttcatttgcctccttcagtgtgatgcctgcaggggctaccaccaagtcttccctctttgtcattatctcttccaagaaacagtcatgttcctcctctttgagaaaatcaatgtccctggaggagatgatgcccaccaagcggctccccatccggcctgtgtctgtgattgggataccgcagaaaccatgccgggccttggcctcaaaaacatcccgcacgcgatccttggggctgaggaccacagggtctgtgatgaatccctgttcatatttcttcactttccgaacttcattggcctggaattcaggtgtacagttgtggtggatgaagccaataccgcctgtaagcgccattgctatggccatcccagcctctgtgactgtgtccatgggagaggaaaccagtggggtcttaagagtgattttcttggtcagagcagaagtcaggtccacctggtctgcagtgaagtcgatgtacccagggagaatgagaaagtcattgtaggtgaggccgtctccgcagttgaagagctgctgtgctgtgagtccgtcgtctggcacgtaggacgtgcccccactaatcaggtagtcggccatggccaacacaggacaccgccgcgtgtctccgaggaccgcctcgtgccgaattcgccacccaggcctcgct

SEQ ID NO: 317361 - DNA, 680 bp, Homo Sapiens
  misc_feature (82)..(82): n is a, c, g, or t
  misc_feature (178)..(178): n is a, c, g, or t
  misc_feature (257)..(257): n is a, c, g, or t
  misc_feature (261)..(261): n is a, c, g, or t
  misc_feature (298)..(298): n is a, c, g, or t
  misc_feature (305)..(305): n is a, c, g, or t
tgaagcaccaaccagccacagcagggccggattcctaaccttggtccttgggattatgttctgaaataattatttcagaganatgaagccatagttgacccattagccaatagttaggttctgtgatgccagggcttctgggctataatcgtttactgagaagccagcgttcctaagnggataatggctcgttccattcagctgcagcataggagtcagggcagcgcattagcagaagataacaccagacacgtgcnctgnggcctgttgatgactttctgtgccaagcgtagacatntagcctntattctgtaggtgatgggaagccagtgccagtggtgggtttgagcagggaaccagcaatacctcaagctctgcttggatggaggccagtcagggaggagttagggcaggaggaccagtcagggaggagacttagggcaggaggaccggtcagggaggagacttagggcaggaggaccggtcagggaggagacttagggcaggaggaccggtcagggaggagacttagggcaggaggaccggtcagggaggagacttagggcaggaggactggtcagggaggagacttagggcaggaggaccggtcagggaggagttagggctggaggaccggtcagggaggagttagggcaggaggactggtcaggctcgtgccg

SEQ ID NO: 317362 - DNA, 642 bp, Homo Sapiens
  misc_feature (424)..(424): n is a, c, g, or t
  misc_feature (427)..(427): n is a, c, g, or t
  misc_feature (434)..(434): n is a, c, g, or t
  misc_feature (487)..(487): n is a, c, g, or t
  misc_feature (492)..(556): n is a, c, g, or t
gcagagagtacagactgcagacattctcaaagcctcttatttttctagcgaacgtatttctccagacccagaggccctgaagcctccgtggaacattctggatctgaccctcccagtctcatctcctgaccttcccactcccatctccttacctctggaaccccccaggccctacaatgctcatgtccctgtccccaggcccagccctccttcaggggagttgaggtctttctcctcaggacaaggccttgctcactcactcactccaagaccaccagggtcccaggaagccggtgcctgggtggccatcctacccagcgtggcccaggccgggaagagccacctggcagggctcacactcctgtgctctgaacacacacgccagctcctctctgaagcgactctcctgtttggaacggcaganaanaattctnctttctctttatggtggtggttccggccggcgcgctggccggactcgagacgncgctnnnnnnnnnnnnnnnnnnnnnnnnnnnnnnnnnnnnnnnnnnnnnnnnnnnnnnnnnnnnnnnnnctgtgaacactctggcgttctcaacttaatcgccttgcagcacatccgtctttcgccgcttgcgtaataccaagaggcccgaccga

SEQ ID NO: 317363 - DNA, 1075 bp, Homo Sapiens
ggggtctggctacaaattttattccggttacaaatagcaccgagcccttggggtgcaccctgtggagagggatccccctcctggacccccacctcctcccctgagctacccaggtagtgtctgggagctggcacacggcccagggtccctctggaagctgggccaggccaaggggttaggcccaggcccttcgtggggtgggcccagggcaagctgtggcagatgtgcaggtaggtgagcggcagcctctcagatgagcacactggccacgggcacgcgggtggagcggccccgctgggacaccacaatccggtcgtctgtggaccctgcttcgtgcagcaggccctgcacgtgcagctgtgcccgccggcggtcggcctcaatgaagatggcggtgcccagggaaggctgcgccgcccagtgccccaacaaacgcgcagagcatgagcgagaactgcagagcccggaactcggacaagaaggaggggggccagttccggcgcaggcggtcagagatcaggccaatgaggtaggggctcccagcatcacccagcaggtgggacagcacgatctggaaggcctcggcggtggagcgtcgggtagggatcaccacgtacagcagaatgtcggccacgatggcccagttcatggacaggagggtctctccaatgaagatgaaaatataagtggccacgatgctaccacgggcgcaggcaagggacaggaagaggaagggtgcagagcccaggaggccagtggcacagaccaggggatcagcccgggggttggaagtggcggagccggcggctgatctccacacccaggcccacacccaggactccggtcaggcaggtgatgagtccaaagatgagactgtcagaggaagagcaggagtctccgggaaggcagggtggggtctccccaaggaccacgcgggaacgcagcaggaatgccggagcccacagagccagggagcccgtgacaaaggccacagcagtgaagcccagggaagacaggacgaaactaggatttcttgccagagccctcagatcatgacgacacgaggtggggttca

SEQ ID NO: 317364 - DNA, 427 bp, Homo Sapiens
ccagcctgtgaaacgctatttcaaaaacaaaggctgaggagtgtctcagtctagtggtcccaggcccggtatgatggcttcccccaccacttgtccacaggtgacgcattgctggatgccggcgagtccatgaagcgccttgcagaggtgaaggactcccttgacatcggggtcaagcagaacttcattgaccccctccagaacctccagcctcggcactgccctctgggtctcaggcaggcaggatccccagtggtgcagggacagtgggtcaaagccatgcgtggggcggccctctggccgctactggtgtgacccatgtcccccacgtctccagcaccacctgaagaaactggagggccgccgcctggactttgactacaagaagaagcggcagggcaagatccccgatgaggagctacgccag

SEQ ID NO: 317365 - DNA, 1349 bp, Homo Sapiens
  misc_feature (70)..(115): n is a, c, g, or t
cccgggggttccgtgggaaacgcagggaggccccaaccgggggggtccccggcccaggttggaccggaannnnnnnnnnnnnnnnnnnnnnnnnnnnnnnnnnnnnnnnnnnnnnaccaaccccctccccgtgagctgagcggggaagaagccccgacgggccgtccaagcatggccctggtaccaggttttctcggatctggttggtcagcgtgatgacgtccgcctcaatggaagcccagctccccgtcgttctcgggctcgaagtcgtacagcgcctgccagctcggctggtccaggggcggcatgctccggctagggggtccggatgggcttgtcggaagatcggaaagaccgatgaagctgcgatcttgggggctgtggtgcaggggaagccccccgttgggactgctcaggctctccaaggtcaaagggctcccggggcttgggcttatactcccgcttagggcgtgaggaagcttcccgcatcctgcgcttgagcttctccgccagctcgtgcaggatgtgcacggcctgccggtggtagtccagctgtgcatccaccagggccgagagctgactcacctgctcgatgtcagtctccaggaggttgtgcatgctggtttctgccacctccttggactcctcgaacttctccagcgcctggcgtagctcctcatcggggatcttgccctgccgcttcttcttgtagtcaaagtccaggcggcggccctccagtttcttcaggtggtgctggatctccttcaggtctttctcgcacaggttctggagggggtcaatgaagttctgcttgacctcgatgtccagggagtccttcacctctgccaggcgcttcatggactcgccggcatccagcaatgcgtcaccaaagttggactcgccgcccagctccttcccgtggcggatcatgcactcgcccagaagcccctccgactgcgggtagccggggttcttcacctggccccggatcttggacaccgtgttgagcatggtcagcttagcccgcgaggctgggttgggctgcaggtactcgatggtcctggccagcacttctgtcaccgccttgctggtgacatccaccttcttctccatctctttgaagtcatcatccagcttggtcccctcggcccctccgaccttctcactgaccagctggctcgccttgtagaactgcttcttcagccccgccaccgacatgctgccgcccgccgccgagcctcccgcccggaccgcgccagcgacaggctcccgggcgccgccgaccctctgcgcgcctcagcagtccccgtcggcgccgcctccgccacccgcttgccagctccgcgccc

SEQ ID NO: 317366 - DNA, 371 bp, Homo Sapiens
atcagttttactttccatgagatacagattttttttctatatcaagtgtatagttataacaatgtagttgaaattgagttctgcaaaggaaaatatagattctaagattgcattatcattgtcattttgctgttaaaattgtcagcaaaatcttaactctgatcccattatccatggctactcttcaatattgtattggcctattcagttgccctatctccatagcagccaaatacattgtcatcattacctattcctgtagcaacatgatttttaatatttcttggataatgaaaagtagttatcaatacatggtatttcatttcctggggatcttagtaccttctggtaatcagtttatgatgtttcag

SEQ ID NO: 317367 - DNA, 445 bp, Homo Sapiens
aagcctgataacattttgatagatctggatggtcacattaaactcacagatttcggcctctgcactgggttcaggtggactcacaattccaaatattaccagaaagggagccatgtcagacaggacagcatggagcccagcgacctctgggatgatgtgtctaactgtcggtgtggggacaggctgaagaccctagagcagagggcgcggaagcagcaccagaggtgcttgggcacatttcactggtggggactccaaactacattcgcacccgaggtgttccttccgcaaagggtacattcaactctgtggactggtgggagtgttgggagtgattctcttcgagatgctggtggggcagccgacctttttggcacctactcccacagaaacccagctgaaggtgatcaactgggagaacacgctccacattccagcccaggtg

SEQ ID NO: 317368 - DNA, 718 bp, Homo Sapiens
  misc_feature (94)..(94): n is a, c, g, or t
gtgaaaaccaaccaggaacatttattaaaaaactaagcaagttatccccaagagggtgaagcaccgctggctggttctgacattcgattcaggnctgaaggcacggcaactcctccagcccttgctgggaaatgtcctacccaggccacgggcagtgccccagtgcagctgggtcccctaaaagcccccaaacacatgatcccaccaaaggcttgaacagagcaacttcatcaagcaggcagggaccacacctgagacacaagggcaaggaggtaaagcacaggggactgggagtgggccagggacacccagcccccgtctccaactggcgccccctccaggggggctaacatgtggcgtggggccaccaggacctgtgcttgcccctggtggcggaagagctaccctccctcttgggtggtggggggatgttgtctgcacacagctcagacgaccgagggtacaggaagaatcaaactcagtcaaccattcttcaacccactgggagtctgtgaggcctggcacacaggtgctcaataaacacttgtggcatgaagaagtgaaggaaccgatcttgttcatctctgtgccccagcactcggcatgtagcccatgatcgaaaatgcagacttgaacactgtcacactcttttgtatcactagtgcccggcacaccggacgcgtgggtcgacgatatcccgaaattccggaccggtacc

SEQ ID NO: 317369 - DNA, 1514 bp, Homo Sapiens
tggacaattaagcagactttatatcagcatctaacttttttaaaaaaaggcaagttacaatataggaattttagagaattgatgcatttgagaaaagatgaagcagatagatatataattgttcacagtggtaaattataggtggttttctcacattttatgtcagttccttgtatatcaaaaaatacattcatattatgagacacaggaatctttacatccaaaataatttgatacagatgccttaacattgctgaatgagacaactttggaaagattcttgttttgtgattcctttttaccctctaagcacagtgctttgttaacactgtgtgtgtagtaaatgtgtgtgctgcttaaggtaaagaatttctagtaaactaaatgcccaaggtgactgcgtgattccatgccagacaggaaaaagcagtcatgctttttgcccctagctgaacgtttgttttccccacaaactatgtattcatccacagaatagtgaaatatgctagatcctagtacaagacaagaattcaatctaaaaaatctctagatagataattaaaatattgctagttctgttattcacaaaactgaagatacttgatggaatattttcctcatctgaaacaactatcagtgtcaactaagtggttatacctaacaaagaactagttatcaattaaaatagtattttatcatttttacaccttgtgtattgtgtaaatgctcttaggtttgaagactaattgaatctgctttcagcattttgttgcagagttttggaaccagctcctttagaatgctctaatagcttgatggccttgtcagagttttcaatatttctaagcagagtctctaatcttctcttaattttcttctgatcttcaagagcacagccaattactatggattgaaacttctgatcaactggcccatgtggcacctcagatgaacatgcactgtagagcgacattaaatgacctcttggcatttcccaaatcatccagaaacttattgaccacctcatcaataatccttgtggcatgctttagggattcttgctgctgggggtttctaattgtttctactgacacttcaacggtgagagttcttcccatcaaacggtttgcagtcaggatactgtggatcatttccagaaggatttctttctcttgctcaacagcagttgctgcttctctcaaagcttcaacccacatgtgaggcattaattcaagttggaggacaatgactcagcttgaaggaaggcggagtggagtaacaacctccccattcctttaggaaaacttttctttctggctaagggagaggagaatgaagtggttgagaacatgccctcaacgttctgaagacatggagagatgtgtgttacttgttatgtggctccctgagctccagctggtccaggctctccagcaggcggctggagcggtcagccatggaggaggagcggcagaagcgcccctcgttggctttagcgttgatcttcgcctgag

SEQ ID NO: 317370 - DNA, 2710 bp, Homo Sapiens
  misc_feature (82)..(124): n is a, c, g, or t
actagttcgagttttgctgtgtcttgatttttttgaagcatctgcaactttattccagagcagacataaggcatttgctaannnnnnnnnnnnnnnnnnnnnnnnnnnnnnnnnnnnnnnnnnnggccaacaaaacaaaatctttaacactgacagaatagaaacttatccaaaaggatgagagatggggccgactggggcatgggcaggacactcctgcagcaccggtccctgagtccccagctcacgaatgtttgacaccctctgtccccagccctggcggggccccctgccacacacacacattctctccacaaagtacaaaatatatatttaaaaacctcaacacaaccaagcatcttgcaaaggcccaggaaagcaagggtttggccagtcagggatgaggatggggcccgagggtctaaagaaggcactagagggacagggaccgctttgggtctcacccagtcaagttcacagtctgccctcttagtgtgaggaaatggggcttgaggtaccctgtttacttggcgctgggccaagccctccatctcctgagatggcctcatgtgggagaaggcggagggaaggtcggcttgggaatatcctatatgtctgtccgaaggctgtggcggggctcctgctccagggatgctgggacgtggcggtgcctgctaagtgctcagctgtgtgcgtctcgcagggaaagagggcccagcccagcatccctggtcatctcctcagttcaggccagggtgtcatccgagacccctcagcggaagttgcagggggaggaaagaactagaaataaataaagtccccagtggcccagcatggcacagcagggaggccactctgtttcttcaagtattcttggccgatggggctccaggccctgtcgaggctcagatggggatccccacagtgttcacctggtccttgagtcccagcaggctgtaggcgatgcgcttctggtggccgggcagccgcaccccaatcctcttgatgtcgtcgttggtcatctgcaccaccttctcgatggcagtgtagccggccgccatgaagtgctccgtatactgctgcatcttgatggactccagccactcggacaccgtgcggaagggcaccccctccgagccgctcgtgctggggagccggatagacacgcgggggtcaaagtcagccagggtcttgagggagtcaggggcacgaatgagcttgtccagggatgctgacgatgtcagcgaacttggggcggcgggcacgctcctgctgccagcactgcatcatgagctggtagatggcggaggggcagtccatgggtgtggggagccggaagccatcattgatggctttcatcaccctcgtggttggacaactcccagtagggccgctcgccataggtcatcacctcccacatgacaatgccaaagctccacacgtcgctggcagaggtgaacttccggtaggaaatggcctccggggcggtccagcggatggggatcttgccgccactggtggtgtaggtggcctcggggtcgtcctccagcacgcgggacaggccaaagtcagacaccttgcagaccaggttgctgttgacgaggatgttgcgggcagccaggtcacggtgcacatagttcatgttggccaggtacttcatgccagctgcgatgccccgcagcatgcccaccagctgcagcacgctgaactcgccatccttctcccgaaggaacttgtccagggccccattctccatgtactcagtgatgatcatcatgggcttgtatttggagatgacgccctctaggcggatgatgttgtggtggctgaactggcccatgatgccggcctcgccgaggaagtccactcgctgcttctctgtgtagccggctttcagcgtcttgatggccaccggcacctccttcttccccgaggatgtcttcagcatgcccttgtacacctccccaaactctcctgctccgatcaccttctgccgagtgacacaggatggatggatctcggtagtgaacttcaacacagcctggttggggtcctcatatgtgtgggggtccacgtatgtcttcaggggcttcagttgttctgacttggagaagtaaacgtcttccggggactggcgggcacgctggttcttcctcctgcggtggataaagaagccaactcctgccagcaccagaagcaggaccacaccgacagccacgccgccaatcaccgccaagttgccagatccctccggggacagcgtctggaattcgtgcaccttgctgccggccccctggccctcctgcgtcagtgcctgcacctggaccaggtaggtggtgtctggggccaggtcgtccagggtcacggagaaaccctcggtgcggcgcacattgtagctgttggagtctcccttcttgcggtaagtgacctcgtacttccacactcggctctgctgcggcggggggatgctccaggagacgctaagcgaggtggtgctgcggccctccagcctcaccttggggggctctgtctggttgatgctgacactggcagtacggaagctgcggctggttaccaggcctgagacgccattgcgggcctccacggtgaaggtgtagttcatgtggggctccaggtcgctcactgtcacactggtgcgggtcagtccgtgaggaggctccgagtagcgcacactggcctcacacggccc

SEQ ID NO: 317371 - DNA, 471 bp, Homo Sapiens
  misc_feature (26)..(26): n is a, c, g, or t
  misc_feature (32)..(32): n is a, c, g, or t
  misc_feature (54)..(54): n is a, c, g, or t
  misc_feature (77)..(77): n is a, c, g, or t
  misc_feature (116)..(116): n is a, c, g, or t
  misc_feature (119)..(119): n is a, c, g, or t
  misc_feature (205)..(205): n is a, c, g, or t
  misc_feature (273)..(273): n is a, c, g, or t
  misc_feature (279)..(279): n is a, c, g, or t
  misc_feature (321)..(321): n is a, c, g, or t
  misc_feature (342)..(342): n is a, c, g, or t
  misc_feature (350)..(350): n is a, c, g, or t
  misc_feature (391)..(391): n is a, c, g, or t
  misc_feature (417)..(417): n is a, c, g, or t
  misc_feature (440)..(440): n is a, c, g, or t
ttgttgtgttttgaagcatctggcanctgtgnttccagagcagaaataagtcanttttctaacaataaatataatanaaataataaattaagattcgaaaaaaatgtccaacaaancanaatctttaacactgacagaatagaaacttatccaaagggatggagagatggggccgactggggcatgggcaggacactcctgcagncaccggtccctgagttccccagctcacgaatgtttgacaccctctgtccccagccctggcggggcccnccctgnccacacacacacattctctccacaaagtacaaaatatatatntaaaaacctcaacacaaccangcatcttncaaaggcccaggaaagcaagggttttggccagtcagggatngaggatggggcccgaagggtcttaangaaggcactagaggggacagggnccgcttttgggtcctcacccagtcaagttca

SEQ ID NO: 317372 - DNA, 505 bp, Homo Sapiens
ttaggtgctaaaacttggttttgaaattttattaaaaaaatatatttgcaaacatataaaatttaagatgaaaaacgctcattttaaaacatgtaataacttaatatttgcaaacatacacagatgctataaaatccataccattaaaaatgttaatgatacagtattgcgctcatggaacaaaaatcttgctgtaattccagagcttctcgtccccatgtttcagggagctgagaatctggtacaatgaaagtcatgagagccacatggccaaagcagtaatacagaataaaaaaccatttagaacacatattttaaaaacatgtttcttaaggaatcacacagataaaaaggaaacacaattctgcattttccccactttgaagtgaatgatattgcatcttagcattttaaatgaaggtgtcaaatacaaaacggagggaatcactgcacacatctgttgaatttgctgaaaaacaggctcctcaaggcctcgtgccgaatc

SEQ ID NO: 317373 - DNA, 916 bp, Homo Sapiens
  misc_feature (181)..(270): n is a, c, g, or t
ggggagatgtggattttcagcaggaactttattccagtgctaatggcagacatcaggaaggaggagaggagccatttgtgcagatcatctagaagaacctggaccattcttgacagagctgaatacagtgatcacgttgtcctccaaggagcaggggtggggtggggtacttctaggagtnnnnnnnnnnnnnnnnnnnnnnnnnnnnnnnnnnnnnnnnnnnnnnnnnnnnnnnnnnnnnnnnnnnnnnnnnnnnnnnnnnnnnnnnnncttcttaatattcctttgaaattctttatggtgcacaggtagcgtagaaaataactgcttcacactgactgtcatccctcttggggtgggggtagggggtttttctggatgattttcccatagtgatcaaacaccagtcgagtcccaaccttcgccgatacatggcaggtagaaatggtgacatcactcagtgcacaaagtgagctcagagcttccccccgaaagccaaaagtttcaacctgaggtaggtcggcaaactcttgaatcttagatgtgtgatgtttcagagttaagccttcgaagttttcttcttctaccccacatccattgcctgaaacttcaatgagatccactccatagtccttaagctttagatcaatattagtggcaccagcatccagactgttttctactaactccttcaccgcagtgcttagactcggtaccaccggcccagagcaaatctgatggactgacttccgatcaataggtttgatggccttagcaggttctgtactcgagctctcagctcgctccaaggatgcaacaccggatccgcctcggggactgggaaagttccctccacggctcccacaggcgccccgcctcctgggctcccaacggctgctttcgacgttgtgctccc

SEQ ID NO: 317374 - DNA, 444 bp, Homo Sapiens
gccagagggtttgcctgccagtgctactttccagacaacgcccagggccgcaagcctccaggggcttccagacccttgagacactggctgacattccggcctccccacagctgctgaccgatggccagtacatgacgctgcccgtgtctccggtccagctgccctgtgacgaccccatggcgggcaggggtggtgcccccgtgctgcgggtgggccatgaccagggctgccaccagcagcccttctgcaacgcgcccctccctggccctggcccgtatcgtacagaacctgctaaggccatcaaacctattgatcggaagtcagtccatcagatttgctctgggccggtggtactgagtctaagcactggatgaagaagatagtagaaaacagtctggatgctggtgccacttaagttgatttttagcttaaagactatggaat

SEQ ID NO: 317375 - DNA, 483 bp, Homo Sapiens
ctacaggcatgcaccaacatgcctggctatttttgtctttttagtagagacagtgagaacacagagtttgtgagggagttcaatttcttaagtgagtggcaggactagtatgagagccccatcttggtgaaggcagagaacgacaataacactatttcagctccttccacccatttctctaatgaggaaactgaggctgggaggtggcccaaggtcacatgggtggagtgtctgcattgggcaagaacaccatgtcctgacctcagtcaggggccggggtgagggtggcacctgaggagaacatggtgacattgacaaagattgagcctccaatgaagtcctctcctgggccttggaatgcggccatgagcgtgtccttctggagggagacgtggcccaggccttcagagatctgttcttagggtaagatagaggaagaggatatggttttttggggagcgttagagctcgtgccgaatcctg

SEQ ID NO: 317376 - DNA, 588 bp, Homo Sapiens
  misc_feature (139)..(139): n is a, c, g, or t
  misc_feature (287)..(322): n is a, c, g, or t
  misc_feature (576)..(576): n is a, c, g, or t
tttgagtgtgagagttttttattcaatttgtgaaggacagttttagaacaaaatgttagtaacactcttagaacactggtttgttcatttgacattttatctgcaccaatttttattacaaaaatcaaaaaagtaaaanttcattacaatatttgcagagtataaccactagttgcctagacaaaagctaatttctacaaaatcaaaaacttaatgcagttttattaagagagtcaaaattctctcagttaactggatatacatagtggtatatatcttaaagcagnnnnnnnnnnnnnnnnnnnnnnnnnnnnnnnnnnnntacatgtcaacagtcagttaaatattttgacctgacagtttctacaaatagtgattttcactacatataaaggaatctgttacatgtggtaaaacttccagagaccaagtaggaagtgtggaataaaaacaataaatccaaacgcagccccaggctgggcctgttttccatgaagcccaaggcagtgatcttcatcattaaggagggaccactgtgtccacaactaaaaccttcaaccacatggtgatctgcanagcttcattgaa

SEQ ID NO: 317377 - DNA, 1240 bp, Homo Sapiens
cctcgggaaaaagctctttcttcgacggggccccggggaaccgcgccccaacaacggggcgcatgtgtatcgcggctgctactaacccttctgcccggttccgcccaaaggttaaataatcggggggacgcgccttttctccccactggtttcacggcaaacatgcgcggggtgtcgtgtgtgccccccccaacacttttattttggtcccaggggcttccccatttaaaaattatttttttggcgccggtttctccacaaagtttaggggtatttaacggggacggccccttgtttccaatagaaggggggccaagacctatactttattttaaaatcccggcgaataacacccaaaagattccgtttaaatgattttccgttcccattttaaaaggtcccccttattggacgggatacgtccatgaaaatctatagttgtcccattctaggaaattttcccaatgggagctctcttctaccgggggtgtatattttaatttgtctcatatgggggtctctcccattctggtgattggctagaacagcaatctgtatcatgaatgtacgagttggcttcttatgattgtcagttaagggaacatgaatccagccacttggttccaccaactcaagttgctgaattggatgttcactaaatgaggctgggacccatctgattgccaataagtttctagattgtcatctcgtaactgatccactccaaatcctggtttgcaagatgagagtgaccaaacagcttgtgacccaatttcccgtactgttccagtcctttccaactgcttggggtcagcaccaggaggtgtcttgtttggtgtagtcatttttaaaatattcgtttccttgacacctcccattgtatccgaagttgttctttaatcggcacacaagcacttgatacttactgcaagttaggtgagatctagggcgagactattcaacctgcaaccatcattactaactgaatgtcctgttaccacacagttgagaggaagttgaggcctagaagagcgcgcaacagtaagccgtgtcggcaccagactctgttggtcctactgacacctccagcgttagaatgactaaggctccactcctgacccaccggccttgaggaaagcgcaaacgtaaaaaaagattgaaaccggagaggcgaatgcatctgtttacgctaggaccacgctcgacgtcggagaaaagcccacacactcacagtttccag

SEQ ID NO: 317378 - DNA, 2106 bp, Homo Sapiens
ttttaagaaagatgccagctctttattaccagggaagctgtgtgcacgcgcgtggagcgcgctccttggagctgaccgggcccttaccttctcctgcttgtcagaggtgagtcctggtacccagcacggtggcctccgggaggctttgataggtcagcctttgctgcctcccagctcagggctcctccaaggaacctgcggggccccatgtgcccacagcccgaggagggaagcaccgaccgccctcctcgtggcacgctgcactccagcgctgggcacttcacctgcttcctggcttgcggtggtcaggctcgatactgactccactgatcggcacattgagttccaaaagaatgcaaaccgcgtgggtgctgtggcgacattgtttgcaccgtttatacaaccagacagctttttagactaaattcgtgtccaaactaacacgcacgggaacgggctccagctgcagctccctgggtctgtcaggccggggagcggttctaccggaagagccggtacgtcctgggcaggcgcccgtccttactcgacagggcggtctggatgtgctcatacgtgggcaggtcagtcaggtcacccagggcggccactgccggcttccctcggagcatcttagaagcgactctcttcacatcttccggcttcacgttgcggatgagcgtgcacagctcgtgcggcagctttctggagcgagtggccagcacctgcctccccacatcctcgaagatcacaggcctggattccaggttcatcatgagcattgatgtcagctgcgtcttggctcgttccagctccaccgtgtccacggttccgcccattaaaataaactcctttgtgatgatttctaccatttctcgaacctgtcttgggtcggcgctggcatggatgcaaaggaggccagtgtcctcgtagctgtggtggtaggaggtcgcgttatacatccagtggtgcctgttgagcacgttgaggtagagcctggagaacatgcccttgccggggcccaccagccgagaaggagccacctccgcccatcatcatgttcaacactgcaaaggggatgaagtcctcctccaggaaggagcagctctccagtccaacccatgatgtgcgtgagctcggggatgggggtcgggcccaggctgacattggacatgtctctttctagcttggcaatcccccccagtgtactgggccacagatctgtcaatatccacggcctctgcgctcccccaggccggctggacccccaggaggtacttccgggcacagtccaccagatgctcgtgctccacgcccacgccggccagcaccatgcggtcgggagtgtagtagttcctcaggtaggaatgcagcacctctcggttgatctttgctacgttttctgtggggcagaaacggtggaggccaactgtgttctccctgtaagccgcttcatgaatcatctcggtgagaagtggctctgggtcaggccgcaggttcaggtcctccagctcaaactggaccgccatccgcgtcatctcgacttcttcatctgttagccggggctgcagaaccacatcagccagtaaggcaaccaccgtgtccaagcctttgctatcagcagacacagcatacatggtggtgtctcttgatgtctggcagtcacagatacccccatgcttttccaacgtaagcagaatttcatctttgctgtcaaatcgagcagtagacgaaaatgccaatttttccaaaaagtgagcaattccactaaggtatttcgcttcatatctcgatcctgaattgataagaattcctactgtacaaaactgtccaaacttattctgagatgccacgcgaagcccattatccaatgtggttactttggtttcaaacttttcctgtccatcaactgtagcaaaaacaggcttgggtactccaggtaagggagaagagagggggatgttgggataggcaccaccactactaaaccgtctgtacgcaggaggtccaaacctcagccgcgaacagccccaagaacccgagccccgcagcaaccgcgtcgccgccagcaccacagccgccatcttgcgtctccgccccgcttcagtc

SEQ ID NO: 317379 - DNA, 269 bp, Homo Sapiens
ggcacgagagagaacgaaagccaaagtgtcatttaagagagatatatatgaaaaagtaacattaatatatagaactttaccatcaccagccgtagttgatagaaaatattagtttcagaattaccctcctttaaaaaataagagactatttgtttttcttttaatttctatgaataaaagaaatttttaaaaactttaaaattttaaatattagtcaaaatactttttaagtcctgagtgcttacaggtagttgttaaaaaaattttaa

SEQ ID NO: 317380 - DNA, 613 bp, Homo Sapiens
  misc_feature (211)..(211): n is a, c, g, or t
tgttgagaatcaccgtattacccttctagcctgactcgatcggtgaccaaagagtaaccaaggggagggaaccagactgagggccagaatcattgtgtgtctctagagaaaacaggttgtctgcaagctttgctttccattttggaaaacctaagccgtgctggagaacttacttacacattctccgggacgataagcatcttttatgttntgttttgtttttccatgaaactctacagagtttgaaccggagcttttgacaattctggcaaaaaacactttagtccccacaacagggacaaaagtcaaggcatctaccttttctattcctgggtttcttctgataagacctgaagcagagcactaggacaagcttgtctacccctgaaagaaatcagatcagacttttgggaaagtaaaatccccaaccaaaggaagtcctgaggaattcttagcagtctgtcaaaacaggggggatggaggaacagataaggcctctttctccctgataccctgtgttggaagagtaacaaacaaggcaacttctaatctgcatacaacatggagaccgattttcagattccaaaggaggatcgaaataggaaccaaggat

SEQ ID NO: 317381 - DNA, 674 bp, Homo Sapiens
  misc_feature (476)..(578): n is a, c, g, or t
ttttttttggtttccctatcgagctttcagttcttgtgcatttctatgagtatattaataagaaaccaagccacggagggcaatttgttttaggtgcatccaacagtctggtggatttagcctttcttctccgtagcctgtgagtctggcaggtttccaaccatagaatccttcttctgcctccatcgtaaggttgcttgaagcttctatttctatatcaattctgtcaaaaccactgggtgttgagatcggggagggtcctccagggcaggaattgatttgtttctgctttctatgttttgagggagtgctacatgccaatattctgttacggtgattatggaggctaaatctcacagtaggcaatctgcaggctggagacccagggaagctggtagcatggctcagtccaactccaacgggcctcagaaccatagaagccgatggtgtaactctcaaccgaggcggccataacnnnnnnnnnnnnnnnnnnnnnnnnnnnnnnnnnnnnnnnnnnnnnnnnnnnnnnnnnnnnnnnnnnnnnnnnnnnnnnnnnnnnnnnnnnnnnnnnnnnnnnntccttcagctctgtttcttctgtgctggtgacacgtatcacttcagccaagccagagtaaaggtggtgcctctttttaaaaataatacttgaaagc

SEQ ID NO: 317382 - DNA, 1146 bp, Homo Sapiens
aggctggaccggtccggaattttccggatacgcggcgggaaggaaccgttccgaggccccgggctgccggcgcgggcgccgcggcacgtccacaggctgggtcgcgaggtggcgatcgctgagaggcaggagggccgaggcgggcctgggaggcggcccggaggtggggcgccgctggggccggcccgcacgggcttcatctgagggcgcacggcccgcgaccgagcgtgcggactggcctcccaagcgtggggcgacaagctgccggagctgcaatgggccgcggctggggattcttgtttggcctcctgggcgccgtgtggctgctcagctcgggccacggagaggagcagcccccggagacagcggcacagaggtgcttctgccaggttagtggttacttggatgattgtacctgtgatgttgaaaccattgatagatttaataactacaggcttttcccaagactacaaaaacttcttgaaagtgactactttaggtattacaaggtaaacctgaagaggccgtgtcctttctggaatgacatcagccagtgtggaagaagggactgtgctgtcaaaccatgtcaatctgatgaagttcctgatggaattaaatctgcgagctacaagtattctgaagaagccaataatctcattgaagaatgtgaacaagctgaacgacttggagcagtggatgaatctctgagtgaggaaacacagaaggctgttcttcagtggaccaagcatgatgattcttcagataacttctgtgaagctgatgacattcagtcccctgaagctgaatatgtagatttgcttcttaatcctgagcgctacactggttacaagggaccagatgcttggaaaatatggaatgtcatctacgaagaaaactgttttaagccacagacaattaaaagacctttaaatcctttggcttctggtcaagggacaagtgaagagaacactttttacagttggctagaaggtctctgtgtagaaaaaagagcattctacagacttatatctgggctacatgcaagcattaatgtgcatttgagtgcaagatatcttttacaagagacctggttagaaaagaaatggggacacaacattacagaatttcaacagcgatttgatggaa

SEQ ID NO: 317383 - DNA, 640 bp, Homo Sapiens
acagagatcttgctcttccatgaatatccctctgtctgaaatgtcctgtatccagatagccacatggcttgctccttaatgttcttcaaatctctgttcaaatattactttctaatagaaccttgcctcaattaccctatataaaagtgcatccctcatgccctgcaatccctttcctgaattatcctgctttatttttcccttgatcatttactgtcatctaacatatcatatatttacttgtttgttctttattgtcagacttcccccatctccattctatcttgatcataaactccacgaggagaaggactttatctttcactgtcatgtcaccactgcttggtataactatttggaattcaataaatatccatagagtaaatgaatgaatacgtgaaaacattgacgaaggaaagaatatatgaggaaatagtatttaaattgctactgaaggaggaaaggatgctgccatataaaagtgaggaggactcatgcagagtgaataccatttgcaaaagccaaaacgtttccttaattcatttcttttcaacttttccattacaacaatcatagtgcaaattactgtcatccactgtggaccagtactacatcaggcagctccctgcaggcttttctg

SEQ ID NO: 317384 - DNA, 952 bp, Homo Sapiens
gctgtctttattggaggtctgtggctggcagggtccttgggggtggctgcctcctggatctcttagagacactcctggcaggtcttggcttaacagtcgcggtgaagtgcggccaggtgcgcagcaggtcgaagagcgcgtcgccggggcagtcggtgcgcaccagctggcggtggcccagcagcgcgtagtctggccgcaggaggccggcgcgcaccgcacaactcgggagcgtgtcgcgcaccgtgcgcagagcggcctcggtgggcagcgccgcggtgtagttgcccactatggccacgccgaagccccgggagttgtggccgagcgtgtgggcgcccacccagtgccagccgcgtccctcgtacacgtagccgtccgagcccaccacgaaactgtagccgatgtctccccagccttgcgtgtcctggtggtagcgctgcatggagcgcatgttggctgcgcagcgcgtgaagtccgtgcagggtggtgcaggcacgtaggtgtgatgcacgtacaagaatcccagcggcagctgcagcagcttcgggcggccccgataaggcgccgctccccagcggcagcgggggtggatggccgggcatcccaggaaggcctcagtgaattccttggtagcattggcagccacctgggccagctgttcttggctcatgcactgaagctggaggtgtactggctccagcctctgtagaaggacaagggttccccacacctgctgggccaggatggaggctgaagtcagagcagcaccgttctgccgtcggaagttgctgcggaaccctgggtctctggccaccccagccccatagtactggctcagcaagtggctgagggatggccggggctcaggagtccggctcaggtagtctccaaggatgaccccatccagggcgccattgaggaaggccatggttaacagagatgccttggg

SEQ ID NO: 317385 - DNA, 1316 bp, Homo Sapiens
  misc_feature (232)..(232): n is a, c, g, or t
  misc_feature (245)..(245): n is a, c, g, or t
  misc_feature (255)..(255): n is a, c, g, or t
aagagaacctgaattaaatttttaatattttaaaaaaggaaagttgctgggaagctgggtaaacagaaacagaagattagaggcctaactagaaagagacactggtgttagcagagagatattgaggggctgtaagctaaggtttgaaatctaaagatagagtggaaaagggagtaggcacccccaccagcccctgcttgacatctgctttagttcattccagcaggaaggnggagaagggcaangaggtagggngcttctcagcaaagccagcttcagctttgataatctcacccacctaccccatttaaggagttccaggtttaagagtttaaaaacaggtggcacccagaccatcattcaggagacaggaactcattccaggttcctagagaactcctatctcagacctgagggtttccagggcttcagctgagctcctctggctaaccagtagtcacttgatcagtcctgctgccttgaccccatctccaggaggggctatggccagagggagtagagggagtccagcccccaagccttgtgaggcactgttaggcagatagggaaaagaggggtccttagatcactggttcaaggagggatctggtaggggcagcatttcttctgggctggaaacagaatgggggtttcaagatggcagaaccattccattattggagctataagcccctagaattgctccatggcctatctcggtttcccttggatctcatctgctcctgaactgcacctgtcatggcaagtccatctccggcccccatctcccctgagccaatgtgagtcaggtgaacaaaattcattggttccccaatcatggtccggtcaatccgtcttctcttcttcttcggctggggtttctctaccacacagcagcccagtttgtgccaaaattcactcatgttccctgatggttccagcttcactcctctgtctgaggccccaaagggctctttccctggtgtttggacaacccactcctcactctccccagatacaccaccaccctgggttcactcagctggatgggtccagacaaagtggaatccctggaacctttaactgagcagtgaaggtcagtgtctcagagcctgagagatgaacaggaccagagagagaggtgggcaggcaggcacaaggttatgtcttcctcagactcggaaccctgctcttctccaccatccagacgttcagctacagctggtgggggtgagggactctgctccgtggccgccagtgtgggcttcccgggctagctctgcggcgaggtgggggagccgagtacgagccggcag

SEQ ID NO: 317386 - DNA, 1390 bp, Homo Sapiens
  misc_feature (337)..(337): n is a, c, g, or t
  misc_feature (351)..(351): n is a, c, g, or t
  misc_feature (369)..(369): n is a, c, g, or t
  misc_feature (375)..(375): n is a, c, g, or t
  misc_feature (1083)..(1109): n is a, c, g, or t
tacaccttcagtttcctggtgtgatcctggttaaaatggatgatttttcattgaaagttttgctgattaacaattaaagtgggatgatatgtgggcaaaatcacttatgaaagtagaagcaagaatcagttggtttgctaaacataaagccatgctgtttttggtcaaactgtgtaaactggaaaaattcacatcatttctgagtttaatcactttaggatatattcacattgttttggtgaatttgctgaattgaattgtttttctttctcaaatctgtgatctcttttctttatcctgtttctttgttcctttccgtttgctttcttatttttcntttggttccattcntttcctacttttttcccntttccntttttggggaggctggctagtagtgtgtgagaaaagaatagaagtgaaatttgcataatgaatgtaaaagggaaataaaagtcttttgaaggtagctatactagcacttttgatcatcttcagggcccacaaaaatgttgtcaagattttaaaggtttataattctgcttaagctctagtttggacttaggtatcctaactatgttggaggtatttgcattgtttaaagttaggataaaagcaagttcctcctgtgactgcaacgtcttactgattgggacagttgccaggaggataccaacttgatagcagagggggttttatgcaaacgcactcacctccgccttggggaatgaaagggtcacttctgcatcatcactagctagttttctagtgttagagaggcttacaaatgtttgccattctcataagtgttttgaacttgatctttgtgacttgtgcttttttagcttctctcttgaatcagagtatcattgtcttcctccaaggagttagaatttcccagtttaaaacaaaaagggaaatgtcctaggttttctttgtgcttctcatttttcctttgttgattcaattcctgtgatttttgttctcttccctgaagtgctttacagtgcatggaatctccatcattgttattttaacgatagtaattcacagtcctcagaagcctatttttaaagcagaagnnnnnnnnnnnnnnnnnnnnnnnnnnncaacccttcctcttttctctcatctcacctctctgtgttgattactaatcatcttagatattattgctagtggatgtatggtagatgggttgaagcttttctgataattattacacaatttaaaacaacatatatatttaaaataaatatatacagtaaatatattgagccatgttaacctgccaatgagatctgtgaaaaaataatggcctcatttttctctttttaatttcttttacccttttgtgaagcagctatacgtggcatacatgtatttaaag

SEQ ID NO: 317387 - DNA, 500 bp, Homo Sapiens
gcacgagggttaatctcagtgattccagttggcataaaaatctaccgctcacactagtaaactaacaagtttgcccttcttctcccaccttcaaatgccacccccaattcttacactgtttaaataggaaattgggaagcatttatttttttcccaggttcagcaatcccattttgactgtaaactaaagttagaaagaagagtttagtggtatatcctctgacagactagattgctggtcctatcaattactagctgtataagcttaggtaggtcattttccagagaattctgtttacttatcagtgttactaggctagtaagacctgtttccctagaaaacatagattcttaacctggcgttcatagatggtcttccttaaaactacatatataaagctaagaatggtggtgcacatctatagtcccagctacttgggaggctgaagtgggagtattgcttgagcccaagagttcaagatgagcctggacaacatagc

SEQ ID NO: 317388 - DNA, 1332 bp, Homo Sapiens
  misc_feature (42)..(100): n is a, c, g, or t
  misc_feature (103)..(104): n is a, c, g, or t
  misc_feature (107)..(127): n is a, c, g, or t
  misc_feature (1246)..(1246): n is a, c, g, or t
  misc_feature (1249)..(1249): n is a, c, g, or t
  misc_feature (1269)..(1269): n is a, c, g, or t
  misc_feature (1283)..(1283): n is a, c, g, or t
  misc_feature (1285)..(1287): n is a, c, g, or t
  misc_feature (1299)..(1299): n is a, c, g, or t
  misc_feature (1302)..(1303): n is a, c, g, or t
  misc_feature (1310)..(1310): n is a, c, g, or t
  misc_feature (1314)..(1315): n is a, c, g, or t
  misc_feature (1322)..(1322): n is a, c, g, or t
  misc_feature (1328)..(1329): n is a, c, g, or t
agggattggtttgggagacaggtaaggagcaggttgaattannnnnnnnnnnnnnnnnnnnnnnnnnnnnnnnnnnnnnnnnnnnnnnnnnnnnnnnnnnggnntannnnnnnnnnnnnnnnnnnnnaaagtgaatatacaatttatttaacattcaaacttcattaagacatgtgcaatatggcaattttactggggattaaaccctacctaggattgcttgctggggcttagcaacagggtccagttcacacttagcactaattaaatactttattgaataaatacaataccaaacaaaatgcattcaaatgctttctaaaaaaattttaaaggcctttctactcaggctaatgacaaacacaataaaggcagatatgctagtttaacataattggctgattttatacagcacttatatcttttagtccacaagtatattattaaatgatagagaacatctaatacaaccatttctacagaactaggaaataaatttctaagaaagaaagattttacagaccccatcttttatacccaccccaacagtctaactctaaagaggataaagccaatgactttcctcacaagagctcacgactaacgtcgctttgctatcaaaatctgtatttctgatccgttatgagcattgagacaagattcaaatattcccaaagaaagaagcacaatgcacgttgtgatcgcctattcagcaacagcgagcactgcatccaaaactctcatcccaggaattaaataaggtcagccacattcatgggcatctcctccactgtagtattgtagaaagtctcaatgtcacgaagaatcctcttgtcttcttcagtaacaaagtttatagccacacctttcctcccaaatcgaccccctctgccaattctgtgaatatagttttcacgattggtaggtagatcataatttataaccaaagacacttgttgcacatcaatcccgcgagcgaacaagtcagtagttatcagaacacgacttgaccctgaccggaattccctcatgataacatctctctccttctggtccatgtcaccatgcagagcagaaactgtgaagtctctggcatgcatcttctcagtcagccagttcaccttgcgcctcgtattgagaaaaataacagcctgttttatggtcagtgtttcgtacaagtcacaaagtgtattccacttccattcctctctctcaacattaatataaaactggtttgattcttcanggntcaattcttcctttttcacnagattcgaattggntnnncatgaatttttnggnncttccanacannattggcntttggnngaa

SEQ ID NO: 317389 - DNA, 964 bp, Homo Sapiens
  misc_feature (199)..(199): n is a, c, g, or t
cgcccccccttctttgttcgtcccccatctgttcagccagtgctgctggtcctttttgctgtgttccttgtcttccttccggggtctccccaggtgcccttcaggcgtggggtctttgggggaatgttgggtttctgttggggccagtggttgggtgcgaacggatcagcttggagggtgagtgaggagacccccgtcnacggcccagcctgcccagctagctgcggctcctcccatgccagggctggaggctgcatggacatccttctccacttcctccagctgggtcgggtcctccgacacagactccaatttggacaggaagctccgaatggccttgaaggcctggtctcgcacggatttctcaggatctacagtgagaccgcagagcacaggcaggatcttctgggcacagtcgttcattgagtagaggttgtgggtggcagcaaagcccaggacacccgcaaccccgggacggtgcaaacgggtccctagtggctcggctgaaggcagaggtaaggaccctgtgtctggtgctagcactgaggtaggagccgattttgcccaggcagactgtggtgttgcagcggatggggccctgttcatccttggcctgtagccgtgcaaagtgcttcatcagctccacattgaggttggcctcgttcagctttggggccaggagcagcatggacttgaccgtctgctcccggatggcagggttggtgtccaggaagccatgtacgacgtgggggaagatctgggtgttgactgttggctcgtcaaggtactggatgaactgctccatctgctgcaggaggcggatgcgcatggcccggtcagtggatgagaacatcttgaccaccacagggatgatcttctgctgatactcctcagcgctcaggaacttgcccaccttgaagaggggcgtgaggactaacggccccagcattgccgctgtgccgaa

SEQ ID NO: 317390 - DNA, 914 bp, Homo Sapiens
cacaaagggggacgaacaagggcgaggctaacgcaaatattatggcatattaccgtaattccctcgcgtaagccggggattgtttcccaggtcatcggtgttcggggggatttggggtgcgtcaagtagatgatggtggggtagctctgttccccttttgggaaaatagaatttattgtggctctgattatgtacacgtgagatggcctggctgggccggccgggctcacatggtttgtacaataaatacatctgtggggcgggctctccgcagccgggaagggccaccgccacggttcagtccagcttccgggctcccagcttcatggggcccttggccaccttcctctcggcgcgtttggcctccatctcccgccgccgctcctcgcgcttcttccgggccagctcagccttgacctgtcgactgtcagtctcgaggccctcccagttgtcctcaccccaagagtctggcctcggctgggtgctgggacgtgcagacagggtagcgaaggggtcgcccttgtcgctggactctgggccaccccagttatactcgctggccagccgtgtaccgtcaggaggtggctcctgggagcttggctcctgccagccctgttcccaggagccctcagcttcccagctgctccagtcggactctggggatttggaggatttgtggtcggagttgctgacctgactagcacggctcacttggcccccggtgctccagtcgtcctgctgggccagcacagactcggcctcctgctccaggctgccccagtcttcgtcgtcccatctgtcagcagtgctgctgtcctctgctgtgtccttgtcctcctcctgcgtctcccagtggccttcaggcgagggtctttggggaatgtggtatcccggaattccggaccggtccagcc

SEQ ID NO: 317391 - DNA, 1044 bp, Homo Sapiens
  misc_feature (114)..(114): n is a, c, g, or t
  misc_feature (128)..(128): n is a, c, g, or t
ttccccagccgggaagggcccccccgccacgggttaagttccagcttccggttttcaagctcaaggggcccttggcccacttccttttgggggggtttggcctccatttcccgnccgccgtccctggnggttttttccgggccaggtcagccttgacctgtcgactgtcagtctcgagcccctcccagttgtcttcacccccaggagtctggccttcggctgggtgttgggacggtgcagaccggggtagcgaaggggttcgcccttgtcgctgggactttgggccacccccagttatactcgctggccagccgtgtaccgtcaggaggtggctcctgggagcttggctcctgccagccctgttcccaggagccctcagcttcccagctgctccagtcggactctggggatttggaggatttgtggtcggagttgctgacctgactagcacggctcacttggcccccggtgctccagtcgtcctgctgggccagcacagactcggcctcctgctccaggctgccccagtcttcgtcgtcccatctgtcagcagtgctgctgtcctctgctgtgtccttgtcctcctcctgcgtctcccagtggcctgaggttgtaggggtggcaggaacaggggtgggggctggggcaggaactccttcaggcgtgggtctttggggaatgttggtttctgttggggcagtggttgggtgcgaacggatcagcttggaggtgagtgaggagaccccggtcacggcccagcctgcccagctagctgcggctcctcccatgccagggctggaggctgcatggacatccttctccacttcctccagctgggtcgggtcctccgacacagactccaatttggacaggaagctccgaatggccttgaaggcctggtctcgcacggatttctcaggatctacagtgagaccgcagagcacaggcaggatcttctgggcacagtcgttcattgagtagaggttgtgggtggcagcaaagcccagcctcgtgccgaattcgccacccaggcctcgctaccta

SEQ ID NO: 317392 - DNA, 400 bp, Homo Sapiens
  misc_feature (346)..(346): n is a, c, g, or t
  misc_feature (353)..(353): n is a, c, g, or t
  misc_feature (367)..(367): n is a, c, g, or t
  misc_feature (374)..(374): n is a, c, g, or t
ttttttttgtgaaatagaatttattgtggctctgattatgtacactgtgagatggactggctgggcggccgggttcacatggtttgtacaataaatacatctgtggggcgggctctcccagccgggaagggccaccgccacggttcagtccagcttccgggctcccagcttcatggggcccttgcacctttcctctcggcgcgtttggcctccatctcccgccgccgctcctcgcgcttcttccgggccagctcagccttgacctgtcgactgtcagtctcgaggccctcccagttgtcctcaccccaagagtcttggcctcggctggggtgctggggacgtgcantacaggngtagcgaaggggtntcgcccnttgtcgctgggactctggggccaacc

SEQ ID NO: 317393 - DNA, 1704 bp, Homo Sapiens
  misc_feature (517)..(517): n is a, c, g, or t
tttaccctttgactctcttttaatgccacgggaggatctccttgcccagctcccaggaatgtttgcccttctcagtctgttccacttctaggaggcagccaccaggcctcagccatccggcaagaaaacagaaaatatggggacagaacagtcattcgtgcacatcccagatctcagagagcagcggtgggagctttttgtcctgcagacgcgtgcaaacacttgctctgagtggacgctgctcagggtccggagctcaccagtttcattagcatccgtgggaacatcagtcggtcatggggatggtggatggagacgtaggcatgcagggcttccacatatgtgtgctgcagcctctctacctgggagctggtcctgcacgttgggccggtctgcagagaaggatgctgatagcaatgagcaaggcaaacttggcatcattgagtttcagctcattcatggccctggagaactggaagatggggttgatgaattccacttgcagccctgctttggncaaagtcttcccggttataactgaaatccttgaggaaaggtgatactctcactcccagggttgtacctccgagatgtctccagaagcatcacctcgatcgcagaggtcttcagcagggcaatctggtcctcccggctgagctgcaggaagccgggtagctgtttagcaaagtcaactatctcctgcacagagacgatggccagctcagtgaagtgggcaaagcgctgctgacgggcctcccggctatggggatctggtgccatgggccaaggcgtgactcgaagccggtcagaaaaggagcgccggttacactgttgctgggcagcgacgagcttctcgatcatgcccagttgttccgggctgagctggggcaggatttgggggggtgaggaagccctggggggcaaggatgtggcatgagcctgttcctcctcttgccgcttcagtttcttcaggcggatctgttcttctgacaggacacactccttcccgcatgccagcctgacggcatttgcgaagccgacactcctggccacttgcgacgcatgtaggtgtccatggggcagtggccgccactgtggcagatgtagtgcgctcccttgatgacgctgcggcggaagaatcccttgcagccctcgcagctcagaacattgtagtggaagcccgaggccttgtccccacacacgctgcatagctcgttccccagcattttgggggctggcccctttttccgcttttgtggacggatctctgtgggttctgaagggggctctgccctggtgagcagggctgtgggctctgcagcctccagccccacccctgcagtacccccagcagagtggggcatcctggcttcctctctgaggatgcagctgctgcctccctgggcctggctgcttgcatcctgtgcgcctggcttccacagctccaccgcagagtcaggaggaatgtcaggcacaggggcccccagccacaaggacatctcttcctggagccctggtcattaccaaggcactgtccaaatccccaggccaccagacttcctgggtgggcagtctctggagcccccttgctgggagaagaggatggtgcagtttcctgtccagaagtctcggtggccagccagtgagctggagctgagcacaagcaggacctggagccccagagaagtagcaatttggggaaaa

SEQ ID NO: 317394 - DNA, 494 bp, Homo Sapiens
  misc_feature (17)..(17): n is a, c, g, or t
  misc_feature (92)..(92): n is a, c, g, or t
  misc_feature (108)..(108): n is a, c, g, or t
  misc_feature (185)..(185): n is a, c, g, or t
  misc_feature (437)..(437): n is a, c, g, or t
  misc_feature (440)..(440): n is a, c, g, or t
ctgcctcaaggttccgnaagcctcacccaattttcaattaaccacccgtgggaaaacatcaatcggtccatgggggatggtgggaatggaanacgttaggccatgcanggccttcccacataatgtgtgctgcaagcctcctcctaccctggagctggtccctgccacgttgggcccggtcctgncagagaagaatgctgaatagcaatgaagcaaggccaaactcggcatcattgaagttgcagctcattcatggcccctggagaactcgaagatggggttgatgaattccacttgcagccctgctttggcaaagtcttcccggttataactgaaatccttgaggaaggtgatactctcactcccagggttgtacctccgagatgtctccagaagcatcacctcgatcgcagaggtcttcagcagggcaatctggntcntcccggctgagctgcaggaagccgggtagctgtttagcaaagtcaactatctct

SEQ ID NO: 317395 - DNA, 1638 bp, Homo Sapiens
  misc_feature (68)..(158): n is a, c, g, or t
ggagtgcagtagcgcacgatcatgattcactcaagccttgatctcgcaggctcgagatcctcccaccnnnnnnnnnnnnnnnnnnnnnnnnnnnnnnnnnnnnnnnnnnnnnnnnnnnnnnnnnnnnnnnnnnnnnnnnnnnnnnnnnnnnnnnnnnntgaggaaagaccaaggaaggtgctcagtaatgcagcactccctcctccagagcttggtaagcagggcctgagggagccagcagagccagctatagacaccatccccccagcagggccccaatgtctccactaggtggtgtctcctcatttcctccatggcctacaaacctccctgctaatgcacacagtggctgggccatgggttggcagtggctgactgttcagcagggtacgtgcctgagtgagggctggcctgtcagccccctgggggttctccatctctggcccatggctaggccccccagcaggcaagggtaatcaactgtacttaaaaaagtgagcactgcacgaagggttgcctttggatttctgaaaaatacccccaaggaactgaacggaggggtgtacacactgccaaccacagacagtgctagccagactcaaccacagcagcccttatgttctccagagtagagcccagaggaagattcaaagccagcggagaccagtaaagggtcgcaggaccaaaacaggtgtcaacaggctgtggccttaacctctcaggcccaaagcctttctgctacacaggccttcctcttcactaggaccagatacacgccaagctgctattaggaagcgttttattgaccagcagagcagggatattcatttagcagctcagcttcagaccctcctctcccacatccttttacacaggtgtgtaaagtccttttaatgcaaaaggatttccagagtctccagggacagaaccaggggcttccctgggccaaagtaatcccattccaatctccccactggtcagacaccatcaccccagcccacagtgaccgtgggccttagtcctgggcatcggctttcagagcggctttgtacttccccctcatctccttgggtaatggcaccaggctggggcagggcacctgcccttccacttcacagatgcactcccgcaggcagtactttcgagggccgaagttggctgggtgagaaagctgctttttctcctcctcctcttccctgagggtttcctcattcttccccaagatttttctgatgtgctccatgatctccttattgctcttggtctccacatccaccaggacctgctccccagaatctaagtagaatcgcaggaagggtgacggcgtcatgttcttaaacatcatgatctgcacccaagggtttttgtattgaatctgaggtatgttgaaaaacacaaacttcctggcgccctcgcccagctccccatgcgtgttgtaattcactgtcatgaccttcacggagtccttgaacaccacgttcccctggctcagatattgcagggtgcggcggatggggaagcggcccttcatgggcatggcggcaacggtggcggggccgaccccacgggccgcgagccgagcagcgacgagaaaggactagctagcacccgcgcggatctcacgcggcttctcccccc

SEQ ID NO: 317396 - DNA, 603 bp, Homo Sapiens
gacatgttagactgatggtgcccgttgtggtggggggaacaggacatcatttaattgcctctagggtcctcctgggagagggactgcggggcctttggcagagctctggctgatggaaccaacagaggtgcccatcagccagtgccaggcaggatggcggccccaatgcttggctgggggcagccagcatttggggctgttgcttaagacaatttctgagactaatgggtaaggaatgttgcctttagatggaggagaggggactacatttagagaggagggaggagaagtggcctgcattgggggagggactctaaggttaggttaggaatgacagggagttggtcaaaaggtccttcatggccaggtgaaggctggggggagtgtggtgatggagtccagcaggggaactctggacaggcttgactcaagccagcttcaggaactcctgcagcgtgttttgttccacagcctccacgaagagctcatagtcctcacaggactggtccccgttgaaaatctgggtggcgtgccctggggttgcctgccaagggtccgatttcaatcctaagggcggttcactggggtttgggtgagactgct

SEQ ID NO: 317397 - DNA, 863 bp, Homo Sapiens
  misc_feature (42)..(43): n is a, c, g, or t
  misc_feature (49)..(50): n is a, c, g, or t
  misc_feature (54)..(55): n is a, c, g, or t
  misc_feature (58)..(59): n is a, c, g, or t
aatttggtattggtggtccggaggttatggtgtggtttgtgnntgtttnnggtnnttnntttccaaatggaaaccaggcccatccatttaatttgcctttagggggtcctcctgggagaggggactgcggggccctttggcagagctctggctgatggacccaacagaggtgcccatcagccagtgccaggcaggatggcggccccaatgcttggctgggggcagccagcatttggggctgttgcttaagacaatttctgagactaatgggtaaggaatgttgcctttagatggaggagaggggactacatttagagaggagggaggagaagtggcctgcattgggggagggactctaaggttaggttaggaatgacagggagttggtcaaaaggtccttcatggccaggtgaaggctggggggagtgtggtgatggagtccagcaggggaactctggacaggcttgactcaagccagcttcaggaactcctgcagcgtgttttgttccacagcctccacgaagagctcatagtccccacagtactggtccccgttgacaatctggggtggggtggccttggggttgcctgccaaggctcgcatctcatccctcagggcgttgtcctgggagatgtccactagctggtattggatgcgcttcccatccaggattcgggtcacctcgctctgctgggacttgatttcgcgggagccggtgaccgacgtgctgtagacgcgcaggccgctcatgctgggggtagacagacgggccggcgggcagagggcggcggtagcggcagctgcactgccgggagacgacgccgccgccgtgctcgggagcggtttccttcctgctccgccc

SEQ ID NO: 317398 - DNA, 921 bp, Homo Sapiens
  misc_feature (96)..(96): n is a, c, g, or t
agggcccaaaaaggaaaggttctaagaaagatttctttgaaggcgcaaggggcggccccacaaggttatcggccttcgcccgtcccgcgcctcctnccccggagggaaccaggaaccatccttttaatttcccctctaggggtccttcctggggaaaggggaattggcgggcccctttggccagaagttttgggctggatgggaacccacccagagggtggccccttcaagcccagttgccaggcacagggattggcgggcccccaatgcttggctttggggggcagcccaggcatttgggggctgttgctttaaggccaattttttgagacctaatgggtaacgggaatgttgcctttagatggaaggagagggggattccatttagagaggagggaggagaagtggcctgcattgggggagggacctctaaggttaggttagggaatgacagggagttggtcaaaaggtcctttcatggccaggtgaaggctggggggagtgtggtgatggagtccagcaggggaactctggacaggcttgactcaagccagcttcaggaactcctgcagcgtgttttgttccacagcctccacgaagagctcatagtccccacagtactggtccccgttgacaatctggggtggggtggccttggggttgcctgccaaggctcgcatctcatccctcagggcgttgtcctgggagatgtccactagctggtattggatgcgcttcccatccaggattcgggtcacctcgctctgctgggacttgatttcgcgggagccggtgaccgacgtgctgtagacgcgcaggccgctcatgctgggggtagacagacgggccggcgggcagagggcggcggtagcggcagctgcactgccgggagacgacgccgccgccgtgctcgggagcccc

SEQ ID NO: 317399 - DNA, 642 bp, Homo Sapiens
  misc_feature (589)..(589): n is a, c, g, or t
  misc_feature (630)..(630): n is a, c, g, or t
tcctaaagcactgggattacaagcatgagccaccatgcctgatccataaattgttctactgataccatttggttttgttagaatttgggggggctgtagaaaacaaggttacagtcttcattagtatttctttttagcaataacaacaaaataggcaattagaccagtgttcatttggtacagtctttaaatcggtcatccaattaacctttaaaaagtaggttatgctcttaaattgtattggttctttaatatgtgttataccagagtatgcctcaaattttatgtagttgaatttgtagaacaaatttggggatattcattttatttttccttttatatgaaattgtataagtacattagcttgacttaaattataaaaaaatatatatatgaagaagaatgtagaccctataatgttttttgtctttgactttttggcttttatgtacctcattttttctgattgagaacaagttttgaaaaagtgattcacttgttggttttcattgtggcaaaactttaaattttaagtcatcacactatgagaattgtttgtacacatttataaatttttttaaagtatgtnaagtaaggattttttctccattcttcactcacaaaggaaancatttttatgga

SEQ ID NO: 317400 - DNA, 808 bp, Homo Sapiens
tgagccatagcacctggtgcttgtttctctgtactcaatctttgtgtccctggtcttctggcagagctgggaggaagggggctcaccgagcctggatgtcaacgcccagagcctcatccttgaggtaaaagaaagtcttatttgggaccagctggacctcaaaagatgggaggacatattccttcacatcaaaggcagcctcgaacttctgcttgggtgtactttggtagctgggcttcgatggtccaggtccccaaactgccaagctctgggaggtgaaaggagctgaaaaagaagccatccttggccatcagattctggctaatcccggtgattccctttgggttctgtggggatagggggtggggctggtgactgccctctgggagggccctggtggctcatgcccccaggactttagcacaccgtgttaccccagtgtccaggatccaccaccaccccccaccccttattgggaaagaccaccttgatgtccagagtgaatgtcctggtcacagggtccatcttgtggttcacagtgaacacccggtagtgaaccaagtactcaggggtgtagatggtcttctccgtctggataaagatgtagccagcatgaagagccaccagcaccatcttctccatgaatgaggaggggaggtacaccaggctctcgggaacagaggctcagcgtggatgagggggcttcccaaaagaagcagaatccaccctaggggccagggcatttccatggtgggtggcagggtgacaggaggccacaggctgcagctcgtgccgaattcggcacgag

SEQ ID NO: 317401 - DNA, 777 bp, Homo Sapiens
ttcttgtgttttactctcttggtttattctgaaagactttattaaaagcgtttctattgtaagaacacaaaatattttaagccagtaacaacatttaaattaaaaagatataaacatgtcaaaggaatgaaacctagatgttttattatgtgtgaattatgagcgcttacctggccttgtgtataacgtataaaccttcacctgttgcatgtcattcagtctctgcagcaacattccttgtgtccatgtgggtgtttctatgtgtgactgtgaatatctgtatgtaaatggcttgtctcttgggtgcatttgtgggggtgggtatccaccgctattatcattgctttctttttcagaaagtgtttccaatctttgcttcattttactcaacagaaatgaggaggttggtttatatttcatgtcttttctctttcagatacagctggtcatgccacagatagtgaagaagaataaactcttcagaagtcctgagatttaaagatggcataatcacttccaacatcccattccatactctggaagaagtagaccatgatgctttccagcagtaagccactcaacacggccaagaaggagagcttacggttgatgtttagggtcactctaattgcctgaaaatttgatgtaagaacaaatactttaatgagtttgaggcacacagatgtgtagtcatgttcccaaatgacagctggaatcagcaagagttttccgtagctagataataataatgctttcagcagcaaaatgaagttgggc

SEQ ID NO: 317402 - DNA, 1158 bp, Homo Sapiens
  misc_feature (362)..(362): n is a, c, g, or t
ggcttgtgggaaggggaacgtggatggggtggcagcgactcctactgctgcctcggcctcctgccagtacaggtgcatcgaatgcaaccaggaggccaaagagttgtaccgagactataaccacggtgtgctgaagataaccatctgtaaatcctgccagaaacctgtagacaaatatatcgagtatgatcctgttatcatcttgattaatgctatattgtgcaaagctcaggcctacagacatattcttttcaatactcaaataaatatccatggaaaactctgcatattttgtttgctttgtgaagcatacctgaggtggtggcagcttcaagattccaaccagaatactgcccctgatngacttggatcagatatgctaaggaatggggatttctatagaatgtttgcgattgctgctttagaacaaactgcctattttattggcatttttaccttcctgtgggtagaacggcccatgacggcaaaaaaaagcccaacttcattttgctgctgaaagcattattattatctagctacggaaaactcttgctgattccagctgtcatttgggaacatgactacacatctgtgtgcctcaaactcattaaagtatttgttcttacatcaaattttcaggcaattagagtgaccctaaacatcaaccgtaagctctccttcttggccgtgttgagtggcttactgctggaaagcatcatggtctacttcttccagagtatggaatgggatgttggaagtgattatgccatctttaaatctcaggacttctgaagaggtcctgcagtgcccttgtctccacctaaccagatacggtcagctttgcctctccatggaataagtgaagactttccaaaaactccagtttgcagtgcttactttttccgttgacctccgagtgctcagcttaacacctacagcagtcacgtgcccaagaacttctgacattgccccaggttttattcttcttcactatctgtggcatgaccagctgtatctgaaagagaaaagacatgaaatataaaccaacctcctcatttctgttgagtaaaatgaagcaaagattggaaacactttctgaaaaagaaagcaatgataatagcggtggatacccacccccacaaatgcacccaagagaca

SEQ ID NO: 317403 - DNA, 502 bp, Homo Sapiens
gttccgggggcggtccccagcagccgcgcattccagagccagcagcgcgtcctggccgctcctgcgctctcccgcctcccggggctcggaggagccggggcacgttccaggagctgcctagggctgaggttccaggcctgggggtcgcttccagctgccagatcccgtgcagtcctggggaccctgagaagcaccgagccatccctgacccaggaactttccgcagactcgccgccatctgggagtgaagcaacatggatgcagtcagccaagtccccatggaagtcgtgcttcccaagcacatcctggatatctgggttattgtcctcatcatcctggccaccattgtcatcatgacctcgttgttgctgtgcccagccactgcagtaatcatctatcgcatgcggactcatccgatccttagtggggctgtttgagagcctcccaagagggccgggtgagggatgaggacaggcatcctatccccagcctcttcctgtct

SEQ ID NO: 317404 - DNA, 817 bp, Homo Sapiens
  misc_feature (210)..(218): n is a, c, g, or t
agaaaacattaagtagttctttaagataagagtacatttataataccatgtgtaagtagatacttgatgactatttttgatgggtattttatgtcttttcataaaaagaaacatctttgaaggttattttacattgggttatatagtttgttgggctatatagaacattaactgtgaatataacatttaagtgaatattcatgttaaaannnnnnnnnaatgcatttacatcctagatttaacattgttgggccatttaaaatgtgcatattggagcagaacattaaatctgtttccattttagtcacagaaaagaaaagcagagtcagctactgagagctctggaaagaaggatgtcaagaaggtgaaatcctaaagcctagaaataaagttttaaatgggaaactgctattttcttgttcccatcttcaaatgctaattgccagttccagtgtattcatggtactctaagaaaaatctctttggttttgatttcttgcatattttatatattttacaatgctttctacctgaaatgtgtagctttatattttatggcattctagtatttttgtgtactgtattttgtgcatttcatgtcttcatcaaaatcctctcagtccttgttcttttgaagcttgtgctgaggttttagcttttctatgttttatatgccgctgctttgaaagagaacctagattctatagttgtattattgttgtttcatactttaaatttatatggctgtggaaaaacgaattaaaatgttttgaggagagagaactcccccgcaacaagaccgggatgaggggcctgg

SEQ ID NO: 317405 - DNA, 873 bp, Homo Sapiens
  misc_feature (38)..(38): n is a, c, g, or t
  misc_feature (50)..(50): n is a, c, g, or t
  misc_feature (261)..(261): n is a, c, g, or t
ctgcctaaggaaattctggaagtccggtacgatgtacnggccccgtaagnacccccggaaatgttgtagggtatatccatccttgtaaaatcagttagtgaaaaaagagtggtttaaagtcctgaactccagagataagtctttcccagatgaaattgacttcctgcccttaaagcttatttgccctagccagttctttggcttcttggtcagcttggcttgaatcgcttccagattttaaaggcaccaggacatccttcnatggcaagagccacatccttcacaacagaattcttgtgattttttggcaagtgctcttctttcctcaggagtgtaatctagagaacctatggctccctctccttttgttggcataaacccaatgatggctaataatgctgtccttatactccacgaagactgccaagtttcaggatgatggcctgagatgctcaaacagattttcttgcccacttcaaatcgaccattagccgttaggagaataatgcttggtggtttcatgggatactctggtggcagtactatccgcccgtgataaactcctccatcaaaatcggagtctgggggccctctaaccgtgaagtgccattcaaaaaggttatcctctaaaggctgcgcatggtaatgatctgttggatctttcaattctgccgcttctttcattaaacgtttaacagccggactcttcaggttgtagcgggtctccatggtgggtcgctggcttggctccggcctcccgggccgctgccacctcctctccacgcggccgctgcccgggtctcagcgcggctcgggcggacggggcctggccgaggagcctcggcaaatgccgcccagtccagcctggactgc

SEQ ID NO: 317406 - DNA, 487 bp, Homo Sapiens
  misc_feature (11)..(11): n is a, c, g, or t
  misc_feature (477)..(477): n is a, c, g, or t
aatgatttganaataggtagaattgctatttcacctaaacctgtatcccccccctttctttccctctgtgaacaggcactcaggctcaccagtttgcacagggtggtccccagtgatggtatgccatccccaactaagatggcaagagaagagctgctgaagctctgcccaggcccatgagtagagctgcaggtgcctccctgttcccaggcttccctctactgagctcattcaggggccttctgaccactctgaacagctgccgtgatgctgcaggatgcatcaggttgaaggaacttggaaacagatttctcagtgggcaaatcctagactccagcacagccgacctagagctggaaagacccttgagagggtgtcactagcagccccctttccacaaagatgctggagcccagaagcagagaagtaggctcagagcgaggactgagacctcgaatgctcctttccctctcggcnacctcgtgcc

SEQ ID NO: 317407 - DNA, 622 bp, Homo Sapiens
  misc_feature (522)..(522): n is a, c, g, or t
gggatgtttcgtaaagtgttgttggcatgtgcggtttcaactgtattttaggatttgaaatagaattcctttggctcctatcagcttagttcatggtagagcccttctgtagccgtgaaagctagcagagagtctagcttttaaattttcttgcatttgctccaggtaattgaagacttgttatgggacaggtactctttcagacacttgacacatatgaggaatggcaggcactgaggacgttgaatgacttgcactatgtcttctatcgatagcggctccaggctctccgtggttagcatatgttgttccagagcctacactctataccactgttaaaccaggacaggttgtaacagttcttaatctttaatctttataacaagtgtattttcaaggacctctgaactaatctcgattgacacactctagagctcttgaagtgcaaccagctgcgttgatcggtcttttcacagatatctgaggtacagctcattaacataatggatgtagacccgaggnggcagaggtgggaagacaggagatgtgagagaagtcaattctacaggattacatgcattacataggtgcctagcgctgtgaaggattctgtgctctgact

SEQ ID NO: 317408 - DNA, 848 bp, Homo Sapiens
  misc_feature (30)..(30): n is a, c, g, or t
ccccaaccctattaaacaaaggcctccacngggtccactctggtgccacaaacccctacaatgaagacctaccctgccaagtccatttggctgtccaccccccacttatggaaatgtccacctatggaatccaagatctgtaactgggggaacagagatggacccaaagtgaactcccctgtccccctggggtccacacagcacatgccaacgaaagtgccaacactgtttcctggtactaagactgctctggctttgtagtagtcagggaggctgaaatttgaaccatcaaaaagatgatgcaggaacaaggtcaactttgcatttgctggttactccggaatactggtaggtcaagctgtagcaattaagaaaatagctggttagataaggattgtctgcagacttgtcaaataaatttaaaatacatgaagggttattttgttagataagtgaccttggtacaacagtacctatgcctcaggaccacgatgaggactgactgagctaacaaaatgcaaaaggttcaaactcacttatctgctttttgcagatggccagctttcacttctgccatctccaggacagaggcatagagtcagtgcttggtactctggaacaaacagcttggggctcaattttgatacccctcccttctcaagcgggaagcggtggattagagacctccttgcccatctctaaactttaggacccacactaaaaatttttaagtcaatttcagaatgcacttgtttagaaagcaaacctccccattccctcattcttaactagagatatatacaattattcacagttacatagctgtatgtatgttccctattaagcgc

SEQ ID NO: 317409 - DNA, 694 bp, Homo Sapiens
aaaaaattaccattttgaattgttaattggctataacaaagatcagtaatacaaatttaaaacattcataaaactgagctgaaaacatgctcccaagcctagtgggcagtaaggaatctggccaatatactgtacaacttgaacattcagttcttaagtagtttacaacatggtttagccctcttttaataataataataaaaaggtaggaatatcttgtattcctcccgctagttggatgtattaaagtgctttcacaaaactaagaccatggtgttaactcaatataaaaggttgaaaagatgtctccttcttttcttcagaaagttaatgttccctctccatatttgtatttgctcaaagatgaagctttgcatctgggaagtccttgagtagagtgtctcagaaatagaaagcctggactctcaaggcttcattcctttggccaacatctttggagcctctcctttatgcaaaacacagtggccggtgccagggcagcacacaagcgtccacaggagcgcaggccctgctgtgaggggcacagggaagggcccaactaggagtgccaacaaccgcctaaaatacagcagggcggctgcacgtgttaacgtgcgtgtaattgactacagcaagaagtatgaggatctgtccatatatgacgagttccccttcctctcgtgccgtattccta

SEQ ID NO: 317410 - DNA, 933 bp, Homo Sapiens
  misc_feature (82)..(222): n is a, c, g, or t
  misc_feature (289)..(289): n is a, c, g, or t
taggaatacggcacgagtctctctcagatcatgcctgtcaggctatatgtctgtatccttgttacttcaagtgcacactgtnnnnnnnnnnnnnnnnnnnnnnnnnnnnnnnnnnnnnnnnnnnnnnnnnnnnnnnnnnnnnnnnnnnnnnnnnnnnnnnnnnnnnnnnnnnnnnnnnnnnnnnnnnnnnnnnnnnnnnnnnnnnnnnnnnnnnnnnnnnnngtgtaggtttctggttacttatagagttgttccccttactcaggtgcccaccccagaggtggatggnggagcgaggcggaccatgtgacttggcatgaacacactgtggccacaagatgcacatctgatacataatctaagactgttgggttttcctttagctcatagcatttccatcaagggtattggtagtctctagttgctgagacaaagtgaatagagaatctcatgatttatttaaaaacaaaactattttaatatgtccccattttatttatatcttactttttattagcccaaagataattaaacccgaaaatactgtagactctgtataatttaggcagttttatgaatatggattttaactctgacctaaatgagctgtctagtgactcaacaatagctacctcttgcttcaagatagtaggaactgatcagcttataaagctgatgctgcccagttctgttctgagtccagtgtgcatagctctggctcccaccatgcccgttagcctgtgaaattgatttttttaaatggttgtacaggcatttggcctatagccaaagaaatgattgagcaagtgagtcctgtttctgtattgctctatgaataagtagttagaccattcaagactgctgtacatgagtcattcattcccagggacacttatagttcttttacatttggtgcattcagcatcctagaag

SEQ ID NO: 317411 - DNA, 1529 bp, Homo Sapiens
  misc_feature (1435)..(1435): n is a, c, g, or t
tttttagttataggctttgtttattaaaatcttttaaacattctaaacttcttgtgtaatttatcatatttaattttctattttagcacttcaaatcattgatatgacaagattataaccaattaagacaaaacattctcatatatttaagcatctcttgtaaatctaatacattaaacttatagtaaatctagtctaatacttttcatgagctaagttaaatattcttatacctttcaacttcaaatcacaaacgtaaaatcaatttcacatttcaaattgggaatcataggctttttaaagattcaaatcacttaaggagcatacacaagattagtcctaaacttaacatggaaattatcaatattatggatttgaattattgcattatttccataatgaattctacacattcccagagttggaaaatcatttacccaataagggaacagaggtgctatttactattgtcaaggactcatgcccacaatatggtggacaactcagatgagcagaggttgcttaggatctctggtcataagacagtactccagcgctgggagacagtgccctgagtgctgtggttactatgggaacaggaggctcccagttttcacccttcagagggttttgattttagaacctttattccagttacctcccaagtattatttttaattttaattattagagtagaaggaagttggcgactccacctaggttagctaacaacttcctttatgatctcattggcttttgcgtttacttggcactctgcaggcattgctaacatatttccatcctgctctaaagacatttaaatgctgttgaattcaatcctgaacatttggctctgagccatgactctcaggtcatgataataacataaaccaatcccctgcctcatgactttttaggaatttcccaaatgggattatagcctctcacatttcattagaactactgtatttagcttggcaggatcttagctttgggggctgttctcccttgagcctgcccctggatgtgctggacgtcatttgctgaggccacccagatagggagcagacctggcatcagccttagatgcgtcagcccattccctccactaccctgctgggagttccttaccattcccacctccagttctctgctattcaccctctctaaaaggtagataaacgcaacgttttttgagtgtccagcctattttgtgggctgagtggggcaggagaagggaggcacagtagcagcagagctgaagccacatttcttctggacctctcattactgtgtatatatgtgtgaattgaaaacacgatgttacctttgtttccatttcacacaaattataagagggcactctgctgatacctagcataatagtcttccacttactgatattcctaaaagatgcttacagaatgtcttttanaatatcacatcagtgtgaatactctgtgggaactactatatatagaagatctagtctgtgtgtggtggcgtgcacgtgtatcacagctcgtgcc

SEQ ID NO: 317412 - DNA, 1201 bp, Homo Sapiens
  misc_feature (197)..(197): n is a, c, g, or t
  misc_feature (318)..(318): n is a, c, g, or t
aagtatagagttggagtaatcgttgttttaaaggtaacccaaaggagaaggtcaaagatcccctaaaaaatttcaagggagcccagaaagccccgtgcttcctggcctgcccccaggatccactcgtttcaataaataacccccagaagccatttcattcaggaaacaaggggcaggcagaaaggtgacagattttntgaacagtacaaaaccaaaagcttggcgtgatagacaatcacccaggccccactattctttagccagttccctcagagcatttttagtatggcttttagagtatattaacagccccatttnttgtccactgatggggttcagatggtctgaggtgttgtcttccaagtacgcctcaaccctcaagtgggaaatgtgaggcagaactgatatccatgttaacagggaatcgacacttctcagaaacttggcaacgattctacattcagtgagggaggacttgtcagagtcagacaggaaaagcagagagcggcccacgccccagttgcagcactctggcgcccttggtcatggaggtgtgggtggagcaattcaagcagcatgcaggcattggacgggaaataatccagcgttaggtcagtcttaagaaagtgcttcatgcctatgatttgtggccttgggttctgaatccaggggtctgagagacatgtgacttgaaaatatgaagccagatacattctccagatcagagtaaaagggggtctattgggggttgcatacacagtctcaaactccttctcctgatggtcatcttagatcctgttagacttgctttctggctttgctagctgctgccggcatgaaggccctcagacggctcagaacattctaggtatgactagagacatgaaaacctagtccctcagtgggcttggtaggtcctctacatatttggctcaatgcagaacccaaaacaggagctttctggtgacagcacgacattctacaatctgctctattcaaatatttatcggatccattttgagagaagaaaagcaccagagactgcttggaaagggacagcttcatttccaaatgagtcttcttttctttccacagaccaccacatgaagacagctgagtacaaggcatgcctgtcaacttgtctgtcttctcttagaaaagttctatgtgtcacttaaccacccttggtcagaagagtcac

SEQ ID NO: 317413 - DNA, 550 bp, Homo Sapiens
caatgcttatgaaagctctcatcccaggataagcatctcctagaaaacatcttcgtccatgtaccagattaatcatatttattctgcagttgatatttatgccacatgttctttctgggtagagaagcctgaagttattctgtttatcctgaccttggaaaagacaaagcagctcatgtccccagggatctaaatatttcactgggaatgatcacccagtgtctccatcacctcagccagcatttctctattcacagctgcactgaagagcttccttcctggcttgtgtctccataaggggatacgatggcaaggtctctggactgtgaacttcatgcctgcttctcaggtttcttctcctcctccatttggaaggctggagcttgctggagttgagtatctcttctcctcaggtcagttaagttctgataaaaccctagtgggttaggctctggttagacagcttcccctgagggcagaccacaacctggtaagtgacagggctggacaggtcagtgcaacttcagagtcgctcgtgccgtactcctac

SEQ ID NO: 317414 - DNA, 472 bp, Homo Sapiens
  misc_feature (75)..(83): n is a, c, g, or t
gacgtagaaacagcaggtctaagcaaaaggtgcatgagcaagagcaagtaacatccctattattatgacgcagannnnnnnnnaagttgaaattcaatttttgggctgctactagagaggacatgtgcgaatatctattatttacgcttcaaactaaagtcagccgtttttctttttcaagatatgtggcatctggctcataatcaattgcaagaaaagcccaactctatttgacccagaaagagctctttcctataccctctcctcccacttacatcacagatggcgactgaagcttaaggtttaatgcccgaccctaaagccactcatcctaaaagacagggctccagatggatgctgtatggcagaggataaggcgctatgagaagctgccaagcctcagatgtgcagctgggctgaataccgacgccagcgcctagcgcccattactgtgcctcgtgccgtactccta

SEQ ID NO: 317415 - DNA, 1301 bp, Homo Sapiens
  misc_feature (1275)..(1275): n is a, c, g, or t
tgcactttgggattaattatttttcgagatcacgttgtacgttatgggtgtattagggatcatctacggcaaactctattggatatgattgcaagagagcgggaaggagaagtcgtagacacgaggcgcaataagaaatgcttgccagatgttaatgattttaggtctcgaaggaagatcagtctatgaagaagattttgaggctccttttttggaaatgtctgcagaattttttcagatggaaagccagaaatttttagcagaaaatagtgcttcagtatatataaagaaagtagaagctagaattaatgaagaaatagaacgagtgatgcactgccttgacaaatcaacggaagaaccaattgtaaaggtggttgaaagggaactcatttccaagcacatgaagactatagtagaaatggagaattctgggctagtacatatgttgaaaaatggaaagacagaagaccttggttgcatgtacaagttatttagtcgtgtgccaaatggtttgaaaacaatgtgtgagtgtatgagttcctatttgagggagcaaggtaaagctcttgtttctgaagaaggagaaggaaagaatcctgttgactatatccagggcttattggatctgaagagtaggttcgatcgcttcctcctggaatcattcaacaatgaccgtctctttaaacaaactattgcgggtgactttgagtattttctcaacctcaactccaggtctcctgaatacctctcattatttattgatgataagctgaaaaagggagtcaaagggctaacagaacaagaagtagaaacaatattggataaagcaatggtcctttttaggtttatgcaagaaaaagatgtatttgaacgttattataaacaacacttggcaaggagacttctcacaaataaaagtgtttctgatgactctgaaaaaaacatgatatctaagttaaagactgaatgtggatgtcagttcacgtcaaaactggaaggaatgtttagggatatgagcatctcaaacacaacgatggatgaattcaggcaacatctacaggcaactggtgtatctttaggtggtgttgatcttacagtccgggtgctcacgacaggatattggcccactcagtcagccacaccaaagtgcaacatcccaccagcaccaagacatgcttttgaggatattcaggaaggttctactttaggcccaaacacagtgggtcgacagcttcacactcccggcttcatttggggtttttgccggatcttcanttgcccacctttttttggggtcccgt

SEQ ID NO: 317416 - DNA, 832 bp, Homo Sapiens
actgctgtcctatccccatgtccaccccttctcctcctggactcacggccgcgttggatgtgggtgaccactccttctttcttgaaaccctctgacctctgagatttggtcccctctcaggccaagacttcttactcttcacagaccggcttcttcctgctgcccctgaaaccatgatgttacccagggttccagcctcagctctccttctgctcatggccttccctctcctgggtgatgccaagcacccccagggctttgacacccagctgtctggggattcttccccctctcctccacactgtccctccagcctggactccaatcaatggcagcctgccagacacctccggctgggtattccacaccacgttcaaaatgcaattcttccctcggagactcactcttccccctgtctccaactcatcttccaaggtcccccaggcctgaagcagatgcatctcagacctcctccccacctcacccagttggtcaccgaggtctgctaatccttgctccgaaatgtttcacagctctgtccttttcgagctgttggctccagttccagctgcatctctagcctgctatgttcagcattttcctggtggctgtgtcttgtttccctcaaaggcacctgtgcactgtcatcagagtcatcttataatgagtctggagtcttgctgtgctggaggatggggatgagctccctcagagtgtgagcctcaacagtcctcgcccacacacccgacagtgtgcgcccactgtccccagccttgcgtgctgcttctgtctcccgagtcacatgggagaacctcacacagctgactgttct

SEQ ID NO: 317417 - DNA, 1000 bp, Homo Sapiens
tttttttcagtaatagactcgtttatttctcagaatttagtttgctgcttgatattacctgcaaatgtgaggcaatcacacaatgtccttgaggctctaatcccagacttgtctgagcaccgtccacaggcagctcggcccatcagaggtctgaaacaaacctcctaacttgggccaggtattttggtttcaaatagtcacccagctcatccttagtgacccacacatgatggcccttattcccagcctgggaaaagtctccagttaatagcagtgctttgaagaagaacaccttggctccgaggttactctctgtccgcattgcctgggggaacttgaatgtgtagtgcccacagggtgcatttcctaggaacttggcttccatgttgttttctgagagtgtggccagggttcgttcagctgttcctcgaagggtctccccaggctgccactctgcctggggcagtatccaaacatcctggtctccaaacttctctctgactaacaggacaaggttcctgtctagcttcctgttcagggatgttcggtcattcttttcatcagcttctgttatgcgagctccaagtttgaactgtagaaatttctgctcccacatatcttccaaatcttgcgccagcaatatatcctgttcatcttcttcatcatgaaggtcagctttcttctttgccagtcgctggttttcatccagagcacgaagctcgtggtctgaatacaggcttctctctatctcaatctgctgcagtagagacgccatctcttcctgcaatggggtcaacggcttggagactacaggtggccgctgcaggcacaacgcgcccaacaagcgccatggggatccgttgcttgagggtgcggctgcaagagccaggctgcgagagcttagactgccggcccagagcctctcgaaccgccgccaaccccccgccacccctaacagcgtccgccttacgggcgccgccatctttcgttctcccacaat

SEQ ID NO: 317418 - DNA, 1001 bp, Homo Sapiens
cccaccacaattgttcccccttgggaagggcctcccttaaattccccccaggaccttgggttttggaagcgccccccgttccccaccaaggccagggtttcgggccccattccaggagggttctggaaaccaaaaacctccctaaatttgggggccccaggttatttttgggtttccaaatagtccacccccagcttcatcccttaagtgaccccacaccatgaatggccccttatttcccaggcctggggaaaagtctcccagttaataagcagtgctttgaagaagaacaccttggctcggaggttactctctgtccgcattgcctgggggaacttgaaatgtgtagtgcccacaggggtgcatttcctaggaacttgggcttcccatgttgttttctgagagtgtggccaggggttcgttcagctgttcctcgaagggtctccccaggctgccactctgcctggggcagtatccaaacatcctggtctccaaacttctctctgactaacaggacaaggttcctgtctagcttcctgttcagggatgttcggtcattcttttcatcagcttctgttatgcgagctccaagtttgaactgtagaaatttctgctcccacatatcttccaaatcttgcgccagcaatatatcctgttcatcttcttcatcatgaaggtcagctttcttctttgccagtcgctggttttcatccagagcacgaagctcgtggtctgaatacaggcttctctctatctcaatctgctgcagtagagacgccatctcttcctgcaatggggtcaacggcttggagactacaggtggccgctgcaggcacaacgcgcccaacaagcgccatggggatccgttgcttgagggtgcggctgcaagagccaggctgcgagagcttagactgccggcccagagcctctcgaaccgccgccaaccccccgccacccctaacagcgtcccctcgtgccgattcgccacccaggcctcgcta

SEQ ID NO: 317419 - DNA, 1043 bp, Homo Sapiens
  misc_feature (164)..(254): n is a, c, g, or t
  misc_feature (877)..(877): n is a, c, g, or t
  misc_feature (935)..(935): n is a, c, g, or t
  misc_feature (938)..(938): n is a, c, g, or t
  misc_feature (1001)..(1001): n is a, c, g, or t
ggggggggagattcccaaagccctatggtcatggcccaggggtttttccttggggaacacaggtatgggcccaagttcccctttcccttttggggggccggcggccccaaaagagaatggtttatgaaaaattttttgaggggccgagagcgggccggacaagnnnnnnnnnnnnnnnnnnnnnnnnnnnnnnnnnnnnnnnnnnnnnnnnnnnnnnnnnnnnnnnnnnnnnnnnnnnnnnnnnnnnnnnnnnncacagcatattaggatgaactttatttttacattgttgtacaattcattggtaaacttaaaaaaatacaaatacatgatttgattgttgtcccagaaaagacttttgtcacattgccagctgtttccctcagcgtctcctgctcctgtcagcaattctgtatgtaactgcaataatttgtgtgacttgagaaaggtgtgccaagggcgtcctcacagtgagaagggaccaggcagacatcctggggccctcggcttcctcctgcctcccctcccaggggatgtgatgacaggaccccgaagctgtggctctgacaggtgggatctctaaaggggacagtcccatgaaagacacacggggacaccagcttcactgggagcttttgctttcccaaacaagatgtgggcagcatgactccagcctctggaacccaacaatgtatcttccacaaacttttgataagcttgcaaataaaacagaatgaaacctcactagcctgaaggaacacactgagtgcgggcgggaaaccccgggaagggctcagtgggttccagcagttccttacgcgaggccctgctgcccagcacagctccaggacacaccgaggacagtgccacaggctgngcagcccgaggctgtggagcttgcaggatggcgatggagagggagagtttcctgaaangcnctcctggggttttctgtctgttcctattcattactgctacccttcagaaagagcaattctgtncaaacggcctgaatcttttctggaacaacctaaaggttacag

SEQ ID NO: 317420 - DNA, 682 bp, Homo Sapiens
ttttttgagtttcaaaggatttatttgatttccccacatgatcacaaccatggttttacattgatagagtctgttgccactgacaaacagaatgcagatgaaaacaaacgcactcctttcctctcaaaggtacacagtgggggtgccaggcttcttgtgagggaggtgtcccttgaagtctctgaacagtctggggattcaggacctgattctaattgcttaaaacaactcggaggcaaaagatattttccaagaggagatgcatgctgtgtgcagtctcgatgtgactgcacacaggaaagggcgatgcagatgcatctgaatggagggcaggcctcctccctcttgtccctgtgctcagcacccccacctcaccctgctcagtgttgcaatgctgccttgactattgttgttacataaaatacaaatgtactcgtttctcaggcaggaagggtgatgatattttacaaggagaactgtaagactgtgcgtgcttactgcgggcacagagcttcccgtggcgctgagtcaacacccagcatcagctgtgaacatctgctgtcttttcagctcattaagaaaaacaagaggctcctgctgcatgcagtgtgtgagggaaagatcaactgactgggtgctgaagacatttttaagcaagatgtcacagcatattaggatgaac

SEQ ID NO: 317421 - DNA, 583 bp, Homo Sapiens
ttgcatttcatattaggatgaactttattattacattgttgtacaattcattggtaaacttaaaaaaatacaaatacatgatttgactgttgtcccagaaaagaattttgtcacattgccagctgtttcctcagcatctcctgctcctgtcagcaattctgtatgtaactgcaatagtttgtgtgacttgagaaagatgtgccaagggcgtcctcacagtgagaagggaccaggcagaaatcctggggccctcagcctccttctgcctcccctcccgggggatgtgatgacaggaccccgaagctatggctgtgacaggtggggatctaaaggggacagtcccatgaaagacacatgggcacaccagctcactgggagcttttgcttcccaaacaagatgtgggccgcatgactccagcctccggaacccaacaatgtatctttaattgtggaaatctaaaacgggctttcctatagagtgactgcattatctgagtttggaaagagtgatggcgagatatgaaaggtgggatagaattgaacaattttctcctaacttaacccagtcacagacagtacatgc

SEQ ID NO: 317422 - DNA, 872 bp, Homo Sapiens
  misc_feature (235)..(235): n is a, c, g, or t
taagggtgtggagtgggaaatcaggggtctcacggccttcagagctgagagccttgaacagagatttacccacatatttattgacagcaagccagtgataagcattatttctatagattatagattaactaaaaacatttcttacaggaaataaagggatgggctgaaataaagggatgggtctggctagttatctgcaagcaggaaacatgtcgttaaaggcacagatcacttnatgctaatggtttgtggttccaggaaacccctttaaagcggttttcccgccctgggtgggcccaggtgttcctcgccctcgttccagtaaacccacaaccttcagggtgggggtcatggccatcacaaacatgtcacagtgctgcagagattttgtttatggccagttttggggccagtttatggccagatttgggggcctgttcccaacaccagagatttccccaaacagcagatgactttgttagtctcaaggacagactgcctcagcggacctctgctccctgcccacgatcattacccccaaaacatgccggcaagtctctgctccctgcgtcggcagagggatttataagccctctcttataaatcctggtttagcctttgttttgtgactgagtccaccgagatccttgcaggagaagaaaatttgcaggcaaatgaactaaatgtctcttcctgacaacttcccttctggggggctgaggaagctgtgaacagcctggtttgtcacacagcacgatggccaccacactgaagcagcagcaagcagattcatggaaggtgtgctgagaaccagccacctgggagccctactgtccctgggtatcctctggcttctggctgcaaagctggtc

SEQ ID NO: 317423 - DNA, 454 bp, Homo Sapiens
  misc_feature (104)..(113): n is a, c, g, or t
ttttttttgaggtgcttcatgttgttttcatagcagctgcaccattttacattcccaccagcaatgcaaaagagttccaatgtcttcacatccttaccaacacnnnnnnnnnnaataatagccatcctaaataggtgtggagtggtatctgacagtggttttgatttgtatttccctaatgttgagcacctttttaggtgctaattgactgttgggagcaagccccccaaaatctggccataaactggccccaaaactgggccataaacaaaatctctgcagcactgtgatatgtccataatggccctaatgcccaagctggaaggttgtggatttacgggaatgagggcaaggaacacctggcccgcccaaggcggaaaactgcttaaaggcattcttaagccacaaacaaaagcatgagcaatctgtgtcttaaaggcgtgttcctgctgca

SEQ ID NO: 317424 - DNA, 307 bp, Homo Sapiens
ctgtaaggtgtagtgcaagagagaggcagtcccaaggtctcagcttgacatctgtttaaaacacacttcgttatccagcatcctgctggtttaaacttgcctgtctactatggctaagcccaaggaggtaatgtgtttgttaacgtggttttcatttggggtcagttattctaaaagaaaaataggctgatatttctttgagcccatactgactgctgcccccttgatctgatcagcaccccctttctcttcaccagcaattcacaggcttgggtagagaccattcatttgtgccaaattgtgtagt

SEQ ID NO: 317425 - DNA, 1893 bp, Homo Sapiens
gcattgtgtgcgtgtctcccctcttggtgtgtcgttatgctttccccgtttgccctggcggtggggtgcttgtgctccccgcgttacgctctcggggtggttcctcccgccgttgtttgtgtggcccgcagtcttttgtgtgttgccttctctgattgttgtggcttattgcggccgacggctcggtgtggtcccgttctgcttgcctgatcggagtgccttctttccagtttggatatgctgttccctcatccctggggccatatgggcgctggagcacctgaaggatcccgccctgcttggtccacgcattatcaggttcaggcttgtatgttcccattgaattccagccctgagcccaggagttccatgggggcctgggacaccatggggccccatggggtacaggtgccctaaaggatttactgggccaccaatcttttcttctatgagttgccgagcatagtctatctgtttgtggagtgccacgaattgtaaataacttcatattaggatctgcatttggtggaggatttctctgaagttctattcttgcaccagactgctggcttatgctttttatggtttcacctccttttcctattattgaatccagttttcccagttggcacaataaaattaaattcctgtagtccaccaggtggtcccatgttccagttgccttgacctctacctcttcctcgaccaccaggtccaggtccaccaggattaccagcctgaacacttcgaagaaggtctgtaataatttctgcagcatgttgacatcggtctggaggtcctgttatttgtgctatcctttcgggtgttgtcccatcatctggcttaaactgaatgcgaacaccagcatcattttgtatttttttgatcatctctccatttcttcctattacaatgccaacagcaaatcttggaatggggacatctatcccttcatttcctcctattcttgacccatactcattccgaacttctctgaaaccgccttgatcacgaattaactctaacaccatttccttggcttgttgaactttatatgggtctcctgtaatcctaagaggtttgtcagcaccagtgttctgcggcccgtcttgaatcataaccattttaactccagcccgttcctgaagctgtttaatagtttctcccccttttccaatgactaatcctgccttgctagctggaatcatgatttcttgaactgcatttcccggtccatcgccatgatggaagccaggagctggtcttcctttttcaacaatctggtccagtaaccgttttgctgactggacagattcaggtgttccagttaacatacaggacctttctggaaggccaccactgtcaggagctatctgtattttgcatccagattcctgttgtatgcgtgagatctgttcacctcctctgccaattatgaatccaaccattccatctggaactttgtattcttctgtcattacagatctgctttgctgctgatgcatcggtggtaactgtgttccaaaagagtcattttgaggagcaactttcttagcatctggttgatctccatcttctaaaggtcttttttgtcccccataaccatagtcatttgaattcagtgatgtccctgcatcacctccaatttttgctgcaatctgccgggctctctgcagtgcatctttgaaagcgtcgttaactcctccaccaccaccgccgccaccaccgccaccagctgagccagaagaggggggaggcactgttgaatagtctgccatggttgcactataagagccgctgccgcctgttcagagacttcctctcagctaacagctaagaaagaaagaaaatggcggccgtcgaagctccctcgtgccgaattcgccacccagc

SEQ ID NO: 317426 - DNA, 551 bp, Homo Sapiens
  misc_feature (320)..(320): n is a, c, g, or t
  misc_feature (329)..(329): n is a, c, g, or t
ttaagaagccaaatatatatatctgtctatgttatagagatgcccacgattatgcttctttttttctctaatggcagcacaggcggcaaagctgggagaaaggctctctgcaggttccaaaatgctggtgcgggatgggctctaggaacagatagccaagtgccgacggaaactgagagcacgccagctctaccaatggcagtcctctagaggaggcagtaagaacggaagcggtgaggggtgcagctgaagcccgccagggctctgcaccccacttaatggctttcccctcatgccttgggggggtctccacttgggtngagggaaanggaagccagggtgggatggaaagccccctcttctgtgcgcaaccctgaagtcagcctcttggaactgagggtttgacctcagcagagagtctcctgttgacccttgggttgaaagaatggggagtggaggtgactgtgtgttcatgcctctctcgtgctctctcaccattatacctgtatggctgctggaattccgagatgaagatggagttctctcgtgcc

SEQ ID NO: 317427 - DNA, 421 bp, Homo Sapiens
aaggtatgctctctcctcctgaacaggtgtgctcatcattgctttgggcagaaagagccattctctgacctttcagccctagactctagccggcgcagatgatggagatatggttagatggagacatggttagaggatggacaggcaggagacagataggctctccaccacctgtgtccaaatatttcagatagtcatgtgtgttagcacgctctgaagttatgacacacgtgcagcctttagagcacttctggttcctttcttgcatcttacatctaggacctggaagtctgcacaacccttgatatttattaacatttactgctcacctgttgtgtgggaagtcctatgacatgcatgtcgttcacattaacgtgtgctactctcatatcaactctcgtgccgtattcctgcagcgcgg

SEQ ID NO: 317428 - DNA, 455 bp, Homo Sapiens
taccttttacctctctccttggaagcaaatgtttataatcgctggttttgtgtaaagtttagaacagtatttttcattcaggttgctacctattagtggatggtgaaattatttggggggatcacattcagaatctttttttaaaatcgaaagaatacaagctggggtcagtgactcgcagctgtacttcccccacccctcccccttcctaactcttcactcagtgtgtaaacttgtcttcattcttaataatgatacaataatgacaacaacaacattaggaaatactactcttattactgctagttctacttgtaaatctctaggcaaacatgttgcaaactttgtaaactcctaggacgagtgccttgcttgaaccaaagtgttaaaccgctgttgacctctttcaccttatactctttgaatacctcagcctcttagaaaggcccctaatg

SEQ ID NO: 317429 - DNA, 639 bp, Homo Sapiens
aggatttcgaccagaagtttgactgcagcctcaaactccttataacaaagaatcctgctgccttagcctcccgagtagctaggactatgggcacatgccaccagatctggtatattttaaaatttttgtagacatagggtctcgccatgttgcccacgctgattctgaactcctgttctcaagcaatcctcctgcctggtcttcccaaacttttgggcttacagctgtgagtcactgaccccagcttgtattcttttgattttaaaaaaatattctgaatgtgatccaccaaattaatttcaccatccactaataggtagcaacctgaatgaaaaatactgttataaactttacacaaaaccagagattaataaacatttgcttcccaaggaagagaggtaaaaggtacttgtttgcctctgatgggccctgtttccttcagtgcccaggaagagtggctctcagacctttcttctggcatccctcatgtatgcagtgttggttattattttcaaggccttggtaaccaaatgcccctagtgtgaccagtcagactgacagtccatatctgtaatatggtggtaagtttcctttgcatgtctttctttctggcatcttagaacttttacctaggaaatg

SEQ ID NO: 317430 - DNA, 675 bp, Homo Sapiens
caaaaagagcacaaaatccattggaattgtgtgacagtgattttccctgacatgctgtgaagtggcccctgtccattcaggcccggcacacgccgggaacatccacccacagcatgtccacctggcagagtccatcacttcgccccacacaacaggacagactgagggctttaaatacaagcaggtatgtgaacaggacatcacctgtgatgtggccaccaaacagtgcacagaggctaccaactcatttcctcaaagatgagtgatggctgggctgctgggcccctgccttgtgggctgctttttgggagaggtgttgcttatttctaggaagcgatccaacttgtgccacacaggatttgtcacccaaactgcttttctcacacagtcaacaccttggtgacaggcatctgcccccacttcaaccagtaacaatcccaaaactcaacatcagcataaagacaagggggtcagtcgaaggttctggagatcagggagggtggaaagatggacactgggttttccacattgtcccttggccaactgcagtcactggcacaggaaatttagtccagggcacttgggacaaggttgggggtggggtggaaacatgtctcttaaagggcacaacagggatgcaatcaagcctagtgggtgggggctctcagacccacc

SEQ ID NO: 317431 - DNA, 769 bp, Homo Sapiens
  misc_feature (43)..(43): n is a, c, g, or t
  misc_feature (57)..(57): n is a, c, g, or t
atgctgtgaagtggcccctgtcccattcaagggggcacacgcngggaacatccaccnacagcatgtccacctggcagagtccatcacttcgccccacacaacaggacagactgagggctttaaatacaagcaggtatgtgaacaggacatcacctgtgatgtggccaccaaacagtgcacagaggctaccaactcatttcctcaaagatgagtgaaggtcccagacagttcctgctggacttggtggctgcagttggagccagtgtagctgatgacaagctgcagcttctcgctggcatgctccacaaactggcgcttgaaggccctctccttggccttggtggtccaggtcagacgctcatagacgtagaggaggccatagagcccaaaggagagggcaaatgagccgccagcccactgccttccacaccactcctccaacaacaagaatgcccatggaggtcctggatgtcaaggaggccaggccggtaaccatggaaaccatgaactcctcctgggtgagcgagccctgtggcagtgggggcatgctggggttggctggcgtcagagggatgggacgctggacctggtcattgtagcccatcaaggcccgacggctgttcttggggcccaggaacctattcaccagcatggtccatccgagagagaaatggaactcaatgtcttcctggaagtcagcacacagcttgtcacagtttaggtcatagttgagagagaagcactggcgtgggaccagcatgtctatctg

SEQ ID NO: 317432 - DNA, 477 bp, Homo Sapiens
ggtactaaatttcctgtgccagtgactgcagttggccaagggacaatgtggaaaacccagtgtccatctttccaccctccctgatctccagaaccttcgactgacccccttgtctttatgctgatgttgagttttgggattgttactggttgaagtgggggcagatgcctgtcaccaaggtgttgactgtgtgagaaaagcagtttgggtgacaaatcctgtgtggcacaagttggatcgcttcctagaaataagcaacacctctcccaaaaagcagcccacaaggcaggggcccagcagcccagccattcacttcatctttgagggaaatgagttggtaggcctctgtgcactgtttgggtgggccacattcacaggtgatgtcctgtttcacattacctggtttgtattttaaaggccctcagttttgttcctgtttgttgttgggggcgaagtgatgggactctggccaggttg

SEQ ID NO: 317433 - DNA, 620 bp, Homo Sapiens
ttcaggttttgctttctctttctcactttgtttaaagtatctcgtactcacagttcacaaattaaccttcactgtctctttcacattaagagcttatgcttaaagcatgccccccttttctaacttgctggtttaccataaactcccctaagtaataaaattcctaacccagtactgagagtcctccttctctgccacttgggcattattttactagtttttaagccatcatcgcacaagaatccaaaaacccttaaattttttaaccactggcaaatatgtacagcaaattaggttaagcatttaatctggctcatgctctatcatactaaatattcaggtttatcataaactccttaaaaaccatcaaaggtcaaccagaaactgataactcttgaaaggagcaaacaggtaagatctttggagtttaagcttttctgagatgtgttgtgaaaaatctaacgtgtttatcgtatattcaatgtaacaacctggagaatcacaactatatttaaagagcctctggaaaatgaggccagtacagtgtgactacatgtttaattttcaatgtaatttattccaaataaactggttcatgctgaccacttgtattcaactaa

SEQ ID NO: 317434 - DNA, 614 bp, Homo Sapiens
  misc_feature (598)..(598): n is a, c, g, or t
ttgacatttaaagagggaatcttctctacctctacaaaatcaacacttaacacttttttcaccttcagaattatttagaatgtggatttactttgtctagttttttcctttatagtgtaatttattgttactctctatttactgactaccagagatatacaaaatactgtgcaaaagattgttactgttcaaagagcttacaaactaaatttaaaagaatagcaagtctgaaaaatagaagatagtcaaatatttgtttatgctaagaactgtttttaattttcagctttgatgtaaattgctagcttaggtgtctttagttcaagcatgttaggaaatcctctttattcttaaatatagatacatgtctgcatatatgattgaattttagagccagaaagcatgtagagcagttgtgattagtagagattttgtgacttaagtcatttaacctctccttgattagagctttctgagccatgcacactggcactgcaaatcacagacaggcctagatacagatcccctcaccccttgctacatccaaaggtggcctgggtggctggagcctctgggccagaaccacctttgtccattntcctcagtgtgcctac

SEQ ID NO: 317435 - DNA, 1048 bp, Homo Sapiens
  misc_feature (64)..(158): n is a, c, g, or t
  misc_feature (172)..(188): n is a, c, g, or t
ggctgtggaatgaaatgtttctcaagagcctataatatagtagatagtgcatattaagatgtcnnnnnnnnnnnnnnnnnnnnnnnnnnnnnnnnnnnnnnnnnnnnnnnnnnnnnnnnnnnnnnnnnnnnnnnnnnnnnnnnnnnnnnnnnnnnnnngagaccctgtctcnnnnnnnnnnnnnnnnntcaatttagctagcaggaatttgacatttaaagagggaatcttctctacctctacaaaatcaacacttaacacttttttcaccttcagaattatttagaatgtggatttactttgtctagttttttcctttatagtgtaatttattgttactctctatttactgactaccagagatatacaaaatactgtgcaaaagattgttactgttcaaagagcttacaaactaaatttaaaagaatagcaagtctgaaaaatagaagatagtcaaatatttgtttatgctaagacctgtttttaattttcagctttgatgtaaattgctagcttagttgtctttagttcaagcatgttaggaaatcctctttattcttaaatatagatacatgtctgcatatatgattgaattttagagccagaaagcatgtagagcagttgtgattagtagaaaatacactgacaagaagatatttgcatttatttcccaaagctgccagtaactagattttgtgacttaagtcatttaacctctccttgattagagcttcctgagccatgcacactggcactgcaaatcacagacaggcctagatacagatcccctcaccccttgctacatccaaaggtggcctgggtggctggagcctctgggccagaaccacctttgtccattttcctcagtgtgcctacagcatcgctttccatgtgtgccataacttgggaatagttgggatgtgttgcttaactcctttacaccattagttatctgtgagaccatctattccacactcttcattttttaaaaagagacaataattatttttaacttactgaagtttaaaattacctagcatttctgatt

SEQ ID NO: 317436 - DNA, 600 bp, Homo Sapiens
ccttctttctctattattcctattctctttaaggattctaattcacatacaaaacatttgttctgctccagctctttgtgaactaattggctctcctggagggataggtaattgtacctgactacacaagctgtcccgaagctcccttggaaagctccagtaagcttctagtgttagcagccatcaaggatttcacaggtcaggcatcggatcgatacagctaaaagcagcagggactgtaatgtcgacagcaggtttcagaaagcgctgcaagtgccagtttgttcctcttcatgcagaagctcaagacagcttaattaacccttggaaaatacaatttatccagaggctcggcaggtccctaccaggccttattggtgaactgataggagagatactgtagctggcagcgctgaattcccatttccccctttaatgcttgttcagttaggatgcaaagaaaacatagttttcggtggatgtgttcctcatgtcctgaagagcaggcaataggaggtagccttagaggggggtttgttagaactcacttgtgacttcagcaggagcaaggctgagactgagcattgatcatccgagccc

SEQ ID NO: 317437 - DNA, 1090 bp, Homo Sapiens
gcgtcatcctcaccggggagtatatcagcaagtgggtccccctgctcctgccccagctgcctgggcctctgcattctgtgaggcctgccccattgagcccatgcctacatctccagcatcatctcccttcctttccgtctgctgctgcattctggccaaacagcatctttcccagcagcctctttcccccgttggaccctcccgggggggtttccctctgcctgagacaccctccctgttccttgcacgcttgctgccccttctctcccttctggtctcggtccccatgccttcccctccggccgtctctcatttactgccccgttttgggccctcagagtaccttgttgtttccttcacacaggctaccaccattggtaattacatatttatccctggtaactttgtaataatgctaataatactatctaccatttattgagctttaattatgtagaaggaactcactactttgtatgaagtatcactttaaatcctcataactgcccctttgaggaatttatccccactgaatactcagacttgagagagtaaataacttgctccagtaatagtgtttaatctctgtacccaccaggagaggggctttgttttaatcactgctatatcccctgccctgagagcaacacctgacccacagtcaataatatagttgctgaatgaatttaatggatatgagaggaggtgatgggtgcatagttatccagaggggccaacctccagtgacccacacactgcagtattagacaagtgtcctcttgttgctgggccccagtgaccacatttatatactcaagtacctaaaagtaattatcagcacagatcctttgtcacagctttgacatcatatgaccccagacccttccaggtgccactctctggcctgatgccaggcagtggcaagcacacagagctgcagcacacatgcttctgctgtcaagaccctgcagtctaatacgggaaacagatatgctgcgttcatgaagaattatgacaccaggaaatgtgtgatcaggagcccagacaagctttattctttaagacctttttgatcctaagtgacagaaaa

SEQ ID NO: 317438 - DNA, 478 bp, Homo Sapiens
aaaaaaggtcaggattaaaggtggtgagaagtgaacatttattaaacagaagttaaaccaatagagagaaaggaggtttgttggagtctaagaggattttgaccatgtagaaattccttgaaacagaccttaaaaggtattgaaaaattgaatcacaaagaaagtttacctttaaatacttgttaatggctcctagatcatggttataatttttctcaatgggaaaaaaagtcttaaaatttgttttaaataagatcctctaatgtctcgagctttttgattctggaaataatttgctttaaaatataaatcaatcagaaagtgatctaccactgaaatcattctaggaaactagcatgggatgcactgcacaatgttctttcctctaaaggcatgggccccataaactgtggcatctggcagcaggatgccatcagtcctttagaaagcctaattttgggccgggtgcggtggctca

SEQ ID NO: 317439 - DNA, 575 bp, Homo Sapiens
  misc_feature (129)..(138): n is a, c, g, or t
gttttgtaatgcaatggtgtgatcatgggttactggagccttaaacttctgggcacaagtggtccttctggcttagccttctgagttggtgggactaccagtgcataccatcatgctcagctaattaannnnnnnnnnaaaaagagcttatgctatagacaagactgctataagcagtggttttcaaatgctgagccaagaggccaaaaggctgaatcagagtcaccaacgatgctttttaaaggaatgcagatttctgtccggacgccctgttggagattctgattcagtgtattctgggcaggactctatagattgcacattttgagtaagtgctccctggtgattctgacccacagccaggtttgggaaccaatgacttgaggtgagagaagtggggctgtgaaagtggaggcaagaccttgtccaaaccgttctacttttgactcagagtctgagtctgacttcctgatgaaaaatgacctgagagtttgaaactggccgtggtgagaatgtttaaccacagaaattgctaaaaggtgtgaatcaagtcagggttccccttccaccacgaa

SEQ ID NO: 317440 - DNA, 921 bp, Homo Sapiens
  misc_feature (506)..(596): n is a, c, g, or t
aggtctgggacctcagagaggcagcaaggagcaaagtccatcgaaagacagtcagtgtagcactggggttggtgggaatgctaaccggtcatgttctgtagcagatttctcaatcaggcaaacagtaggaggaacgttatatccaaaagacaaatcgattaggaagtttggccagtgaacatattattaggattgggaggtcaatgatcaaggcagaagctcttagtcagttcactttgcagctctcatcataggattgtacaaaagagaagaaaagatcttccttaactgactcagggccaggtactttgaagatccaagtagtctgctactccagcttctgctggaatcttggctgtttggaggcaatttgttctgtgccttttggagaaatcccctgtgttccaaagaacacctgggaataatatctcaactgtagttcaacttttccattttcacaagagaagggacttgagagctggacggtaagagagtcgttgagtccnnnnnnnnnnnnnnnnnnnnnnnnnnnnnnnnnnnnnnnnnnnnnnnnnnnnnnnnnnnnnnnnnnnnnnnnnnnnnnnnnnnnnnnnnnntgaatggggatatactcgaatcattcaggaaaaccccctgtatcttattcctaagtctattggattaatgtcatatgtacatcaggttagctagaaaaaaggacattttaaagggcattaatcatttatattcaagggtaagatattaagagcaatataaattatagttaatttctgaaatcaagaatttactcagaaaatattttctagtttttcatcagctaacaattatgattattttgttcaaaattttttctagtttcaaatttaagctccccccattgcccccgggtcacttacatcattctcttctttatagaatctt

SEQ ID NO: 317441 - DNA, 603 bp, Homo Sapiens
  misc_feature (558)..(558): n is a, c, g, or t
ggacatgctgctcaaggtagttatatatacgataagttgtatatatgatcactggtagcctaccaaagctgtagaaatctaggactgtgctaatcagtatcaaaccaaagatttctatctcttcccgaaagagagggtatgtgcaccagtctacagttccaaaggactgcaacaaatgtagatggttctgtcctcatccctgagatcagttctactgaaatggcaacaacaactccaaatacatctctcccttcttgaaatccctaaagcactatcgcactcctaaatgcatttctccacaagttagcacttgattgtatactgtcttttaatccttcattgtttcatgtatgaagtttttaatcaccccctaacccccaaaaaagattcggttgtcaagggatatatttctatccctgccagcacagtgctggacatagtgagtactgaacacctaagaggcactcattcagactgacttctacaggacttctacgtgtgtgatagaagaccttcgtagccacaaggcatgctaaacctctaaggtctgatgctgtntttgtccaaatataaacgaaaggactagtcagccggctgcataga

SEQ ID NO: 317442 - DNA, 536 bp, Homo Sapiens
  misc_feature (440)..(465): n is a, c, g, or t
ccaaattttttcttctgtgggagtataaatatggggacatgactatgggactatatattttcacattgttagcactttgttagtacagttacttttaggtattgtcttttagtagcattattaaagttaaaaaataaaggacacagaagtaaagagtttatagaaggatacacagaaatacggtacttatctctgagtggtgacattagaatgggtttttcattctatcctttttactttatttatacattgcttatataacagatatcattcaagagcaatgaagataactgtataatgctatggcgtcaacttaccttagcatacaaccaacttgataataaataatggtcaaatggccaaacctaccaatccacagagatcattcaaatatctaaaatgattatggatcagacatacagaataccaaacataggatnnnnnnnnnnnnnnnnnnnnnnnnnntttcccatgattaaagccaaggctttaaagaagacacactttcttaggtattttcaactaaatgttatccc

SEQ ID NO: 317443 - DNA, 1083 bp, Homo Sapiens
  misc_feature (76)..(96): n is a, c, g, or t
  misc_feature (380)..(641): n is a, c, g, or t
  misc_feature (650)..(681): n is a, c, g, or t
  misc_feature (1061)..(1061): n is a, c, g, or t
  misc_feature (1067)..(1067): n is a, c, g, or t
ttttaacatacaccaaaagaatataaaaatattgatttattaccaacaaagcaggatttcccagttttttcaattnnnnnnnnnnnnnnnnnnnnnatagcagaatgaaattacatttttcacatctaaaggtttatacctcaaagaaaataggcatgtgtccaaaagacaattagaaagcaagaaatctttccttttactttgaatatggaaaatcttttaacagagactctttccgggcaaaccaatgaagatttagggcatagaaaatgcttgtcaccttaaggtttttaaatataactgtattcacccaatcaggtttttactagaagtttttacgatttttatgtaattaaaaatcaacttttggccgggtgcannnnnnnnnnnnnnnnnnnnnnnnnnnnnnnnnnnnnnnnnnnnnnnnnnnnnnnnnnnnnnnnnnnnnnnnnnnnnnnnnnnnnnnnnnnnnnnnnnnnnnnnnnnnnnnnnnnnnnnnnnnnnnnnnnnnnnnnnnnnnnnnnnnnnnnnnnnnnnnnnnnnnnnnnnnnnnnnnnnnnnnnnnnnnnnnnnnnnnnnnnnnnnnnnnnnnnnnnnnnnnnnnnnnnnnnnnnnnnnnnnnnnnnnnnnnnnnnnnnnnntccatctcnnnnnnnnnnnnnnnnnnnnnnnnnnnnnnnnttttgttttaagtggctgagactatgtgctagacttactactgtttaatatgctaaaatgatacataatttattcttcacagctcaaaattcaatgtaaagccaaatattaattttgtccagtagagaaattaaatgtttacaaacaaagtatggaacagttgttggcctatgtaaattgaaatgtaattgaccattttattttcaaacatgcttaatcttcacgtgtctttttcacattgatactcattttgcagaaataagatgactggtactaatttagacaataaacaaactacaccaagcacattttagtaaagatattttggtggaacgcaaagtaattaacgattaaaacatttggtaatactcgtgccgaantactgngccgcgcagggccaaa

SEQ ID NO: 317444 - DNA, 691 bp, Homo Sapiens
tattttcaacaattcttaacaatccatacaatttaaaaaccatttcaagtcattgcctataacacttcttagtttacccattaataactcacaccattgcttttaagcgtgtgaatgtttccagcaatcatcaactttaaaaatggacaacaatgaaaagatgtctaagagtctccagaagcatccaaattttggatctctcctacgtatagcacaaggtagaattgatacaatgtgccttccagcttgcctttaaagctctccatatgtctagttctgaggtgaagagattaaaaataggaagagcctggtagggagtgaagattcaaaatgcattgctagatctcacaccggttatatttcctctctaagatctcagctgcagttgccaatggggatattgaagggtacactttaaagttggctaagcattacggggagagtttcccaccatttctttccctttaacctgtaaaattctttctgaagtaaaaaagagttttaatgggggctcaatgctcacagtattaacttagaaagacccttggcatgaagggagcctgttccaatatctcctcttggggtctgataattcaatgagagaaccagccaagagaataaattagggaacagtctccttggtctgtttaggacaacctttcacatcctaatcttttacttcccatgtttc

SEQ ID NO: 317445 - DNA, 1090 bp, Homo Sapiens
  misc_feature (686)..(686): n is a, c, g, or t
  misc_feature (751)..(751): n is a, c, g, or t
  misc_feature (810)..(810): n is a, c, g, or t
  misc_feature (864)..(864): n is a, c, g, or t
  misc_feature (869)..(869): n is a, c, g, or t
  misc_feature (873)..(873): n is a, c, g, or t
gccagcgaaggtcatccaagtttcctccagcatgggcgatatctttgggaccgagactttccttggagagctgctgagagcggacagtcccatcacagggatcagtgtttgctccacagctgtagctctgggctgacgccccccagaccccttccttctcggagtgacccgcccccaggccacctgctccggggagttctgtgcactttactctttggacttctcctcacgtgtgccctggttttatggggagagggaatcgctgttgggaaggcagagcagttgcaaccctctctgcccttgcttcatgtggctggagcccaggcaaggagagcaggagccagcgtgagactgaggccccctggtgcctatcaaggaccagagtgaaggggactacatctcccagcccttcaccttttaaatatgagtggttttaaaaggaaaaaaatgaaaccaggcaacagcaacaatattctgtttttaaaatagggacaagactgttgtcactttttagacatgtatcccattccttttggctctgcaatatttggggctgtagctccttccaagcccatggtagtccctccccgagtctctcccagtagaatgcagcctcccttcccttggccccttccctctcagtgacggtgactccctggggccttctcgtggaacccagagggctngaggaactgtggccttggctggcgggcccaacgttggtgctcctcaggactgcagcactgagatnggaacctgggcctcagtttaggaacaggggccacaacagggcaggaacccaccatcctntcacattaggattacaaccagttggggccacatcatgtgagtcatcagacccanactgntcanccagcaggccgggctgtgtccttcagacccagtgctgccctagactctgactcgggactccagcttgccacgtgccctctcccctcttgaatgtactctggtcttgcagtgtgctgctgggactttcttgctcagccatcactctggtcaccttgtttgctctgggtctggctgaattttctgccctgagatctgggcataaagtggatgaaacttg

SEQ ID NO: 317446 - DNA, 1147 bp, Homo Sapiens
  misc_feature (883)..(883): n is a, c, g, or t
tttttaagagtaaatgagtttatcagatccttcctgagaacaggtttttcagagaaagggtaagtggttgcacacaaaaaggcacttagctcctggccatggcagccggccagggaagggaggggagaaccaagcaggtagacggggcacagggaagacgcacggcagctccttctcccctggccagagcgggcctcagtggctgggatcaggccccagggacaaagatgggtgggtccaggcctcagagaagggggacatcatagtcaaagaggcgcttgctgggagccgatgagccaggtgactctgaagttcttgaggggcgccgtgccctgactgtgaatgtgagcagcaaggagcagaggtctctggacaggccataggccccatagtgctaatgtgcacatgtgctgtgacctgggcagagactgggtcccagcatctgttgtgcctgccgcagggtgagaaagtcccagccccaagaggctggtctgggaaggagctgtctgagtcttgcatatattcctgaccccagggaccatggccaaacagatccacaggcaaaaagggaacagggacaatgagaggaaagggtgctgctgtgagaggcaggggcctggcatgagggaggtcccttgagacgaagacttgcaggtctgtcttggcggggcttgtcacacctcagcgtccagcgaggagtcagatttctgtccccactgagtcctctcggttgcagatgatgctttctgtgcctcctgggggtcctgatctccagattcctgggtcctgctgatccacaggttgagccttgatgtcacaacccctgagagcctcaagttctccttccggctggaggctggttctgctcggctttggcccgccnagttccttctcaaagaggtggcgcttgctggctacacccacaggagccacgaataactcagtgcaaggcagaccccgagacttgacagattctgatctccgtatggccgtgtggtatctctccagcttctctcccaacttcactgtgttgtctgggagcttcatgctggcactgcgagttagggttgtttccgagttttctttcttgggtttcatccgaaaggagatggtcctggggctggagcgtttgagggagcctgctgta

SEQ ID NO: 317447 - DNA, 509 bp, Homo Sapiens
tagaacctgcacttggtgttttgactttccagaagaaaaaaatgcaactttggttagggggcagtggttggatcacacagttgtctttcgtttcctaccacagtaattcatatttaaatatgcttttagattagtgtggatactattgctgctgtgttgctacctgacctttttctggggggggtacctcagaaatgagcatttgagggcaagcgaaaaagccctcttcatcctccagaggcaacaaagaggcagcagaaatggggaaagattgtgagaggcagggcttgggtctagacctgggacttaggcaagatatgttgccctcaaccctggagttttcttatatgtaaaaagggaaggttgggctggactagatgaggttcaagatttgccattctgggaggctgatattccagagaatcaaaattaatcctaaaccaaagctttatggctgctacagagacatgtcacatttctgagacttgtcaccaagagtttgtccttca

SEQ ID NO: 317448 - DNA, 486 bp, Homo Sapiens
ttttaaagatttgcagaaatcaattagaataaaaatgtcaacagacaataacagtgttgcatagcttgaacatttttatattgattaaattgtttttcagtagaatcactgacagaacaggtcagaatgaaaaacattccaaatatacagaaaaaagattactgctcagttaaggtccttttccaaataacttcacacaaatcctttggttgctccaaacagaatgagagctatgagaatggtggcccagcccggccatcagactcccaagcatttggtccccggtctgaggtcacagaatctttgccacctttaccgagactgctctcagctgaggacaacaggcaagaaccagaaggtggccatccttgtctttgcattcaacagcgccaaagtctgagggacaaactcttggtgacaagtctcagaaatgtgacatgtctctgtagcagccataaagctttggtttaggattaatttggattc

SEQ ID NO: 317449 - DNA, 632 bp, Homo Sapiens
aagctcatcagctgttattagtgttactgtattttatgtgttgcccaagacaattcttcttccagtgtggcccagggaagccaaaagattggataacccagccttagaccatggctgtctcttcctccctgctcttttaggaccagatggcctttgaggatgtggctgtgtacttctcccaggaggagtgggggctcctggacacagcccagagggccctgtaccgccgcgtgatgctagacaacttcgcacttgtggcctcgctgggtaaggtcctagatactccatgaaatgggcaactgataacaagctgactggccagggctgccccctcacctccctggtggctgacgagcaggcctataccttgcagccaggagccatgtggaataggggtctggtcctatagacatgcagtctggttggctcaaccactccctgtggcgctgtccggctgtggccttttcgagccttggctcagtccccttccttttgtgccctgggcacagttgcttgccttgggatgaatgagctattcctgtctgtttccgtgaagccctgactcctgccctctgtttggaggtgggttatcttgagctgggtctggactctaacctgcacctcctcctcac

SEQ ID NO: 317450 - DNA, 440 bp, Homo Sapiens
atcagctattgttagtgttagtgtattttatgtgtggcccaagacaattcttcttctaatgtggctcagggaagccaaaagactggagtctagactttgacatcagacctagttatacctttgccttagactctggcaacactaaacaaccacgttccccctctcctcctcttttacccacctagtcactgagtaccatcagttactaattcaaaatgtctcgtttcttctatttctttcccacaacactagccaggccctcattatttcccaggtcagattttagtagcctcctcagtggtctctatgcctccattctatttttcctcaaaacctccttgttttacttctctgcttggaattctcccatgttcccaaggataaaatggagtgtaaacttctcagatataattagaaccctctaccatctagcctcgtgc

SEQ ID NO: 317451 - DNA, 1026 bp, Homo Sapiens
  misc_feature (357)..(413): n is a, c, g, or t
agtgcactcacgtgggctagtcgtcggtattatattgttccgcggtcggggcatgttaggcacatgctgttgttatttaccccgccgcctcggtgtgtctctagtgtgtctcacaatgtcgtatattgttgctactatgcttggcagtttcgcaagtcacctttgggaacgttcaaaaccggggtttgcgcccattttctttaagcctcccagcatcctcaggttaagcaatttaagggccccgcagccatttcttcctccatgtggctaagggaacccaaagagtgggccaccctgattcaacctattgaatttaaagtatcactcatgagcctctgtcagtataatatgctttcnnnnnnnnnnnnnnnnnnnnnnnnnnnnnnnnnnnnnnnnnnnnnnnnnnnnnnnnncttaagacgattgtatgaacttattctcaaatattttacatttaaagggttttacataaaaatttttcccttgttttatacttggaaaattatataattcatgatctctaattttcaaacattctcaaaagtttagatcttcagagataagctctgaaaatatagatccatacatataaaatatctatgaaattcttttaaaaactattgtctaactacaaaaataatggcatatacatgcataaaccatctttaattagaaaatttagtaacattcatatcaggcatcatcgatttttcttttcttagctcctgtattcttagaaccagattgctgaagcatgtttgcagccttcttctggaagttgcctgaatttttttcctccatctttttatcaccttgttcagaatgacaagtttgagacgattcagccctgaaagagttctgcgtggactttgtcacttgcatagtaatagcatgtgcctcattgttcagaagattagctttaggtcctattttcaaatacgaaatggtagcataagctgtaaaactgtagtcttccgacgcgtgggtcgacgatatcccggaattccggccgtaccagccttgccc

SEQ ID NO: 317452 - DNA, 373 bp, Homo Sapiens
agaattccatgacaattgtatttccctgggcaattaacaggtacacagaagctcaagcgcattcctgctgaaggctgacactcatccgtgttctgggcattcgtacagagcattactggcattcacggtcccagcgaaacctgaacacagctctagagtctagaccaaatcaccggccccttgtttaaactgtttgaacccgagtgtatctgtacaccaccagtcccctggcgctctggggtgagtctggcccggtctccggtgggccctggagcttggcactctgagatacccctggctgtctggtaaattcctttataagtttcacaaccgcaggtttgggtgaggagacaaacaccgctgtagtttgctg

SEQ ID NO: 317453 - DNA, 1215 bp, Homo Sapiens
aagaagctgaggatgtactatgcgagatataggacgctggctaacacggtgtcgcaaatgcatcgcggcgtcgtgaggaagcctatgagagatgccgacacattgtgttcatgtggaatcagcaagaacgtatgaaacgaggatgaggtcaacataggcggacggtatggatagtagtggacggggatatggtacgtgggttggaagaatcggaggggtagagcatggtattggtaacctggtcgtaggttttggtgtcttatgagtggtagtggttataagtctggttcgaacggtcgcgggcgtcgctatctgggggtgagtggtatgtcgaggacagcgctaagagttagtgttccgtggtgtgagccgggaccagccttgtaggggggcgagcgaagagaggtgcggggcaaaagaccccagacgcgccgtgcttggcgtagagcttcacttagcagacccgaggtgtgagaggccgtagggagcacgcgtctgatggagcgattcagcccatgcgagagacgaggttgcggccgagcagcaaaactacaaaagacgaaggcgtatggtgccgggaataaaccgagcgcatcctgagggctgcgagaggcaggctcagggtatcctgaaccacctggctctgcctgaggggatgggctgggttccagctggcccgtccgccacgtagtgactgcttgggacagtggagatgatgacaggatgcccactcgccttaggcagtcagaagcggggtacacgcaaacactctagaagccacacttagcaggaattcccagtcttgcggcccaggggagggtgccaccagctcaggcagccctcaagaggaggccggtagcaacttctccagggccttcttctgcttctcggtggctgcagccagggcctcaaccagcttctcctcgggcatcatgttgagcaccttgagggcaaagaggagctggctcttagccgtgctcacgaaggcgttgctcaggaagttggggaagcctccgactcgtgtccttctgggtgtacagcgggacccgcacgaggcccagcacctccaggccgtggtcgcgcgagtgcaccgcgctgatctccacggcgtgcagctgctccagcgtcagctgccgcgcgtacaggtgcgccacgacgcggtgtgggccctcggtcaggtgcgagctcaggtagtcggcctcgcgccacccaggc

SEQ ID NO: 317454 - DNA, 429 bp, Homo Sapiens
cactgttaagctcttgtactttattgagcagctgtggaattaggaaggggatgtaggataggggacacgattacgttccttagtgaaggtttcaagctgggctttgcagggggtataattagtatggtcactgtgtcttgtaggatgtttggctccttggtgatagagcttgccaaaatggtgtcctttgataaggaggtctggggggcagggagttgaagaaattcccttgccagtcttggggatctgtaacacatttccattaatcaccaagtgtgtactaatcccgagtcttacattgcgatgcctcactatccccacagccccatccctccctctgtgccccacagggctgagctcaaatctgtgtgttgtgcacctctgcataggccacaagagagagagtctgaggctcagcctgggactcag

SEQ ID NO: 317455 - DNA, 734 bp, Homo Sapiens
gggcaggccaggatttttctggtccgatccctccccgtaatcctgatccctaaaggcccgcgtagccatgtgaaacgcccgatacaggcagctgcactccccacctgagcttctcccagttatcagccagtctgaatcttcattctcgctgtggggattctgcttcctcttttctctatattgttttgaataactccaggggtttttaactggtccaaatacaccatctgtgctcccagatcccatagcaaactcatctaaatttgtttttcccattagtagagctccctgatccaacaacttttgaactactgtagcattataaggtggtatataacctttcagcatatttgatgcacatgttgtctcaatgccagaagtgctgaaattgtcttttactgcaataggaattccatctaaatccccaagtgactgtccattcttatatctcttttctgattcttcagcttgttttaaggccacctcttctgacacagtaatgtaggcatttagaaacttggtcttcttgataagagagagacatttttgacagagctctgttggtgtaatttggccttgtttcagtgccgcagaaacttctcggaggctccggcccagcatggtcctcgtgcccagcctgccaccacaggagccaggcaagggggaaaaagaggtcaccggtcgctagtgatgttacatgggcgcagccatctttaattgtcactgagcccttc

SEQ ID NO: 317456 - DNA, 787 bp, Homo Sapiens
  misc_feature (29)..(29): n is a, c, g, or t
tggaataaactcccaggggttttttaaantggtcccaaaattacacccatcttgtgcttcccaggatccccataggcaaactcatctaaatttgttttttcccattagtagagcttccctgatccaacaactttctgaactactgtagcattataaggtggtatataacctttcagcatattggatgcacatgttgtctcaatgccagaagtgctgaaattgtcttttactgcaataggaattccatctaaatccccgagtgactgtccattcttatatctcttttctgattcttcagcttgttttaaggccctctcttctgacacagtaatgtaggcatttagaaacttggtcttcttgataagagagagacatttttgacagagctctgttggtgtaatttggccttgtttcagtgccgcagaaacctctacacttagtgtagtgtatgaagggtgatgcactgatcagcttgaggacaggtggaggacatgacattcttctccttagccaacttttggtttcaaagtcaggctgtacaaacaacggcagtaagttaggtaaaccatcctgtccagggggagttgaggcccagcatgggtgaaggatggctgagggcagattctgtacagagggtagcttagttctcggaggctccggcccagcatggtcctcgtgcccagcctgccaccacaggagccaggcaagggggaaaaagaggttaccggtcgctagtgatgttacatgggcgcagccatctttaattgccactgagcccttcaacccc

SEQ ID NO: 317457 - DNA, 1754 bp, Homo Sapiens
ggtgttaaatacatttattgtaaactttagacacaaaaataggttctctaggccattcacatgcacattaaaaccaacaggtgcaaactacaacaatgcatataattatacaaatgatgccactctgtgatgtttacaggattgctgtccatgcaaggtgatcataggcattatttatgaagccttaagatccagaagtgttgttactaccaaacctctgattaacactgtgaagtaagtgttttggaaggcagttccatgagttggctaacatttctttaaagcaaatgactgcttctaagcttagccgtacaagagattttggttgaactgaaaatattagtatttcattactgtgtgcagctctgtgatggacaagcaagttgttggcacatccaccaaaaacaattacttctccttcatcgctggcacaagctgtgtgccataaccttggtttttcggtatatggatgattaaattgtatccattcatttttactgatgcagtaagtccaggcatcacttagtggctgtttatcagtggtaaatcctccaaagagaaaaagatgatctgaagaaactggtgttagtgagtgccaagatcgaccaactgggcatatgccttgtggaattaattcattccactcccatgtatccagattaagatagtgaagatcattcattctagcatctcgatatctgcctccaaacacgaagcctctatttccgacagttgcacaggcatgggcagcacgaggtgaaggtgctttaccagtagttataggctggctccaggtaaatgtttcagtatctaaaatatgtacatgatcattccatcctcttggatgacttgaattccaaaaagatgtttcatcgaattcaaaagttcccaatactttatcttcaggcaaatatccataccctccaaaaaatattaacttgtttttatatacccagacaccaagtttgtcctttgatgatggaggaattccttggcaatcaattctttcccactgtaacactctgtctgtagaccttgaatccagcatgtagaacttattggtattgcctcttgaatggtgtcctccaaacaagtacagcaccctgtctacacacacagcacagcttcctgacatagaaggaggaacatcaccttcagtgttgatttttttccatcttccagtctccatgttgtagatccatagttcttctctaggcagataaaagtcatataatcctctgagttgattactcttgtagccgccccagacgaacatgtggcgcccgtcgctgacggctacgtggcggctgcgctcagcggggcaggcaagctccatggactcatagctctcgaaggctggcccaggcaagtcgtcagcccgcagatcctcgttgccatcagccatcttgaggctgcacttttgctaaccaacaatgcccacacccgcgaggggccaaaaaaacaaaggaaaaggagagaaatgcacagcggcgcgaggcaaggaaaaggcggtggcgaaagggacggcgttgaggcctctctgccgcctgcgctcgcgtttcccagcctcctcggccgaggacggctctccgccgccgccggggcacgcctgcagacagaggggccgcgagcggagccgggcggcggcggcgcgggcccgggactcggggcactgcagggaagcggtccgcgtcgggccggctccctcttgcagcccgtctgccccgcctcctgcagtccacggccttgtttac

SEQ ID NO: 317458 - DNA, 397 bp, Homo Sapiens
  misc_feature (358)..(358): n is a, c, g, or t
ggatatttgcctgaagataaagtattgggaacttttgaattcgatgaaacatctttttggaattcaagtcatccaagaggatggaatgatcatgtacatattttagatactgaaacatttacctggagccagcctataactactggtaaagcaccttcacctcgtgctgcccatgcctgtgcaactgtcggaaatagaggcttcgtgtttggaggcagatatcgagatgctagaatgaatgatcttcactatcttaatctgggatacatggggagtgggaatgaattaattccacaagggcttatgccccgttgggtcgatcttgggcacttcacttaacaccagttttctttcaggntccatcttttttttctttggggggggttttacccactgg

SEQ ID NO: 317459 - DNA, 617 bp, Homo Sapiens
  misc_feature (97)..(151): n is a, c, g, or t
  misc_feature (554)..(562): n is a, c, g, or t
gtgcgagcggcgaggaatgttcccagtgactcacccgtgagcctcattgaggttagggcggccccatccgtcggtctccgccagctaggatctcccnnnnnnnnnnnnnnnnnnnnnnnnnnnnnnnnnnnnnnnnnnnnnnnnnnnnnnnttccctttcctgccttgcgccccactccctttcctcccctccctgtgtcccttcctgtccttcccagctcacgctctctttccctgtcgcctgcctttctttattcctttttttgcattggcgtcttggggctgttacacacacgcgcgctgtccattgcagcttacataaaggcgggcgcgattatgcaattatattgttagcgatatttcaagagcaatggctcgttttcttaggatttcaacacgaaggcattatgcatttttgaaaaactagtattgagaataataccttgcaacgtaaagaatgttttttggtatttttacacaatctctactttgaccaaacgagtctggacagttttcttttaatggaaaataggagaaatggtgagtagtaccannnnnnnnnagcgtagttcaaagaactttactataaaacattaggtagttctacaaataagtgc

SEQ ID NO: 317460 - DNA, 2311 bp, Homo Sapiens
  misc_feature (1319)..(1332): n is a, c, g, or t
  misc_feature (1870)..(1870): n is a, c, g, or t
  misc_feature (1878)..(1878): n is a, c, g, or t
  misc_feature (1919)..(1919): n is a, c, g, or t
  misc_feature (1941)..(2004): n is a, c, g, or t
  misc_feature (2018)..(2018): n is a, c, g, or t
  misc_feature (2021)..(2021): n is a, c, g, or t
  misc_feature (2037)..(2037): n is a, c, g, or t
  misc_feature (2044)..(2044): n is a, c, g, or t
  misc_feature (2065)..(2065): n is a, c, g, or t
  misc_feature (2084)..(2084): n is a, c, g, or t
  misc_feature (2088)..(2088): n is a, c, g, or t
  misc_feature (2105)..(2105): n is a, c, g, or t
  misc_feature (2107)..(2107): n is a, c, g, or t
  misc_feature (2116)..(2116): n is a, c, g, or t
  misc_feature (2120)..(2120): n is a, c, g, or t
  misc_feature (2124)..(2124): n is a, c, g, or t
  misc_feature (2129)..(2129): n is a, c, g, or t
  misc_feature (2150)..(2151): n is a, c, g, or t
  misc_feature (2153)..(2153): n is a, c, g, or t
  misc_feature (2162)..(2162): n is a, c, g, or t
  misc_feature (2188)..(2188): n is a, c, g, or t
  misc_feature (2198)..(2198): n is a, c, g, or t
  misc_feature (2207)..(2209): n is a, c, g, or t
  misc_feature (2245)..(2245): n is a, c, g, or t
  misc_feature (2247)..(2247): n is a, c, g, or t
  misc_feature (2249)..(2250): n is a, c, g, or t
  misc_feature (2252)..(2252): n is a, c, g, or t
  misc_feature (2271)..(2271): n is a, c, g, or t
  misc_feature (2282)..(2282): n is a, c, g, or t
  misc_feature (2285)..(2285): n is a, c, g, or t
  misc_feature (2307)..(2307): n is a, c, g, or t
tggactcacgagtccccaggtccagctttattaccctaatacaagtccaacctctgggaacatccaaaattcgctgttccaaagtttaattaaaaacacaatttacaaatatttaatatcttctgaaaagcatttctaagttaagaatgaaaaagtatgtacataatatataatcaaataccaggcagcctcaacttccaccaggtccacactcagcaacatccgtctttttaggttcttcagtgtcttctgtcaaatccacaaagttgttttccatgacgggggaaggaatggaaatccccattgcttttcgaactccatacgtgcttacgatatcacctggagttacttgctgtgcaagttctttaagattattggtcacttgttcagcaagatgcatttctctgtatgagggacccaagagacagatcatgttcggagggggtctggtgctcaaacgttcattctgggcttcctggagttccctgagcaatctggtggtctcatcaagtttcttctggaatatttcagcttcttcagagtcaaaaacttcaactggaacgccaaaatttgttactgctttcagcgctatgagcctgtcttgagtactggagtccaaacgccctggtggctctacttctgtaatctccatttcttttgctgtgtcaagtgtcctagtatggccttcatcttcaggcaatgacatctccatctcttgtagggtcctggaatgccctccttttgttaaaacatccagtaaactatctgccatgacatacggataatcttggcacgtggccaaaaactcatggatgctgaaatcacttggaagatcagagtcttccccataggttgaatagattaaatcagaatcatccttgctgatatttgcaaatgtggagtcataatgcggtgcataagaactgtagggcccataattcaaatataacactggagtgactttgttccttttatcctctttgaacccctgcaaagtattcactccagactgaagtcttccagttgtcattccccagtctcacagggcagtagcctggctctcctacaatgggatccacaggatggagaagtcccaacgtcgttgttccatctggttttcttctttcaaattcgcactgactgttcacaagccgcctggtcagctttcctccagattccttcacgatgcggtcaagctgctcctgctctctctctaaattattgcttttaaacttattttcaagcatatcttgtgtctttgtttttattttcttttgctgggactcttgaaggcgtgtgcttcggcatctccagagtcnnnnnnnnnnnnnngccagcagcctccgtcctccccactctgtgaggtgtctgttccatctttctgctttcgagttttctgcaagtcagcctatgaagtctatgctctgcttcagagctctgaattctttcctggctaagaattttcattcctgagtgcaacagcttctttgcagctttataataaatggtctctggtttattgtaaatcatggcattagtacacattagtttgaagttatcctttagttcttctatggactgatagtcattgttcttgatcttttctttcatggtactaaaatccattgggtgtttaatgatcatggagtagccaggagcaataaaatcagtcacaggaaatgaaaagaaagcacttggatcttttctctgcaattgtctcatcagttgattcaaagcttcttgaaggggtgtctgttctacttcttcttgtttggctaaagagcttgtgagaggcttctcaggaggcaagtctatatctcacaggggcgtgacactggagatttttttctgcctcattctccacccggtntcgatttngcttttttttatcctccttaacttttctccgttttctcccnttttcttcccctggaatttgcnnnnnnnnnnnnnnnnnnnnnnnnnnnnnnnnnnnnnnnnnnnnnnnnnnnnnnnnnnnnnnnncgaagaggctggantcntgccccgagctgcccntggaganttcggtgacttcgttccctcntattttgaggaccagcttnaagngcttttttacatactcntngtagaggtntttntccnatttntgctttttgtgttttttgccnntntccgaccgngccccggtgccctccccccgcgccangcccaggccntgcggcgcnnnttccggtccgggccaggcgagcggagggcgggagcngntnntncgagaccccgcgccgcgangcaggggggcngcngcgccgggcggcgcgatgcccntctc

SEQ ID NO: 317461 - DNA, 936 bp, Homo Sapiens
  misc_feature (534)..(596): n is a, c, g, or t
  misc_feature (782)..(782): n is a, c, g, or t
cggccaaagtcccacccccaggaaagtttaaggctttgggtttccaggccttggaaattcttttccggggttaaaaaatttccatttccggagggccaccaactttttttccagcctttataataaagggtctctgggtttatggtaaatcatggcattagtacacattagtttgaagttatcctttagttccttttatggacggatagtcatggttctggatcttttctttcatgggtactaaaatccattgggtgtttaatgatcatggagtagccaggagcaataaaatcagtcacaggaaatgaaaagaaagcacttggatcttttctctgcaattgtctcatcagttgattcaaagcttcttgaaggggtgtctgttctacttcttcttgtttggctaaagagcttgtgagaggcttctcaggaggcaagtctaatctcacaggggcgtgacactggagatctttttctgcctcattctccacccggtctcgatctcgcttctttttatcctccttaactcttctccgnnnnnnnnnnnnnnnnnnnnnnnnnnnnnnnnnnnnnnnnnnnnnnnnnnnnnnnnnnnnnnngtccttgtgtttgtcatgatcgtttttgtcttcgaagaggctggagtcgtgctcttagttgtctgtgtagagttcggtgactttgttccctcctactttgaggaccagcttcaaggttttctctacatactcctcgtagaggtgtttgtccgacttgtgcttcttgtgcttcttgtccatgtccgnccgtgcttcggtgtccgccccccgcgccaggcccaggctgtgcggcgccgcttccggtccgggccaggcgagcggagggcgggagcggggcccgcgagaccccgcgccgcgaggcaggggggcggcgcgcgccgggcggcgctatgcccctctc

SEQ ID NO: 317462 - DNA, 612 bp, Homo Sapiens
  misc_feature (31)..(31): n is a, c, g, or t
  misc_feature (38)..(38): n is a, c, g, or t
  misc_feature (59)..(59): n is a, c, g, or t
  misc_feature (66)..(66): n is a, c, g, or t
  misc_feature (171)..(171): n is a, c, g, or t
aacccttttgattgtgttgtggtaatcccantgatttncggtggaaaaagtaacaaagntaatccntcccatgaatggaatatgcatatggtaataaccaggctgggatcctaatgggaccccgggaactgagagactggaaggtacacccaggaaggccgcaatgtgttnttatacaaattgtatgctgtcctagtaacttttccatcagaggccttataaatcaggagtgaagaatcttctgctgcatgagataacaagtaggaaccctcctgcaagctactttagtttctttagaatgtgttggaggatgttaaataaattggaaatcttgagtgctgaaagcttttcttttaattcttctgaggtaatttcttccagtagaaaaagttttgaagtaaatgcatcgatatgcccaacataaaatgagctgttggaatgcaataaactttcagtccataagcgacaaagttcactttcagtcagagcttcaactccataacaagcttgatactctacttttggtagtacataaactggaaattgtcttctgattttcttccgttttttagaacgtggtcttgtctctatcctctggacactgcagcgtac

SEQ ID NO: 317463 - DNA, 1137 bp, Homo Sapiens
  misc_feature (64)..(75): n is a, c, g, or t
  misc_feature (131)..(194): n is a, c, g, or t
  misc_feature (198)..(456): n is a, c, g, or t
ggggcacccccgagctgggggtgagaagcacgcggcttgtgtgccgacggaaagctttggattnnnnnnnnnnnnaaaacgaggaaacgggaaaaagggggatggaaattgataggaaagagagggggtgnnnnnnnnnnnnnnnnnnnnnnnnnnnnnnnnnnnnnnnnnnnnnnnnnnnnnnnnnnnnnnnnattnnnnnnnnnnnnnnnnnnnnnnnnnnnnnnnnnnnnnnnnnnnnnnnnnnnnnnnnnnnnnnnnnnnnnnnnnnnnnnnnnnnnnnnnnnnnnnnnnnnnnnnnnnnnnnnnnnnnnnnnnnnnnnnnnnnnnnnnnnnnnnnnnnnnnnnnnnnnnnnnnnnnnnnnnnnnnnnnnnnnnnnnnnnnnnnnnnnnnnnnnnnnnnnnnnnnnnnnnnnnnnnnnnnnnnnnnnnnnnnnnnnnnnnnnnnnnnnnnnntttgaaacgttaaacatcgtttttattcccagcacctaccattgtgccccccttataatagacagtaatggtatagtgaatgaatgaacaaatgaatgagttgagaaatccagaataatacatcacaagctacagcgaatttttcttgctagtgctcaggacaggtgaaatgaatcataacaggttggtgtctgtgaaaagctgacagagatgtgagaggtcccaccctgaggccaacaaagactctgcagctctggcagaaccactaagctctcagctcctagtcatcacatctttttcccttaaccctgccaagtcaaccagatgaggagtgtcttcagggtgggtctgttgcccctctttgcccatgccgtcatttgctgtaggagtgaggcaagtccatatgcctttaagaaccgagtaggacaatggagatgatgccaataatcagcccaaccacttccagtgaccgtctgggctatcagcgttgactgtggcaaccacgagcgtgcagagaaagctgaccatcagcagcatggggagagggcctggggtgctcacgcaccagtcagcacacagctccaggaaggaaaggggttgcagtggggggcctgcaggaagctcactctgtgagagtaagcctgcaaaactcagtgtgcaggcaccagccactcagtgaaa

SEQ ID NO: 317464 - DNA, 301 bp, Homo Sapiens
tttagttccacttatatgattattttcttcatcagcaaagggttaagagcagtttacaccaaaccaagttaccaagcagatcacaatcagttcacaggttggataagtcacggcacgcaggccagaaaatgtactcagacttcagtcaacctaatgggacagtgtactcacactgtgggttttgttgttttggagtctagaagctccatctacccattctccatgggtctaccaccatgttaacacagatttaccacaggcgccatcttgtaccaagcctaggatagtctctttaaaaaaa

SEQ ID NO: 317465 - DNA, 570 bp, Homo Sapiens
agattcagctagaccaggatccagtggctttcagttttgcattctagggcatgtgtaaaataatggacaagcacagtcgttgatataacttgtcaaatgtctgttctcaagtgggcaattaggaaaatacatttgagctaaaaagacagagtgatgtatttttcatgactgaggttacaatggtattttaggttattatatactaaagaccaggaaattaattggtgtcctctaaaatgcaggagagcaagagattaatctgataaatggtttccattaaaaattccatttggcttctcaaattcatcttgtctcctgcagtttctgaatgccacaatgtcctccccttgtgccttccagctgcattctcttgctccctacaccactaggtttggagaatatcagtatttatacaaatccagtagcatagcgggaactggaagcttaacccattagctccctaattcatgaatatgttgactgaaaccatagttttgtctttcaatttagggtttggttggtactcagaatgtaatctttgtcgatactgaagaaaagggttttggtgac

SEQ ID NO: 317466 - DNA, 879 bp, Homo Sapiens
  misc_feature (798)..(832): n is a, c, g, or t
ttttttttgagttactctgatgtttattttaatgcatcttagtccacacagttggtataaaatcagaaaatgcaaagcaaaaacaaaaggtctggagtcttagcatcagaagggcaccatatatacatctacagttggtggccaatacaagtcattgccagacagtccttggaggcacagaacagcctagacccagccaagctctaggaactcacggtcccaaggagtctagacgcttgttctgatgctccgaccgtaagaaaaatgtgggagtgatgaaggctttatgatttactcattatagtaataatagcagcctagctaggtacaaaagcagttataaaccatttatattacacagaattattcaggtctccattctatcttatgttgtaaaattgttaattggatttccagtgagttgtttagatgattagtgataataaggaatggtaaatccatagcaccatttcaaagacttgttgtcactgatttctcatttagatgtgtgacgaagatactccacctgtaaaggcaagtatgccaatgccacaagcccgtgtttttgcgagggcatccagtttgggcattttgtccgtgtgcgcgtaaagcttcacacagaggttcgggcagcggctgtttctgttggatgcactgggtcacccaccagaaaagggcttttggacatttggggtttctacccacactttggttttctaaatgaggtggactgggagggaggtatcttctttcagatgaaagggaaggggcgagatggagttatcttatttctgggtnnnnnnnnnnnnnnnnnnnnnnnnnnnnnnnnnnntactgagctggattatactgttaggatgtaaagttccttagctactt

SEQ ID NO: 317467 - DNA, 467 bp, Homo Sapiens
  misc_feature (444)..(444): n is a, c, g, or t
  misc_feature (450)..(450): n is a, c, g, or t
gaaaccccaaatgtccaaaagcccttttctggtgggtgacccagtgcatccaacagaaacagccgctgcccgaacctctgtgtgaagctttacgcgcacacggacaaaatgcccaaactggagcccttgcaaaaacacggcttgtggcattggcatacttgcccttacaggtggagtatcttcgtcacacatctaaatgagaaatcagtgacaacaagtctttgaaatggtgctatggatttaccattccttattatcacttaatcatctaaacaacttcactgggaaatccaatttaacaatttttacaacataaggataggaatgggggacctggaattaattctgtgttaatattaaatgggtttattaactggcttttgttacctaggctagggctggctatttttttactattatggggtaaatccttaaaggcctttnttcaanttccccctttttttctt

SEQ ID NO: 317468 - DNA, 1592 bp, Homo Sapiens
  misc_feature (1339)..(1339): n is a, c, g, or t
gtcccggccaccgctgcctcagcctctgcctcccagcctctttctgagggaaaggacaagatgaagtggaaggcgcttttcaccgcggccatcctgcaggcacagttgccgattacagaggcacagagctttggcctgctggatcccaaactctgctacctgctggatggaatcctcttcatctatggtgtcattctcactgccttgttcctgagagtgaagttcagcaggagcgcagacgcccccgcgtaccagcagggccagaaccagctctataacgagctcaatctaggacgaagagaggagtacgatgttttggacaagagacgtggccgggaccctgagatggggggaaagccgagaaggaagaaccctcaggaaggcctgtacaatgaactgcagaaagataagatggcggaggcctacagtgagattgggatgaaaggcgagcgccggaggggcaaggggcacgatggcctttaccagggtctcagtacagccaccaaggacacctacgacgcccttcacatgcaggccctgccccctcgctaacagccaggggatttcaccactcaaaggccagacctgcagacgcccagattatgagacacaggatgaagcatttacaacccggttcactcttctcagccactgaagtattcccctttatgtacaggatgctttggttatatttagctccaaaccttcacacacagactgttgtccctgcactctttaagggagtgtactcccagggcttacggccctggccttgggccctctggtttgccggtggtgcaggtagacctgtctcctggcggttcctcgttctccctgggaggcgggcgcactgcctctcacagctgagttgttgagtctgttttgtaaagtccccagagaaagcgcagatgctagcacatgccctaatgtctgtatcactctgtgtctgagtggcttcactcctgctgtaaatttggcttctgttgtcaccttcacctcctttcaaggtaactgtactgggccatgttgtgcctccctggtgagagggccgggcagaggggcagatggaaaggagcctaggccaggtgcaaccagggagctgcaggggcatgggaaggtgggcgggcaggggagggtcagccagggcctgcgagggcagcgggagcctccctgcctcaggcctctgtgccgcaccattgaactgtaccatgtgctacaggggccagaagatgaacagactgaccttgatgagctgtgcacaaagtggcataaaaaacagtgtggttacacagtgtgaataaagtgctgcggagcaagaggaggccgttgattcacttcnactttcagcgaatgacaaaatcatctttgtgaaggcctcgcaggaagacgcaacacatgggacctataactgcccagcggacagtggcaggacaggaaaaacccgtcaatgtactaggatactgctgcgtcattacagggcacaggccatggatggaaaacgctctctgctctgctttttttctactgttttaatttatactggcatgctaaagccttcctattttgcataataaatgcttcagtgaaaatgc

SEQ ID NO: 317469 - DNA, 1009 bp, Homo Sapiens
ccaacgtgcctccggggcttttattggaacccaaaggcccttgaccaggggggcctcaggccggggccctttcaaagccacaaccccttgccccccatttttggagatttcggaattcccagaggggggcctcaggtcccttggtttaaggtggtttttggtgccatttccttcttggaataggttccaaccccctaaggggtaaatatttttgtcccccccaaataggccccccatatattccttgctccaggctgtccatgctcaacaaaacggctcccccctgggttggggtatgcaaggcaatgggcatccccggccatccacggccatccacccatccatccaaccttccatccatccgcaacaaggacagcagcaatttctgagcagtcagggccccagggttcacagcagtaggggctgggcttccagcaggctcatgattcaggccttaacccttgccctgggagcccccaaggataataacatccctttctggggcaacaaaactgggaccgagtgggtaactgatatttgacaggggaacctaaacagtctacggaagtgtcctgagatgggcgtaaagtcaaacagaccaagcacacaggtaacactgaaataggaaagagtaagagcttctgttcaggctggaggtgctcgtatggtgggacaggaaaggggaaaagagaaaggggcaacatggcagacataccacggttcctacagagattaggggcagccctggcccgggaagtacacagggcagagagctgactctcaggccaggaaggagtttagctctgacccatcctcagggaccacggctctcccccagcctcagctgacacacacacaaaggagcgtttcaggacacaggaagatgaagggttaaccctaacaaggaaacaagaagctcctggaggacacaaaatactgcctttaagctggtattaacccaacttaactaactcaacagactgggctcttccaggggtggggggcaccc

SEQ ID NO: 317470 - DNA, 845 bp, Homo Sapiens
tggtttctcaacttgctcagtgctttattgaaccaaggccctaacagatgactcagcagggccttcaagcacagccctgcccccatcttgagattcagaatccagagggtgctcagtccttggtttagctgcttctgtgacatttcctcttgaatagctccaaaccctaagtgtaaatatttttgtccacacaaataggcacacatatattcctgctgcaggctgtcatgctcaacaaaacgctcccacctggtttgggtatgcaaggcactgcgcatccacggccatccacggccatccacccatccatccaaccttccatccatccgcaacaagacagcagcaagttctgagcagtcaggccccagggttcacagcagtaggggctgggcttccagcaggctcatgattcaggccttaacccttgccctgggagcccccaaggataataacatccctttctggggcaacaaaactgggaccgagtgggtaactgatatttgacaggggaacctaaacagtctacgcgaagtgtcctgagatgggcgtaaagtcaacacagaccaagcacacaggtaacactgcaaatcggaaagagtaagagcttctgttcaggctggaggtgctcgtatggtgggacaggaaaggggaaaagagaaaggggcaacatggcagacataccacggttcctacagagattaggggcagccctggcccgggaagtacacagggcagagagctgactctcaggccaggaaggagtttagctctgacccatcctcagggaccacggctctcccccagcctcagccctcgtgccgaattcgccacccaggcctcgctac

SEQ ID NO: 317471 - DNA, 479 bp, Homo Sapiens
  misc_feature (16)..(16): n is a, c, g, or t
  misc_feature (52)..(52): n is a, c, g, or t
aatgggttaaactgantattttgaacaggggaacccttaaaacaattctaanggaaattgtcccttgaagatgggccttaaaattcaaaaacagacccaagccacacaggttaacactgaaaaataggaaaagagttaagagcttctgtttcaggctggaggtgctccgtatggtgggacaggaaaggggaaaagagaaaggggcaacatggcagacataccacggttcctacagagattaggggcagccctggcccgggaagtacacagggcagagagctgactctcaggccaggaaggagtttagctctgacccatcctcagggaccacggctctcccccagcctcagctgacacacacacaaaggagcgtttcaggacacaggaagatgaagggttaaccctaacaaggaaacaagaagctcctggaggacacaaaatactgcctttaagctggtattaacccaacttaactaact

SEQ ID NO: 317472 - DNA, 785 bp, Homo Sapiens
  misc_feature (626)..(685): n is a, c, g, or t
ctttttttcagcgcctgcgcgctgtcacgttacggcggaactaatccagcgacgcctgcgctttgacgcatttggtgccgtggaagggaaaaagggggactgcagtatgcgtcacacccggaagcggcgagccggaagtggggttagccaggttatccccaggggtggagaagcggaggcccaggaggagggggaataaagaaggtggaggatcctggctaccactctgaatccgataccgcttctcttagacctcagcgacagaaaaagggaagggtgtctcatcccccttcctcctctcctccctgtcctgagccttagccatggccgaggcaggggctgggctgagcgagaccgtcactgagacaacggttaccgtgacaaccgagcccgagaaccggagccttaccatcaaacttcggaaacggaagccagagaaaaaggtagaatggacaagtgacactgtggacaatgaacacatgggccgccgctcatccaaatgctgctgtatttatgagaaacctcgggcctttggcgagagctccacggaaagtgatgaggaggaagaagagggctgtggtcatacacactgtgtacgtggccaccgcaaaggacggcgtcgtgcnnnnnnnnnnnnnnnnnnnnnnnnnnnnnnnnnnnnnnnnnnnnnnnnnnnnnnnnnnnnagggccaatgcagcactaaatccctctctcctccagcattcctgtgtctgtctggccctaaatgtatccatgtggctacttctccagccccctccttccc

SEQ ID NO: 317473 - DNA, 1940 bp, Homo Sapiens
  misc_feature (92)..(107): n is a, c, g, or t
  misc_feature (136)..(162): n is a, c, g, or t
  misc_feature (165)..(168): n is a, c, g, or t
  misc_feature (176)..(177): n is a, c, g, or t
  misc_feature (184)..(184): n is a, c, g, or t
  misc_feature (186)..(296): n is a, c, g, or t
  misc_feature (314)..(339): n is a, c, g, or t
gttgtgaacaaaaaacaagtggtgtggtccaccacatagttctcctctgcgggaacaagatgagcactgtcttttcccttaatcttgtgggnnnnnnnnnnnnnnnngcgaggggtttttagaaagtttttttatnnnnnnnnnnnnnnnnnnnnnnnnnnnggnnnntttttggnntttgtgngnnnnnnnnnnnnnnnnnnnnnnnnnnnnnnnnnnnnnnnnnnnnnnnnnnnnnnnnnnnnnnnnnnnnnnnnnnnnnnnnnnnnnnnnnnnnnnnnnnnnnnnnnnnnnnntttttgtgtgttgtgtgnnnnnnnnnnnnnnnnnnnnnnnnnnaacacattttgtgattttgggttatttattttgtgcatctgtggcaataaatgagatctcagtggtggtatggatttgactgatctctgtaactgtgtatggcaaaaggaccggaaaatgaaaaccagatcccagtaaggggtagagaggggccaagagaactgaacatctgggctgccggagaaatcaaagtctaggaagtaagaggtaagagtgtactacaggggacataccccaatctctttgctccctccctcttccttcctctcccagagacccaggtccctgggactatattggatctgtctctgaagctgaaaaacaaaaggcagaggagacagtcggctctaagtgaccaatctcaagccagctttgtcagaaatcctaaataacaggagaagggtgggaagaaaggatatgattatttcttattccattttccataagaggtgagaatgacaagggcctcttttctaactcctcttgagggtgtgagaagggttagcaggaggagaagggctgggagctctgaggtctcctgtaagacctcatatctcacaggcaaggactaagaattaggattaaatattttagtgggatagctctaaaccaggattagcaagcaaagttagggcgcaaattcctggaatctgactgggaccctggcagtgaaagctgggactgttgaaaacccaatttaagtgttcgctactcatgttgagagtgcagggccaagataactagatcccaggacaggcagtttggcagtgagaacaaaaggaagacactgggaccaaggtgcctagatccctcgagagagaagggtgggtattgggaggaaaaatgaggactggggaaacccaggaggctgggttctggaatagcagcaagtcagaatttcaggatctctgttcgtcctcctcttcctcttccctctatcaggcagaagagagggaaggagggggctggagaagtagccacatggatacatttagggccagacagacacaggaatgctggaggagagagggatttagtgctgcattggccctggagggggctgggaagggtcaggaggctggggaggggtggtgggggtcggtcctagggttgcacgacgccgtcctttgcggtggccacgtacacagtgtgtatgaccacagccctcttcttcctcctcatcactttccgtggagctctcgccaaaggcccgaggtttctcataaatacagcagcatttggatgagcggcggcccatgtgttcattgtccacagtgtcacttgtccattctacctttttctctggcttccgtttccgaagtttgatggtaaggctccggttctcgggctcggttgtcacggtaaccgttgtctcagtgacggtctcgctcagcccagcccctgcctcggccatggctaaggctcaggacagggaggagaggaggaagggggatgagacacccttccctttttctgtcgctgaggtctaagagaagcggtatcggattcagagtggtagccaggatcctccaccttctttattccccctcctcctgggcctccgcttctccacccctggggataacctggctaaccccccc

SEQ ID NO: 317474 - DNA, 413 bp, Homo Sapiens
  misc_feature (153)..(218): n is a, c, g, or t
ctgaccattttctgattggcagcagcaggagggccccagggtcaaacaatgcagtcacacaggcctgtgctttaactgtgcctccccacacagcttggtgaccccgggccagtgactttgacctttgaagcctcaattcccttgactgtaaannnnnnnnnnnnnnnnnnnnnnnnnnnnnnnnnnnnnnnnnnnnnnnnnnnnnnnnnnnnnnnnnngcttgcccagaccaacaaaatcagaaccccctgatgagacctactgctgtaaggtaaaatgatcatcttctactcccagaagtggaattaagggagactatccatggaaggtgcttaccgccatgctttacacagagtgcgccgtaaaaggaggccgtgatatggtaccatttggagttcccagactctagaaac

SEQ ID NO: 317475 - DNA, 1065 bp, Homo Sapiens
  misc_feature (619)..(643): n is a, c, g, or t
cgacagctatcacacggcacgacttcatcgagaccaacggggacaactgcctggtgacactgctgccgctgctaaacatggcctacaagttccgcacccacagccctgaagccctggagcagctatacccctgggagtgcttcgtcttctgcctgatcatcttcggcaccttcaccaaccagatccacaagtggtcgcacacgtactttgggctgccacgctgggtcaccctcctgcaggactggcatgtcatcctgccacgtaaacaccatcgcatccaccacgtctcaccccacgaagacctacttctgcatcaccacagggctggctccactaccctctggagaagataaggcttctggcgaacgcctggaggaccttatccaggggctgacgggcgagaagcctcgggcagaatgacatgaaatgggcccagaagatcaaataacttctccgagcctgctacctggttgccaaccttccctagcccccaaaccgaagccatctgccaaattccagcctctttgagctggcccctccagatggagaggacatctcctgggctgggcccaggtaccccagcccacccctcatgacacagaatacttgagccactgannnnnnnnnnnnnnnnnnnnnnnnncctcggcccctcctcagccacctgagttgctctatctgcaagcctgactctgccagcctcccctggtagagaggaggtttacccactccctgcacgcctgccgtccctgccccgctgggcagcccttcagtgtggctggcgttggggccagtgagttgcctctttccctccttgtctggccccagtggtctggggagcccccaggcacacctaagcgtcgtggagcattgttctgccacagccctgcatactgaccccgggaaaggctgggcaggtggaacagccccagccaccaccttcagcctagcctgtccccccaggaatgggtgaagctcagcaggggtcttgagggtagccccgccaaaaagaagctgggaccctcctgcttcaagtctaagaccccctactttctctggctgcca

SEQ ID NO: 317476 - DNA, 749 bp, Homo Sapiens
acaaaacaccaattttattataaatatcaagaacctacagggtgtttatgggccagcatatgccttcagttatgttgaaaatagctgatcatctttccgtacattctgaacatttctcagtttcagagtgctggccacaccaaagcatcagccctggctctaaactccgttacagtaaggaattacaaatcctgtgtttgtactccaggaagtctgcattatcacgaggagcttggaaaggaggtaacacactcaaggcaaatttcaagtaactcatcctggaggcagctgcctactctgcagctgtggttctccaccacagagagaagaaaagggagggagatggagtgcgcaggtctgagaaggctttcattctggagcatctgcaggagcctgcaccatggcccagtagcacccctttttctccatgagctgctggtgggttcccccctcccggatagcgcctccttccagaaagaggatgtggtcagcctgctccaccaggctgaggtgctgggtgatgagaagcactgagcgggagtaccggtcagggctttcgtacaggagctgctccacctgaggaaagacatcggaccgtcagagccggggactaccctcagcccagggagacacctgtgtttccagggctgggactgacctcacaggatcactgctggctctgctaacaaccccaaggacaccaacgtttcccattctgagtacttctccgcaaaccctttgtttcatta

SEQ ID NO: 317477 - DNA, 525 bp, Homo Sapiens
agaaggagaaggacttgaagagtctgctgatataaaaggtgaacctcatggactggaaaacatggaactgagaagtttggaactcagcgtcgtagaacctcagcctgtatttgaggcatcaggtgctccagatatttacagttcaaataaagatcttccccctgaaacacctggagcggaggacaaaggcaagagctcgaagaccaaaccctttcgctgtaagccatgccaatatgaagcagaatctgaagaacagtttgtgcatcacatcagagttcacagtgctaagaaattttttgtggaagagagtgcagagaagcaggcaaaagccagggaatctggctcttccactgcagaagagggagatttctccaagggccccattcgctgtgaccgctgcggctacaatactaatcgatatgatcactatacagcacacctgaaacaccacaccagagctggggataatgagcgagtctacaagtgtatcatttgcacatacacaacagtgagcgagtatcactg

SEQ ID NO: 317478 - DNA, 350 bp, Homo Sapiens
gggagtttatgtgaaagagtaaggcctctttgcagttgagtataagaggaaggcttgtgtctcgtgctcatccctggaaatggaatgtctcggtgtaaaccccgttcgtatgttctatttcctcgcgataggagaaacccgccttatgtctgaaggtgacacttgctggcgccaatcctgctctttaatgcactgagatgtttgtgtaaagtcaaccttaattcgtggcctatgtgcacctcaaggcctgctgaccctctccccacctattcccctatagtcctgccacatccctctctccgagtatggtagatatagtgctctatatatgcggagggacccgcgcgcgg

SEQ ID NO: 317479 - DNA, 426 bp, Homo Sapiens
ttttaaatttaccagttccttcctgaaatttccatcctggaatgaatttgttttatataagaaattgatttttgttgtttctctgcatttatgaatatgtcatcatacttgtgagagagacaagaaaagtaaaaaaattcagagtgcagagtgattaaaatataaagttgatatttgtatacacttttctatctctttctggttttatatttgcaacatcagtgcctatttgaccaagaaaacaaagatctagaaattcttgggggttcaagacttctgccttcttgagaggcagagagggattggaatgaatagctcacctcgtcacttggctgcagctgctcaatggaaattgccatagttcactattgggcaaagttagagctgcagttcccgaccctattggcctcaggtgccagctcgtgc

SEQ ID NO: 317480 - DNA, 353 bp, Homo Sapiens
ctctctccccaattctcactggaatgtaatctcccagaacccaggacctttgccttttttgttctgtgcggaatttctcaatactcagtacctgtcccttcatagaggctcaataaatacttctcgaatagatgaatgatacatggtggctacacaatttttattgtcaaagagaattttgaagcccaaaaagtgcacccagcccatggttcctctgggaccaggtaccgtttctgtctggccataggattctcgaatgtcacagtccctgtctgggccctacagttctacagagtttctgaaaaaaggcactcccccacagtgacgcagttctgtatatgggggaacgtgca

SEQ ID NO: 317481 - DNA, 980 bp, Homo Sapiens
  misc_feature (164)..(183): n is a, c, g, or t
  misc_feature (186)..(186): n is a, c, g, or t
taaatttggtaaaattggaatttccaggttcaagttaaaaagaaaccccacttttatattcttttaagctttaggaatttttataaaccaattgggaaagccagggaaaagtggttttttcatttcaactcttaataaattgtgcaggggataaagctagaggnnnnnnnnnnnnnnnnnnnngtnccagtcttctgtcttcttaaaattatttttcattctgattatattacaaagaaatgagcggtggaggtttggcactgttttccatcttaacagttgttctgtattgtaagattttatatgtgattcataatgtactactataacaagacacagtttttatatattactggaataatgcaaagaaaatgaattttcctttgggtccagtaattgtcaaaggaatgattgcagattcagaaaatgtgctttgtaataaccctgttaacataaagtatacactgaggaaaaaaataagtatggcacatatatggaaggattagttgtattagcaaggcatttcagggatggctttggttctttagactaagatacatccaatttagacccccttcaaatccttagacaaatgggaatcacttggtaacataaagattattttggtgggcaggggctgatttcaccatgtgcttacaaatgctccaactagtcagtaacctatcccatctgaaggaaggatttgctctggtaataaggctgatatgctcaagctgtaagaattaatttgaatatcaaaaatgaaattgagattgctaaccatgtcctgatagttacagcatgtagaatattaaatgtcctcttttttacctaaagtaaaaaaatgaagaagcatggttaattcacttgtgctgattaacacagatgtccacgtgcaacttctgtgtgtgagcctccacatgctgacatgccaacagatgctttcccttcaccgtgctaatcccactatatgttctcct

SEQ ID NO: 317482 - DNA, 584 bp, Homo Sapiens
cgctttgtcatgcactgtgctgtagcctcagttactacacagtctgtacatgatagaccggagctttggttctgcctgatgctagctcccctgtgtcctgagtttttcttttcaatattagacttaatcccagaattcacatgttgaaagaaaacttagaggtctagtgacatgtacccgatcatggtaatactggatgttcactgagcacttactatcttcaggccttttctaagtgatttatgaagttgtcaggtttaatcctcacaacgcccttatgaatgagctattgttattatcccgatttggcagatgaggaaactgaggcttgaggggaggatgacgtactcaaggtcacacagctgggaggcggcaagctggaagttgaacccaaggagtctcacatcggagccaggactctcacccttcagtggtatgctgccttaatcaggcacacatacaggcggggagaggcaggtttcccgacaccacactaggctggtgccggtcaggctacacccaggaacctggaggcctgtcattcttttgtgatgctgttaattcctgttgaggaagtgaggctt

SEQ ID NO: 317483 - DNA, 576 bp, Homo Sapiens
ccaaaaaacttgggttgattctgtaaaggaattctccttccccccaattctcataatgttcattaaatgaaattccctagaagtaaggatctgagtccttctgggccagggatccagagtacagacgatgtgcacatctgcccaggcccagccactccacgtcatgactctgggaactccaaccactgctcctcaacaggcagcactgtcgaggtcacctttcaaagaattgctctttctgacctggtgctcctcttaccctcacagctcggcaggaatcaggaggtaggaatgctattaccaacagggattttcatggatggataaaaaggtcatgatgcaaatcctccaaaaaactgggctcaaaacccaagcatcttgtcctctaggccagcatgagaggtctgaagtgtcactgcctctagctaaaagagggaaggtcagacaaccctgtcctcctaaggccaataatgggaactctcaccaatgcataaagagacacattaaaaacgtatctcaaaaggcagcctggatcgcagtcttttgcaatcaagaacctgggagtctaatgctcca

SEQ ID NO: 317484 - DNA, 360 bp, Homo Sapiens
  misc_feature (205)..(278): n is a, c, g, or t
atacagacatcctctcttctccgaagccctggctccatgtgataaccaagcccttttccatatctttgtaaataaaaattatgatgacaagtcaacaaaatattcttcacctgatttttaaaaaattcctaaactatcccatgccacagtttctttttaatgatattcgatacggtttggctctgtgtcctcaccaagtgtggtnnnnnnnnnnnnnnnnnnnnnnnnnnnnnnnnnnnnnnnnnnnnnnnnnnnnnnnnnnnnnnnnnnnnnnnnnnaagaattagacaggcatggtggcacacatgtgtaatcacagctactcaagagtctgagacagaagtatcacgtgaaccgcgg

SEQ ID NO: 317485 - DNA, 504 bp, Homo Sapiens
caacatagagagaccctgtctctacaaaataaataagtaaataaaacacctgaaacactaaagatttacccttagctctcttccataacaccaaccttttcaaaaatatgctacatcacaatttttaagaatgtcttgagctcagaacatgtctattctatactatcaagctgatcttttaagtagcacatagtagaattaaagcctaagtagattttgttattctaactgttttatcaacattttcagcaatgtcttcaatgatcagaaatcaagaaaagaggatacagaaagtaaaagaccaggaaaaaatgttactaaaatgactcgttgcttgcctattctttacagaggaatgaggcccaattaattgtggtgttactcgtaattagtgccctgtgtactttttctttttatgtgaaaatttaataaaagataccctgtcttgtaaactctattttgaaataaactattcttgaatccctcacagtaaacctcgtgccg

SEQ ID NO: 317486 - DNA, 1096 bp, Homo Sapiens
  misc_feature (884)..(884): n is a, c, g, or t
  misc_feature (913)..(975): n is a, c, g, or t
  misc_feature (1008)..(1019): n is a, c, g, or t
  misc_feature (1060)..(1060): n is a, c, g, or t
ctgtagtatattccagacctgaggggactcacactcgtgttgatacttggatcacatattccgtgaggttaggaaggtaaatctaccaacaggaagccctgtactctgtattccaaggccattggtaaatgtgttggtgccactgatcggactgtatgaccttaaacaagtcaccttagttttcaatgaaatgggaatatcattggctcctctttcatgaatgctgtgagaatcagatgtgcaacaggtacagacttgccctttgaaatctatacctctggatacattagaggcattttattaacaaaggcccttctaaatgtgctatttatttgacacataactatcagatttgccttaattttgtgtttatagcatttatcaaaacgtatcctcatagactttatgcagattaatatggtcaattgatttggataaaagaaagtaatttcagggtttgtttttaagccaggacaagaagtgcaaatgcctctttgaagcaatttaggctaaactgattttgaaatttcaaaatgttttattttactttgttttattaagccaggacaagaagtgcaaatgcctctttgaagcaattcaggctaggtaaaccgattttgccatttcaaaacgttttattttactttgttttatatcagagtcttataaaacctgctgcaaatatttctgaatgtctttgtaaaagtgtttgttagtgtacctgtgattatagtacttcacttttttcctttggattaattggttaaatgaatgagaaatgtgttatgttttttactaaaaagtataaattaaaattttggaaagaaaaggcaatatttatctggctccccaatttaaagtttgattttattggcccccaaccntacaccattaaaataactacatacaaacnnnnnnnnnnnnnnnnnnnnnnnnnnnnnnnnnnnnnnnnnnnnnnnnnnnnnnnnnnnnnnncactaaaccataaccaccccttaaacatctttnnnnnnnnnnnntaccatgcccacccactgcccgcagtcttcccacataacgnacgaatgctcttcacgagaggttgccacaccccccc

SEQ ID NO: 317487 - DNA, 1139 bp, Homo Sapiens
cagagacaaggtctcactatgttgcccagggatggtcttgaactcctgagctcaagtgaccttcccaaagtgctgggattacaggtgtgagccctgcacctggccctggtttaataagaaccagagccacaaccctctcagagtgacccagtggagccccagttacctgcctcactctgagagtgaaattaggcagcgagaaaggaaaagccagtttttcaaccagcaggcaactttcccctctcaacagggacactggggacttatgtgccagcccaggctgaactaactactgtgtgacttactgcctcagctaaagcttgcagctcaagaaggaggatgccccttccttcgcgaaccctccgtgggtctggcaggcacccagcctctgtgcatggcctgggaaggaaccactgccctgggttagagaatgccacgtgaacacaagaaaaaggatgcggcaggagttaaccatcctccccttctgtccctccaggaggcagggaggaacatctcaggctgaatgctggccttccccaaatggcccacagggaaaggctggggaaaaggagctggattcactgcccagtacttgtctcatttcccaagactttatccaattctcagccactgagtagggtaccacctgggtcctagtgtgctagatagtttcaggcaggagcctgggagcaagggctgtgctggccctcttggcttatcagggggcttccctggtcatcctccagcagcaactgtcttagcgctgggtggccagcgtcctgggcttgtagacagggacatctttgtcccagagtgcaggctgccccttgataatgtcagctgccttctctgcgatcatgattgtgggggcgttcaggttgccgctgaccatgctaggcatgatggaggcatcgacgaccctgaggttttccaccccgaggacccttgtctgcggatccaccacggcagtgggatcggagggctggcccatcttacaggtgcacgaggggtggtaggcgctgtcggcttttgcccgcacaaaggcatctatctctttattgactgaatgtggcttcctggctggagctctttccctcggaacggagccagggcttccctcgtgccgaattcgccaccca

SEQ ID NO: 317488 - DNA, 991 bp, Homo Sapiens
  misc_feature (84)..(119): n is a, c, g, or t
acaaaaacttacacattatggtgccactcgttatgcgaaagaacgagcgtcaatcagtcagatgagcgaggaagctgacgactnnnnnnnnnnnnnnnnnnnnnnnnnnnnnnnnnnnnagtcgactgtaccggacatttgcccgggaattcagccattacggccggggagggctcttctcttgaccagcaggattttgccaagtcaagcaaatgactgttgcaatgcatgactattttcctatgttgtctgattcttaatctaacttattgtgggagctggagtgatcatggccctgtttctacccaaacataggagggatcataagtatattcaggatgcagacatgtgcgactggccttcgtattcctatacccatctctcatctatataatttccctccaccaagaagagcgtctgacatggcctaatattaatcttccacgttttcatcatcattttgggcgtggctaacctgattgttcagttttttatgtgaaatacctcaactgtttttttcaagagctctcatgatattttgagccttgacaacagttctatataaattcacttgtaaatgctgctgttgtgtaattctaaatattttctatgataatttgaaagcgcgggaaatagtggccccttaatgagtatttttttattggggtgtggaaaggggcaaaaagagtgatcttagtgtctttacctttctcatattaacttacctctttattctgtggtcttttctgaatagaaatgtatgccctatgaagaaatcatgctgggttttgcttttagagataaaaggtggtggatttattttgcctgcagtaaacgattctcagggtgtcagagcaggcatattgtcaaattcctgcttctgttttatgtgttcagtgtattcactttcattttcttacttactataccatttctgcagttttgccaaacctctactgtttgggacagtaagccaaattcctcattttta

SEQ ID NO: 317489 - DNA, 364 bp, Homo Sapiens
cggcagtttctgttctatgacaggccagaaactatagtctgttgtgagctttcaggctctgctttgcctctgaatgtgtcaagtggagacttgaacacttggcttttagaatgacgattacagcaaagatttcttgagtgcttactatgtgccaggctttaagtattttatatacattcttacaacaattctatgaggcatgtgtctattattggcttcattttatagatgagaaagccaaggcacagaacggtgaccaagatcacacaggttgagtctggatttgaacccatgaatctgcagtttgtgctctcagtcagatgcttcccctgctcttaatccattttctgtgttccttctttcg

SEQ ID NO: 317490 - DNA, 384 bp, Homo Sapiens
ccagttgccatgtctttacctacccgggcatccttgtgaaaagacgcacagttaattgagggaagtaagagccaccctcaaattaaaatctaaaaggacccacacacattgtattgtagagcatttttaaaataaaattccagttagccctaattacctacacccattcttgctctctccctaatgcttctttacctgttagaaaaaagctgtaggacaaaaccatgtaataaccatgcaccctactcaaatagcttgtgctttctaacttaaatgctcaaatttgaagattatataggcaccacagtttccctttctaatattctatttactagtgtcctataaggttctctgactatataaatctctgtcacctctcgtgcc

SEQ ID NO: 317491 - DNA, 1444 bp, Homo Sapiens
  misc_feature (356)..(411): n is a, c, g, or t
cggcttgtggtccctccccccggggctccaaccgtccttccccgttgccgcgctgctctttttcgtctcttgggcctggtcaaacgtgtccgtacttgcccccggtattgacgccccctttggtttgtcaagctccgcccttggacagccgaaccagttcttcctgactaggtctgtttctcttagtatttggatgtccctctctgctgccacttctgcccagatgaggcactgataatgccctgcaggtcactcacaatcctagctccacatcactccatggtttgataacctagaaccacgttatgatttccatttataatgccctaagaacagctgaaaagatctgtattaannnnnnnnnnnnnnnnnnnnnnnnnnnnnnnnnnnnnnnnnnnnnnnnnnnnnnnnattctgctggttctgagaaacataaatggtaccatagggaggtgtttcctcctaagtggcaggaggatgtttgctgggagttaagtgaaccaattcctcctctgcttacaccacgtgggggtaggtccagaactcaggccttgggaacatatgctgtgctctcttctacaggcgctgtgtggaagaaccaatagcagttgttaaatagctgtggaatttcctccacaatccacatagtgatgtgtctccaaggagctctgggtcatgaggccaatgtatgaaatcttcactgaagttcgcatgaagatcactatgttgtgcaccaggatctcaggtaccgtgcagaagaagtacacataggaaaacggtcctcccatctcggccttcccggtaaaattcaccagttgctcactccgaggtggaataagggagacgttagtagtcacatatgtactgaccactgtgttcatgtactgaatctggctggacaggctggtcactgccaccgtgtagaagttggagttcctgattttcagggtggccatgatggtgagaattacaagggagtcttgcttattaaatgtgactttcaccactttgatgccgtcatcatccacaaggactgaatgcggaaacaggaagaaaaccaccaaaccagatgccaggagacaaagcaggatggacaggaggacatattgcttagttcgctgagggcgcaatctctgatcactgtgtgggatcaaagccaccaactcatttacttgctctgttggaatgtagcctgtcccctggcacgtgagacaggtgatgctatctctcccggtgaattccacatatgggaactgagcaatggcttcttcctgctctcgttcagccagcaaaccgtccctgtcatcttcttgctttcgcctgcaggaggaggggcgagcagcagcggaatgctgagaccccatggccgtgatatgccactggtgtcatgtccagcctcttcggtcggcggagcggcacgcactcagcgcgcaggcgccaaaat

SEQ ID NO: 317492 - DNA, 1144 bp, Homo Sapiens
  misc_feature (116)..(116): n is a, c, g, or t
cccaatcactccaggtttgatacctagaaccccgttatgattgccatttataatgccctaagacagctgaaaagatctgtattaaattctgcaaatctttattgagtgccaactantttgctgggacaggctaggcactgattctgctggttctgagaaacataaatggtaccatagggaggtgtttcctcctaagtggcaggaggatgtttgctgggagttaagtgaaccaattcctcctctgcttacaccacgtgggggtaggtccagaactcaggccttgggaacatatgctgtgctctcttctacaggcgctgtgtggaagaaccaatagcagttgttaaatagctgtggaatttcctccacaatccacatagtgatgtgtctccaaggagctctgggtcatgaggccaatgttatgaaatcttcactgaaagttcgcatgaagatcactatgttgtgcaccaggatctcaggtaccgtgcagaagaagtacacataggaaaacggtcctcccatctcggccttcccggtaaaattcacccactgtgttcatgtactgaatctggctggacaggctggtcactgccaccgtgtagaagttggagttcctgattttcagggtggccatgatggtgagaattacaagggagtcttgcttattaaatgtgactttcaccactttgatgccgtcatcatccacaaggactgaatgcggaaacaggaagaaaaccaccaaaccagatgccaggagacaaagcaggatggacaggaggacatattgcttagttcgctgagggcgcaatctctgatcactgtgtgggatcaaagccaccaactcatttacttgctctgttggaatgtagcctgtcccctggcacgtgagacaggtgatgctatctctcccggtgaattccacatatgggaactgagcaatggcttcttcctgctctcgttcagccagcaaaccgtccctgtcatttttttgcttttgcctgcaggaggaggggggagcagcagcggaatgctgagaccccatggccgtgatatgcccctggtgtcatgtcctgcagggcgcgaactcccggcagctcctctccggccgctcccccgaccacctgccagcttgaggacttaccagcct

SEQ ID NO: 317493 - DNA, 874 bp, Homo Sapiens
  misc_feature (53)..(53): n is a, c, g, or t
  misc_feature (112)..(112): n is a, c, g, or t
  misc_feature (208)..(208): n is a, c, g, or t
  misc_feature (279)..(333): n is a, c, g, or t
aaaaaaggccaacaccattttttctttcttttcaaaaaagctccccaggcctntggggaacagctgaaacaaaattcatattcctgactaggtctgttttctcttaggtatntggatggtccctctctgctgcgacttctgcacagatgaggcactgataatggcctgcaggtcactcacaatcctagctccacatcactccatggtntgataacctagaaccacattatgatttccatttataatgccctaagaacagctgaaaagatctgtattaannnnnnnnnnnnnnnnnnnnnnnnnnnnnnnnnnnnnnnnnnnnnnnnnnnnnnnattctgctggttctgagaaacataaatggtacccatagggaggtgtttccctccctaagtggcaggaggatgtttgctgggagttaaagtgaaccaattcctcctctgccttacaccacgtgggggtaggtccagaactcaggccttgggaacatatgctgtgctctcttctacaggcgctgtgtggaagaaccaatagcagttgttaaatagctgtggaatttcctccacaatccacatagtgatgtgtctccaaggagctctgggtcatgaggccaatgtatgaaatcttcactgaagttcgcatgaagatcactatgttgtgcaccaggatctcaggtaccgtgcagaagaagtacacataggaaaacggtcctcccatctcggccttcccggtaaaattcaccactgtgttcatgtactgaatctggctggacaggctggtcactgccaccgtgtagaagttggagttcctgattttcagggtggccatgatggtgagaattacaagggagtcttgcttattaaatgtgactttcac

SEQ ID NO: 317494 - DNA, 584 bp, Homo Sapiens
  misc_feature (125)..(137): n is a, c, g, or t
  misc_feature (529)..(529): n is a, c, g, or t
  misc_feature (534)..(534): n is a, c, g, or t
  misc_feature (540)..(540): n is a, c, g, or t
  misc_feature (564)..(564): n is a, c, g, or t
  misc_feature (571)..(571): n is a, c, g, or t
gtgtgtttcgaatcaaaagcagggtttatttttctatcaaatccccaataccatgttccagccaatggatgaagggtgaatcaagccccacatagactcttggtaaaaacaattctaactttctnnnnnnnnnnnnngccaacacacttttttctttcttttcaaaaagctcccaggcgtttgggaacagctgaaacaaattcatatcctgactaggtctgttttctcttaggtatttggatggtccctctctgctgcgacttctgcacagatgaggcactgataatggcctgcaggtcactcacaatcctagctccacatcactccatggtttgataacctagaaccacgttatgatttccatttataatgccctaaggaacagctgaaaagatctgtattaaattctgcaaatctttattgagtgcccaactatttgctggggcacaggctagggcactggattctgctgggttcctgagggaaaccataaatgggggacccatagggggagggtgtttccctcccnaagtngggcanggagggatgttttgctgggggagnttaggtngacccaattcctc

SEQ ID NO: 317495 - DNA, 712 bp, Homo Sapiens
  misc_feature (301)..(301): n is a, c, g, or t
  misc_feature (394)..(394): n is a, c, g, or t
  misc_feature (436)..(436): n is a, c, g, or t
  misc_feature (500)..(500): n is a, c, g, or t
  misc_feature (566)..(566): n is a, c, g, or t
  misc_feature (630)..(630): n is a, c, g, or t
  misc_feature (649)..(649): n is a, c, g, or t
  misc_feature (684)..(684): n is a, c, g, or t
aacagtgtttaaaggagttttaaaaggtttctcctgcttcactgcttcttaactggtttatggttcctggctcttggaacttccctttcagctcccttctctttcctggttttgtgtttaatcttgacacattgaaccttgatatctgactgcctggggtcggtcatgtgctgtgtcatttgcagtaaggcaatatgtcctcctgtccatcctgctttgtctcctgggcatctgggtttggtggttttcttcctgtttaccgcattcagtccttgtgggatgatgacggcatcaaagtggngaaagtcacatttaataagcaagactcccttgtaattctcaccatcatggccaccctgaaaatcaggaactccaacttctacacggtggcagngaccagcctgtccagccagattcagtacatgaacacagtggncagtacatatgtgactactaacgtctcccttattccacctcggagtgagcaactggtatgctgntcttttaggaatcttgccccacaggcctaagagaagagtagggggctgtaggaatgccatagctgngtcactttcctttttgtctcctcatttctacttgtaggaactggtgatgaggaagacctgttgngccctgtaattataaatanttgtgagaaaaaacagctatcatttaagcatttgnggagcagaataatttgtaagagacaaag

SEQ ID NO: 317496 - DNA, 683 bp, Homo Sapiens
  misc_feature (467)..(467): n is a, c, g, or t
ctaagggatggagggtttactactgggatctagtgggcagatgccaggaatactgttaaacatcctataatgcacagaacagccccctacaacaaaggtctggcccaaaatgtttgtagtgccaaggctgagaaactctgctctaacccctcatatttcatgtctgcagcagagtcttgtcacttgcaaatttaacagccatgcttccagaaaacaaccctaaaggtccatgacatgtggtaatttgtgtggctagagaggaagtctggtcaaatgcccagtacttaacatcttgagaaagcttttctgttcatgactgtctcattaggattctgaggggatcaagtgtttagttaaactagaccccattttaatggagaaaatgtttgactgcctcagggtgactggtgatttgtgaagggcatgtggacactgtgtttagagaacaccaagggtctactgtaatnctgtgcctgtgaggcacagggtgtcccctcgggctaggtgcctctgccctgtggtcacacaggggcctcctgagcaaaggtggtaggctcacatggccggacaggccatcgggatagggaagagagacgcaccgcatgaagatcactatgttgtgcaccaggatctcaggtaccgtgcagaagaagctaccaaacagcaaatatggaaatagtcag

SEQ ID NO: 317497 - DNA, 2237 bp, Homo Sapiens
  misc_feature (108)..(108): n is a, c, g, or t
gtttccttttgtgagcccccgcggcccgagcggaatggttttagaaaaactttttcgagggcccgagggcgccccacaaggttcattttttgttttcttatgattaanaggcccaagcctcccccctgtttatttaacttattcagtgccttataataaaaggaaacgctaacaaacccatgtctattgtgaaatggcaatggcaggcaatttggcccttacccttagcatagtagtccatcctgtgatggggaaagcagggccagtgagagggaaccagaggtaggcagcagtcaggctgagtttaatgatggggaactgggccagaccaaacacagacctctgcccatccccttggcctttggcccatggctccaagaggccagaagcggcccagagggagatatggttcctccccaaggcaggcagccatggtcccttagactttgtgcaaaatactaaatgctaatttggcatcgagggccagctctgaaaagagaaggggcaatcctctgtgcagccagcccaggggacaaggaaaggtaggatacgaggcccctggccaagagaaaaggggtaggtaggaaagaagaaggaaaagacccctccgcccctagcatgggggacacaggcacagggcaagtttctgtaaattcctctggggtagagggcagacatccaagcagtggagattacagatcctcatctccaatgccctcgaaggcgaaattgccgtggacatcactggcactggcatctgtgctgggactgccaattccccgcaagctcacggcactcagcttacttgagagtttgaccatagactcccgggtggcatcaggtgactcaagcagtggtggggacttcactgcttgctggctgtctgagcgtctcagagtaccccccacccgccggcgcagcatcttcctgatactgccgccagatttcttcaccatcagttcatcaaccatggactgcaagcagatgctcatcatgatagcctgggggctagtgatggtgacccactgtagccggtccttgctcatgaggtattcaaaagccagttccaggcgcacctcaccccggccccggcctgggctgctcgtgcttccactgggcaatggtacagaggaggtgacccgccagcatcgcatgcgggtgacccggaaggagccttctcggagttgctggccaggcaggcggagctgcaggctgagctcactgttgcccgcgctcaccaccacaggacagtccttttctgggaagtcagccacacaggcatcaaagcgcaagtagccatagtgccgcagcgtctgggccagtctcaggaactccttcttggagactttctcttgcagagatttgagttgccggtgctgttccttggtgaccaagatccacccacgctcaatatctgataccgtctgagcataaagcaggttcaggccaacccggttctccatgacatcgtcatcataggcagagtcccaataactcttccttagcacaatcttatactcttgactccgaaggctggtgacagacacataaggcagctcaaactcttgcaacttccgtacaaaagaaaaggctccatcctctttttctcgaactaagaatagactaaagtatccaatcaagtcatctggaagatccagctttgcagctacagcctccaggacatcctcagtctgatctgaagttagcacgttgaccagaactttctgcccgttgctgagcagcacttccaaggacacttcctctgtggggacctgctgtgtctcctgttgtgcccgacgcaggaaactgttgaaagtctcgctgctcccaagcaatgggtcttgccgaacagcttgcatgtacttctctaactgctctctcctctgttctacctcagcaggagtcagagagaaaagcttctttggggggaatgcaggaagcacattggccccatactccttccgaagctgctcgtgcagccccaggagctggctgtagcgcacccgacagtgcaggactccattcacgtgaatgttataggccacgtaggcggagccgccgctgtccccgctgcgggactcggtttcgggaatggaaaagtgcatgttccctacggcacggcacggccgggctccggactgtgagggccgcagcggctctgcacgctccccctccgctgctcagcgagtccccgcagcctcactcgccattttgggagcccctgcgatccgatgtgg

SEQ ID NO: 317498 - DNA, 238 bp, Homo Sapiens
atcggtccatctatttactctccataggacttcctgaatggcctgtgtcatgatcaaagaaatggaatggggaataagctacataaaattacctggcagggagttcaggcatctctgtactatcattctttaaattgggatttgaaactaacagggccaaatcacctctgtcacctagttgcagtagcctctacagtcaataaaggaaagaatttctgccaggcatggtggctcaccc

SEQ ID NO: 317499 - DNA, 1665 bp, Homo Sapiens; identical to SEQ ID NO: 150689
  misc_feature (325)..(325): n is a, c, g, or t
  misc_feature (1001)..(1021): n is a, c, g, or t
  misc_feature (1079)..(1089): n is a, c, g, or t

SEQ ID NO: 317500 - DNA, 914 bp, Homo Sapiens; identical to SEQ ID NO: 150690
  misc_feature (877)..(877): n is a, c, g, or t

SEQ ID NO: 317501 - DNA, 1262 bp, Homo Sapiens
  misc_feature (126)..(172): n is a, c, g, or t
accactgtaacctcctggcccagggttcccaggatactgagtaaggggcccaaagactataaacccagctgtgagaatgcctgtttgctgggcctcatcaaggcctccaggacctcagtgcaaggnnnnnnnnnnnnnnnnnnnnnnnnnnnnnnnnnnnnnnnnnnnnnnntggtggttggggttctgggcagcccatgcttcagcccctgcaagctgatggtaccgagcatgagactgtgaggtacgggccccatcacatggtgctaacattaatctgcgaaggcctgggatgagtcccatgagtcgcttaaccaacattggcagttagcccggagccgccggatggcttcccttggctgtgactgcattcctggtccagccagttttggaagaggccgcaggtgaccaaaggctccacggccccagcgctcccagccgcttggcgaactccagaagcccatctggcttgatgcagttggaactgatgtccagctgacagagagaggaggatgaatcctctgagaaaacatctgccaaagccagcaggccagcattccccaggcggttccctggccaccggaggcccttcagtgtggagttgcccttcatagcagcaaccatctcaggcagaaattgggctgggcgcttctcaaacagacggcagaaggagaaggtaatctcttgcagagtcagattctgtagcaaaaagagcacctcgctctgacagtcagcgagattcatgtcatggaagctcagtcttttcagggctaggttgtactctttgagtgtttgcaaaacaagcccaaaatcctggggagaggcaaaggtggcactatccagggacagctgctgcagagaacccgaggccttcagaacggagcacagcagtggggctggctgggctccccgtggaaatcccatctccaactgctccaggcagttttctggtatctcctcatcgcctattatgtggctagggggccctgcattccctggcacaccagggttgtcccgctggcttgggtggtcaacacgaatagagaggacccgtagcaggggcagtgctcgcacgatagcacgtgtcagctccaggatgggcagtggtgagaacaggtcactgagatgcagggcacggaggcgacatccagcctggcctgacagggcccgcaggctgtctagcaggcggaagatgttagagcccaggccattgtaggagagtgtgaggctctccagtgccctcgtccgaatcgccacccagg

SEQ ID NO: 317502 - DNA, 1594 bp, Homo Sapiens
tcaccaaaaccccggggctttgtagtttagccagattcggtcctttttccctcccagccactgggcattcacctcctccacgggggttgctccctcatagtggggcccaggctttctctttcttctgttttgcggcctcctcggcagacagcagggactggtagtaggagctgcgttcggcggtgaagtggaccttggagagcgcgtgctccaccagcaggacggacaggttggcaccgtcgatgtgcagccagccgataaagttgccggccttgtccatgctctccacctccacctccacctctcgctgcagcaccagttccttggtgaaaagtgtagcttcctcgctgaagggctctccttcctgcaccaagcctgggaggtttcgggctcctctggggcattcaatgcctgcaagcaagaaggtgataaggcaagtttcctttggcaaatagagtttgagacgagaaccactgaagacgtattccaccacagcttcagaacgacctgcccgctgaagaaaaggcaggaactgctttgctttttgggtatccccagatatatctgcaacacggtggataggcacttccttcttgctatgcaatcctttgccattcttaatagctctggcctctgcagcaagcagttcatcgttagtgtgatgatctctggtcatcatcctgcccggtattctgatcactgtggctagacctttgctgaccaagagcctcagcaatgtttattcctccaatggtgacagtggcacaggtacgctctgaaaaggcaggcactgtctctgtggctgggctggctggtctaatgtagtccaccgtcacattgaccttcttcccaataagcttttttcgaagaaattcccgggcctcaaacatgtaaggaatgtcatacaggggacgcagtttcttgttcttatcctgggtgttctccccctccagcctcggtggtcggatgctggacaggtgaatcgtcttgtaatcgcctgagttcagcttcacaacaatggcatcagcattcagaacctgcatcaccttggcaacaactgcttgtccttttggtccaaattagctgtgggagccacatagtctctccatattctcagcctgcgctctttggcaaacctctctgccgccctcagcttttctgcgccccgggtgtaaactgcaatcgaccagtccacacagcgtgcgaaaccttccttcaggaggagctctgtgatgttgccatttggatgaaggatggtacccagaatgttctggttgtggcagctctccagaatgatctgaacatctctctgaagcagtcgcgactcagtgaaaaatttggcttctgcagcaaaaggctctggagtttcactgccatctgcttcccgtcgaaaagttgggcacttgatgcctgacagcatgactgtaaccaggtagtaatctgggaggagcagggccctgaccacactgccgtcccgcacatgctcgatgatagcattaacaggcttctggtggtgtgagtccacaaagtgcgggaatttcaatggttactgcatcccgaattcggaccggtaccagcctcttttggcaccaga

SEQ ID NO: 317503 - DNA, 1104 bp, Homo Sapiens
  misc_feature (58)..(96): n is a, c, g, or t
  misc_feature (177)..(177): n is a, c, g, or t
  misc_feature (285)..(285): n is a, c, g, or t
  misc_feature (323)..(323): n is a, c, g, or t
ggggacccatttttccctttttacaaattggggccaaggccaagttttctccccctcnnnnnnnnnnnnnnnnnnnnnnnnnnnnnnnnnnnnnnngctggccaaagttccatggggcatgttttttccatcaagttttctccaaaagggggtgccggttttccccatccttggccnggtagaagtgcagtccatcagggattttcggtccccaacccgggggcttgtagttagcagatcggttcctttttccttccaggcactggcaatcaccttctttcccgngggcttgtcctcatagtgggcccagaccttttcttttnttttgctttgcggcctcctcggcaggacagcagggacttgtagtaggagctgcgttcggcggtgaagtggaccttggagagcgcgtgctccaccagcagggacggacaggttggcaccgtcgatgtgcagccagccgataaagttgccggccttgtccatgctctccacctccacctccacctctcgctgcagcaccagttccttggtgaaaagtgtagcttcctcgctgaagggctctccttcctgcaccaagcctgggaggtttcgggctcctctggggcattcaatgcctgcaagcaagaaggtgataaggcaagtttcctttggcaaatagagtttgagacgagaaccactgaagacgtattccaccacagcttcagaacgacctgcccgctgaagaaaaggcaggaactgctttgctttttgggtatccccagatatatctgcaacacggtggataggcacttccttcttgctatgcaatcctttgccattcttaatagctctggcctctgcagcaagcagttcatcgtagtgtgatgatctctggtcatcatcctgccggtatctgatcactgtggctagacctttgctgacaagagcctcagcaatgtttattcctccaatggtgacagtggcacaggtacgctctgaaaaggcaggcactgtctctgtggctgggctggctggtctaatgtagtccaccgtcacattgccttcttcccaataagcttttttcgaagaaatcctcgtgccgaattcgccacccaggcctcgctc

SEQ ID NO: 317504 - DNA, 1803 bp, Homo Sapiens
  misc_feature (154)..(220): n is a, c, g, or t
ctttaaagaaaaggtgcccaccaaggccgttccaaaaataaaattccaagtttggcccagaagtgtctggggagataagccagggtcccccatccatccccaggagggcgcaagggttatttggccccccaagaaaaaacccttttggggtgtnnnnnnnnnnnnnnnnnnnnnnnnnnnnnnnnnnnnnnnnnnnnnnnnnnnnnnnnnnnnnnnnnnngctgaaaggcaaatgggtggaccccaattgtacgaacccccttttcgggggtttgggagttgaaaaccaccctccccggcagaggaagagggactggcgtgagcggggctgggggccaaaccccgatcccctccttagcggctgtagccaaattcgtctgcatcatcagctcgaaagtctccatagcgccacaggttcagcctggcgctcttggctgactcttgggcattcaggtattctgtgatcactttctggaactgtttctccttgcgcacctccaccatgaccagcccttccttcaccaagcccagccccacatcgcccttggaatctgcaaactgcagggtgacatgggggcagccggcactcaggtgttccacgttgagcaggcactgagtgttctggatatcccgaactacgctgtccacggcgtccgtgcgggcatcatcatcttggggcacctggatgaaggcgaaggcatactccgtggcttgagctggcagcacccgagtgctgaaggcaggtgatagggtacccaggcgggtggatggcaggacctctctgttgccgtagtcaatgtagaagacatgtattttggcaggagactcgactttctctactcgggcacggtaccattctccatctacaaatttggcaatgcagaactctcccctgcggggggcataggagccctctacaggggggtgactggcaatgtcattgcgcatgttctccatcagcttctccaactgggtgccggtctccacatcctgcacgtagaagtgcaggtcatcagtgatctcggtcacaaacacgggcttgtagctagcagatcgctccttctcctccagcactggcatcacctcctccacgggctgctcctcatagtgggcccagaccttctctttcttctgctttgcggcctcctcggcagacagcagggacttgtagtaggagctgcgttcggcggtgaagtggaccttggagagcgcgtgctccaccagcaggacggacaggttggcaccgtcgatgtgcagccagccgataaagttgccggccttgtccatgctctccacctccacctccacctctcgctgcagcaccagttccttggtgaaaagtgtagcttcctcgctgaagggctctccttcctgcaccaagcctgggaggtttcgggctcctctggggcattcaatgcctgcaagcaagaaggtgataaggcaagtttcctttggcaaatagagtttgagacgagaaccactgaagacgtattccaccacagcttcagaacgacctgcccgctgaagaaaaggcaggaactgctttgctttttgggtatccccagatatatctgcaacacggtggataggcacttccttcttgctatgcaatcctttgccattcttaatagctctggcctctgcagcaagcagttcatcgtagtgtgatgatctctggtcatcatcctgccggtatctgatcactgtggctagacctttgctgacaagagcctcagcaatgtttattcctccaatggtgacagtggccctcgtccgaattcgccacccaggcctcgctacctt

SEQ ID NO: 317505 - DNA, 713 bp, Homo Sapiens
acacaagctctattcatgtccaggatctcctgggcagacagcacgtactattttattgggcctcaaaagctttaaatacagaatgggctggccagagcgaagatgtgaacacactggcatttgagaatggacgtatcagaaaaatcacataatcaacagttggacagagagctgggacgagggcagtctgggatagaggcaggtgccagctggcggccagctgggtgttaggattactccctccactaggacatagtctttgatgtttcttcctgatttgaggacgtttgttttgtaaaaaaagcccacaaacctccaaataaaaccaactggcagagactgtggatagcagtgcccatcatcccagaggacaagggtctgccccagaaagccttggggtccccaccccgcagccccgatgccaccccacgagacatttccacacactgaagcaaagctggacccaatctacaacccctctctggggtttggagttgaaaacaccctcccggcagaggaagagggactggcgtgagcggggctgggggccaaacccgatcccctccttagcggctgtagccaaattcgtctgcatcatcagctcgaaagtctccatagcgccacaggttcagcctggcgctcttggctgactcttgggcattcaggtattctgtgatcactttctggaactgtttctccttgcgcacctccac

SEQ ID NO: 317506 - DNA, 456 bp, Homo Sapiens
  misc_feature (19)..(19): n is a, c, g, or t
  misc_feature (181)..(192): n is a, c, g, or t
gggcccaacttgccttcantgtgtggaaaaagtccccgtggggtggccatcgggggctgcggggtggggacccccaaggctttcctgggggcagaccccttgtcccctggggatgatgggcactgctatcccacagtctctgcccagttggttttatttggaggtttgtgggctttttttnnnnnnnnnnnngtcctcaaatcaggaagaaacatcaaagactatgtcctagtggagggagtaatcctaaaaccccagctggccgccagctggcacctgcctctatcccagactgccctcgtcccagctctctgtccaactgttgattatgtgatttttctgatacgtccattctcaaatgccagtgtgttcacatcttcgctctggccagcccattctgtatttaaagcttttgaggcccaataaaatagtacgtgctgtctgcagcccttattg

SEQ ID NO: 317507 - DNA, 1168 bp, Homo Sapiens
  misc_feature (364)..(387): n is a, c, g, or t
ttttttttaatgtactaacatttttaatacagtctgatcagatcaattcacatcacaaggtcaacctgggcttgctcacatgtgacacaactgaggtacacaatgtccctacctgccggctgtcccaccttcctggttcccaacagcattgaaaccccctacttccctgaccagactggcattttttaaaattttgcataaaactatttcttccatagacttcaaacaatcaactagccaagttaattatggtacatctaaacaaagtttaatactaaccctaatgtgtgactgcggtttacaaagagctctgtatcacctgggatagctttcagtagcaattcactacaactggtcctaaaannnnnnnnnnnnnnnnnnnnnnnntagagaattaaaacccaacagcatgttgaatggttaaaatcacgtaagaactgaaatttggggtgggggtgtcctcaacagctgagcttgtcctagcagtgaaaatgctcgcctccaagcagggctcagaaaggtctggagccctccaggcagagggctgagctcagggggctcttggaggacactcaccccatggtccatgggatgcttctggcttccttaaaaacagttgggcatccgcattgtataagtaggtggagaccctagtgtggttcttttgaaggatatgggaagggaggatgacgaactagagaaagtgggaggggaccaaaatcactgaggtcccagaatatcatagatttgggtataggattggggtcactaagaattgagcaccaggaattccagcttcttcccattaaagaaactgggactggttttgccttggaggcctatgtagtgttttctgcccctgtcccataccaagtctcattgatatttctgcagaatatcagatgaaaatctatttctaaagaccattgggagaatgggtggtggagaaggagttggagtggggttggggggcagttaaaaatgaataaaaatctctcagctacagaacccaaacatcacttccctccgcattcacagcatttcccagcagtccccagatggttgtttccgtggggacacagcagctgcctcatttcccttcaggccccatgggctgctggtcaacctcaggatctactaaagatgacgcaaatgccgactgaacacc

SEQ ID NO: 317508 - DNA, 616 bp, Homo Sapiens
caactatttcccaaaagcaaattataataaaagagtgaattaaactgacaatttatagttgtgtatttatatagaatgtctttatatgtgttacacaaatacaaaacttgttatttaaatagtaactgctaacatgcacataagttactatgtctgacaatggtgttctgtaaccaagagatgaatagtctttgtcaagaataattgtgtgcatttttgttatctgatttcctatctgcattttcagtttttaacattataaaaaagaattagtaatatgcaacaatttcttagttctctaagcattgctattattctcctctggaaagtatattcatattagaatttttgaaattgttcttcagatgacaggctatgatattttttccctttaggattaataatcacataattcaggaatttaattcactattaagtgaatattaagttcccttacgtttcatcaatatttgtcataaggtaaattaagtatcagcccccttgtctcttgatctttcacatcctcttctgtacaccacaatctacaatacctgtgttgcttttaaaatatatctatgaaacttagatacttttcccttcaaggggtgcagcttaa

SEQ ID NO: 317509 - DNA, 652 bp, Homo Sapiens
atgaaaactaaggaatattgtgttaataactgcttagcagtacctaagtctgttactaaagaaaaaatttttggacttttaagtataattagtggagagtagggcatgtgcaaaggtatggaactaggaataaatatgtcacattcagtaagtagattagcctgattggagtagaaagtctaggtctagttaagaagggagtttgatgaaacagtagaagtctatctggtgaaagacactacaatgttagatctggcccctaaaataaaatgaacagggaacaaatgttttctttaggtaataataagtggccacatgtccctgaccaacttcactgctcttaaaagttttgaagttacactaagagatagaagctaataataggatagtagagaagtactcagtgctcttgggcaagtagaggaaactgccttctacaagaattcttaggaagtggcaagcagacacccaaaggcaaggaagaaaaaaactcaatgaaattccgaggcagaggatctatcaaccaaaggccaactagatctaggtaattgcaagtgttcaaatagaatgtctttgaccctaattcttagtgggaagtggattgtatatgcttacgaaattatttatttaggccaggcacggtggctcacac

SEQ ID NO: 317510 - DNA, 1088 bp, Homo Sapiens
  misc_feature (214)..(222): n is a, c, g, or t
  misc_feature (402)..(402): n is a, c, g, or t
atttttccccacaaggttctattttggcccaaaggcacatgttatgaaaaggggtggaaattaaagtgggggggattttttcattatccaccatcccatccgccttattttttcttggaaagaaccagggtcccccaaattgcccagggaaactggaatggtgggaggtccacacccagggcttttatactttccactgaaaaggggccttcgnnnnnnnnnaaccaactcaggaagccttgggacccttgccattaaatagggtaggttgcttggggaaaagtccctttttatttcataaacggagaccagggcccccaggtaacatattttgcatacttcctttcaactcctcccccactccagtcgatatccagtgacatctgttcccattactcaaanggaacctcccaattcacttgtgcacaagttgcagatctacatgtcacttgagggggcttgcactgatctggtggcccagggggctgtagtaatatcacatttttctgaaaatggtccaaaccccattttgttagctgcacgtagtctgaagctgtatgtcttccaggaagaaggctgctcactgtacattctacttcagaaccttggtaaacttctctaggttcatctttttctataggagacatttccacactgtaacaggaaatgggtgatccaccatcaaccagagggggtccccatcgtaactgtatttcttttgctttgggtctaccctgtaatctgggagggaggcatgggccaggaggcacagctggagtctgcacaagtaaagattcagagaccgcactctgtcctccatcactgatgcagtaaactcgtaaacgatagaaacagcctggattcagtcgatcacaaagatgttccctggtagcaccactgtatatcatttcccatttgtttccgttagaaggtggatcccaggttattttaaaactgtgtgaatgtatctttcctttcactgaaggctttacaggtatgcctggtttatcagggcaagtagtaaattctactacttcacttggattacttttaccttctgagttgtaagcaataaccttaaatttata

SEQ ID NO: 317511 - DNA, 2276 bp, Homo Sapiens
  misc_feature (167)..(167): n is a, c, g, or t
  misc_feature (207)..(207): n is a, c, g, or t
  misc_feature (592)..(603): n is a, c, g, or t
  misc_feature (758)..(810): n is a, c, g, or t
gggaggttgtgcggtcggcgtcggttggtcttccgtcggcgcacaggggatggctatgcgggggaaagggcggagtagagtggcgtagtgggtggctgtggggtcgaggaggcgcgtcgaaactcaccggcgccctcaggtgcgaaagaataatcaagtgcggaggnccgggttgtgttaggtggataatgaatgaggtggatatangggcgcgtttcatgaagtgagccattgacgcgctggggtgttcagggtgcataattaattttaacaaagcgcggtgttggggcgcgccttccggttttggcggggcgggtcacggccacgcatggtcgaccgcggacgcctccccctcgtttttttaagttttggtcttttcggcggcggcggcgtgctggtattcacccacgcgcggccgggggggtgttgttgggtgttcacgataaatagccgcccggccccgtgtcgttttcgagtccgctgcacttgtcccttttggtttacccgccgggggacgcgcccgtggtttataggggttttccggggccggcgccgcgccgcccaaggagcggttttgggggaaaatgtgttnnnnnnnnnnnnagggcgcggcacaccgtctcgcttgggggcaagtaaggggcggggggaagatcatggtggaggcgttcacagcccctcggttgcgcgcgggtgttttgttgtttttggggttttctggcggtatttgtgtggcattgtcgctttggcgttcaggnnnnnnnnnnnnnnnnnnnnnnnnnnnnnnnnnnnnnnnnnnnnnnnnnnnnncatgaggggggaaaaaagaatcctttatgatagtgaaaatatactttattttttaatacaatagctgccagcaatatactggtgctgatgttccaaagataaaagaaaatacatgcattctataataagctttcatttgcctgttcaagaaattataaagaaaatactccaattctgttcaacattacggcttgaggagttgaaatttttccatgataaaaatatactttgtgtggcccaaaccttgactatttataaaggatggagtttttaaaagcccacatgtatcaataatggatgctcccctctctttgaattaaatgcttaaattcaaattaatgcaagaaattgggtgaatcattaaatgatgaaatttgtatcaaaatgttcatgaaaaaatacatttctatttcctctacatttttactttgtagttattttctaaatgggtttaagggcacagaaataaatgctatctacatgcaactctggagagattcaaaacacaacagaagttaacatgcctaaatcctagagttgatccatttagtgtaagaataaatgtcagaaatctcttaattgtatacagattgctcaaggatttaaagataaattgtgaaagccaaaattaccaagaaataaaatcttatttgaattttatcacaaaagtttacagtcctagtaaaagacaacagaactgtatagaatatctgcatctacatcaaaaaagggaagttttatcaactagaatagagagctttccaactgctgaatacaaaaatttctcagaatctcttggaaaacagatccattcagactccaatctcctcactgaagtaaaacacaaaaggtgtttaaatgaaggggaatggatgttagttgtaaaaataaaatcagattatttccattatgtcaattcatatactgcatgaactgtctaccatgaaaactttatgtcccaaatttctcaagatgttaaactatgctctttccacaaacatacaatggggttaaagcatgttgctgggtcgtcctttttactagctagcttttgtccatttaccaatttccatttcatttgactaacttccctgataaagtggtatctgtgtttctacagagaaaaataattctgtcttcatcaaaatcacaatagacatgccttcctagaacatttagagggatggccaggtgtaatcactggtttaataaaaacaggagaatatccaaaatgaaaatatttgagtttcaaaatgaattttcatcactgtattctgaagaatgtagttctttcctcttgttagccctccacctcgcaccactcagtccaccattcactggaaagaacaacctcactgctcttgaatcttttttatactttaagctatgaggcaggttcagaatcaccagaatgaatcccagttgcccgacgcgtgggtcgacgatatccctactccggccggacc

SEQ ID NO: 317512 - DNA, 1327 bp, Homo Sapiens
ggtacggtccgcaattacgggatatcgtcgacccacgcgtcggcagaagaccatcacagacctcagaacacagataagaaacttgaatcacggctcagtaccacagagtgcgtggatgccgggggcgaatctcacgccaacaacaccaagtggaaaaaagatgcatgcaccatttgtgaatgcaaagacgggcaggtcacctgcttcgtggaagcttgcccccctgccacctgtgctgtccccgtgaacatcccaggggcctgctgtccagtctgcttacagaagagggcggaggaaaagccctaggctcctgggaggctcctcagagtttgtctgctgtgccatcgtgagatcgggtggccgatggcagggagctgcggactgcagaccaggaaacacccagaactcgtgacatttcatgacaacgtccagctggtgctgttacagaaggcagtgcaggaggcttccaaccagagcatctgcggagaaggaggcacagcaggtgcctgaagggaagcaggcaggagtcctagcttcacgttagacttctcaggtttttatttaattcttttaaaatgaaaaattggtgctactattaaattgcacagttgaatcatttaggcgcctaaattgattttgcctcccaacaccatttctttttaaataaagcaggatacctctatatgtcagccttgccttgttcagatgccaggagccggcagacctgtcacccgcaggtggggtgagtctcggagctgccagaggggctcaccgaaatcggggttccatcacaagctatgtttaaaaagaaaattggtgtttggcaaacggaacagaacctttgatgagagcgttcacagggacactgtctgggggtgcagtgcaagcccccggcctcttccctgggaacctctgaactcctccttcctctgggctctctgtaacatttcaccacacgtcagcatctaatcccaagacaaacattcccgctgctcgaagcagctgtatagcctgtgactctccgtgtgtcagctccttccacacctgattagaacattcataagccacatttagaaacaggtttgctttcagctgtcacttgcacacatactgcctagttgtgaaccaaatgtgaaaaaacctccttcatcccattgtgtatctgatacctgccgagggccaagggtgtgtgttgacaacgccgctcccagccggccctggttgcgtccacgtcctgaacaagagccgcttccggatggctcttcccaagggaggaggagctcaagtgtcgggaactgtctaacttcaggttgtgtgagtgcgaaaa

SEQ ID NO: 317513 - DNA, 1646 bp, Homo Sapiens
  misc_feature (1195)..(1219): n is a, c, g, or t
  misc_feature (1232)..(1290): n is a, c, g, or t
ttttagcaatacaaaagataaatatttattcagaacaaaacttttaacaatcaattttacattctaagccacaaggaaatagcaaaacatatagcaaaggaaaagcaaacactaaaagaaaagcagtgtactgtcttttctactggataacacttagttggcccatgacctctcgcttggcctatctcccaagtacattttagagttaacagctcactcataattttgggttaaaatccatctttctcctgagaatcaggagttgcacatgagctccagctagctgcttctctagggttcgtagctattgaggctaaggtgcaaatgtaaacctttggtaggtttctttacacaggggcacccccatttctcactggtggcaatgaatggggaaggggtagggcctccaaaggacctggcacactgtaatccagaagtggtgccccagggagcaacgaatgcaccctggagtgtggtccttggtccgttccgtatctcccaagtattcagaagcccctccttaaaaaccttctctttctgctccctcctccaggtgatttctcagcattcctctgggctgatcattctggagagatcagactttctgggccctcaagtgttgaggaaattgttgtgaagtgtgagaggtagtggaatgagcaccgggcttggggtcaggggactctactataggctggctctggcaccagacagctatgtgattttcacccagtcatttaacctctttgggcctgtttcatctgctggaaaaccagggaattggtccaaaccaactctcaggttctttccagcaggaatattctagattccatgattctataaaaaatggcttctgagccaccaaaagagctgtcatgaagtccatgcatctttgtgccataagacgaggcccttggccaccattcagagcttattgattcagattatatacacttctaacaacactggtttcacaaattctcagaccacgtagattaaaagcagcaaattaaatgaggggaggggaagagctgcaaaaggtagacactctgatagaagccacagtcaacaatgttttcaattcagcaaacactgatggagtgcctaccacgtgttgggccccgtacctagtgctggggcataaagatgagcaaggcagcccaaagggtgaaaatccaggggaagaaaaggtatnnnnnnnnnnnnnnnnnnnnnnnnnaaggagagagagnnnnnnnnnnnnnnnnnnnnnnnnnnnnnnnnnnnnnnnnnnnnnnnnnnnnnnnnnnnggaggggcaacacatctgcacgctacagttctccgcagtcgttattggtgacagagtcaccaattcagaacaggctgaaatggagtaaactcggtttaagaaggcatagagagatgtctcttgtaggttttaaaaagatctccttcaaagtcgatacagcatggtttaaaagaaagttttggcacttaagaggggtaagctggctgtgtgttcaccctggcaggcaggcgggtgtttagtgcccggccacgccggttagctgagctgccacggaattgtgcactgctttgggacactgggcaaaggcgtgtcctcgcttccacagaggttcaccctcgtccgaattgccacccagg

SEQ ID NO: 317514 - DNA, 499 bp, Homo Sapiens
  misc_feature (118)..(118): n is a, c, g, or t
gcaagggcaggtcgctggccagagcagccaggcagggtcctagagcttcccaaagtaggcagctgtgctgaggctggagaggggagccgggggagcccgcaaggaccaggttgggctngcagtcccaaaactgagaaggagaagggcagctcctggcgaaactggccaggcgaggccaaggcacggcctcaggagcaggagtctgtgcagcccccaggcccagcaaggccacagagcttgccccagggcaaggggccgcagccgccggagccgcaacaagcaggagaagccagcctcctcctttggacgatgtgttcctgcccaaggacatggacggggtggagatggatgagactgaccgagaggtggagtactttaagaggttctgtttggattctgcaaagcagactcgtcagaaagttgctgtgaactggaccaacttcagcctcaagggcatcctgaggccctgactgccagctgaaggcgtataatttttccg

SEQ ID NO: 317515 - DNA, 483 bp, Homo Sapiens
actttctctttcccctgcccaggccctaagttagggttcccatccatataacaaatacttctggtcaggtggcatacacaccctaaagcatattctaaatcaaactgtggtttaaaagcaaaacaatccaaccactgtgaaatatttatttttgttttgtagtattaagcatgattaaaccagtgcagaaaaataccaagtacattgggtgatctatgagctagctgttctagtatttgctttttgtaatccagttaagaccatcagcatatacgacatcatcactaactcagcaatgtagctgcagggtaacctgtggataccctgtgtgctctactggcctccaaaggcattcaggggatcatcaaagatgttggacaccttgtgttcaaatcttggttcaggtgcggcctgtgcagatcggctttttggtttggttgtcttagcctggataccagaggagaagatgtcatccatatcacc

SEQ ID NO: 317516 - DNA, 462 bp, Homo Sapiens
tgtgttccaataaaattttattaacaaaatatgacagtgggggggccacagtttgccaaactttgccttggaggacatgcagaggcaccctcagaattcagtgaaaacctgctcccatattgctaagactcatgaagtataatctctcatcttctttctctttcccctgcccaagccctaagttagggttcccatccatataacaaagacttctggtcaggtggcatttgctatctctgagattccctgcccatgaaagccacaaagagatttcttcttttacacaccctgaagcatattatggccccagcaaggctaactaaatcaaactgtggtttaaaaacaaaacaaaccaaccactgtgaaatatttatttttgttttgtagtattaagcatgattaaaccagtgcagaaaaatactaagtacattgggtgaacgatgagctagctgttctagtatt

SEQ ID NO: 317517 - DNA, 390 bp, Homo Sapiens
  misc_feature (53)..(66): n is a, c, g, or t
ggatcccccgggctgtacgaatatttcacgcgaagagagctcgactctagagnnnnnnnnnnnnnngacacatataacatatcaccgagtgtacaaaatgctaaatatattcctgagtaggaaagtgttctttaaaaaacacagtgattttgcgctatagctttttctctatactggccttgggcttactatatatcacacacggttattacccagaaaatattgggtttacctgattaaactttaaaaggtaaatgtagatttcatgtgtctatgacacttgtgaattgcgttgcaaagtgtacatgaaactgggtaaatgagtcatttagttaaggggaacagggtcttgggtaaatgctactgtaaggtttagaaagggatgggttg

SEQ ID NO: 317518 - DNA, 967 bp, Homo Sapiens
  misc_feature (447)..(478): n is a, c, g, or t
ccccacacccttacaggatagtttaagtcacataagttacatgggcatatgatgctaccctactgtagtgtcatccctgctttccttgatctgttccattaagctataaattctttgaagattgacccatgttttattcaaatttgatttctaaatatttgattatattaaggaaaaaatgttgattcaaagaaagtaataatggcattgttgtcatatgtttttacaggagtctttatattttggagagcattctgaaatatttacaggctattgcttcaaaataacatgatagtcaggaggagggtgatggtggcatttggatggggcagctaacatggattgatggctgttggaaccagtgatagatatatggagatgcacgaaaactattctataggctggtgtcggtaacatgtacttgtgtatatgtcaaacattctctannnnnnnnnnnnnnnnnnnnnnnnnnnnnnnncacatgaatttatggatttatgtaaatcatatggatttatggatttatataaatcatatgaatttctccctgcctagccaagttcctgacacatggcaagcactatctttttggtgactgagtgattcaaagtgaagtacagcgagtggtctctgatttcgtattagtgcagccacaggaggtggaagtgctgagcttgcaggaaacatagaagtcctctactccagaaaacagagaacttggtcagctctgacttactctgtgaacaagtattatgtgcagactccatgctagcactagggacaccatgaccaacaagacaaggttcctcccatcagcaaacttgcaggtaggggctaatgaaagtctagatcccaagcatcctgaatcaccagccagtaccctaaaaatttcattctaaattttgcttaataatacagtaatgggaaaacaccaactatatccagagtgcgatgtgtgcctaaggcc

SEQ ID NO: 317519 - DNA, 741 bp, Homo Sapiens
ttgaaaatgatagattttattttaccctcttataatttaaggggaattctaaaataatttttacttttgccatttgcttattagggcataaaaagtaagctatctcaaacatgagtgctttttacaaaggttttccatgctttgcatatggtcattttccattttgctagggcctatactcttgtccaaagatttttaaatacataaggccataaagtaattttgttcaatttgcaattccatctacaggacagttcaacaaacttcatcctctggttaggtattattcctaaagaatctcagcacaatatcttagacactggcttcttctgccacccacctcaagagttatatatcaaaagtgtggagagacaattccttcctatgactcactggaaacaaggaaatgagaataatttgggattttgacctttgtgggcttgttagcatccatgctctccttgaatttctcctgcatagtttctgcaagttgacagagcaaggcaccattgtccaacttctccataaaagtttctgctgtaatctccttccctaatagattggttaaccacaaggccagatcttctttcattggtagcaaattagcttcatgtctgctggctagccattggctatactgatgcatatcagagaggccaggcccactgcgtacctttgggctcagagcagtgcacattatttatccacttgtaatacttttttggtggacgcaaatgcagt

SEQ ID NO: 317520 - DNA, 410 bp, Homo Sapiens
  misc_feature (365)..(365): n is a, c, g, or t
  misc_feature (376)..(376): n is a, c, g, or t
tagaagacatgaaaatttttattttcaaaaagaatgtatttttacataaatctacaacagaattcaaatgtagaaaaaataaactatattcaggtatacagcgctcagcacagcacaccccctccccggagtgggccgtccccccagaacaagactgaaggggcctcgcggccccgggacccccacagcagggcagccacaggtgccacgcggagtccccgtgtctgtcacaacagactgcaaatgcgaggcgcccagaccctgagcgtcgaagacaaaaaccaacccattttcactgtggcaactcacttcttagtgcaggtcactcatccgtacacctcatcggaaacagaggggcagggggnaaccacagggntatacatctccaggatgcctcagataatcccctc

SEQ ID NO: 317521 - DNA, 605 bp, Homo Sapiens
  misc_feature (402)..(402): n is a, c, g, or t
  misc_feature (450)..(450): n is a, c, g, or t
ctctcatacaccacacgacgcacgacgatgtgtaatacacgacgcgggacacgacgcacatctcccactatctcgcgagtatcgacagcagcggatatcgtctcgcacgaggcgcccacacacgtcgcacgagagcaccacagcggcgcctcgtgtctatatctctctacagcgcgcccgcagagagagatgctgcgtctgtgcacacggggctcttgcccacgagagagtgtgtgtgtgtgctacagggcgctgtagatatcgtgtcgcactagtgtcgctcgtgcgcacaccagacgctgtgtcgcttttctcacacaccacgagacaccacacgtgcgagcacagagcctctgtgatcacgcgcgcctgtgcgctctctttgtagacacagagtgtganatatcacacagcgtgtagagagcctatagggggccctttcgtgtctcncctgtgatatacgctgcgctcgtgtctctacacgagacgcgggagagcccctttcagagggcacgagaagacgcatcactcttctcacgatgtcactcatctgcagcatcgtcgctgtcgtggccgattattcgctacgaagcgccgggagtgat

SEQ ID NO: 317522 - DNA, 901 bp, Homo Sapiens
  misc_feature (154)..(154): n is a, c, g, or t
  misc_feature (547)..(557): n is a, c, g, or t
  misc_feature (738)..(786): n is a, c, g, or t
cctaaattaactagcactgactgtaatttatttccctgtttcacgtctctcccttccattctgcaggagttttagctatttgagatcgtggaccatcagttttgcactttagagagtgtttctgactctaaacctgttttatcagaaaatttgnttttttcttgatcttagctggaaaaatctgccaactttacacagtatttacttggttttgacccacagaatatagcacgttgtgcaaactgtcgattcagcgaaacttaaaaaagacaagaaactactgaggagcttagtaactgctgtttctgtacgtagtgtttaatcttccaagcacatctagtgtctgtcagtttctaattggcatgtgtaggctgctctgtgactgaagaattttcaaaccagctttacacccttcaggaaaaatcccttgtgattggatgtttactatctgccaggaaactggtactcaagatgttgaagctacagttattttatgatagcacacttcccttgatctgcttatttttattccatcaccatttacccnnnnnnnnnnnaaattttgtagccattcttatgatgctcttgatttgttggttacacaaatcaattttattaaaaatccaaagataagtctttaggtatattttgtaccaaattaaattagaagacaaaaattgtgctttcatagttgctacaaaggtaaataatggagagatttggtacaaaacaacaaannnnnnnnnnnnnnnnnnnnnnnnnnnnnnnnnnnnnnnnnnnnnnnnntgacacaagagactgtgaaatacttatccatgcagaatatgtgaccagaccagagcatgtgtaggaagactttacagtgatcattaaactctaccccgaatgatggactacaagt

SEQ ID NO: 317523 - DNA, 528 bp, Homo Sapiens
tccatatcaatacagtggcattttttggtttaggtgctggaatccatacatttagatataaacagtcttcactgaggtcagtgtttgggttccacatctctgatccatggaagcctggaaaactttgatctatgttctgacagcaagaatttgcatattttgtggcattccaaatatcagaccacttggtcagagactgtggctttttgaatcgaagtctaccaagaggtgtctgtgcatagggaattccaagaaaggctgttaccgtgccaccaaaaactgtcaagttcatccctctgacttttccattctttgttgcaattatgatgtcatcttcagtatgtgacttcccaataagcatgcagagcaaaagaaaccaaaagagaaatctgatgcatatgattgtgactttgctatgcatattgatttccgattctctgcaacaaagatggcaaagtttgcaaggagtgaaaatcatgtaatacttcggggaaatgcaggatgcagctgctgctccagcctgtaaat

SEQ ID NO: 317524 - DNA, 356 bp, Homo Sapiens
gtttaatgggagcttttttctatcttatatcacctctagattttgtacctgaagccttgtttggaattctaggctttctagatgatttctttgtcatctttttattgcttatctacatctctattatgtatcgagaagtgataacccaaaggctaactagatgaaaaagaaaacaaaactgagtttactaggatatctgagctaatgtagaacatcaaacagaaggacccatggcagtataaagcaatgaagcaatggagtattatctcacaaatatctggaattttcatgtttgaagttctaatattaagtttagaattataatgatctacagttgtatcttgattctatgttgt

SEQ ID NO: 317525 - DNA, 568 bp, Homo Sapiens
atgtaattggaacagttatctttgattagacaagcctgggaagagaatgttgaggtgcagagctcaccagccaagttcatgcccctctcgggcctttgtggctgagaagtgggacagaaagatgattaaggtaatgtgtcctccctgtagcattgtccagggccgttgtgtagatatttgacttcactgacagaaaagaaaccagggagtttgtagagactgtgcatttttagtataacattttcaccatctgatatggtttggctttgtgtccccacccaaattgcatctcaaattgtaatccccatgtgtcaagggagggacctgatgggaggtgatgggatcatgggggtggtttcccctatgttgttatcataatagagagggagttctcacaagatctgctggttttaaagacagcagtttcccctgctgtcactgtctctctcctgctgccttgtgaagaaggtgcttgtttctccctctgccatgattgtaagtttcccgaggcctccccggccatgtggaactgagtcaattaaacttcttgtttataaagtaaaaaaaa

SEQ ID NO: 317526 - DNA, 524 bp, Homo Sapiens
tttagaaaaaacaagatttgtattttatttccttgtaaaaatctttacacatgcagacaaaccagtgttaagaaagtattcaccatcatttaaacaaataaccacttaaatagaacagtgtctgcaattttatctgtataaaaataagatacatttttacagaattcacgctccagttcttatagcaataaacaatacacaactataataaagtacaattgaacctgaccatggtttttaattagatactgctagggcattttaatgtgcaaaaaaattaacatagttcttttcaaaagaaactgtcctcagtgttctagagacctagagggtttcaagaaatcaaatcctaatcagtttgcgtttaatgtttttgattgagtccatacatcacactgtagataggcaaaaccaagaactgatgcaggctcaaaggaagagaaagtcagcgcctgtgcctgccatgtcctgagcgactgccaccatggtgcttgcttttatgggacctctcaaaggagcgagat

SEQ ID NO: 317527 - DNA, 433 bp, Homo Sapiens
  misc_feature (259)..(331): n is a, c, g, or t
gctattaaaattttcctttttaataatttatttaaataaggtatttgaagcagtttagaaaaaacaagatttgtattttatttccttgtaaaaatctttacacatgcagacaaaccagtgttaagaaagtattcaccatcatttaaacaaataaccacttaaatagaacagtgtctgcaattttatctgtataaaaataagatacatttttacagagttcacgctccagttcttatagcaataaacaatacacaactannnnnnnnnnnnnnnnnnnnnnnnnnnnnnnnnnnnnnnnnnnnnnnnnnnnnnnnnnnnnnnnnnnnnnnnncatagttctttttaaaagaaactgtcctcagtgttctagagacctagagggtttcaagaaatcaaatcctaatcagtttgcgtttaatgtttttgattgagt

SEQ ID NO: 317528 - DNA, 392 bp, Homo Sapiens
cagaatggtatttcttaggttatttttcagagtttttatagtttaatgttttatatttaagtctttaatccttcttaagttgatttttgtatgcagagtaagctgggggcccagtttcaatcttctgcatatggctagccagtaatcccagcaccatttattaaatggggacttctttccccattgcttggttttgtcagctttgtccaagatcagatgattgtaggtgtacagcattatttctggactctctgttatgttccatttatctgtgtgtctgtttttctactaataccatgctgttttggttactgtagctctgtagtatggtttgaggtttggtaacttgatgcctccccttttggtctttatgtttaggattgccttggcta

SEQ ID NO: 317529 - DNA, 446 bp, Homo Sapiens
  misc_feature (69)..(69): n is a, c, g, or t
  misc_feature (405)..(405): n is a, c, g, or t
  misc_feature (415)..(415): n is a, c, g, or t
  misc_feature (422)..(422): n is a, c, g, or t
agggcatctgggtttttgccaagcctcctccatctcccatcagtgctgtgggctggctgcaagcttcgnaaacagttctcctggaagggaggtttttgctttacccccgccagcacttccgcacacaatcatagagaacctctctgctctctgctggcctacagcttgtctgtttctcaagcagaggcaggaagagctagtcttagcatttatattttaataggaagttgactcccagcatgtaaaagtgatccacgcagccggagtgtatgccgggagctaagtggtctatgggtgcacatatcccaccttgcttcctgagtccttggtcccaatcttctcatttgttcctctcgttttaaattttttccccccaactcttttgatgtaagagttcagtttgtnttcgggagtngggattnggcaagggctctgggatgagtgtt

SEQ ID NO: 317530 - DNA, 581 bp, Homo Sapiens
  misc_feature (380)..(380): n is a, c, g, or t
  misc_feature (440)..(440): n is a, c, g, or t
gaactcatttttatattttccttagtataacagttaatataatatgtcatttttgttaatagtgtctttttgtcattttactttttaaaagattttattgaaatatacatacaggaaagtgcatctatcataagtgtgcaaattgatgaattctaaaatctttattgtacctgtttagcacctagattgacactgaacataactaacaaccagaaatctccgtgtactcccttcctgtaactacccctgcgcccgaccaaatcactctcttctaacagcataactttgtgtgactagcttttttaatgtcattatatttgtgggattcgtttgtacagttgcatattagtttgcagatccctcactctcatttctatatnggattatattgcataaacgtaccacactttatccaactactgttaaatatttgtgcattntctacttgggggtgatttcaaatagtgctgctatgaacattcttgtaaatgtcttttggtgaacatatgcaacacatatatgcgttgttgttggttcccaggaggggcattcctgtgtcataaacaatgcgtgtgttcagg

SEQ ID NO: 317531 - DNA, 613 bp, Homo Sapiens
catctcctcctcacccataccaagtttcaagttctcaaagtaactacatttattattacaaactatttgccagaacaatatgcctagggctttgtatacattattttatctttaatcaactccgcaagtagatcggagttaagtccatcttactcgaggctcagagacttcacagcttaacaagtggctgagcagaattgaaacccacgtgcgcacgattccaaacctcctccaaatattccatgctgtccacttgttaacctggcaaagccttgggatacagcagctacctttcaggggaaattatttttttcgaagtaaattaatttctacctactttcagaaaatagaagttgaggtacagaaacagctgggattggttacagctcctttggccttatttgaacaagattcgaacagttggctacatttgattggcacaagtgcagtctacagtgtttttatacctccacttgttatagttcatgatgtacagagaaacctttaggctgaacttaaaatatgtaaggaggtagctttaggctaaacttgatttaacaagtacccaaaaaagacccaagagagccccaataggccgggcacggtgaaacac

SEQ ID NO: 317532 - DNA, 457 bp, Homo Sapiens
  misc_feature (73)..(73): n is a, c, g, or t
ttaacgtttgaaatttttcataataaaataccaaaaaaaattcactgttttaaagagggacctattgccaggnaattggtacatattttgacctggaccctaaagaacaggctttaaagaaaatacaatacatgaaggcttgtctgagaaagacaacacagagttctcagtttctccttcatccccagcaccacagtctgggctcgtaccacaggtatgctgccaggtgctgccatgcccatgctcagggagtcagcttgagagccctggtttctcatgaaaaccaaagaaggtatgagcctcgcgaaggagacacaggcacagttaataaggaagcccatcatgagacaggcatctcccagagtgccttcctgtgtcctcggtgatggccaaagatacctcccggggcagggacaggggagggaattggggcggggagtatcccacccattccgag

SEQ ID NO: 317533 - DNA, 1071 bp, Homo Sapiens
  misc_feature (115)..(124): n is a, c, g, or t
ttttttacaaaccacagcaaatttattactcaagatccagtgccacattatagcaccacccgaagccctcaccttccccctcccaacctggcccctagagtacacccaaaacagnnnnnnnnnnggaaacccagatccctgctcctcctctggaagagggggccttggccaggaagccccttccataggtcccagcaggcaggagagtggacccctctgtgcccagagagcaaggctccaggctccaacaacagagagaacatgcaggcaggagcaggagcagaggcctgtggctatgggggaggaaaagtgggaggaaagggcactgcctgaggagtccgggagtctggtcatcccggggatgcacgcaggagcttccgggcatcaggggcctgcccctggctggttagcgctttgacagctcgtgggacagccagtccagaccatcgtacagacctgtgccttgggtggcacaggtggcctggacataccacgtgcggctgcgtaagtgctgtagccccagcttgtcagtcagctcgctcacgggcatggcgttgggcatgtcctgcttgttggcaaataccagcagcactgcatcccgcagctcgtcctcctgcagcatcttctggagttcatcagcagattcttggacccgctcccggtcattactgtccaccacaaagatgaggccctgagtgttctggaagtagtgccgccacagaggccgaatcttgtcctggcctcccacgtcccagactgtgaaacagatgttcttatattccactgtttctacattgaagcctatggttgggatggtggtgacaatctcccccaacttcagtttgtacaggattgtggtcttgccagccgcatccaagccaaccatgagaatccgcatctgcttcttcccgaagatccgcgaaaagagcgcggacacggtgaggcccatggcggggcccggggaggggcgcgggcaccgacgcggggtgcgggctggaactggccggccgcggggggatggggcgcagcagcagcaggaggaggctccgccgccgcactccgcgcgtcgct

SEQ ID NO: 317534 - DNA, 705 bp, Homo Sapiens
  misc_feature (33)..(33): n is a, c, g, or t
gggcctggcgttgggcatgtcctacttgttggnaaataccagcagcactgcatcccgcagctcgtcctcctgcagcatcttctggagttcatcagcagattcttggacccgctcccggtcattactgtccaccacaaagatgaggccctgggcaggaaggaaggaagaaaggagaagtccaagctggggaagactaaggtgagttctgaagagtgagtaggggatagccaaacagaaggggtagaagtggggaagggttttttcctttgcctgggggcccagcctaggccaacaattctgttctcccagccctaacaccttttcccgtggggttagaaagtcccctcccaacactccacctgagtgttctggaagtagtgccgccacagaggccgaatcttgtcctggcctcccacgtcccagactgtgaaacagatgttcttatattccactgtttctacattgaagcctatggttgggatggtggtgacaatctcccccaacttcagtttgtacaggattgtggtcttgccagccgcatccaagccaaccatgagaatccgcatctgcttcttcccgaagatccgcgaaaagagcgcggacacggtgaggcccatggcggggcccggggaggggcgcgggcaccgacgcggggtgcgggctggaactggccggccgcggggggatggggcgcagcagcagcag

SEQ ID NO: 317535 - DNA, 794 bp, Homo Sapiens
  misc_feature (42)..(42): n is a, c, g, or t
  misc_feature (54)..(54): n is a, c, g, or t
  misc_feature (266)..(556): n is a, c, g, or t
ctgcctcccagctcgtggggcaggcagtgtggtggccaaggncagcgtagaaanccagggctcttgtcccaaaagaggagaggaaagagggttttgcagtcaaggaaaaacaatcaaaacccaacatgatcgaagagaagccctgaatctgcatcagagggaggggccgtgggcagtgtcgcaacttggccactgcggcggcaccagtacggggagctgtgattcctaggaggggttggggccagctcacaagtttatttatttannnnnnnnnnnnnnnnnnnnnnnnnnnnnnnnnnnnnnnnnnnnnnnnnnnnnnnnnnnnnnnnnnnnnnnnnnnnnnnnnnnnnnnnnnnnnnnnnnnnnnnnnnnnnnnnnnnnnnnnnnnnnnnnnnnnnnnnnnnnnnnnnnnnnnnnnnnnnnnnnnnnnnnnnnnnnnnnnnnnnnnnnnnnnnnnnnnnnnnnnnnnnnnnnnnnnnnnnnnnnnnnnnnnnnnnnnnnnnnnnnnnnnnnnnnnnnnnnnnnnnnnnnnnnnnnnnnnnnnnnnnnnnnnnnntgcgagtttaattattttttcgggggtgggtgaacttctcgcagcggcccccttgtgggggtaacccggtggcgggtttcacttcggggtttggaggggaagttggagtctgtggggcgggtcccgcccggccccgaatgtcacggccgaggttctcggaagcagcagagtgaagttccttcctgccctgaccccaggtctatggcttaaaaatcagggtgcacaggctggggccgcg

SEQ ID NO: 317536 - DNA, 620 bp, Homo Sapiens
tttacaggccctgcactcctccccccagctatgcaggatctgcttcagctctgccactctcatcttccgcaggtcaactgatgccaagtccagtgttttttcatatttcagctcacagatctggctatccaacttcttcagcttctcacaaatcttcattgcaggcatatgcacactcattgggcgagtgacttcacttaggatctttgtggctgcgtcttttgtggctcctagataatagcacaggcggttttcttttcctttggtgtccaagcaaaaactgatcaattctttctctatagtgtccagcgaaaagttaactcctctgtctatcagtgacttgtagaatcggttcaagaattctttacatacttcacagtcggcccctggccgccccccggcctcctggccctgcgtcagcaccgggtgagagaccaaaagcccggcgcaaaaggccaccacagcaactgggctcgcgcaccacatgctgggccagcagcttcaatcgcctccgccacccgcgcccaccgcccaccaagctgccaaagcgagctgagcagaattcgaggttggaaagaatctgccagtagttgccaggacaaatgacgcaacctcgtgcc

SEQ ID NO: 317537 - DNA, 572 bp, Homo Sapiens
ttcagtttttaacataatttttgttttatccacaacttttcaagtattgagagtggaatataaacatgggttcttagtctttagctatctgttaaagcctatgaatgccttcttaaaatcatgtttttaaatgcataaaatatatagggattacaaaggaatctaattatatcgaaatacagttattaaaatgttaaaagataagtttgttatatattaatatgcatgcttctttataaatgcattaaataagagttaatagctatcctaaatttgaaatagtgataagcataatgaaaatagatgcaaaaaactaatgtgatatgaaaatatctgggtttttcttttgatgatgaagtattgctaatattaccgtggtttatgaactatgttcagaattgaagaaaatcctaactttcagttagaggttagtgacggggtttcaggacaccctacacaaaatacagcactttgacatattgaatattttaagctgaaggcatttgaggaaattggcagaagcaggaaggtgactctgaccttctgcctgctgtttctccccagaagcagcc

SEQ ID NO: 317538 - DNA, 355 bp, Homo Sapiens
caacctgtgttttttaatttaatgtgcttctcttatagacaccagatagttgagtttgtctatcattttgctatttgttttcgatttgtcccattcagttttgtgttcctttggtctttacttcctgctttcttttgggttaattaatgtttttgtatttcatcttaattcctctgttggctttaactgtatctttttgcattattgctttacagtgtttctgagaattatgatatacattcttaacttatcacagccttagagttaaaattatgatacttcatgtaaaatctttgttgtcatatatatcatatctatgcacattgttatttttgccttagtcatatgtatcaca

SEQ ID NO: 317539 - DNA, 387 bp, Homo Sapiens
gaaaagattgagtctgtaggtggcaatattctcattcatcattcacgggacaccgccgagaagcaatgggctgagacgtgggtattaacattggctggagtagcaaggatcttcaacactagaagatatttgctgcagcctttaggagatttttcaagagcttgggatgttcttcttgaccatatacagtcagcagcactcagcaaaaacaatgaagtatctctggctgctctgaaaagcttccaggaaattttacagattgtgtcccctgtcagagactcagataagcctgagacaccacctgtagttaatgtacctgtgcctgttcttatagggcccatattaggcatgagccgggcatttgtaagaacacgatttcattggaga

SEQ ID NO: 317540 - DNA, 345 bp, Homo Sapiens
ccagccactatgacaatgatattctggccttcattattgacaattatagaagcagttcctaagttttctatataatcattgccaaaagaatctttgccaaccttacacaccatggacgtcattgctccaagccgagcagcttggacacactggttggcacctttccctccaaagccaataaaaaacttatgtccatggatggtttctccagtttttggcaaacgagaagtaagactgaccaggtcggtcatgcaggagcccaccactaccaccgccgccacctcctcttgccacttgcctctggggttccacagacgccgccatcgctcaaaggtgctgctgtcc

SEQ ID NO: 317541 - DNA, 288 bp, Homo Sapiens
  misc_feature (152)..(194): n is a, c, g, or t
attcattatgtgtcattaatatacttttccaaagataagatttttaatcactgccagttgtaaattatttttagccaatttttaaatcttttcaaagcagctttgaaatgtgaatatttaaaggtagacctgtgctgcaagataattaaacnnnnnnnnnnnnnnnnnnnnnnnnnnnnnnnnnnnnnnnnnnnactttaaatgtgaaacttaagctaaaaattgcttattatatgtaataaaaataatatataaatctttacaattttgaaataaacccatccttgg

SEQ ID NO: 317542 - DNA, 359 bp, Homo Sapiens
cttttgtggtggatgggcaaagagacgagagagaggcaaaggggggccagaactcatttttttaaataaggaaccctcttccctgatgatgacattaatccattcatgagggcagagtcctcaaggcccaatagtctcctaaagatctaacctctcaatactattagaatggtgattaagttcaatacatgcttttttggggaacataatcaaaccatatgtctatcagtctttaatattaagatgtctttttttctgaacccattttttgtgagatttagtgaatctttctgagtatcatatttgagagacaattgctttagccttatttttaattacttagctagcatgtaagctat

SEQ ID NO: 317543 - DNA, 774 bp, Homo Sapiens
  misc_feature (554)..(584): n is a, c, g, or t
ggtggaacaccagccatggtcagtcaccgggtcttcttggaaacacatcaggcccagttcccctttcttgtgggtccgggagcccaaacaatagtgttgaaaacttttctggggccgcagcgggccgacaagagttaagtcttcaggtgaggagatttgattgcactcagcctttccagttgtccatttccagctactcttttccagagactttgatatgtttatattatagatataatacataaaacatctagagtgagactctacgttctccccaaaagaagagaaccaagccgtccttccctgctcccagccccagtgatgcgttggcgggaggcacctcccttcccgaccaggagccagggcctctgggggacaagccttgtgggcagcccaggccggaggggctggggaaagctgagggcaaaggagaacccccctcacctcattggtcccccaggatcaaaagtaatcccaaaaccaaaaggaaagggagtctcagacccttcccccagctgccgacggagagtctcattttggcaagtatccgagcnnnnnnnnnnnnnnnnnnnnnnnnnnnnnnntggtggtttagcagagacgcgcacattcacattgcacaaggcactgctggggcacagaggccagatacaagtgttgatatcggctgataaagcaaaatatttggaaagcttgtcataactccggtccctctgggatggactgatcgtgcttcgtgttcctaggcaatgctgaaggcatacagtacaaaca

SEQ ID NO: 317544 - DNA, 633 bp, Homo Sapiens
tagccctttacttttggatatcttaatttctaaaacaggttttctagaacttgctttctgtctttatgttcatacttaaagaagttataggtgtttttaatatatatcctaagtgaggactgaagctttgaattacattaaaaattaatccgtcttatttttgtaagtttggaattcttaagacttaatctgttcaatgcaaaatacaggctggacattcctaatctgaaatccaaaactttttgagtgccaacatgacactacaagtggaaaatccacacctgatctcgtgacaggtgtgcaaaattaattaaaatactgtataaaatcacctttaggctatgggtttaagaaggtgtataggaaacataagtgaattttgtgtttagacttcagtgccatctccaagatacttcaaatatgtatgtgcaggtactccaaagtccacaacactttggtcccaagcattttgaataagggatactcaacatgtgccagaaaatgtttgggcatgctatagaaaccattttcttctagcaaagttactcattccagtgaactcacaggtatttatctaaaagtaacattgggaaggataatttaactttcaccctatgtgcagcttattacgtc

SEQ ID NO: 317545 - DNA, 627 bp, Homo Sapiens
  misc_feature (406)..(431): n is a, c, g, or t
cacagcaagaaaggaactcagttctgtaatagcacaggtataatgaactacaaacaagaaggggtggaaaaagaagaaaaaaagatgtgcattgagtttaagacactgtaaaactcagaagacatatttactattcaagtataaactctgtaaggacttggcataaattgaaaggcagctgctgaggtacaccattataaaagaagttctatgaatttacaattctaccttccaatttcctgggagaaagatgaagacatagtcaataattcatgattgaactattcaaaaacatgtatttatttagaccaatagaaatacgtgttctcagactgtcctctagagtttttgagactattagttcaagagtttcaaagtatattacttgtaaaaccaatactgattnnnnnnnnnnnnnnnnnnnnnnnnnncagaaatctgatttgatggtaccttgaaaataccctaaataccaaattttctccaacctaacattacagctaatttaagaattcctccttcattggtaaaacattttttcctcattaaatgtgggtactgaaattggatagaaacactatgaatgtgaaaataccaccaattttctctcgtgccgaatcctgcagc

SEQ ID NO: 317546 - DNA, 431 bp, Homo Sapiens
ttgctaaatagtattgtttattaaggcttgtattctcctagaggaaaaacccaatgtcgtccaggactccattcaggcagtaacagttcagaggaagtgacacgctctaaatacaagtctaatgatacagctgaaacgttaactcagagggtcttttggagcaagtagttttcagaaagcgtctgctctctaggacggtaaggatcctctacaagggcacgtgcagatccaggcgctggagcgtcaggcatgggcaccattttcatgcttcaactcaaactccaggtggtagtgagctcaacggtccctcattccacaaaacatgacagcaaattcatcttctaaaaaaagttttgttttgtttttacccattcaacaggaacaaacattagacacacacgatgaaatttacaaccagcagcatcatccat

SEQ ID NO: 317547 - DNA, 357 bp, Homo Sapiens
tctacacacctagctctcaacattcctctctaaaatatatgactctgtttactagtgtaaggatcaaaaggatcacatgtggcttccatgaaaagaaaggtatcttaaaattgttgtgcataaaatatacaattcaaaggaattacatagagttataaataatagagaaaataaaaagatcaatggtccataaggcgatgcaatgataaaccaccaaaaagtcctgagattctttctatgctagccacgtatgaagaactccaagccaaacgctattccttcggttgtatttttccttgaatctaaagaacaaaaatagggcctcacagtttgagagaatcattcactttgtctagc

SEQ ID NO: 317548 - DNA, 403 bp, Homo Sapiens
gtggccagagagcagatgagtgttgcacttcctcccaactgtcctgcacaccctacccaccattgcacatccaaatcctacccataccatgagacttatttcatataccacctccttcactgacactttccctaattccctctctcccctgctccagccccactctgcatcagaattaattttgcccctctcttaattttcatgcactttatgcctctttttgattgcatttttcatttctcatgagttatttatatcctggactataagctccttgtggctgtggaccatgccttacttatttgtcgcatcagagtgcccaggtgtgggactgcttgcctgtgattctaggaagcccccaggcgacttgagaggcactgctctaatcagctacctagagacc

SEQ ID NO: 317549 - DNA, 203 bp, Homo Sapiens
gtggggggtgtataatgaaattactctgtttaggaggatgaactgatatttattttaacagcaccattgaggtatcacatttattacatggacctgagcttcaatcgtagtaaggaaaccagcccaggaaagtcgttccatcactagccagaagttacagggcaaaattatagcttaacttttggaaggcaaaatggagtctc

SEQ ID NO: 317550 - DNA, 744 bp, Homo Sapiens
cttttaattgctattaatatggttgatctgattggctcttcgatgaatttcatccaagaagttctccagttgttctattagcattcgttttttaaaccttgatgcttctttaatgacattttgtaaaaatattagtcttgtttgtaaactgccttgcacatgcttcagtaaagtgaagattctttcatattttcttcctggctttcggatctctttcattatttgtgcttttagttcagtattgacctcttcatggcttctgcaatgcatcaatttctttcctttgttgagtgaagatgctggtatgttctcttcagcacattgttctttatctcttggctcctcatgattttctaaaaatccaccaacagtgaggtcattggttcctaaatggtcatgaccaagagcctccatatgattggttggccgttccagtaaactggctggagaagatgctgaaaattccgtatccatagcatttggtgtaatgtctgatgaaagttggtctgcaacatgattttcaaccacatcatgtattatcgaatcattagtggtttctgaaattttatgaagaggaagaggtttaataagatctggctgtgcttgagttgtaggtgcaggtggtccttttcccccaatatgattgtttacaacaggattctgctgtctgcctcttagtagtggagacatacaccgacgtcttttagggatcccttgcatatttggttctccgggtcgtttatg

SEQ ID NO: 317551 - DNA, 483 bp, Homo Sapiens
aatggtatgccaatgtaggccttctgcttgattttgcggtgaacctaatattgctgtaaaaaacaaaatcaatttttaaaaaatgacagctttttattgggtattctgtctctatctcactctcttgtcctggggagtgagcttggaaccaaatttcccccagttgaaccagaatatactgcagttacatataactaatatacatgatatatctacatatctttttctacccttctgtgttcagattatgtgttctctttttaatccagactgacaatttctgcctctaactggatatggtagtccatttacatttaatgtaattactaatattacagggttgaatttaaatctaccatcttgggatatgagttctatctgtgccatctgattgttgttcacctgtgtctttcttcctgtgttccctttggtgaatgcagtaatttttaggattccatttagtataagtgtacatatttttag

SEQ ID NO: 317552 - DNA, 769 bp, Homo Sapiens
gtccgtatttaaaagtaaagtctcactggcgttcccacattccacactttcagacggatccaatgcccaggcccttgtttgaatgtacttcaggggatcccctcccagtgaaaaaatctcagaaaaccgtttcacgacacagtgaacaagttggaattgtttgctagatgtaaaccatttgtacaagcaggctgaatggatttttcttgcatgttctacaggcttttttgggaaagggaatagttgaaaccgtgaatgactgagaaacagatcatgcaatcttcaacaccctcaaaacgtttgtctacgttatttttccataaagctaagccttccatagatacttccattctgatgggtgaggtaagtgcttaactgcagcatccagttccgccactgctgaacagctactcctactcttttcccactttctactattattgaacccagtggataatttgaaggcagttgtattataagttcaataactatgtcctcaatagtataagtagccattacctctcgagtagtagctcgagctttaaccgtcatgccattaaatagttgtgtacttgtttgtacagaagatatttcttgaaaagaaagaacactgctgacatacttgcttgtaaatctatccacaatattgaaaacacgcttctcactgctattccaccacaacctaaccatggcaggcaagtcttttaatgtcatatgatagactgaacaagccaagtgtggaatgtggtatggaagcattgttgtttct

SEQ ID NO: 317553 - DNA, 319 bp, Homo Sapiens
gccagaatcatcagtcatcagagggctccaccagttagttattatactacgtatttcttactaaaccttccctttcaacttagatcaatggaacaaatatatatgtgtgtgtatatatattcctcttaaaggtccaccagtcccattcctgtgataatccactaattcattaatccataaatgatgcttcaatttatttaagcagagtcctcataacccaatcacctcttaaaggcctcacctttcaatactgctgcattgaggattagttttcaacatgagatctggagagaaaaacattcaaaccattgcatcatac

SEQ ID NO: 317554 - DNA, 367 bp, Homo Sapiens
cactatgtgtttgcaccttatagcctagcttccactcctacctacccaacatcaaatgaggacttaattctgtttctctcttaaattctctcttccttcttcctttggctcccatgacagtgggatatattgaaggaaagaatattgtccttggactgagagatttctgaactcaaaacctggctccaatatggagtaaggagaatttacttaaacattctgagtcatcatttctttcataaaatatgggatagagacacatacctcctaaaaactgtacatcgagacttgtatgagataacatgtgtaaagttagctaagagcttgtgtttctaacctccactacactttcatgaattcatatttc

SEQ ID NO: 317555 - DNA, 388 bp, Homo Sapiens
attctgtacggcaagtgatcaactctggcaaaatatgtcttttaagtcttcgtacacagtcattgaagactctccggaattcagatttgaaaccatatattatcttcattgcacccccttcacaagaaagacttcgggcattattggccaaagaaggcaagaatccaaagcctgaagagttgagagaaatcattgagaagacaagagagatggagcagaacaatggccactactttgatacggcaattgtgaattccgatcttgataaagcctatcaggaattgcttaggttaattaacaaacttgatactgaacctcagtgggtaccattcacttggctgaggtgaaagaaacatccattctgtggcatgttggacttgatctggca

SEQ ID NO: 317556 - DNA, 387 bp, Homo Sapiens
agacaccacaaagggaagaaagctggacttctcattagcgttttggtaactaatttagtgcaaccttgggttggcgagaaaatggcttgctttgtggggggaaccctagacctctccactgtctgaatattccatgtgtttgtttccctagagggctagagaaccctggacacagagttcagcaagagagagtgaaattaaaagaggttgtgagtctttaaccttgagcctgaaatgaatgtgaatcaatcccagactcttggcttccttgaagccgggtaaacattcgagtatgtagaacccatcttagaccagggcctgtgcgttttctcagagccctctgacaacgggcatgggtctccctgttccctttgtgctgacgaaacc

SEQ ID NO: 317557 - DNA, 406 bp, Homo Sapiens
cacactttcatgatttcgcctcaagtatagtagatgagcttaggctttttgagccaggtagccttgggattaattctcagctcttgcacctagcaggtgacctcagcaatcaagtcacttgccctccttgagcctcagtgttgccctcagttaaacattgctctcgtgtgttgctgagcattcagtgagattgtatataaagtgatcattgtgaaggtattgggacataatttgggaaagcgtcctggtctaagcttttgattggctctccatcatttgggtaatgggatagtgatttaggagtatcatagcagctcaaggggcccttctggaaagggtatgaggaaggtcagggacaagtctgaaatgaatcatcctaggcttaatgcctgtgactgggcagtgg

SEQ ID NO: 317558 - DNA, 419 bp, Homo Sapiens
attccatgctctggtttaggggtcccccaactgccaaccaaccgtggcctcagagcctctcctccttgggctgtaccatagcctgtcacctgacttggccctgtctgtgcccagaccttgaaatcaaaggagatggtgtcaatggagatgacaaatttgcgggcaaaattctgcagagtgcttgttaagaaagcttgggggaagaagaatccactgatccagaagacagctgggatgccatcttggatccaggcttgcagaaagtccaggcgttgcagcaggtccatgacccatgatgacagaggcttgagcgatgggtaggccttggcactccagagctcaggcacagtattgttgtacagtctggcagccatcagctccatctgagaggacatcactaccagccccttgagtgcctt

SEQ ID NO: 317559 - DNA, 362 bp, Homo Sapiens
ttccaatctctcttaaggcggttctatttatcccatctttagcttgtgatctatgtccaagtttgattttcttaatggcgacaatttggttggtgttcttatctctggcctgtgtaaacggtggcaacttagaaagaaaaatagaaataccttaggtttatgggagtttttgtgtttgcctttttgcatttttcacatttcgcgaagcaaagagcccagagtttgtgagcagactcgcggcggctgtaaacgtggcgggtcagtctcggtccagctccaggttacttttcagcaaggagaggcccctcagggattcacccccaggatgtaaagaatgcacagcaagtgtgtctgcacggtct

SEQ ID NO: 317560 - DNA, 747 bp, Homo Sapiens
ttcctggccaaaaaaaggaacccttagaaagtaactctgctaatatacagccaccagccccacatgtccaccacctacacccatacatcctagctccaaatagtaactcggggggcccgatacccacctggttacaacctgatgtgtataagctctattggggctcccaaaagatttggccaggccaaaatctgccagttttagaactccattttcatctagcaacaagttgtttggtttcagatccctatgtaggatccaatgttgatgtaaatattctaatccttgaagagtcatcaacatgtaggctttgatgtgtgatggtgtcagcacaagactattatcctttattataacctctagatcagtttccataaaatcaaagacaaggctaatattagatttatgtccaaaagcatcaaggagaccaattatatttggatgacttagctcctgtaataattttatctctcttaaggcggttctatttataccatctttagcttctgatctatgtccaagtttgattttcttaatggcgacaatttggttggtattcttatctctggccttgtaaacggtggcaaactgtccctccccaaggaagtccagcttctcataacgctttgcccgagacttcacgtccagagccatccggcgccgtaaagcccgactccagccgaaaagggcgagctcccaggacaacacgaatttaaagctaccttaaagcctccaacacccacttcc

SEQ ID NO: 317561 - DNA, 367 bp, Homo Sapiens
tccaatgatgatgatgccaaggaggaggaggagcacgtctgtgggcgcttccatctgtttggggctcagtcttagcttaggaaactgtttgccagtttcacccatcttctgccatggatgctaggaggactgatttctgtaggctgcatctcagatttccatgtcacttcattcccagttgggttcagccagtgggagatccttgaaggtgtctgagttggggccattccaccgcaacctgcccgtggtggactcatctgtggttgcactcatcatgaaagcagagtctttttgtctctcggctttcctttcctcccttgcaaggagtcaaacttgacagaggtcgacaggcgtgtgtatgagtgag

SEQ ID NO: 317562 - DNA, 1618 bp, Homo Sapiens
  misc_feature (238)..(238): n is a, c, g, or t
tgatttagatccaggtgctttattaaagataaatagtctcataagaggagaagtaaatgtttttgcaggccaacagagagtccatgtatatgagaaagagatgcgtgaggtccctgatctgtgctctgagggggtggtcagtcaggcagggcttgggcaaccagtaaggcagatgagggtccctgtcctgggggactcactgctcctgggtgccccaggagattttagtctggccgtntggccgcattggtactcatcgatgagctgctgcacaatctccctgggatgtgtccatctcatcaaagttgtccttgaacatgtcctccttgcggaactgctccaggaaggcctcccgcttacgcagcttgtcatactggcgacaggttctctcgaagagcgaggagatgctggtgtggttggccatcatgagcccgctgacccggtgggccgagggcaggtagggagacttcctcgacagggccacctggatgctggcggggccccacgggatgaagttggccaacttgcgttcccggatcctctgcaagctcttgtggacctgggtggggtccacctctccctggatgatgttgaggatggcgatgtagcagtggttggtctggcggtctcggcctgtggacaccatcacgttcttgggctgcagcagccgcctcatgacatccaggaccgtggtcttcctcacgctggccactgactggtccgtagtgagaggggtgtagccggtcatgaggaagtggagccgtggggtgggaatgagcgaggcgatgaggccgatgaggtcattgttcatgtagccagggtagcgcagggtggtggtgctggctgacatgatggtagacaccagctggttgatctgggagaaggatgggttctggatgtgcaggcggtctgtggcaatccggttcagggctgtgttgtccagcaccaccacacagtctgcattctgcgtcagcctcttgagtgtgaggagtgaattgtaaggctggaccaccacatcgctcatctcgtcctggttgggaaacactgagtatgtctgcaccagcttcttaggatacctgtcattcagccgttctaagaggtaggaacccagtccagagcctgtccccccagcaatggagtgacacagcacaaagccctctagactgtcactaccatctgcctcccggtctatgatgtcaaaaatgtcctcatggatcttttctccctgggagaatccgctggcccagttgttgccagctcctcctccatgttccgacaggtagatgttctctgggttgtagagcttggcatagggggagttgaggatggagtggatcacccggggttccaagtccagcagcacggcccgggggatgtagtgctcatcgtctgcctggtagaaaaagacgtccttgcggtcagtgccctcggtggcgaactcctccacgatgccctcggggctgataccatgctcggcgcacagctgtttccagaactcgaacccaatctgattgccgcactggcccaactgtagggtgatgatttccctcggcatcgctcctcaggcaccggcgttgcagccgctcccgcccgcaacggcgccgcacgccagcccccc

SEQ ID NO: 317563 - DNA, 419 bp, Homo Sapiens
  misc_feature (365)..(365): n is a, c, g, or t
ttactgacaaccaagctttattactttattagagctgaacaagcatattaaaagttagggcatggaagggaggaagcaggaccagctcacgggctggaggatgaaccaagaagggttgtccatgaggtgaagctgggtcagagggagcaggcatggtcgaggctgtggttaccatctagaaggagaaggagtagtggggagggaaatcactgctcctgggtgccccaggaaatgtagtctggctgggtggccgcatggtactcatcaatgagctcctgaacaacctccctagacctgtccatctcatcaaagttgtccttgaacatgtcctccttacggaactgcttcgagggaaggcatcccgntttccgcagcttgtcaaactgctgggcaggaacttttcaaagagcgaggagatg

SEQ ID NO: 317564 - DNA, 514 bp, Homo Sapiens
  misc_feature (43)..(43): n is a, c, g, or t
  misc_feature (54)..(54): n is a, c, g, or t
  misc_feature (66)..(66): n is a, c, g, or t
  misc_feature (75)..(75): n is a, c, g, or t
  misc_feature (421)..(421): n is a, c, g, or t
gggttcccacctcctcccccggaatgaatgtttgaaggaatgnccgaatgtaancaatggttggtnctggcggtnctcggccctgtggaacacccatccacgttccttgggctgcaacaacccgccctccatgaacatcccaggaccgtggtccttccctcacgctggcccactgactggtccgtagtgagaggggtgtagccggtcatgaggaagtggagccgtggggtgggaatgagcgaggcgatgaggccgatgaggtcattgttcatgtagccagggtagcgcagggtggtggtgctggctgacatgatggtagacaccagctggttgatctgggagaaggatgggttctggatgtgcaggcggtctgtggcaatccggttcagggctgtgttgtccagcaccaccacacagtctnattctgcgtcagcctcttgagtgtgaggagtgaattgtaaggctggaccaccacatcgctcatctcgtcctggttgggaaacactgagtatgt

SEQ ID NO: 317565 - DNA, 412 bp, Homo Sapiens
gtatatccagtgctttattaaagataaatagtctcataagaggagaagtaaatgtgtttgcaggccaacagagagtccatgtatatgagaaagagatgcgtgaggtccctgatctgtgctctgagggggtggtcagtcaggcagggcttgggccaaccagtaaggcagatgagggtccctgtcctgggggactcactgctcctgggtgccccaggagaatgtagtctggccgtgtggcgcatggtactcatcgatgagctgctgcacaatctccctgggatgtgtccatctcatcaaagttgtccttgaacatgtcctccttgcggaactgctccagggaaggcctcccgctttacgcagcttgtcatactgggcgacaggttctcttcgaagagccgagggagatgcttgt

SEQ ID NO: 317566 - DNA, 262 bp, Homo Sapiens
ttcaaagatttttctatgtattccactactataatcacaaaatttatagataaatgtttcatgttagaaactttatggctaataatcaatatgaagatgttctgaaattaaatcaatgctaaagaaaggctgtgtttataaaatttttgataaaaatatttatctctattaactttacaacatgaaggtacatgttaccaaattatgaaactacatagggcagttttaaacaatactctgtggctcctctttttttccatca

SEQ ID NO: 317567 - DNA, 1048 bp, Homo Sapiens
  misc_feature (781)..(781): n is a, c, g, or t
  misc_feature (786)..(787): n is a, c, g, or t
  misc_feature (790)..(790): n is a, c, g, or t
ttttattgacttactaccatctttataaaaatcgaatatacacacaaacacatcaacaactgtggaactgtatccattaaactttgataagacaacacaaagaactaatagctaagatgtggctgagttgaaagcacttccaatagtattttaattttaaaaggtccatatttacatggtatgctaaatgctcttgcatctcattttaaatgcatgatgaactcaaggaacaaaggataatgggttgcagcagatcttccacgaggggtttgggctgggtgtggggctgacttcacgtgagcaagcataccaaacacctaagtaccattcctttctcattctgcttctttccttttctgtagtttccttcaaggaaactaaaccttcattactgggattgtctggtactaagaatccattttcgatggttgtgggtattgagtgaggtcggactgtgttggactgttctaatcagcgctttaaggcgggcctgcatgactttgccaatcaccctttcaagaacattctatgagaaagtctgcctatgtgcatgtgtagacagttagagaaacacgcacaccccagggcctgtgtcacactcaggtaacaccaaaacagaccttccgagtggccatgaagtccaccttaacaatgaaggcccaaacaggatccgttttattaacactgactacaaaaaagtctgtttcaatgcctacttttcagagacaacatgcatatttttggttttaaacacagcacactctatttcaaaaagtgtttnaaaannaanaaagtcatgaaactcatttcattgtatcagtaagccctcaatgataaagtaagtcggtaggccttcccactgcccagtgggtactgagtggtttggatctctcttaattagagctcaagggctaccaaagtcaccactccaacgcagctgtggactgagccaaataaactagacgaaatacatcaacacatccgtatctaactgtggaaatgagtgggcagtgacagccatgggaacctgctgatgggcacacagacc

SEQ ID NO: 317568 - DNA, 431 bp, Homo Sapiens
taaacactttttgaaatagagtgtgctgtgtttaaaaccaaaaatatgcatgttgtctctgaaaagtaggcattgaaacagacttttttgtagtcagtgttaataaaacggatcctgtttgggccttcattgttaaggtggacttcatggccactggaaggtctgttttggtgttacctgagtgtgacacaggccctggggtgtgcgtgtttctctaactgtctacacgtgcacataggcagactttctcataggaatgttcttgaaaggtgattgggcaaagtcatgcaggcccgcctttaaagcgctggattaggaacagtccaacacagtccgaccttcacttcaataccccacaaccattcggaaatggggttttttaggtacccggacattcccagttatggagggtttggttttcccttgagggg

SEQ ID NO: 317569 - DNA, 611 bp, Homo Sapiens
agttctttgaagattcacgagtccctatatagaattttctggtactgtgtctctgcttagcttaccttttttctgttattctgacctgagaattccagctttctcagcccttccttaactcaaatttgtcccttcaactaattgagttcgttgtgtttactgaggttttccccttacattataggggaaagtatatttagccgaaagctaaagtatatttagctgaaagctatattttagggatcacagtcctgcattgcctgctgtctaatatctgaaaagagtagtttcataaattctgccccattttctagttgctagggtaaatcctataccaattattctgttaggttggaagtagaagttttaaatctgtttttacaacttaattgtcatggcacttcttttagcaattatgaactaccttgaggcatttcttttactggtatcttaaagttatgtcttaaagttattgaaaatctttggtggttgttttactttttactccttgtttcttatgttagaaccgataggttagcaatattctgaatcatgcagatctgattcttgatgtttaaaatatctgctctgggccaggcacagtggctcat

SEQ ID NO: 317570 - DNA, 661 bp, Homo Sapiens
aagcctggcccactaggagcccctgctgctccacttgcaggacaccccaggcctcctggcgtcagtggggcctgggacgtctgggagttccagagctggggcagcagctgtgaccatgggggccagcacagtggacagcatcagagctggcagtgaacagctgaggcgggggaggcctgatagagaggttcagtcccaaatgtctgtctcgaaggggaccaggtggtaatatgacaggttggtgacgtaggctgctgggtcgtccccgtcctccagctctgagggaaactcactgccattctcaaataaatgctctgttgggtccacgcccaggtgctggtctcttccatttggtatactgtggtcaataactatgactggactttgaaagctgggttgaattttatgcacattatcattttttaacacctgatccagaggagatctttcgaagaaggtgagcacaacttccgatctagaatatttacagggcatgcttatgatcgtcttcagcagcttctccacctcattaagcctggtctctatgtcgtgggcttcctttatggcaaccagtccttgccgcagcggcccgtgcgccagttcggaccggtcctcgggaaaggcgtcgcgcaggcgctgccacctacagcccgggggatcc

SEQ ID NO: 317571 - DNA, 574 bp, Homo Sapiens
aatctgttgtttgctaagaaacattacctagcttatcgaaattgtatataaaataaaatttgatagagtttcttgtccctaaaggctttcctgtgcagggaagaggtagggttttgtgatggctgtttcaaccataaaaagaccttttgtttcctcagttgctaaacatttgcctagacacttgcttatggaaaagtggggtattattggttttaagaaagtaatagattaatagttgaataacaaaaaatgctttatatctggtattttttaaaaaagcttcattgactaggttccaccactagttagtttcctttttaaaaggtttccttagtgcttttatagtatgagggaattgcaggaataagaccacaaacatcttttcagagctcagatggacctgacaactcacttcatcggtgtttgtttcaatatccaagattcttcttttacaggtgtttgatttcaccaccatagacttgacatctgagactgatgaaattccagatattatagctttggaagaggagaaacggatcacataattcacatgctaatggccctgtgctctcag

SEQ ID NO: 317572 - DNA, 773 bp, Homo Sapiens
ttttggcttttaaaggaaacaatacgtttgctagaaaaacctcaaaaaataatgattatatacaaaatggttatctgaatgtggattctgtactgcagcagaagcaacccagctccggaactctatttgcgcttcctcagtatcaggtacatcatgccgctgatgaaggtgcaggcgaaggccacccacgccaggatgtaggagtagccgtagctgccttctctggtcacgggatagaatttcgcgtttttgtcgtgaatgtcttcacgcctgtctgtataaatggaggccgcaatcatgacacacagacatgacattagctggatgatggaggttaggacaaacctctctccctgcttcaggcggaagagctggagcacgaagatgaagaaggcgatgcagcagagaatggtggagaggatcatggtggcctggaccgcctgcagcgtggagtactcttgaaagctgtcattgatgactgtgcaattcgtgttgttggtacatattctccagacatctgcaaaaaactcatctcctacccaccaggcattgtcgacggtggcaatgaacagcaaggctgcagaggtgatgtggaaggcgatgatgaaagcaagaagcaccaacattttcacagggcagggcgagtcgaggcgaggggtcacgtttaaagcccagagcgggatgtgccggcgctggcggctgcgctggcagctggatcgacggactggctgggggtgcgaggcgaggccgccgggctgttttgaagctctccc

SEQ ID NO: 317573 - DNA, 644 bp, Homo Sapiens
ccaggtctcttccgctatactttattaggaatataacacctaatctatgtacaggacacgtcggtgtcagggtgaggggtggccaacacgtcggtgtcagggtgaggggtggccacaaggcggggccatggctgggaccggccgctctcctcggtgtggtacctggagcggagggtcaggcacaggtaggaacggggctcacaggccgagcagagccccctctggcccctactcaattccttcctgcttgtcttttatggccacccgaaagcgctcctccagcagggacagctcactgatgaggtcggtgatggcgttggtaaaggcttcctgggggctgtagtccggcgtggtctgcactcggatgatgatcttgtgctccaaggggtgggggactttgtagccagcaaatagcacttgcgggtcttttaggagttgtgatttaatgatgtttcccagtgtgtggtcttctttgttgatggtgaataaacaggcattgggtaccttggtgtccttgttaatggtgatcttcttctcgccctcgaagagcaagaacgactcgaaggctggaggggcgttcatgctcccgccgccgttgcgtccagaccccaagggtccgccgccgccgccaccagagccttaat

SEQ ID NO: 317574 - DNA, 1403 bp, Homo Sapiens
  misc_feature (6)..(6): n is a, c, g, or t
  misc_feature (22)..(22): n is a, c, g, or t
  misc_feature (37)..(37): n is a, c, g, or t
  misc_feature (43)..(43): n is a, c, g, or t
  misc_feature (46)..(46): n is a, c, g, or t
  misc_feature (49)..(49): n is a, c, g, or t
  misc_feature (51)..(51): n is a, c, g, or t
  misc_feature (58)..(58): n is a, c, g, or t
  misc_feature (63)..(331): n is a, c, g, or t
  misc_feature (1125)..(1219): n is a, c, g, or t
aatctntgggctaggggcaccncccccaccctcgtcnagaaanagncgntntcgccanagttnnnnnnnnnnnnnnnnnnnnnnnnnnnnnnnnnnnnnnnnnnnnnnnnnnnnnnnnnnnnnnnnnnnnnnnnnnnnnnnnnnnnnnnnnnnnnnnnnnnnnnnnnnnnnnnnnnnnnnnnnnnnnnnnnnnnnnnnnnnnnnnnnnnnnnnnnnnnnnnnnnnnnnnnnnnnnnnnnnnnnnnnnnnnnnnnnnnnnnnnnnnnnnnnnnnnnnnnnnnnnnnnnnnnnnnnnnnnnnnnnnnnnnnnnnnnnnnnnnnnnnnnnnnnntagtaaagaaaagaaacaatctctctcagggtccagaagcttcagggcgtgtcccagctcaggctctgcagcctgggccagggaggaggtggagggacacgtgggcccctctggaacccctcaggaagccccctcggcaggagtgctgaacgcgaggtgcgtggtgtatcttctcacactccctgcctcctctgggcctgatagggaagtgctcctgcagctgtttgaagcaggtgtatatgagcacagccaggaggaccgtgaggaggacggccaggaggatagacaggatggcgatgatgaccacggtgcccgggctctgggggccggggacagcccgaagtgcctgggcttgctgcaggcgagtgtcgctggaccacttggtttcagccacgggtcctttgtcattcatcaccaggaacttcaccctgtaggggccgggtcctggtaggggatggttgcagccaatttttgttggttggcagtgggtatcattgccgacgcggaggacatggagctggcctctggtctggtacagcacccggttggccctcagtgtgagatagtagcccctctgggagaagttggcaggagcagggatgtcctggtttgtccgtggggccgtgaagctctgggtggcgttgctgagggccaccaccagccagatggtatccaagtcagagatgttgtggctgctgaactggcctagaggctgctccagcgtgaaggtggacagggtgagcctccccgccaaggtgtcgtttgagagctggggcacatagctgatgtgctcnnnnnnnnnnnnnnnnnnnnnnnnnnnnnnnnnnnnnnnnnnnnnnnnnnnnnnnnnnnnnnnnnnnnnnnnnnnnnnnnnnnnnnnnnnnnnnngatttaatgatgtttcccagtgtgtggtcttctttgttgatggtgaataagcaggcattgggtaccttggtgtccttgttaatggtgatcttctcgccctcgaagagcaagaacgactcgaaggctggaggggcgttcatgctcccgccgccgttgcgtccagaccccaagggtccgccaccgc

SEQ ID NO: 317575 - DNA, 652 bp, Homo Sapiens
  misc_feature (383)..(469): n is a, c, g, or t
  misc_feature (537)..(537): n is a, c, g, or t
gggagggctctggtggcggcggcggcagacacttggggtctggacgcaacggaggcgggagcgtgaacgcccctccagccttcgagtcgttcttgctcttcgagggcgagaagaagatcaccattaacaaggacaccaaggtacccaatgcctgtttattcaccatcaacaaagaagaccacacactgggaaacatcattaaatcacagtgtgacctaaaggacccgcaagtgctgtttgctggctacaaagtcccccaccccttggagcacaagatcatcatccgagtgcagaccacgccggactacagcccccaggaagcctttaccaacgccatcaccgacctcatcagtgagctgtccctgctggaggagcgcttccgnnnnnnnnnnnnnnnnnnnnnnnnnnnnnnnnnnnnnnnnnnnnnnnnnnnnnnnnnnnnnnnnnnnnnnnnnnnnnnnnnnnnnnntagtaaagaggacaaataggtgaaagaacaaatgaaaggctggaatcccacttcccccgctgtcccanggcattggatattgacggataggaggcagcaaaccactcacagagccaggaagaaatgaaggcgttggtattgccaggaggggaagccggctcggctgaaatacgctatgaccat

SEQ ID NO: 317576 - DNA, 431 bp, Homo Sapiens
tacccctccatcccgcaatttccaaatgagtagtcaccccaacactgaggtcccttctttgatgggcagcccctccccagaccctcattccccctctccacaatcttcctcttccaagatgtgacctctccctctctgtgttcctttctctccatcagtatctcctggctatggtcatagcgtatttcagccgggccggcttcccctcctggcaataccaacgcattcatttcttcctggctctgtgagtggtttgctgcctcctatccgtcaatatccaatgccctgggacagcgggggaagtgggattccagcctttcatttattctttcacctatttgtcctctttactctgtgtacaaaaaagagaggattatactatcatagactgttgtttctaaacagaaactcaggctgggcacagtggcata

SEQ ID NO: 317577 - DNA, 860 bp, Homo Sapiens
  misc_feature (23)..(23): n is a, c, g, or t
  misc_feature (193)..(280): n is a, c, g, or t
ccatattctgcctttaccccggnggatgcagatgtaccttctctcaggccgatgacctcaggcctccacggtccctggagctctaggaaaggtgagcgcgatctcgtgcccacacccagtgctctgggtcataagcctggatctggaaaaacaaacgccctttgagaagacggggactcgccaggataccccnnnnnnnnnnnnnnnnnnnnnnnnnnnnnnnnnnnnnnnnnnnnnnnnnnnnnnnnnnnnnnnnnnnnnnnnnnnnnnnnnnnnnnnnggggaaacccaagccctgccgctcatggaacagaagaactggaaccgaagtttctggaacaggactatctgagagcggttcttcctggccctcgggttcatgcaacggcgtaactggaaccgacgcttacggaccaagggtatgcgagagcggtacttcctggccctcgggttcatggaacggcctaactggaaccgacgcttctggagcaagggtatgtgagagcggttcttcctggccctcgggttcatgggacggcctaactggaaccaatgcttagggcgcaagggtatgtgagagtgggtcttcccatacaggaagtggaagatgttttgtttggggtcctcgtcgtcctcctccatgtcattggccaggtagctgaggatagaaatcaggttgctgctcaggggcaccaccaggagaggcctccggctgaggtcagcttcccagagaggaaggtaagggaccgtccctagctcaggactggcacccaccctgcagagagccacgccttcctcaggagggctctgctggacagagacctgatcaagggcatctcccactccttcaggatggagac

SEQ ID NO: 317578 - DNA, 522 bp, Homo Sapiens
ggtccctggagctctaggaaaggcgagcgcgatctcgcgcccctcccagtgctgtgggtcataagcctggatctcctccatctgctccggggtaacccaagccctgcggctcatggaacagaagaactggaaccgaagtttctggaacaggggtatgtgagagcggttcttcctggccctcgggttcatggaacggcataactggaaccgacgcttacggagcaagggtatgcgagagcgggtcttcccatacaggaagtagaagatgttttgtttggggtcctcgtcgtcctcctccatgtcattggccaggtagagagccaggaagaaatgaatgcgttggtattgccaggaggggaggccggcccggctgaaatacgctatgaccatagccaggagatacttgtccgacaccctcagatctttgtcccaggccaggaatcttttaatgacaggatcctcaagcagcctaaggaaggcctcgtggtgctcagggagcacgagcgacactcgccgtcgctt

SEQ ID NO: 317579 - DNA, 719 bp, Homo Sapiens
ccctcgggttcgtggaacggtataactggaaccgacgcttacggagcaagggtatgcgagagcggttcttcctggggcctcgggttcgtggaacggtataactggaaccgacgcttacggagcaagggtatgcgagagcggttcttcctggccctcgggttcatggaatggcctatctggaaccaacgcttacggagcaagggtatgcgagagcggttcttcctatacaggaagtggaagatgttttgtttggagtcctcgtcgtcctcctccatgtcattggccaggtagagagccaggaagaaatgaatgcgttggtattgccaggaggggaagccggcccggctgaaatacgctatgaccatagccaggagatacttgtccgacaccctcagatctttgtcccaggccaagaatcttttaatgacaggatcctcaagcagcctgttgaaggcctcgtggtgctcagggagcacgagcgacactcgccgtcgcttcagcttcatcttgaggccacacagcatctccgccacccagatctcctcaggctcaggggcgagcaccttccgtggctcctcctccaacgactcctcagattcgtcccaccactccatcttccttttccagcaaaaggacctatgcggggggctgggatctaccccaggggcaagctgactgttgaagtccttgtggtgctcagggaggatgggtgacactcg

SEQ ID NO: 317580 - DNA, 832 bp, Homo Sapiens
  misc_feature (792)..(792): n is a, c, g, or t
  misc_feature (818)..(818): n is a, c, g, or t
ttttggggggggtctttcagtgaatatttttattaaactctactgtggacaagaagcctgtggaaaggtgtttcgagttatgcaggaagaagtgttcctgctttgactgacaggcaggcccaggagttgaggcttctagagcagagactcttgggagctcatgggtttgcacacttctctccggctcagcacagcccccgcagcagcccctgggaccccggatctttggtccagaatgaattcatccctgccagccggacgcccctgaaacaggtcatctgcctgcatcaagcctgacaatccatttgcttgcgaagtcaccgctgctcaaggtccacatccgggtctcttccgctatactttattaggaatataaaacctaatctatgtacaggacacgtcggtgtcagggtgaggggtggccacaaggcgggccatggctgggaccggccgctctcctcggtgtggtacctggagcggagggtcaggcacaggtaggaacggggctcacaggccgagcagagccccctctggcccctactcaattccttcctgcttgtcttttatggccacccgaaagcgctcctccagcagggacagctcactgatgaggtcggtgatggcgttggtaaaggcttcctgggggctgtagtccggcgtggtctgcactcggatgatgatcttgtgctccaaggggtgggggactttgtagccagcaaatagcacttgcgggtcttttaaggagttgtgatttaatgatgtttcccagtgtgtggtcttctttggttgatnggtgaataaacaggaatgggtacccnggtgtcctggttaa

SEQ ID NO: 317581 - DNA, 764 bp, Homo Sapiens
  misc_feature (139)..(303): n is a, c, g, or t
  misc_feature (568)..(568): n is a, c, g, or t
gaacgcccctccagccttcgagtcgttcttgctcttcgagggcgagaagatcaccattaacaaggacaccaaggtacccaatgcctgtttattcaccatcaacaaagaagaccacacactgggaaacatcattaaatcnnnnnnnnnnnnnnnnnnnnnnnnnnnnnnnnnnnnnnnnnnnnnnnnnnnnnnnnnnnnnnnnnnnnnnnnnnnnnnnnnnnnnnnnnnnnnnnnnnnnnnnnnnnnnnnnnnnnnnnnnnnnnnnnnnnnnnnnnnnnnnnnnnnnnnnnnnnnnnnnnnnnngggacccttctggttgaaggaatgcagccattctgcttgtttgactatgtcctttctattcatctctatttcctgggaggtgtttatccaagtgcaatagggaggttttggtgaccgcacagtcccctcagtgttctgctagtaaatagttgaaggttgatcattgatcttctgcgttttcagtctggcatggaaaagcccctgtgcaactggtaaagatatcaataagcaccaggaggtatctaaatccaccaggagccatagnatcacgttgacgtccatttaccagtcttccctggcaagattcttctgaattgtgctgccttggccaaaagaggtatgggaaggggctgggcgccagtggcttgtgcctgtaatccccaacattttggggaaaccaattcaggtggatcggtagaggtccagggggttccaagaccacctgggccggcatggtgaaa

SEQ ID NO: 317582 - DNA, 920 bp, Homo Sapiens
  misc_feature (43)..(43): n is a, c, g, or t
  misc_feature (51)..(53): n is a, c, g, or t
  misc_feature (126)..(139): n is a, c, g, or t
  misc_feature (175)..(271): n is a, c, g, or t
  misc_feature (293)..(314): n is a, c, g, or t
  misc_feature (708)..(709): n is a, c, g, or t
  misc_feature (713)..(715): n is a, c, g, or t
  misc_feature (731)..(731): n is a, c, g, or t
  misc_feature (736)..(736): n is a, c, g, or t
  misc_feature (738)..(738): n is a, c, g, or t
  misc_feature (743)..(743): n is a, c, g, or t
  misc_feature (750)..(750): n is a, c, g, or t
  misc_feature (753)..(753): n is a, c, g, or t
  misc_feature (757)..(757): n is a, c, g, or t
  misc_feature (765)..(765): n is a, c, g, or t
  misc_feature (779)..(779): n is a, c, g, or t
  misc_feature (788)..(788): n is a, c, g, or t
  misc_feature (796)..(796): n is a, c, g, or t
  misc_feature (804)..(805): n is a, c, g, or t
  misc_feature (809)..(809): n is a, c, g, or t
  misc_feature (813)..(813): n is a, c, g, or t
  misc_feature (818)..(818): n is a, c, g, or t
  misc_feature (827)..(827): n is a, c, g, or t
  misc_feature (843)..(843): n is a, c, g, or t
  misc_feature (853)..(853): n is a, c, g, or t
  misc_feature (860)..(860): n is a, c, g, or t
  misc_feature (866)..(866): n is a, c, g, or t
  misc_feature (873)..(873): n is a, c, g, or t
  misc_feature (880)..(880): n is a, c, g, or t
  misc_feature (885)..(885): n is a, c, g, or t
  misc_feature (887)..(887): n is a, c, g, or t
  misc_feature (901)..(901): n is a, c, g, or t
  misc_feature (907)..(907): n is a, c, g, or t
  misc_feature (911)..(911): n is a, c, g, or t
cgacagggttttcttgtcttgttgttggtctgtttttccgttntttttttnnnttttgcagttgagaaagctttattaactaacacaaaggaagtctgggcaatgttgcgagaccccgtctctggnnnnnnnnnnnnnntcaaatttgccaggtgtggtgttgtgagcctatggnnnnnnnnnnnnnnnnnnnnnnnnnnnnnnnnnnnnnnnnnnnnnnnnnnnnnnnnnnnnnnnnnnnnnnnnnnnnnnnnnnnnnnnnnnnnnnnnntgacagagcgagagcttgtctnnnnnnnnnnnnnnnnnnnnnngcggatgaggcttccaaagctgggagggagtcctccaataccttggcccccttccccactgcttgcaggaccctgatcactgcaggaaactggagctgcatagtgcaagctcccagtgaaatgcaaacaggacaagaggacaaggcatagcttgggcatattccctgggcactcatgtccagacatgaccgctgagtgtcattgttaacacttggcagaaatgtttgtgggtggggaggtggctaacaaaggtgtcagttttggggggaagggaggaataaggcctcactgggtaatctctgaacctgtaaccattaccagtccatatagtgcttttgtgccgatagaaaaatcactccttcttggggaaaggcaggttggccaatgagaagtnnaagnnncatttgatctttttgncaggnantctcntgcagtntanaacntgtacaantgtacctggtgacnttgaatgtnattaggantgggagannagtnaggnaaganaaatatgtnaatttagaataaatanggggaaatanataaatngatggnaaaatanaaaatgnattantnaatataaaaagggntggggnaagntgaagaagt

SEQ ID NO: 317583 - DNA, 352 bp, Homo Sapiens
gacaccacaagcccagccttcttggatgggcaccctttcagcactgagaagtacccaagtgagggctcttttgcagaacaatgagagttcctgctttgattattgaatgatgagccattgttccctgtggttctaaaaggatacagggagcctgtcctcggggttaccccagaggggcggggcctgtccgaaagagcgagccttttgttgccggtgatcccttcctaacatttgtgtgtggccatttcttagaggatttgagctgccttttcaggtgcttgtgacatttgtctacgaaatgtgttttacagatatgttccttgaggagaccagacaccatgcagaggtcgta

SEQ ID NO: 317584 - DNA, 1279 bp, Homo Sapiens
ttttaataaagcagaaatgtatttattaggcacccttgttcctcacagaggagcaagatccaggcctgagcgcctgggaagtctcttgaggttgcaggaatctccagagaaacataggcgctgcccagccaccaccccgagaacactatttggctggagtgtgaccgccgaggtgatcctggcaggaggctggggttggctcctcgactccacaaacactgaggagtgggtggggacacccttgacacccacccaaacactggcagagagggaggcccttccagatctggggcacatgttgctgggcctgccaggggggaggaggagcctggagagtcccttgcccggggccaggtcctcagggccctccccaaatccgcccgcctctcctcgccaccgctgactcagtcccacacgtaggggtttctaaagacctgagagttcttgccgtctttcggcggtgtggccgcctggtggctctgggccgagtacatgtcttcagcccgcagggtcgagttggcactgcccatcacctggctgttggcggtggcccgtgggaggatgatgtcgtaagctcttcggacggaactttgtgcatcagggccatctcagtgggctggtacacactggtcagcagctgcccattgtacccgctgtatggtgacaccggcctcttagctgggtccccagcaggctccgtttcttggtgtcctgcacaaaggggaggctggccaccaggatgatggtgagcacaaacgtggtgacaatgcccgccccagccacggcctccaggacgatgccccacgccccagagcggtcacacaggttgtagtacagggggttgaggccttggctgcagccgggtgggacattgccctgggcccaggcccctgggaacaggaagagaggcagtcccaggcacatcaccaaggctttgtggattgccattctggctcccaggccaggctctggttgggtccctccaggctgagccgactcgtactttccggctggtgagggagatgggagtttctggccctgccggcgtgtgggttgttgctgttgactgccacgcccccgcatgcgggcgcgcgcacactcacgcgcactcactttctgggctcggccttcgccggggcaattggtgtgagggtgcagccctgcgcaccccccaccgcgtcttccagagagcgcgcctacggacacgcgcggggctaccttggcgcgtctccgtgggggacacctagcctttgtcaccttcgtcctggccctcccgtga

SEQ ID NO: 317585 - DNA, 420 bp, Homo Sapiens
aggtccttgcagtagaacctcttgtcatacagaacgtccatggtgtcgcccacatagtacctgagcccatctagctcggtctccagccgctttcgctcatccgcgagcccccgggtgttggcaaccctctgtggtgagtggggcaccctggcagcgcaggaggaatatctctccttgccgaatgacctcatcccggtgtttcccttgctgcaggactcggagacccatgtctccctccagctggtgaaatacctcttcaccctcttcgatgtgatagtccttcctggtgttggggcctccgacgaacatgactttgagctgctcttggtgcatgagcttgttgcagaccggggtctggaaggagcaccggtttctctttcacccaggccctcactcccaggcggcgctccatgactgtcc

SEQ ID NO: 317586 - DNA, 488 bp, Homo Sapiens
caggaagagtttcttgtttgttaactcaagctttattgataaaatggaattcataatatcttactaggaacagcagggggcccatgcgattcatgatagcaaaaatgtggcagtttcctactatatgtaggaagctgctgcttatcaattagtaattaaatgtaaggacttgaaaagaggtgcaaagaaacaaggcatttagccccaagattgagattctatatgaatacactgtattattacctgcaatactcatggaaacagtgaaggaacatcctgaaagacagttaaatgaagggactggctttatcaacaatgccaactcccctaccaagaacatttaagatagttttcaataactccttggatgttcagctttgtaagattttgaggttattttccataatcatctgcacatttgagcgtgtagctgacatggctgctgctctccctgttccaaccccaagtccaaacacaacatgacttga

SEQ ID NO: 317587 - DNA, 380 bp, Homo Sapiens
ataagctaattactctacagaaagtactgtaaacaacttgttattcttactctaatatgcgcatgcttttcaaaattttaaagttcttatatgatgaatgctatctcaagtaaggtatttattcataaggcgcttaaaatgtatgactaataacaagtgcaagcaagacagtgcttcataaaatattattaagcgcactattattgttacgcagtttttttaaaagggtgtaaatatctagaaaataatattcaatacctgctttttaagttgaattgttaaggtttctttttgttaaaatatattcacacaaaatgcatggtatcatagaagtacgccacagatctaaattccttagttacagcacaattttactagag

SEQ ID NO: 317588 - DNA, 1169 bp, Homo Sapiens
acaattcagtggtttttagtatattcacacacaaaattgcacaactatcactaacatctaattttagatcattttgtaacttcaccaagaaaccccaggtctgtcagcagtcagttccattcccccttcatcccagcctctggcaaccactaatctgctttctgtcactattgatttggccagacactattcttctgtgcttctcatgcatcttctgtaataccagtgctacaattctcattttatgtggaaaattgaggcactgagaggttaagtaaattgcccacggtcacacagtaatttgatttacaacagtaataacacattagatgagaacacagtaggacacaattttgaattccatttttatgtacctgaaatgaatacacccctcccccaaggtattttccctattgttagcctttgtaccctaggtacaaatataggtattttccctattgtgttatgtacctgaaatgaatacacccttcccccaaggtattttccctattgttagcctttgtaccctagaactgactggatgtagataacatttgttttcagagtaatggaacactgtatcagcagcatctgagaacataagaacagttggacattggaaagaggtttgttgccctcatccctccttgaacctcttttctctcccgcttccaccaccaccacacatatatacccctttttctcagtcttaagcatcaaacaatttctgcctctttctttttaattctcccagagggatgggttaatgcatcacaatttaacttgtctattcaggtattaatagtcaagggatgcatctgtttgcttatagtaccagttatattcctaggaccttagagagcagtagtgtgagaatagaatgcctttctatttgggttaaactatgtgggaggaaaaagtaacagagtaaaagctttgccttaatgaagtcaagtgttctgcctggtgggaagtggccacacgctgcactgcgctgctcttgtttactctgttctttcagagcctttgtactttgccatcactgctagtaatttcttggtccttttcaatactccattttaatcttgatttttttctataaataataaatctgtgaaaaatctgtaaaaagatttgtgactattaaatgtgcaactaaaaacactgga

SEQ ID NO: 317589 - DNA, 398 bp, Homo Sapiens
  misc_feature (26)..(26): n is a, c, g, or t
  misc_feature (316)..(333): n is a, c, g, or t
acactagttttccatctaatggatanattcattatacataaagaaaaaacccttcaatgcattaaatgacttatttttaataaagcccttctgataaaattagacccttcttcctagataccattcttcagacaaaagccagaaaggctgtctcatactcagactacaaagctgcaaagagcgtgtaatgtgtagattagcttgcctctaatttaccccgcaattattaggtctgaataataaggaaatgtgtttcaatgcgtgcataattatatactctctaagtagaaccaaatgaaaccattttctgtgtttnnnnnnnnnnnnnnnnnncacgccgggcatggtggcctcacatctgtaatcacagctctttgagaggacaagacaggcgtatc

SEQ ID NO: 317590 - DNA, 980 bp, Homo Sapiens
  misc_feature (223)..(223): n is a, c, g, or t
  misc_feature (389)..(389): n is a, c, g, or t
  misc_feature (533)..(533): n is a, c, g, or t
  misc_feature (558)..(558): n is a, c, g, or t
attcaaagaaaatatgttaccaaaatatattaaatatataggtagttcattcgtgggaagatgaatcttcttattaagcctgccctcaattgtaaataagtgactcaaaaactcaaaatgttcatcagcattcaggtcatttgtttcacccttagccaagaagaactcattagaaattcagttataatttcaatttaagcctgtttatgataagcataatgantggcatgttatatagcctgttgaaaataactacagaatgaccttccagagcactgtttttggcctcgtgcccgctctgttcaggctctgcttgtttttcagaatatgatttttacctccagacagtaagaattgaacaagaactgatcaaacacaccttcctattntgtttttttcactatgtaaatattatttgggcaaacattacaaaaagggatccaaacaatttgagtttcagtatttttttctccctaggcatgtgcttcaatttcaaatatttttttctgtgtggaaaatgccatgtaactatngcactaccttctgtgtggactgtgntggtattggttctttctggtatatcaaaagtcagggtgtttataactgcaaagttgtataagtggctttattcctcttctagaagatttatgaggagcctatgaagcactattggtacaggaggaagcaaagagatggaaaacatgtttacagactctagctttccttattagcttaaactggtggccctcaaagagcagcctgttgatcttttggcgcaaatgacttgagcataagtcttttatatttttttaagggtaaatcgtaaactgtatacctttactactgaaaacaaaactatagggcatcatactaattgattgagattcttcctgtgtttttgaggcacattcctttacaaccagtgtttaaaccaccacgtaatcatcttctgcaaacaaggggtgccagtgttgcctaac

SEQ ID NO: 317591 - DNA, 372 bp, Homo Sapiens
  misc_feature (213)..(221): n is a, c, g, or t
cacgaggaaaagacttttttaaatatttcatttatgagccgcgcattcaagagtatagacactgtggtgtgtttgaagccctacagatgtttccagtctttttagatggatgcctactgtggagagtaactttgggatattccagtgtgagctttctttagctggaattggcaaagcatttggtggtcctggtggtctcatggtggcacgcgnnnnnnnnncaatggttagaaatagaataatccatgttggttgatatcttaagttttacccctattagatggtaagaacaattaatgcagttttgcacaaatatttttacattctgagcattcaggtctgtcattggaatctttgttgtgagaaacacac

SEQ ID NO: 317592 - DNA, 426 bp, Homo Sapiens
  misc_feature (318)..(318): n is a, c, g, or t
ctgtgcttctcagtgctcccccttcttaaagggtgtgtggacacacacacagaaggggacagtgaaaaaggccagccttgggcacaagcctgtaagagccaggccccaggaacagccctaggagaaacctcggcggttgccctcaaatgggcctgccccagcccccactgggcccattctgagtgccaaagcctgggcttgggaggctgtcacttacctcaccctataaaagcaatggacagttcagggaggtgggaggacaaggtgtgggactgccaccttctgggcccacccatcacccaggggagcagagaaagncagccaggggcccagggtgaggctcacagcagcgcaaaggtagcagaagtggctgggcctaagactgccaagaggaatacactctctccagatactatggctctcgtg

SEQ ID NO: 317593 - DNA, 2445 bp, Homo Sapiens
  misc_feature (266)..(266): n is a, c, g, or t
  misc_feature (543)..(543): n is a, c, g, or t
  misc_feature (599)..(599): n is a, c, g, or t
  misc_feature (612)..(638): n is a, c, g, or t
  misc_feature (1019)..(1019): n is a, c, g, or t
  misc_feature (1397)..(1433): n is a, c, g, or t
ctaaccctcaatggtgcggggcaacataaatattttttaattttccccccgacaaagggggcgcgagacacacaagagggggttggactgtgagatattccccccgctcttggggcccgggattatctcaaggggggtgattcatttcacatatggcgccgggttttttggtgtgaaatggggggcttttcccccaattgttgccgggcccaagagaaattggcctttcaaaatggagaatttacccacacccaggtttctctgcncgaaatggagatgggccaaggggccggggggggcgtaaaattttggattatacggaggcttccgcctttggaccttccctggtttggataaggattcccaggtaaatggaacctccaggaaactcccattctgggaatttggttccaggaaccgcctcggtgtggccccccggggcggtttttttatttggtggaggaattccaaagccactaggtcatggaccacggatctccctagggaaaccagcctatggacccatgttcaccttaccctacntgggccccgcgcgcccaaacgaaatggtttagaaagcttcctcgaggggccgaggncggcccgacatgnnnnnnnnnnnnnnnnnnnnnnnnnnntttgacaggtgcaaaacagaggctttaatctgaacagcaatgagggtgcaaggggctgggagcccatagggggatgggggagccaggaaggggtgtctggccctgggagagaggtggacgctgggcctcttctgagaaactgtcactgacctttgggactcctgacccagcctctgcccagaccatcaccggatcccaggctgagcccctgtgctgtgcttctcagtgctcccccttcctgaagggtgtgtggacccagacacaggagggggcagtggagaaagggcaggcctgggggacgagcctgtaagagccaggcccaggaacagccctaggagaaacctcggcggtggccctcaatgggcttgcccagccccccanttgggcccattctgagtgccaaagcctggggtttgggaggctttcacttaccttaccctataaaagcaatgggccccaagcccttccctgagtttctgcccatcccctccctgcccagggaaagttctggaaagacatgcctcaccccatcatctgggccctcccaggagcccagcacctacccaaagggcagcttccattggctaggttacccttagggagcgggagagatgtggctacagtcaggaaacccagcaaagccaagggctagagaactgaagagccagggggaggcttagacaacaagggcctcaagcccagggggcagggtgaaaaggagcctgggaggggcaccagccaggacagctaaggcctctnnnnnnnnnnnnnnnnnnnnnnnnnnnnnnnnnnnnngctggcggccagcctcagcttccagccctagcatagatggccaccccggcatggcctgggaaactgacccgcccctgcaaggagcagctccaacccttagaaaggcatcgactccaggaagggaaaagcaatggaagcagcaggtatctctcctcccttccctgaggtgctgcagaacagcccctgctctcaaaaccagactggacgggagtgaagggagaagaggccagaaacaggagagagtggccgagtgaccaggccccagaccctctcttctggccagtttagcacacgggaactcagaaaactggctacactttggtcacttctcccaacttgggccctgaagccttatgctctgagccccctcaagcccatctcgccaccccaccccagtaaacagcctctcatcaaacgggacgaacagagggaggggatggggaggggccactgctggggtggggaaggcaggcacaggaactgtggcctgggtggctcttcggcttggcccctcctagcccgacgtgacaggatggatgggcagcaggctcccgaacttgaagtgctggatcacagggaacttctccaggcactcggccttatacatgcggatgagaccctggttcactttggaccaggaagggacggcgctgatgttccacagctggttggagtgctctgcaaatgggccagtcttcatctcggtaataaacaggatacactccaggaacatgtagtccttgtggttctcattcacggccttctcatccacaaagtgtctgggctccaggtatgggtggtctatcagctgcgaactgccccagatgaagggcagaaactggaagtcatccagaccccacactccatggctgccggctggctccatcctgtatgttttctggagtttccgcataacctcaaggtaccgattgaacaccttgaagacaatagctatttggtcatccacccggagcaccccaatcttgcagagacagcagaggaaagcagcgaa

SEQ ID NO: 317594 - DNA, 724 bp, Homo Sapiens
tttccttatattatgttcattaatgtattacatgccttaataatttcactcagttaaaaaatgatggtatgatgctttaaagctgattcaatcatgattttataagcttatcaagagtgaaaatagaagactattaaaaatagctaaaaaggtcatgtgtcatagtgtttaatgtttctgtaattgttggtaaggcttgtatctaagtctgatgcagaattcttaatggcactcaaacagttcttttctcagccacatggtatccactgatgctatgagtctggaagagactggctatgggtaccacttcttgtcttcagctgtgactgtgcaatatcagcaagtgcgctttgtatcttctccagaagcatgtctcctcgataaacaacatcctccagacatgtagcagcttcatggttttcttcttctagcttatacaagctagcagcctgtaaagcagctgtagattcttcactgggtaaggaatctatcaaaacatcaatgtcttttgctgttcgtgcaatcagtgctgcaaaaagctgggcatactcttctgtagggttagctggctggtctttgttaattgctgtctgaatattattgaaagaggcaggaggaccacattgctgcaatactccaatggcattacaaaactgatgtgcaagcgaattcacagcgtcctgaagctgcgtgagccgatcccccatgttcctgccgcagcccc

SEQ ID NO: 317595 - DNA, 560 bp, Homo Sapiens
caaaactaagggacagtgctgaaatggtttaaagaatctggatttcagatcagagactgacttcagagtctgatttctgtcacttactctgtgggcctggagcaaattacttctccaaggacctatgaaatggatataatggtagctattgtacctggtgtgcatagcgggcattcaataaatgctagccatttcccttaatgaatcactgtccacacatctgggagtcctggtgaaaactcaccaacatgcacgacactaaaggaaactgcagttgatctccgctctttagcagcttttcagcaattacacaagacacaatatatgggtttttgcatgttttgcatatgcttgtgaaaattatgtagtaaataggtgccaagtaaggtatgtagatagcaagtgctagtgcaatttataggtgccataatccctatggactgagtcagaaatggcctaatataaggcagaagagaggccagtttcaagcaggggcatataacagaacaatctgcaagggagatgggagcatataccgctgggttaagacagtgagtgag

SEQ ID NO: 317596 - DNA, 854 bp, Homo Sapiens
agcaaaaatgatttggtaattaaagtttatttgaacacaaaatactttctctgtctataaaattggctgttagcagtagcagcagcatgtcctggccaaggggagtagatttctccagactactaaagccatgtatatagccattcccacttcccatattctgtggatatgtacatgtgcatggtagctagagtccctccaccagagtatctctctcatgatggtttcttcagggagaggaagaggagacctgggtgaagagctgggatggttttgagtggggcaagccattaggctgtaccttgaagcccagtctctctggatagctgtactgcaggtgtcctctgaggcccttctctgtactctgtctgctgagggaatggggtattttgactcccatagaaagcactagcctaagtcaccaaatgactgcttggtccccactgaagcagtgtagctctccatagtatttttggtggttatggattacatgtgtggccagctcatgctttttcttgagcaggggctgtccatgacctgtgctcataccatgctttctaagttctctttggacagggcctcagctgctgcctcagcctgagtttcagagagtgtgtaggagtcctggtaatcttgaagcagtttgaccacctccagatggttgaactgcacagcatcatccaggggaatgttgccccacctgtccttggcaaaaggattcactttgcaagcctcgatcaggaatttaacaacttcgatgtgtccttcagctgcagcacacatgcagatctgtgcgcgagtcatagtctttgtgttccatatccatggctgacaaggcacaccttcaaagagct

SEQ ID NO: 317597 - DNA, 596 bp, Homo Sapiens
gtcaagaagcacgtgactatattgacacatgaggaagcataatatttttaaatgtgaatttgaatctatgaaaggaaaatcaggtgaagtaatttctgaacttttactatgtgagtccaagaatattaagctattacttcctaaaatattactgtaaagtaaaaataacaattattgacaatattgagaagttttatatgtatatacacatatatacgtgcatatgtatctacattctatgtatgtgttatacatatataactgtattttaaactgtaattttcaaaatagttttgatagctttttgatttggtgcttatttggctatgatttaattggcaagaattttatttttggttatttcaaatatgggttatgtgtacatatactttgttcctgcatactagatgccttagtccattttgtgctggtttcacctgggggctgtgaagcctgagatcaaggagcggacagattcagatttctggcgagggctgtattccatatggtgacactgtatactctggagaagagagatgctgtgtgctctcatgacagaaagcacaagggcacgaggaatgaacttttctttttaa

SEQ ID NO: 317598 - DNA, 2086 bp, Homo Sapiens
  misc_feature (57)..(57): n is a, c, g, or t
  misc_feature (428)..(428): n is a, c, g, or t
atacaagtttgtatttgcgcccgtgtttttcggccataggggcgcaagttataaatncgggggggtaaacaggggccgtagaggcggggctagcgagtgtgagggtgtcatcagaaaacggtttggggagggattgccatagttgaggaggaaaggtattaaaggaaggggccaccaggggttcgaagggggtttacgggggggaggcaggtgaatttgaaatcgagggtcggtttgggaatacggggggaaaaatgccaggtaaaggcctttagaaggtcccattgggcagtttgttcagaaccggtggggttgggcgccggggggtttttgttaattggggaggaatgccaaggccggtagtgcatgggccaaagattttccttagggaaaaccagggtgatggggcatggtggcgcttggcgtanctgggcccgggcacgcccaacgagatgggtttagagaaagttgttcgagggccggaggggggccgggcaagtggcgtgtggttagggtggtgtttgtggggactggtaaatgtattttattttgtaagtgacaatcaaaatatatttgtgctactgattttttcaaatattaaatgggatcttaacaaaatttgtccactttgatgtattcatgtataactttagaatctgcaaagaccctgactaaagaaacagaagtaattgcacaactgagactgaaggtgttacagtgctgcaaatgatgccagatgtcttacatttagccaagtacaccttcagaggtcccttgattttgagcattaggaacaacagaggaatatacactgaaggcatcattaatagcgtttttcgttgctttatttaaatacgacagtatccaacatagctgctaaacactggacaatatttgaggtcataagtacatccacatgttcctccaaatgacgtttggggtcctgcttgccaacattctttattgccagctgttcaggtgtcatcttatcttcttcttctacagccttattgtaattcttggctaattccaacatctcttttaccactgattcattgtgtttacaatgttcactgtagtcctgaagtgtcaaaccttccatccaactcttcttatgcaaatttagcaacatcttctgtgccagttcatttttccgatagttaatagtaatggagtaataatgtctgtttagtccatgaattaatgcctggatagatggcttgtttaagtgacccagattcgaagttgtttgtcttggttcatgtcctaagaccatcatattagcattgatcaatctgaaggcatcaataacaacctttccttttacactctgaatgggatccacaaccactgccacagctctctccgacaaggcttcaaagctctgctgagtgttgatatccacaccagaaagccaacaaccaaagccagggtgactgtgataccaaccaacaaccatctccggccttcctgtctgcttcaacatatccaacattttagcttggaacactggatcaactgcctccacactgacacctgttcctgactgtggcatagcaaacacatcaatcactctgacggtataatcatcaacaaattctccaagcatcaaacccataacttccattggaactccagcacggccatgttttaacatttttaacagtgccagggaagagatatagacttgttctgctgtgtccactgcaggagcatctgtaggtggcccctggcccagtccaggcatacctcctccaagtctaagaagtctgtccatatttctggtcagtaactacaactcttaaggtgttaaccttcaatttgttgagtttgacaaatgtcttcttaaagaaagctcttgctaattctggcaggtacaacttccccaagtatattttattttttctttctctcctgaagacgggcgggagccggatgccgcgatatggacccttgtcttgcctctgtggtgacgcgaagacagaggcaacagcagcagcggcgcacacccgacgcggctcagtctgcaaaccggcgatgaatcagcccgattccattcaaaagagttgcccgggcctccgccccc

SEQ ID NO: 317599 - DNA, 405 bp, Homo Sapiens
  misc_feature (21)..(21): n is a, c, g, or t
ggagcccaaatatcatggccnactgcaactcctagccctgggttgaacaagagcaaagaactcccatctggcccaaagtccccggcatacctcctcccaagtcttaagaagtctgtcccatatttcctggtcaagtaactacaactcttaaaggtgttaaccttcaatttgttgaagtttgacaaatgtccttccttaaagaaagctcttgcctaattctggcaggtacaacttccccaagtatattttattttttctttctctcctgaagacgggcgggagccggatgccgcgatatggacccttgtcttgcctctgtggtgacgcgaagacagaggcaacagcagcagcggcgcacacccgacgcggctctgtctgcaaaccggcgatgaatcagcccgattc

SEQ ID NO: 317600 - DNA, 861 bp, Homo Sapiens
  misc_feature (674)..(674): n is a, c, g, or t
ggagccctaaaaatttaatgcccgtttaaaacctttttcctcctacgggtaaatgtgtgcccatatgaaacttcccaattaagtcctaaagtaattttccccttcctttcagccgccctttttatagccgaaacacagctgaaatgtacgacaacattctgaacaagcctctcccagctgaaaccaaatattacaaattccgcaagacacctccctggagggcctcctgcagaaggacaggacaaagcggctcggggccaaggatgacttcgtgagtgatgttttcctgtcctcctgggccggccgggacgtgcactagacctccctgcccttattgaatgcacctgtctaaattaatcttgggtttcttatcaacagatggagattaagagtcatgtcttcttctccttaattaactgggatgatctcattaataagaagattacttccccttttaacccaaatgtggtgagtatctgtctctcttctaagtatagagaagcccaaagggcatttattttaattcagaattgtctgggggagggttggaaggaatacattggcagatgttttctccataaacctgttattttacctacataaaaagcacatttttgtgtcccaacaaggctcccataatttttagacacatttatcaattcgaagcaccattntgtgcttgaagtgggtgattatggaagttgatataagacttaaactctggtatttaaagcctggtcaagatttccctgtgctgtgtctagagtgagttcttgacaagagtgtgtttccctttccgtgacagagtgtgcccaacgacctacgggactctgaccccgagtttaccgaagagcctgtccc

SEQ ID NO: 317601 - DNA, 1269 bp, Homo Sapiens
  misc_feature (1090)..(1101): n is a, c, g, or t
  misc_feature (1128)..(1128): n is a, c, g, or t
tgtaccggtccggaatttccgggatatcgtcgaccacgcgtcggacttcatggagattaagagtcatgtcttcttctccttaattaactgggatgatctcattaataagaagattactcccccttttaacccaaatgtgagtgggcccaacgacctacggcactttgaccccgagtttaccgaagagcctgtccccaactccattggcaagtcccctgacagcgtcctcgtcacagccagcgtcaaggaagctgccgaggctttcctaggcttttcctatgcgcctcccacggactctttcctctgaaccctgttagggcttggttttaaaggattttatgtgtgtttccgaatgttttagttagccttttggtggagccgccagctgacaggacatcttacaagagaatttgcacatctctggaagcttagcaatcttattgcacactgttcgctggaagctttttgaagagcacattctcctcagtgagctcatgaggttttcatttttattcttccttccaacgtggtgctatctctgaaacgagcgttagagtgccgccttagacggaggcaggagtttcgttagaaagcggacgctgttctaaaaaaggtctcctgcagatctgtctgggctgtgatgacgaatattatgaaatgtgccttttctgaagagattgtgttagctccaaagcttttcctatcgcagtgtttcagttctttattttcccttgtggatatgctgtgtgaaccgtcgtgtgagtgtggtatgcctgatcacagatggattttgttataagcatcaatgtgacacttgcaggacactacaacgtgggacattgtttgtttcttccatatttggaagataaatttatgtgtagacttttttgtaagatacggttaataactaaaatttattgaaatggtcttgcaatgactcgtattcagatgcttaaagaaagcattgctgctacaaatatttctatttttagaaagggtttttatggaccaatgccccagttgtcagtcagagccgttggtgtttttcattgtttaaaatgtcacctgttaaatgggcattatttatggnnnnnnnnnnnngcattcctgataattggatgtattggnataaagaacggtctgtacaattgggttaataacactagttatatttaaaacttaccagggcttattttggtaatgttaaaaccaaccattttttaatggtacctggtaaattaacattggggttaataattacgttaccca

SEQ ID NO: 317602 - DNA, 677 bp, Homo Sapiens
  misc_feature (228)..(238): n is a, c, g, or t
ttttaaatatttttcaaggttttattgcaaaccaaaatcagtttatcacacacaaaaaaagttgtgtgatgggatgagggaaggattgtacgtattataaccatgttaattacagtacattaaaatggtggtttacattacaaataagcctgtaagtttaaatatactagtgttataacccaatgtacagacgttctttatacaatacatacaattatcaggaatgcnnnnnnnnnnncataaataatgcccattttacaggtgacattttaaacaatgaaaaacaccaacggctctgactgacaactggggcattggtccataaaaaccctttctaaaaatagaaatatttgtagcagcaatgctttctttaagcatctgaatacgagtcattgcaagaccatttcaataaattttagttattaaccgtatcttacaaaaaagtctacacataaatttatcttccaaatatggaagaaacaaacaatgtcccacgttgtagtgtcctgcaagtgtcacattgatgcttataacaaaatccatctgtgatcaggcataccacactcacacgacggttcacacagcatatccacaagggaaaataaagaactgaaacactgcgataggaaaagctttggagctaacacaatctcttcagaaaaggcacatttcataat

SEQ ID NO: 317603 - DNA, 400 bp, Homo Sapiens
  misc_feature (15)..(15): n is a, c, g, or t
  misc_feature (25)..(25): n is a, c, g, or t
  misc_feature (66)..(66): n is a, c, g, or t
  misc_feature (156)..(156): n is a, c, g, or t
  misc_feature (158)..(160): n is a, c, g, or t
  misc_feature (337)..(337): n is a, c, g, or t
  misc_feature (346)..(346): n is a, c, g, or t
ctgaaccaccggttnataggagacnttaaaaccccagagaataattttgcctagattccacagggnacacattgtcccttactgacttcggactctgcaaggagaacattgaacacaacagcacaacatccaccttctgtggcacgccggagtatncnnngcctgaggtgcttcataagcagccttatgacaggactgtggactggtggtgcctgggagctgtcttgtatgagatgctgtatggcctgccgcctttttatatccgaaacacagctgaaatgtacgacaacattctgaacaagcctctccagctgaaaccaaatattacaaattccgncaagacacnctccctggaaggggcctcctgcagaaggacaggacaaagcggctcggggccaag

SEQ ID NO: 317604 - DNA, 635 bp, Homo Sapiens
  misc_feature (88)..(88): n is a, c, g, or t
  misc_feature (579)..(579): n is a, c, g, or t
tctcattaataagaagattactcccccttttaacccaaatgtggtgagtatctgtctctcttctaagtatagagaagcccaaaggatnttattttaattcagaattgtctgggggagggttggaaggaatacattggcagatgttttctccataaacctgttattttacctacataaaaagcacatttttgtgtcccaacaaggctcccataatttttagacacatttatcaattcgaagcaccaaaaggcaacaagtgaacattattcttatgtttaactgtgtgtagccttttgagattttgtgcttgaagtgggtgattatggaagttgatataagacttaaaccttggtatttaaagcctggtcaagatttccctgtcctgtgtctagtgtgagttcttgacaagagtgtttttcccttcccgtcacagagtgggcccaacgacctacggcactttgaccccgagtttaccgaagagcctgtccccaactccattggcaagtcccctgacagcgtcctcgtcacagccagcgtcaaggaagctgccgaggcttttcctagggttttcctgatggngcctcccacggactcttttcctttgaacctgttaggggttgggtttaaaggattta

SEQ ID NO: 317605 - DNA, 803 bp, Homo Sapiens
  misc_feature (84)..(84): n is a, c, g, or t
  misc_feature (103)..(135): n is a, c, g, or t
attgggccctcgggcccagaaattcggcacgaggagcgttgccctttaaaaggggtcccctggggagctcagcctcatcctgangatgctgccaaggcgcacnnnnnnnnnnnnnnnnnnnnnnnnnnnnnnnnnagcatccttttggggcttcactctcagagccagtttttaagggacaccagagccgcagcctgctctgattctatggcttggttgttactataagagtaattgcctaacttgatttttcatctctttaaccaaacttgtggccaaaagatatttgaccgtttccaaaattcagattctgcctctgcggataaatatttgccacgaatgagtaactcctgtcaccactctgaaggtccagacagaaggttttgacacattcttagcactgaacttctctgtgatctaggatgatctgtgtccccctctgatgaacattctctgatgatctaggcttccagcaggctactttgaagggaacaatcagatgcaaaagctcttgggtgtttatttaaaatactagtgtcactttctgagtacccgccgcttcacaggctgagtccaggcctgtgtgctttgtagagccagatgcttgctcacagacacatttccatttgcatcattactgtgcttacctgcatagacactcttttgatgctgtggaaccaaaatggtgatgatatatagactctatgtatagccacaggtcatacccaaccctagacttcgaaatgttaatatttgataaatctagagaatgcattcatacacttacagaattcacatattgc

SEQ ID NO: 317606 - DNA, 1637 bp, Homo Sapiens
ccccacccctcaaaacacagaaataggtttttgaatatcaactagccattatggaagccgtaagatacagatattcatcaacattacacaagctacagttaaggtacctggacaaacactaccaacatttatgaaaaaagatgttggttttaaaagtgtatgaggagttacaataaacacactattcatgtcctcctgaaaccaaaatgggggaaaaccttattgtcattctgccaaacaccacataactaaaaatgctggcacagtcatgaatccaaatgtacatatcacaggattaaaactccagttaagcaactgagctaatcattgaagtaaattaaaaataccaagcttctttaacctatcaatgctgttttagaagcatcatccgaacaaatagagatttagttataaattggcctgggctacattctgtgatgagaattttgcttagtactaaaaaagaatctcaaacatcccagaaaagctgtggaatcatgctctttattattcctgaaagaaaatttgccacgtttgatgatacctctattcttccccgtggtgctaggagttctaaataccaagtaattcagaaaatgataggagtatttaagcaaaaagaatagcaaaagcagactttgtatcaacatatcctagatagatggatttttttaaaaattacatgataaatgtaaatcataaaattgaatgtacttataaaggtacacctattttgtgctacataaaaaaactgtagactgcaaactgtgcatgcttaccataacattttacccggggtcgatgagtgggatttcttgcaaatatttactgctatgatataaaacaattatgtgcaaactgcaaggtccctaaaatagcagttaaagagtttatatacagaaagatgtcactatctgatcaaatatgcaagagatggaatttcccagagtttataacacagagcaataaccaccacaggctcctcctccttggccttcttccctgtgtgacagtttgactcctttattctggttctcactttcccacagtccaggggtctgaatgatcttttcaacaagttcttcaaaggcacattgtacaccatcacaggtttttgcacttgcctctataaataacatggaatgctttcgtgcaaatttcaggccttcatttctatcgacttcacgattttccttatcgattttatttccaactagcatgtttactatgtcatttcttgtacagtatgtttccaattcatttaaccaattatccagtttaacaaatgtatctcttcttgtgacatcataaactaatataacaccctgtgcacctctataatagctgggagttaatgttctaaacctctcttgaccagcagtatcccatattgcaagtttagccttatttccatccactgaaattgttttcaccttaaagtcaacacctattgttgctgcaagttctggatcaaacgtatcatctgtgaacctcaagagcaggctggacttgcccaccccactctcgccgatgatgaggatcttcagggtggttagcacgtcctcgtccatcctgaccccgttccgctccgagcccagctggccgcccgggtgcgcctctcggcccttcagcagagt

SEQ ID NO: 317607 - DNA, 415 bp, Homo Sapiens
aggttgttcaggatctttttctggggctttttgttggctgcatttccagtaactttgtctgtttttcaataaaagattccatcgcagacatggatagagtctcagactccacattgccttcctggagccaataaagaatcttgtcttgtgcttcagtcacacttagtgctggagaaattttactggatgagaacctcagcctggacttgctagccttcttgccttctgtctggggcttgctttcggtctcggcctcactcagctcctctgtggggctctggggttcagagcgaggaaacgctgtcttcaaggtgtccacaatggcactcaccaccatcttgtctattctagagaccataaatggtttcttgacaaaggcaatacgagcatctgtgttcagagcaaggactcctgc

SEQ ID NO: 317608 - DNA, 1089 bp, Homo Sapiens
aagtagcgaggcctgggtggcgaattcggcacgagggcgcggcgacgaccgccgggagcgtgtgcagcggcggcggcggaagtggccggcgagcccggtccccgccggcaccatgcttcccttgtcactgctgaagacggctcagaatcaccccatgttggtggagctgaaaaatggggagacgtacaatggacacctggtgagctgcgacaactggatgaacattaacctgcgagaagtcatctgcacgtccagggacggggacaagttctggcggatgcccgagtgctacatccgcggcagcaccatcaagtacctgcgcatccccgacgagatcatcgacatggtcaaggaggaggtggtggccaagggccgcggccgcggaggcctgcagcagcagaagcagcagaaaggccgcggcatgggcggcgctggccgaggtgtgtttggtggccggggccgaggtgggatcccgggcacaggcagaggccagccagagaagaagcctggcagacaggcgggcaaacagtgagcgcccacccagaccggctgctgcgccccctcctgccagggtggcgattccgctccacagtctcggacggatctgctcagaaaggaagaggcaggcgccagggggaacccccttcgtgttttgtgaccctcccttttaggtgaagcccctttttcttgctaaaaccggcaattctccggttagaaatgttacttggtgttttttggttttgtgaaacggccgtcccaaagctggctggattcctagaagagtctgtgttgaaggcatctttcaagccctcgctctggttctcagggcagcattttccaggcgggtttgttttgcatttcttggagcctctccgagcagcaaccagacgggagatttttattttaagctgttcatgctgggactgacagcctgcagggtttcccttgggcgcggccccaaaattgccttcaaaacaaacccgggacggttgaaagccttcgaaccgtgcaggggatgccttggccctggcccttcgcttcctctcttgtgttatggaaataaaaacaaataaaactacacactgcaaa

SEQ ID NO: 317609 - DNA, 966 bp, Homo Sapiens
  misc_feature (43)..(43): n is a, c, g, or t
  misc_feature (60)..(60): n is a, c, g, or t
cagcaggacaccttctttccaaaagctgtccaccagccccaantagggggctctactcantggcaaaaaagactacatgagccccacaactgtcaactaacacagtgccacctcctcccaaagcaaacacatatacatacaatgttaagaacctattatcagaacagcagtgcagcagaccctggccttggtctctgaaagtcctgtgtcactggctgtaaggacgcttggccacaggttcctcctccttctcccgcttcagccattgctctaggagtcctgcagtgcctctcttggtggggagtggactcttctgcaggaactgactggaccactggggaacatctgactcttccttttgaggtgtttttgagtcttcctttttgggtgactttgtggccaaccactgcaacatcctctggctactgccacttgccttgagctcctttttgaccaccaagtcgacaggagccagacactcaggagtgttgtttcgcgagttgttcaccacagaagagactgcatggaaggtgatgttctctgttgggtggattaatttcagagcttcctgagttgagacttcaccaaagtcaagccatttagaaactgcctcctctccatctaatatggcaggcatcctgtggtggatgtcactcaagcctttgcaggaatccactgtgatgatggtataggaatacaggacatctcctccctctgggggctcccagcagtcaaagatcccggccattgtcagcagcctccagttgtcccagactttctcccagttctcaggactatctgcagcaccaatgctacctgacttctctgtcttgatttgaggaaaatagatgaagtatggctgcctctggtttgttccctgacatcgctgccactcatagaatccatctgctaaaacgacacagcgtcttccctttcccagaggcaccttaaatgaccgtttctccc

SEQ ID NO: 317610 - DNA, 576 bp, Homo Sapiens
  misc_feature (118)..(126): n is a, c, g, or t
actcgtgctaattctaggttcacagaggtatgagaagcctgagctgaggaccattttcaagagggacggtatttatgaatcaaggttaggctccatatttaaagagtagagccacggnnnnnnnnnaaatagaacccaaattgtgtaaaaatgtgtaattgggttttttaaacattggtttatcaagtcactgttaagtagaagaaagccatggtaaactgagtacataacctaaattataaaagcagaaacctaacttacttgtcaagggaagttaccttttgaggaaagttaaagtacttttttccctatctgtatctatagcaacaacccagaacttacaaacttcttcaaagattttattgattgttatatcaaatcagaatgtaaacatgaactcttgcatatatttaaaattgtgttggaacatttgaacatgaatgctgtttgtggtacttaagaaattaattcagttggattatcattatgtgatactggcagaatgcagtgcaaccttatgccaataaaatgtaatttaacaggcccagatattggtgaatattcaacaataacaag

SEQ ID NO: 317611 - DNA, 1058 bp, Homo Sapiens
  misc_feature (678)..(689): n is a, c, g, or t
  misc_feature (708)..(736): n is a, c, g, or t
  misc_feature (739)..(756): n is a, c, g, or t
ggtacgggccggaattacgggatatcgtcgacccacgcgtcgcacctccaaggctccgccagcaaggatggggctccaaggagatctctgaacttggaagactacaaaaaacgacgagggcttattgagcacacccagcctgctgcttctgaccctgcatgccccatcgcagcgtcccacctttcctcctttccttgatttagcctcttgggctggagcagctgtgaactgggaagagactctaaactgccagtcatctgtaatataaaccatttgctgtatagacctccttgtctgcacaccatctcccaccagcctcccctcccccaggccccacccagtgtgggcctgggctctcttgggctttatccatgtctttagattgtgttgcctttgtttttttaaccgcgcagttcattggccactctgcacgcattcagtattaccatggagctgggaatcttgctggagcccctggggcaatagcagcagcaccaggcggtctcctctacagactgccttggcccacccattgaacattcggcacgtgaccttgtggggggagcggggattgggcacctgcgatcctctttcctctcttcatctttctcttctgcccttctttttggaagaaggggtttcaaaaccagtttagtttccacaaagtgtacatttgtnnnnnnnnnnnntctaatttgagagcgagannnnnnnnnnnnnnnnnnnnnnnnnnnnngannnnnnnnnnnnnnnnnnaaaatgcagtactctttgtatcagtctgtcatgggtctatagctgtttcagatttttttcagctgtacttgagcatctgaaactgcaagaaagaaactcattaaatgtgattcttcttactaaacaggcctgactgctgtagctgtgtaacttccccattcccacctactcttcccatcctttcccaactttggagagggaagcccatggccaggtaccagggagggcagtgaatgtcttgctcttcccatgggtacaggccacagcttcttggctgaacgtagaactcttttttctccccc

SEQ ID NO: 317612 - DNA, 674 bp, Homo Sapiens
  misc_feature (280)..(280): n is a, c, g, or t
  misc_feature (583)..(583): n is a, c, g, or t
tacacagctacagcagtcaggcctgtttagtaagaagaatcacatttaatgagtttctttcttgcagtttagagtctcttccccagttcaacagctgctcccagcccaaagaaggctaaatccaaaggaaaggaggaaaggtgggacgctgcgatggggcatgcagggtcagaagcagcaggctgggtgtgctcaaataagccctcgtcgttttttgtagtcttccaagttcagagatctccttggagccccatccttggctgcggagccttggaggtgnatgctaaagcctttgactctgagctgggaacttgtaagtcaatcttcacatcaaaatcgtgtactttgaacagatcttctgagaggtcactggctgacttagaattcaaatctttatctttgccttgacccttgctcatttcctttggagcatctggtaacactccagaaccgtattttgcattcagctgggccaagatggcagcttgaacagctgggtctctggaattagaaacgatggtaggcttgcactgccgccgagtaaagggatccatctgttggtttttcatgttgtgactttcancacaagggccttctcagactctacaatgttccactcccggttccgctggttgatgtaactgatagcggatatgttcttggtcgctggcggt

SEQ ID NO: 317613 - DNA, 366 bp, Homo Sapiens
  misc_feature (167)..(178): n is a, c, g, or t
  misc_feature (197)..(225): n is a, c, g, or t
  misc_feature (228)..(245): n is a, c, g, or t
cagactgccttggcccacccattgaacattcggcacgtgaccttgtggggggagcggggattgggcacctgcgatcctctttcctctcttcatctttctcttctgcccttctttttggaagaaggggtttcaaaaccagtttagtttccaaaaagtgtacatttgtnnnnnnnnnnnntctaatttgagagcgagannnnnnnnnnnnnnnnnnnnnnnnnnnnngannnnnnnnnnnnnnnnnnaaaatgcagtactctttgtatcagtctgtcatgggtctatagctgtttcagatttttttcagctgtacttgagcatctgaaactgcaagaaagaaactcattaaatgtgattcttcttact

SEQ ID NO: 317614 - DNA, 531 bp, Homo Sapiens
  misc_feature (475)..(475): n is a, c, g, or t
  misc_feature (515)..(515): n is a, c, g, or t
gtggtctgtttttatatgagactcaagaacaggcctcattccagggcgcagtgcctaaattactgatcatgtgcactcgtgcagtgtattactgtgaccacacggatgtggccaagattctcatctttgttcaagtggcttttgctcatctgattgagaattaatcagatcatgttggctacataaggaaacagaaggatgggatttcaggagaggctggctcctccccaaggttagtccccagactgagaaagtgaaaccttattgggaaaaattggactgcccttaatttagcaccaattgcattaacgcacatctcttccacaactaacagacttaaaataacagtgtccttcgtattaatatctgtgccattcatttagaattagcagagtaatatggaggggctgaactagtagccacatcttgttcatcacatagactaatagaaaggaggctgtgggctaaaagcagnaaatggaacttccggattctgaaattaggcaatataatgntccttttggaattggg

SEQ ID NO: 317615 - DNA, 631 bp, Homo Sapiens
cttttgtgttttttgtgactgtggcaattaccatttttttccccatttaagaaaccaacatcaagtgtgtgtcccacaggtccttgtaatgaaatccagtggcttgccgaggcctgttttggattctgtggaacaggctgggaagacaggctttttcacactgacactctttcgagcagcagatccacttaggggctcattcagatacaggctctgagggttcacacccgacctactgagtcagagtttttactaagatgcctgtgattcatatgtacaggcaagagtccttgtgtccaactttttctttggaattaattttaaagttagggaagatggcgagaacagtacacgagacttgcaaataccctttccttcacttttcccggtctccctctctcttgcttacccactctcaccccctcattgtttttttccacaaatatttagatagatgcagacgtttgtgcccccttattcatgccaaaggagcgtatttcctatacacaaggacaatctcttaaccacaatacagttatcacattgaggagatgtcacattataacaataatgagccagcatcgctgcgttttatatagatgtgccatatctgaacactctctccttgggg

SEQ ID NO: 317616 - DNA, 484 bp, Homo Sapiens
  misc_feature (330)..(342): n is a, c, g, or t
cacctgtcctatgtgcattgtgtttaaaaacacacatgttgtatgtgttgtatgtaggaataaaagcagaaggcccctatgggcatgttaggatttataatctcctaaaggtaaatattctgcaaggttacacaagcagtaacttcatgaattactaagtattactgagagtatttatgtgtccaaattcgaagccttaatcaaaccagaaaaaaacatattctgttgggtttgaacagggaggtttcttattcattgtatacttagaaccttgggacttaaaggtcagagagtcaagggaactggcaaggagttaggtgctagatatannnnnnnnnnnnngagctgtatatatttccccactctggaaaacacaaacactactacttatatggcattagtatgataggtgagagagaatgttgttggccatgggtaccaccttatattgacatgtgagaagagaatcaatatgaagtggggg

SEQ ID NO: 317617 - DNA, 627 bp, Homo Sapiens
gttttattttgtgttttcagaatgcatatttaatgtgatagtataagtgactatcattatgaagaaaagacatacttttattagatatctctcaacacataaatttcatacttaactgaacagttgtagtagggatcattttaagaggtcaaaattctagggagaactaagggtttaatggtggtatctacattgagggtacctcaaataacctgcttccagcccatcagactgttcttaagcaccaaagaagtcttgctccatagagctggattagaatttcagcaaggaattttagattattttaagaaaacttagaaaatcaagggattaagttagttgattgcatgattgtatcaaagcttgcagacagtgcattcgctccagatgcattctgtgtggtggctttccaggttcagatccattcctgagggccatgtgcacttgcgattcacattcagggaggagagactctgagtcctcctttgtgatgcgcgcgcaacttatgaactcattacaagctgggccatatgtgcattgcctatttctctgggaagtgggcacggagactgtagtctggcaacatgcaccctttcgaaagggctatcagtgaagagggttcacctt

SEQ ID NO: 317618 - DNA, 341 bp, Homo Sapiens
  misc_feature (1)..(1): n is a, c, g, or t
ntgagccaccgcacccggctcttacgttctttatggcagaaacctccatgaagaactttgaggaatcgttagctgctcccctacaacactgttatcagagtgagagccaattttgccatgtgtataggcatttattaaataaatactcatttagaaatagggttctgcaacctatttttcaaactgagtaatgtgcccactctttgtgcatttaagtgtctggcaactgtcacggatgtgacattccagaacagggtttggtactcttagaaacggcatatggcaaccgaaacttcctaagccatggcttggcacaaatggcccggcagaattccttggga

SEQ ID NO: 317619 - DNA, 543 bp, Homo Sapiens
gtgttggaggctgtggaccttctctgtgcactgaattatggcctcgaaactgataatatgaagaacttggttctggaactgagagcatcttgccacaatttacagaattacataagtagccgacggaaaagtcccgcttacgatggcaacaccttccgcaagggccccaatgagtttctgacctcggtggtggtgctcatcggcgccgtcaagggcctgctggcgtggctggaccgggcttcgtttacacgggatcactgatttctcagtcacgaagaacaaaattatgcagctttgtttggacactgagcactacagtgcagaaggattggtttgtggcgggaatggaggataaagttttaactgtggtcaaggaggtaaatggcgtatgtgagagaacaattcgatctaccacagatactgtgactagacagtgtgcatgtctggaagaagctcacttaccaaacattgaacctggggaaggcctgagcatgtgcattacatctacctatgaaggggtacacgtgatttctgtgaccacag

SEQ ID NO: 317620 - DNA, 662 bp, Homo Sapiens
  misc_feature (60)..(60): n is a, c, g, or t
  misc_feature (185)..(185): n is a, c, g, or t
tgctgatggcagaaaattgctcctcttgcccagagatctgagggcatcagtactctttcntacagccttgtcggtcaccagcttgctcacttcactctccacgtctgtgagggtgtcccgggggcgcgtgctccgttaggagccagtctcttcgcagattggagaaggttagcaggtgctcaggnccatagctctgcagatactgtgttttcagagatcgttaatctttggggatcaacccattctcagtgatgcacaaagggcacttgaggcgcaggttttctataggcgacacctgccggtctatgtgttcctcaatgtagttggtgctctcgcgtatgttgaccccctctagcagtgcatgctcattcttgattagctcctggaaatcctgcttggttttcttcttcatgatggattcacgggccccaatatggagactcagcaggcggtgctcctgtttcaggcccttgagtctcttgggacacgaaattcttcatctgcttaatgtccatgcctctccggcgatcatactgggcctgcaagttccgggcctatgtggctcaagaagccaaagacattggaggagtgctcgttccgaatctcattacaccctgtgtcctcgcgcattgagtagcaccttcagtctcttgtcagagtat

SEQ ID NO: 317621 - DNA, 778 bp, Homo Sapiens
  misc_feature (18)..(18): n is a, c, g, or t
  misc_feature (37)..(37): n is a, c, g, or t
  misc_feature (52)..(52): n is a, c, g, or t
ccatctaacagtgaaaancgctgaactttgattttgnagaaagatggtgtcnatggcttctctggggagatgaagatgagggaatcctgaagacttagggggccgggaggaaaaggaatcttggcaatgatgaagacaccttcaaatgaaggggctaatagggtagtggctgagaatttgtgctgcagtcgggagggcttgggttagagctacatccacagtatgaccttggacaggtgactttatctctctgatcctcagtctcctcatctatagtacacgcccagcatgggtcggcagggggcgctccgcgttgtggaacgattcatatctatacttgcttccccaacaagggcagcactggcctttaaagcttctgcccaggtgtgacacaggttgtttctgctcacatctcgttacctcaataatatgaccggtgtgcagtcaagatttaggccccaggtactagaaattgactcaaagcaacagaggaggcctgtcttcaagtcaccgaatccttgaccctggtatctgccgttggtatcagcaagtgtcagatcccagctcccaggaagagggctgtcctctcagatgggaggcaggggtccagtggggtggctgtggctgcagggacagcctagcagagcctcttggtggcccagaccccctgtccctggaccttggaagccgctaaaggaagcagcaagaccaggccagctggtggctgcctggactggagtttggtcagtggttggggacctatattgtgagatagtta

SEQ ID NO: 317622 - DNA, 1135 bp, Homo Sapiens
  misc_feature (62)..(76): n is a, c, g, or t
  misc_feature (554)..(587): n is a, c, g, or t
gaagaaaaaggggctttcctggtcgggggaaaaaaagtggggggtccacaggaaggaaaaannnnnnnnnnnnnnncccgagaagagttgttcgccccgttgagagaaataagagaggccaaagttttcccccaaaggaagggccccttattcctgtaaaggtggctttttaagaaataaagggtgccaggaaggccagaattggccaatggtctagttaggtggctggcctaatggtccattatttcacgaggaataaaaaaaattcccaggctaggttccacatttttctcgtcccgttttggaggcatcccactccccccttggtgggccttggaccgcaggcaaatgcagcacctccactgccctttgttggtccttgaacttgagtgagtagccctgggagatccagcaggctctagaaacacacgtctaccaatgggctggagtcctgagttaaagagaagctccagtactggagttggacacagcaatcaatgttctattgtcaaggctttttcccttagatttgtctaaaataggtgtcagagagnnnnnnnnnnnnnnnnnnnnnnnnnnnnnnnnnngccaagaagccccaacaaccaccgcggagagtcagaggcttaacagctcttgacgcgggcctgggtgatatccgatgttttcttgatgacgctggcccgggtctcccggtctggccgactgctgctggatgctggggtcatggaggaagaaagggggaggtcttgaaaagggggccaggagctgttgtaaggcaccggattgctctcctctttgatggtgacctggaggtccggtttgttggaagtgacgaaggacgccatgccgggcagcaggtaggagcctcgagtccccatgttgctgaggtactgtttgccttcaatattcctcttccgccagtgtggccgtccctcggcactctcttcatcgctgggcacactatcagtcgtttcgctttctgcataggaagacacgggggagatctgcagagggtagagctcgctcatgctgaccggctgctcgtcgctctcagtggtcacctctacaacttggcaaatgtctggcggattggtgacaatctcttgattctaaatgttgctgtccagatggg

SEQ ID NO: 317623 - DNA, 862 bp, Homo Sapiens
  misc_feature (34)..(34): n is a, c, g, or t
  misc_feature (41)..(41): n is a, c, g, or t
  misc_feature (63)..(63): n is a, c, g, or t
  misc_feature (74)..(74): n is a, c, g, or t
  misc_feature (80)..(80): n is a, c, g, or t
  misc_feature (111)..(111): n is a, c, g, or t
  misc_feature (120)..(120): n is a, c, g, or t
aaattccatttccccctcccttcccccctccggnatgtggnaaatggaaaacctttgaagggnaagggaaaaanttaggnaaaaagagcgggaatgggaatgggaatgggnataggaaanagaggctggggaaatgggccagagaagggggtgctgaagtgtgttgtgagatagagcaagatcacaagaaggcctatctgtaagtgctttaagataaggtgcagaagcagactgcaatgtcgctagtgctgcctatgtacatattcacaagtataaaatattccagctagttcacattatctcgtccgttgtgaggcatccgctccaccttgctggccttgaccgcaggcaatgcagcacctcccactgcccttgttggtccttgaacttgagtgagtagccctgggagatccagcaggctctagaaacacacgtctaccaatgggctgaagtcttgagttaaagagatcccttagatttgtctaaaataggtgtcagagagaaaaaaattaaataccaaccaaccaccaaaccaaagccaagaagccccaccacccaccgcggagagtcagaggcttaacagctcttgacgcgggcttgggtgatatccgatgttttcttgatgacgctggcccggtgtctcccgtgtctggccgactgctgctggatgctggggtcatgagaggaagaaagggggagtgtcttgaaaagggggccaggagctgttgtaaggcaccggattgctctcctctttgatggtgacctggaggtccggtttgttggaagtgacgaaggacgccatgccgggcagcaggtaggagcctcgagtccccatgttgctgaggtactgtttgccttcaaa

SEQ ID NO: 317624 - DNA, 2099 bp, Homo Sapiens
ttcatgtttataaacactttatttaggtgattacagtgggtaagttcccagctaagtgcacagatagaagcgaggtatttctgggttaatgcaggagccagtgggttacatgggtctgggcactgtggccaaggggcgagtaccaaggtttctgagtcagacccggccagagaccctgcgctgaaggtggactaatgtcctaacactgccagctgctttctcctcacagctggccacaccgcaaggcatctcttcaacagtaaatcatttcagcgatgttaagggaacagacgttaaagaaatggaagctgtgtcctggtgcgcctcagctgttgctgctttataagtcataatagcatgtgaacaagagttttagaatattccagtaacaatgagccacagagcgataaagtctgtgtctttctccctcagtgcctccttgcctgttttctttcatacctgaattcccatctttaagctgtggatcctgatgttgagtctcatgcatacaagaaaagtttttccgatgacaaagtttctgcttccagcattcccatcaacagcattgtctgcagttgatgatatcaaagcaaaggtctctggttggctactctctgtgaaaagagccattcacccctgaccaatgcctaattgcaggcataatttagaaaactgatttaggaagcagaatgtgaatacaaataggaaacaaactccaaagttatagtttatcttcatatttgggccagataatgatcaagttcacaggtggtcttacttgaggctacagaattgttgcttgcataattatcagaaacatgctggagtccacagctgataatctgccaactgctgggtagaactcttttatgagacggtcagagtctacctcaaaccttctctaacccccatgcaaaatactgaatcagaaggggagccacactgtctacagcctttcaaaaggaagaaaggcctatgaagatgtagaaggttcacacacaaggtaatgattttaattctgaaggggcaccttgagttccatttggcacgtttctgaatttaactgtcaggaatacacttaaggccattttatcggtatttaactttttggcaaaatagaagctttggtcatagccatagttctttaaaaatttttttaaagaggttatctctgattaaaacaatatttttagcaagtgatacataacaataacaacaatgtaaacatcttcaaatctaatgcaagagcaaaagctcttcaccagcatcttaaatacagcgagagtcagtagtgcttacaaaaagtagagggttctcttctagggaatcagaaaattatcaaaataaggcacagcctgttgttatcacagatttgtgttaggcagtagtgtttttttctggaaggcataagttggaaatctgattacccaaaggtttaaaatgtggttctgaaaataatgccaaatgacaagggtaactaactgggagtaatggcaattaattagtgacaacattacatctagattatagcactctggaacttaagaaggcctcttcatcagcccatacgtaaatctgtaaaggcactgtgcaaaatgtggacggggccggccttctaatttggagtgcatattaaaaaacaaaggcacgtttcctagaaattcaactttacattaacacaaaaaaaattttagagataacagtaggtaagcttgataatatagcaggttctaagtcaaaagtcttgaagaggtttcttgaacagcagttttgagttccgctggttcttcatgaagagacaacccacacgatgatgatgatgatgaagataaccagaacagtaatcccgattgcccacatcttgcaattcttccaccaatatttcctcttcaacttggctgcgctcgtttcaaattgagaagcgcctgcctgcagtgcgtctgcacggtcgtctaactcagagagcttctggtctctttccagaaccttgtccacgttaactcgcattatgtccaccacctcatctacttgattttgtgtctgctgaagtcttcgattactgccagtggcagcagttggacctgtagacattttggcag

SEQ ID NO: 317625 - DNA, 785 bp, Homo Sapiens
catggggccacccaggaatgtctcgctttgaatacctgcttctgccagttaatccaagtttcctagttctgggggcagaacgtgagccggttcccctgaatgtggagctctttaagctgggtaagctccccgatttccttaggcagcgagctcaggtcgttatccctaaggctgagtatctgcaactttgtgagcttcccaatatctggcggcaggatttcaaaatcgttgtcacttagatagagtgcacgcagggtggtcaggtagaagaagtttccaggaagagaattttcgctcaagttgttgtacgtcaagtccagaacctcaagagctggcagggagccgaagcctcgtggcaaagtgttcagcctgttcatgccaaggttcaggtgtttgagtttctgaaggctactgatctgtgtgggcagctcctcgatttggttattaaaaaagttgagcacctccaaattcttcagttctgcgatgttcggtggcaccattgttagcttgttatggctgaggaccagttgtgtgatatgggataaggtaaagaggccgttgacatccagcatgttggagatgccccggtcactcatgtccacctcgggctggttcttctcccggctctcctccaccaacttcttcagagacttggacatggtcacggaaggtagcccctaagacgatgggcgtgcaaccacaagcttcggcagaacgcactccagctgccctcactccctgcaacacccgcactgaacagcgaacacgccctgtctcggcgcccc

SEQ ID NO: 317626 - DNA, 942 bp, Homo Sapiens
cacacgcagcattgggtttatttgagagacagggcaagagagaatgaagtgttggagagagaaggtgctggaaggccagccgatgccaatcccttccttatctgttcttggctgccaggggtttccggctgatctttttcgatttgtcattattcttcttcggtggttctgggttggcctgcatgtgtctgccgtagaggtatttgtatgtctcagaacggatatactcaaaaacatgggacacgccaagctggaactggtctgcaatgggggtcaccaggggattgttctctgctttgaatacctgctttctggccagttaaatccaagtttcctagttctggggggcagaacggtgaggcggttcccctgaatgtggagctctttaagctgggtaagctccccgatttccttaggcagcgagatcaggtcgttatccctaaggctgagtatctgcaactttgtgagcttcccaatatctggcggcaggatttcaaaatcgttgtcacttagatagagtgcacgcagggtggtcaggtagaagaagttcccaggaagagaattttcgctcaagttgttgtacgtcaagtccagaacctcaagagctggcagggagccgaagcctcgtggcaaagtgttcagcctgttcatgccaaggttcaggtgtttgagtttctgaaggctactgatctgtgtgggcagctcctcgatttggttattaaaaaagttgagcacctccaaattcttcagttctgcgatgttcggtggcaccattgttagcttgttatggctgaggaccagttgtgtgatatgggataaggtaacacggaaggtagcccctaagaggatgggcgtgcaaccacaagcttcggcagaacgcactccagctgccctcactccctgcaacaccggcactgaacagcgaacacgccctgtctcccc

SEQ ID NO: 317627 - DNA, 762 bp, Homo Sapiens
cctgaagaaagctttttctttagctaaaatcaattgtaaacgatttttgtagattattttttgtatgttttagtgtaagtagaagataaactttttattcataaaccaggaagcaatgttctttatagtgattctcttgtgtacatgcttgtgaattaaatttgtgtaaaatcccttggcaattgggtcttttaatataggaccaaattaaaacattttgctgaatatgtatagtttttcacaatttcattaggtaaataatggtttggtgatcatacatgagaaatgtacacattaaaaggccttgctgacaacttgcacaatgttgaacatagcctttaagcatcatttaaattttaaaggaatggagtttttcagcctgtggcccagcactggtcaagaaaacaagatggcaacatatatgctttcagggtcaaatttgagcaaactgtaaactgtcagggtgataaaatgtttctcttgatgtttacatgcacaagctttgcgttctgactataaaaagtgtgaacaaatcaatgccagattcctgttttgcgcattgtcatgggattcttaagtgaacctttctaaatgtggtcttgttcacatgctccacgtagctgtaacttcacatcatcagcttgcagtttgtaattgactaaagcattccagtgtcctctttctagattgccagctcatgacatggtgcttataaagatttaattaaagtaagaatgaaataaagtttttataattgtaaaa

SEQ ID NO: 317628 - DNA, 1154 bp, Homo Sapiens
tccggtccggcgtcgtgtgatatcgtcgacccacgcgtgcgctgtgtaattcggctgatagctggatgatagtacccaacatcaagcagaaccactacacggtgcacggtctgcagagcggcaccaagtacatcttcatggtcaaggccatcaaccaggcgggcagccgcagcagtgagcctgggaagttgaagacaaacagccaaccatttaaactggatcccaaatctgctcatcgaaaactgaaggtgtcccatgataacttgacagtagaacgtgatgagtcatcatccaagaagagtcacacacctgaacgcttcaccagccagggagctatggagtagctggaaatgtgtttattgatagtggccggcattattgggaagtggtcataagtggaagcacatggtatgccattggtcttgcttacaaatcagccccgaagcatgaatggattgggaagaactctgcttcctgggcgctctgccgctgcaacaataactgggtggtgagacacaatagcaaggaaatccccattgagcctgccccccacctccggcgcgtgggcatcctgctggactatgataacggctctatcgccttttatgatgctttgaactccatccacctctacaccttcgacgtcgcatttgcgcagcctgtttgccccaccttcaccgtgtggaacaagtgtctgacgattatcactgggctccctatcccagaccatttggactgcacagagcagctgccgtgagcgtctggccacatggagctgctttctggggaacagtaaggttcaggccactatttaggggactgagaaagcacaggcttcatgagtgtaatgaaatctcaccagaagtgtcccgaaatcggctcagatagggctcaaaacaagagattcctctccttttactgtgtcttgtattaagtacgggctttaataatttctttaatttttttgtatttagaggaaaatctatagattatttataagagaaacataatcaggattacaacttttaggaattacttgggtttgcacattaagaggcccataagtttatcagctatttacaaccttcatttcatcacaatctgtgggcttacacaatgatgagcccatggtagggcttctcacctcgatgggg

SEQ ID NO: 317629 - DNA, 633 bp, Homo Sapiens
gtactacaggccggcgtggcagatgacctgaggaaactgcgctttatgaccagtgctgtgatggaggtgtttggcgtgtctggctgtcgcgtgacccgctgtggctacacaggagaggatggtgtggagatctcggtgccggtagcgggggcagttcacctggcaacagctattctgagaggcaggcctctgtctgtatgggaatgacattgatgaacacactacacctgtggagggcagcctcagttggacactggggaagcgccgccgagctgttattgactttcctggagcccaggtcattgtttcccagcttaagggcagggtgcagcggaggcgtgtggggtttatgtgtgagggggcccccatgcgggcacacagagccattctggacatggaggggacccagaatggtactgtgactatgtgggtgtcccttcccctctctgaagaagaatgtggcgatgggttatttgcccttcgaggaccggcgtccaggacaatgctgctggtataggtgcggcgggagcaacacatagctgtagtcaaccaagatgccctttgtgcccacacactactatactcctaaatgaagcttgctataggtgggcttgtcctttcggagatgtgccc

SEQ ID NO: 317630 - DNA, 588 bp, Homo Sapiens
ggaaattctccttaatatttatcagcaaacaggatgctcgaccctaagtgaattttagtgcagcctcaggccaatcttggtcctgggagtgggcagggttcccagaagaacgagtctggtttctgaggctgtagaagggagccggaagcccctcaacttgatcacggtgagaacacagggagcctttggagaagctattcagccactgtagttaagagctcctgttctgatccagggagacctgggttcaagtcctgactcagccacttcctagttgtgtgagtttcagaaaaaaaatcacttcacctcttagaacgcaatttcagcttctgtaacaatctctaggttaggagggagtggggcgggtgagggcggggagggaggaggagaataaaaaacaaaaacaatctctaggttaatagggaggaagggaggattaaatgagatgatgcatgtcagatgccttaagacagtgcctgggagtaaggaagagcttgagacaggccctgggagcttattcctcctggatgtcactctgatgtgagggtttacccatcttgtcctctccagccccaagcctcattactc

SEQ ID NO: 317631 - DNA, 629 bp, Homo Sapiens
aacagcaaagtcttgtgtgtttctatatgacgcgattcctttaacagtcctgttacactgaaactgctgttcttggacttatcacaggtcttctccttaaacttaatgccaaaggtaatttagcaacatatctgccttgaattgagtgtagagctattacacagtctcatttgatcccacttagatatattgtgctgaagagtaccagtgtagtatctagtggtattaataatatatgtcccatattatctaaaatttgaaatagcgtgaatccaacgcacagcgtgggttaacatacatatatactagcgctgccctctgaaaccttagtataacaaaccccgagtaccaatagtgtccccagagggtctgcatgttggattcatatataccatcctctaccaaaagaacacagggctctctggagagaggagtcgattccagggcagggacagggataatacaagagcctggtggtgctagaaagaaaggaagtgctcaacacaaaaagcacagaatggagaatgtttatggggcacaagaatccaactgaaggatgtggccacaggtgtaagatctggagccacacaataaatggtgataatattgctcataatacaatactgact

SEQ ID NO: 317632 - DNA, 611 bp, Homo Sapiens
ccttgtggaatcccgcccctttgcagagtcccggcatgcactctgacagtgccaagcctcgtcttgttgactgatgttcacaggaaccttgagccaatctgctgcacagagctccgtgcgagagaggcaagagagactgctcttcaagtagttgcagggtcaggagcatgagggacagggatacatgctctaggtgagagcagagtgccatgggacccatgggaagtatggttgccacacttcgggcttcgttctgctttaaattggtccacatgccctctgaggtaaaagagggacactccacagcccgagacacagtcccgtttccttagaaagtcacacacgcgatctagatgcaccctgtatttccttgacacgttctttatacccctgggcctgtgggctcttccttacgattagaatccctggacacctctcttctggagaactgacactcttctttcaagacttagctcactccttcactctctgtaggcctatgcagaggactagcttggatgaagccggtacccagcctcgcggcacacatgcacagtgctgctgttttccttccacatctctctccttgcggtacaggacctgcttggttc

SEQ ID NO: 317633 - DNA, 1601 bp, Homo Sapiens
aggcggcgagaggcttccccacctaaggccttacatggcttaatctataccgaaacaaggcccaaattttttagttaagaaaaaccctctgtcgccctgagtgctcggcgcagcacaagcgctattcccattagccaacaacgtgatccaacgaacattgcccggttacacgcacgacacacaggaaatgtgctggacaactcggagtatgcaatgtgctttgtcacgagtccttgcgagagcctgtcatgtactaagagcacgtacttatctatgcagaacgtctcgcttctcatctgtaactgggccagtacacgttactcacgagggctgccgtagtacagatgagactgaaacaggggcattgatcaaagtacccaacacagagcctggcacatagaggtgttcaataagtaacttttgtcaggagactcttagggaggaccttcagaaggccaagtgagatgacttccctagaaattctctcagggcatggggaccctggaggactccttggagcctgcagcccctggtgtcccaaggccccagaatacaccgtgccagggctgttcacaggcgtggggggctggattgcccagggaggtgcccgcagaagctgggtagacactggaggaggtggggtttggaccaaagtggttctgcacatagcacaggccggaggcaggctggtacggaggcaaggtgggcatgtgcccgggggtgcaggagggccaggaggccagcttctgaccactggcgtgctgcgtctgggacacagggtggcttggggacaggtgagggtggcagctctgtgtggggtaggagccaggcaccgggttcagtttccggctctgggctgccctcctctcggctgaagaccctgagacgtacttgaacacggatatcctcctcatcaggctgaaggggaaggtctgatcgagcttcagcgccactcgctctgagaggtcgatggaatagcagtaggtgaggccataggccagcccgatggacagcccgcagacattactgaggaaagaggtctggggaatgagccacgaggcacccagcaggagccacggaaccaggactgagggcacaaccatgccaaacaccagggcccgcctcatccgagaacggacggtggtgactcccagcatggcaaaggccactggggtgaaacctctggcatcctccacttcccccagctttgacagtgatgacacagcctcgaatgacaggaagatgatagcggagaagatggcgaagatcacggtgaagaagcagtggcggacggtgcccacggttctctcgaaattgccagcaaagcgccagatgatgatagcgccgcagagcagggagatgggattctcgtagacaaagatgtaggttaccagcctgtaaacttgccagttgcgaagggcctcggacttcagcgtgaggcccgagggcgccaggggctgctgcagcaggaacaggcgaggcccggaaaccagcagcgagagcagcgcagtgaagaaggtggcggatggcacctcgggacacaagcaccagctgcgacacccgggccccgaggccgccatggccgccgtcgttcccgcgcc

SEQ ID NO: 317634 - DNA, 1103 bp, Homo Sapiens
agcacttcccatgagcatttttattaaattgaaacaagttgttgattcgataattccaagacttgtacaaaaattcacagcgcctgtgaggagcctttggctggaactggtgacacctgtgcctctccggacagaggaaggaagtcccacaccgccttccagcagcagcgagcctgtgtctggcattccctgttccgctgctcccaccctcactgtggggcagcagttctttaggaacattcagctgtcaaaggtgagaaccagccccacaggcctgggcctcgcaggcttaaggagcacttgttggcactgttagctcagcacctctcccagctccagcccatcggctggagaggaaaagggcagaaaacacaaatctcactctagaacacatacacacaccttctacacagatgataaaaatcccacaatcgtatctgttcatgtttctgggttttgcactgaacagagattggaagggagtaaggactctctcccttctgcttaacattcacatcaggaaaaagaagaaaacaaagttgccctttcatcttcatctgcttatttcagaggacacacggaggcagactgaccgagcagtggggcttcatcttcattcttgcacttctcaccctacaaccatttagcaacagaaaccgtggaaagcgctggctacggggctccaggcagccaccccccttattgggcaaaggagttaaaaagagcatcaccacgacctcgctactggtttttggcctgtctgagggagagagttcccgcggagccggcctgggcgtggcccgcagccctactgctgggcctgcctcttgcagtagttgctgtaggcctcctcgaacatggccttgcaggggaagcgggccttcagcttggagcagatgaggaaggagccccccatcttcctgtgcagggagtaggtttcctcgggtggggggacgagacggtgcctcagcatgacgggaatcaggttgtggatcttctcggtggtgctctgagtgccaaaatcaaaaggctcatcggaggcgaaggcctcccccaggatgaggatggcatccaagtgggcgtcttccatgaccttgacctcg

SEQ ID NO: 317635 - DNA, 622 bp, Homo Sapiens
cccatgtaaccggtacctataggtgatttaggtatttctgactataaagagatttatttccattctgagtgttctgctacgtgtcctaaagatgtgcgtccttatgtaaagatctgatgtgtggtaagtataagaccgagtaacttgagatctctccatcactgaagttgtgtgatcttgatggggataatactattaaagtccaagaaaaaaggtccttcttgtttaggcaaaaaggttctaggaatgatattgaagatcccagaaggtatattttctaattccaggtagcaaaacccacacctatagtcaccactagatttcctcagaaagccatggggaccagtatctcctagagtagaacctgttacaacctcaaatccaacgctatattgcctagcatttaaaatgacacagaattactgtattaatatatattctcaaacgtgatttaaaatacctttatctgaagtgcagatgtcatactaagtttatgtttctgaagtttcagtagaaacatacacactctatttttgatcataacacaccatttatatttttcagttgaagccttaaagattaacaccagattacacttactttaagagagactgtattttta

SEQ ID NO: 317636 - DNA, 2248 bp, Homo Sapiens
  misc_feature (2)..(2): n is a, c, g, or t
  misc_feature (4)..(4): n is a, c, g, or t
  misc_feature (17)..(17): n is a, c, g, or t
  misc_feature (114)..(114): n is a, c, g, or t
  misc_feature (118)..(118): n is a, c, g, or t
  misc_feature (192)..(192): n is a, c, g, or t
  misc_feature (220)..(220): n is a, c, g, or t
  misc_feature (240)..(240): n is a, c, g, or t
  misc_feature (251)..(251): n is a, c, g, or t
  misc_feature (253)..(253): n is a, c, g, or t
  misc_feature (257)..(257): n is a, c, g, or t
  misc_feature (277)..(277): n is a, c, g, or t
  misc_feature (279)..(312): n is a, c, g, or t
  misc_feature (333)..(333): n is a, c, g, or t
  misc_feature (399)..(400): n is a, c, g, or t
  misc_feature (404)..(404): n is a, c, g, or t
  misc_feature (409)..(409): n is a, c, g, or t
  misc_feature (414)..(414): n is a, c, g, or t
cngngccctacggagancagacttctgtcccagctgaagtctgcccagcactcctggtgggcagcccctgggcctgtcactgcagaactggccttgacaagcagacccactgtncgcnacgccacggtttccttacgcactcggcattatgtacagatatgaaaaaacccaacggcaggtggctggaaaatngcttctagctcccctatgctggcttagnacgttcatgcatgcaaagcnaggaggttttncnggcntcaccaaacaattaattttngnnnnnnnnnnnnnnnnnnnnnnnnnnnnnnnnnnttcataagcaggatttaaaanccactgaagtgaaaatgatgtatttcctcagcgttatggagttagactaccactacaatctttttnntttnttaanaaaanctctgccatcctctcccccgactcaggtcaaagttcatagcagcaatgcacaaagtcctctgtgaagccagtgttctctgctccccgggtcagaggtcacaggtcaagttcagtcagtccgaagaatcatgggcgggtgctcgctgtcctcatccaggcgcagggcgctggcctcgtcctccaggcaggcgccacccacagcacccaggtcgtctgtgtaggcaagtctcgttggggatgaaggcacgtaagtaccttttcctgcagctgcgccgtatgtctgagtgactaaggggcagtcgtgagaggcagagtccaagatctcatgggtcgtttccagactgccgtccagccggtgctgcttcatcagggcacactcgccgccctcctgggggtccaggttgtacatgtacaggtacccgtcggcggcacccaccaacaaccgcgggatcttctgaattgtggctagcgagcagatgtttttgtggccgcagaatggcaggcggaccgtggcgaaggctctgccctggttgaacatttctgtcacttgggaaggcaggtagctggtggaggccatgagcactttcccgaagtacccggtccaggtggtgggctcctctgggggtttttctttcacagtctcgagtttgaagatgtgcacggtctcagtgttgctggaggcggagaggaacatgccgtccatgctgaaggccagggagcagatgctcacgcacctctttactcctctccgaaactcaaagagtttttgtccttctggaatggaaaataccctaatcacggtccccttctccgaagccgtggcaagtttagttccacttgcgtcaaaggccagtgccgctaaaggactgtcgtgagccggaatcatgtttgcagctctcaaattaatggtatcgaagacctgcacctctccgatggtcgcgctccctgggtacgccaagtagcagttgtcgttgttgattgacagcgcacacaggcctcaaacttgaaagttgatcaaaccaatgagcttatgtggtcacatgaccagcatcagtaggaaggcagcttggtttgggatccaatacttttaaaatctgtctcaatctgcggaacctgcagggtttggaggcgtctccctgatcgtatgcagcaccttcatgtcccgaatgttgtggatgtacagggactcctccaggcatactatcagcctctgcctgttgagcttcacagccagaatcgtgttggagtagctgtagttgcagatctcagttcccttcttaaagtggcaaacctttagcttccttggtgctttaaggctcacgatggccactaggctgctggagaacgatctctctacgatgcacacatcttccgtatcggtgcattcatagatctgttccagcttatccacagaagaaagggagaaaaatttataaccggacttactaccaacagctagggacttcccacaagctgtggtatccactggaaaaatgtagtccttgatatttccatttcagattcaagtgatcctctcccacttattaactggttcacttcaatttcaaaaagccaaaaaagtcctctaacataagccttccaaggtgatactttcagaaaccagggttggaactaaccagacaacagcgcgacggccaagaccagctgctcttgatgcccctttcacttctgtgttgtcctggttgaagttggcgaagagcagctggccggcgccggcctccccgctctggctcgccaggttcatggctgggcgcgcggcgagtggccgccactcgccacctgggatcaaccgccgcctcatcccgtccccgct

SEQ ID NO: 317637 - DNA, 916 bp, Homo Sapiens
  misc_feature (815)..(815): n is a, c, g, or t
gtctcgagtttgaagatgtgcacggtctcagtgttgctggaggcggagaggaacatgccgtccatgctgaaggccagggagcaggatgctcacgcacctctttactcctctccgaaactcaaagagtttttgtccttctggaatggaaaataccctaatcacggtccccttctccgaagccgtggcaagtttagttccacttgcgtcaaaggccagtgccgctaaaggactgtcgtgagccggaatcatgtttgcagctctcaaattaatggtatcgaagacctgcacctctccgatggtcgcgctccctgggtacgccaagtagcagttgtcgttgttgattgacagcgcacacaggcctgcagggtttggaggcgtctccctgatcgtatgcagcaccttcatgtcccgaatgttgtggatgtacagggactcctccaggcatactatcagcctctgcctgttgagcttcacagccagaatcgtgttggagtagctgtagttgcagatctcagttcccttcttaaagtggcaaacctttagcttccttggtgctttaaggctcacgatggccactaggctgctggagaacaatctctctacaatgcacacatcttccgtatcggtgcattcatagatctgttccagcttatccacagaagaaagggagaaaaatttataaccggacttactaccaacagctagggaccagacaacagcgcgacggccaagaccagctgctcttgatgcccctttcacttctgtgttgtcctggttgaagttggcgaagagcagctggccggcgccggcctccnccgctctggctcgccaggttcatggctgggcgcgcggcgagtggccgccactcgccaccctgggatcaaccgccgcctcatcccgtccccgctctgttttt

SEQ ID NO: 317638 - DNA, 486 bp, Homo Sapiens
  misc_feature (59)..(71): n is a, c, g, or t
  misc_feature (155)..(188): n is a, c, g, or t
  misc_feature (476)..(476): n is a, c, g, or t
gcattgctgcctatgaactttgacctgagtcgggggagaggatggcagagactttattnnnnnnnnnnnnngattgtagtggtagtctaactcccataacgctgaggaaatacatcattttccacttcagtggcttttaaatcctgcttatgaannnnnnnnnnnnnnnnnnnnnnnnnnnnnnnnnnccaaaattaactgtttggtgaagcccgcaaaacctcctcgctttgcatgcatgaacgtgccaagccagcataggggagctagaagccactttccagccacctgccgttgggttttttcatatctgtacataatgccgagtgcgtaaggaaaccgtgcgtcgcgcacagtgggtctgcttgtcaaggccagttctgcagtgacaggcccaggggctgcccaccaggtgtgctgggcagacttcagctgggacagaagtccgatctccctagggccccacctggaattantttccctccg

SEQ ID NO: 317639 - DNA, 639 bp, Homo Sapiens
acaccctgcgacctgtccagactgcaagatgaatagcatatgtcgtagagtcccacataagagcttctttctatcagccgtctccgaagttgcacgtgtcagccatggttatacatcgcgtccactgctcatctgacagcatcatttacaggttcacactgttccacttgagtcttcatactatgctcgcaatatggtccgatcagtaaatagttctctcagcattcatcggctgttgtgttggcctttgtgtgactcacagtatagatgcctgcatctttcttggtcacttcccgagcaacttcaaagagcagtatctcctccacaggaagttcttcgacttcccactggggaagcccgcgcagggatgttacagagagggatcggcctcgaagcattcttcttacggtcctccgagactcctttgaattcctgtttcaattagttgtagtctcaggagaagagaacttacaggctcaacagttagagttggtagagttaccaggctttggtagcttctcttgggaatgagctagtagcatgaaatcttatgtgcttcccacagaattcgtggtggaaggagtatttcttcctcctctttctcgtctttctgggcaggtattgtgaggacggtatctg

SEQ ID NO: 317640 - DNA, 615 bp, Homo Sapiens
  misc_feature (137)..(137): n is a, c, g, or t
  misc_feature (245)..(245): n is a, c, g, or t
aaaaccattatttatctttatttctctacaagagaaattcaaaagctactgtgcttcataacatttacacagcatctaaaaatgttaatttcagacaagagatccagatctagtactacacaggatacaccagtacntgggtcgacacagtacacaatccctgtcaacaacagtacaccaaagagagaactttgtgatccgttggtaagatagtatccacaagtaagcacttgtgttcactgttntgtgttccacactagaatacaagtctgtcaggaaaatattccatattgttttaagccagatcatacccatggaaaaatagagaatggttttctttctttttctttctgaccaatacatgctcaagaaatcaaatatctgagatacacaaattgaacgcggtagggtgggggaggaagtagggagataaagcctatgctgctgattcctcagttataggagcagtctctaaaagccctcgtcaatctagtgatgtgtttctctctggaattgggggactgggtggtgggctgcattttgtgggtgaatgggggtactgcaacacaaactgcttaaattgctgaatccttgtggctttctttctcaacttcc

SEQ ID NO: 317641 - DNA, 673 bp, Homo Sapiens
  misc_feature (646)..(646): n is a, c, g, or t
ctgggcagaaaaaggactagaaagggagcactttaatgaacagaagtacagacgtgctggcaaggatggaaatctccactggttcctggcccccttcacctccatgcatccccagcatgggtgttaatcattacccaagctctcgctgttccccctcaccccctgcagagtccagcaggtctagatacgtgctctttgaaatgtgttctgggattaaaaatggtgccctgaggctgtctaaccctcacaaaagacagacacatgcacacacgggccttggggagggctgtgtattagcagtcaggtgggccctcctgggagagcttgctcaagaactcttctcggaaggaaacccaccttaaggtagggttctgataggcagagctcccagaggggacagccagctgctagaagatggggttatccagggtttgtaaggtttaaacaacgggcagggaggcaaaccgagtcaaatggtttggaaacctactgtgtgcagggcattctgagggaatcctgaactctgcctctttggcatgaccaaagctgaagccagggacatacatacgaaggccctttgagctggtggaagaaagtcctaggcactgattggacccttagctggaagaatgatccattcttaacnaaccctgggagccccagggattctgca

SEQ ID NO: 317642 - DNA, 614 bp, Homo Sapiens
  misc_feature (389)..(460): n is a, c, g, or t
  misc_feature (467)..(503): n is a, c, g, or t
  misc_feature (564)..(564): n is a, c, g, or t
  misc_feature (576)..(576): n is a, c, g, or t
  misc_feature (582)..(582): n is a, c, g, or t
  misc_feature (596)..(596): n is a, c, g, or t
tccccccaaatattttaaatgtaattcctatgtcaattgtattttacaccaatttttaatatttaactctgatttgcattatagaaattagtccacttcaataaacatgaatgtgcaaaaacaaaattactctggaaaagtcaggttttttaaataaacattatccttttattaaattactaaaatgtttctcatataacagtaatgattattctaagcaactgcatgagccttggaagattcttcatctctaacacatgttcctctttcagaaaatatcaaaactctcatttctctgttgtccaccttcctcctgaggggactcaggccacacagggggtctcttctgactgagaatccctaatactgaagaagtgggcatcaccagnnnnnnnnnnnnnnnnnnnnnnnnnnnnnnnnnnnnnnnnnnnnnnnnnnnnnnnnnnnnnnnnnnnnnnnntgggagnnnnnnnnnnnnnnnnnnnnnnnnnnnnnnnnnnnnncccagtctttccctgtgctattcctcatggataggtaggtctccatgaggacctgaggggnttatcagggggnttcccncttttgcttcttcntcattttctcttgccacc

SEQ ID NO: 317643 - DNA, 927 bp, Homo Sapiens
  misc_feature (57)..(65): n is a, c, g, or t
caacgagggcacaaggaaataaattgtctgtttttataaacatgtagctactgatannnnnnnnngaaggtgaaagctttatttaaaggaaggtctcatagagagttttaaaattttagaatgaaaaaaggtcttaaatttattaaccaaatagtaaactaattcattcaaccaaaagacttactgaacactccctgagtgaaggtgtgtgtgttaggaaatgtgcttactgggtgaacacaacagaggtgttccccacctcatgatacccacagtctagggagtgacaggcaataattaagtaatttttaaaaatttatagctgtaaagtaaagcaaactatggcacgtccatgaaagagaggttagagcctatgagcggggaggcggggaccagatggagcctgggctcaggggctgccagacacacacagctggctacgggcaggaaggggccccattggaagcgttaaacaagtgtctgtatagaaggaaggcatgtgaataaagaagaccagattgacctttgtgagttgtgacatccaaggtgttcaggaactaggttctccactttctttttctgctttttgtcatggccggcagttgggcccttgtactggtcatcagctttaccatcaagatcaaatgactagaaagagacgggaatggaatgctcactttgtagaccttactttaaattctgttgaagatttattaatatttgggagagagtttgcaatgataatccataagatgtctccctttggacatatgtcgaagttactcatttagattaacttgcctttaaaacccataattgtatgtgagcgcatacatttttttggctcactgtgttgtgttccaaggcacatttcctagggtagagctgagttatactacattttttaggctgtgtaattcacctttt

SEQ ID NO: 317644 - DNA, 679 bp, Homo Sapiens
  misc_feature (561)..(614): n is a, c, g, or t
ttgccaaaatcaagccccagttttattgcaaataaaacaagtcattcaagtgaattgtggaaattgagggtgcacgtgaaggggtggcaagggaacgggactcttgaagatggtcagtgtttccttggtttgaacttcaaagccacactgttgatgcaaaacctctgaccattgggcccaggtccatcaggaaacacgtgacctagatgagcttcacactgcttgcagacaacctctgtgcgagctgatcctaacgaggtatccagacgtctcaggatccctgtgtggctttcatcagagccagacgtaccatgagcctcggaaaccgaaggccacccagtgccagaggcagtactttttctcagaactgaagagtggactgtcgcagcacacgcaatgatacattcctgcttccttgttattcaggtagatccctctgaaaggcggttccgttcccttttctcttgtgacgtagaactgctccggggttagtttcttttgccactcactcttggcaagaggcagctcacacgttgcaagagaccctgcctcccacatgtnnnnnnnnnnnnnnnnnnnnnnnnnnnnnnnnnnnnnnnnnnnnnnnnnnnnnnggcgcagttccgagggtcaggccccggagcacccagaggagccgcgccatcacgcccgctgcggc

SEQ ID NO: 317645 - DNA, 983 bp, Homo Sapiens
  misc_feature (46)..(153): n is a, c, g, or t
  misc_feature (701)..(701): n is a, c, g, or t
ttgggacatcatgtctcttcaatgccctttcaattaatagtagctnnnnnnnnnnnnnnnnnnnnnnnnnnnnnnnnnnnnnnnnnnnnnnnnnnnnnnnnnnnnnnnnnnnnnnnnnnnnnnnnnnnnnnnnnnnnnnnnnnnnnnnnnnnnacagtacttatatcctaaggtagtagtgaacattaaatattaaggacttcgaaagtgcctggagccttgtaataagtgttagctgttggtcattatcattgatgttattttttttaataaatcaaagaattgttacatttctgcttgaagtgacttcagagataattaaatccaagtttttcattttgtagatgagaaatctctggtccaaaggagcaaagtgaactgcctacagttgcctaattagtcaatggcagagctgaaaccggaatttaaatcttctgggtctctagggcccgggtttctgtcttttctggagaacagctcccataggaagctctttttgctctgcacgtgcagggggtagacttgcaggaacttcatgcagggccctgtgggggatgtgggccactatgggaaaggctcttgagccacacacacacacttgccatgacaatgagatcgataatccaagacttacagaactggatgatgtgaactatagtctgcctagaaatattggtcttaaccactttcaggaagactanaatgaccacacacatatacaaaagagtctaatgcttgtaaatctgtttttagagtaccagattcctaagctgccatatcttctgagataatatccaactccaaagctgagcttccaagagggccttgtatgaatatggaactaagaggcacactggctgcagacctgacttctctcatgtactgtttctgttcattttctttttaaagaaaatatcgtatcacaaaaggacaaatgtcatgtgattccacttatatgaggcacctaaagtagtcaaattcag

SEQ ID NO: 317646 - DNA, 611 bp, Homo Sapiens
  misc_feature (120)..(120): n is a, c, g, or t
aaagtagagactcattgaaaatgaccaatatcacaatccaggagtagagcatgccaggttcttattcataggatagatgttctcctatatatgtgttcatcaaatataagattagagganaaaggaggcggtaagcacacacttactctatcaacctccagtcacaggcattgagacacagagagacacaggcaccattctggagacacacataaaggaaatattcttcctttatatcggtcttcaagtatgaaaccattcacacactttattctcaaggtctcagcacactagggtgatttaaaatcatccaccatgtacccaggggtctgaaaatctctcatttagtagtcgattctccattagagttcatacagttttatttgattttattagcaatctctttcagaagacccttgagatcattaagcttgtgtatccagttgtctaaatcgatgcctcatttcctctgaggtgtcgttggcttttgtgttgatcttgacaaggtagttttccttcatgacaccctcccatgacagagtctcattgtcttcatttttgacacagcagacagaagactccatgtttttctccgtgcagcaacacttgaa

SEQ ID NO: 317647 - DNA, 587 bp, Homo Sapiens
tcaaagctgtgcctcctgggttcatgccattctcgtgcttaagcctcctgatcacttttatatatcctaggaaccaaaagagttcatgtgactcactatagtgtggtggtctggaactgaacccatggtatctctgaggtatggtaggctcccggaaccctgctgaagtacaggactgttcttcctcccatctctgctcctatatccacagctggactcctaactaatcagaagcttctctgttcctgagatgggcaccatttaccaacactgaattccttaggggtgggagaaaagaaaccctttaaatctatgtgagtcctttaaaataacgtgggaaaacgtccttcctggagaagcaaatatttatgcacataattatctaaggaggtagagtgttctttccaaatcttaagcaaaacttggtggaaaaaaacacagacctgcttatgaaatggcctctcacagacactggaaggggccacacgtctgaatcagctcatgaatcctctccctattaaaaatataccactcatctgggctaacccaagacttttctggtacctcactccatactcctcatttac

SEQ ID NO: 317648 - DNA, 641 bp, Homo Sapiens
  misc_feature (161)..(236): n is a, c, g, or t
  misc_feature (241)..(475): n is a, c, g, or t
gatctttatattcttttgtctataccctttctttccaccttcttcctttatctatatatgtgtataatttttcttcttcttttttctaactatctcctcccagtgtcaggaatcattttgtaagcatttccaggaactcaatcttcctctgcgcacaaatnnnnnnnnnnnnnnnnnnnnnnnnnnnnnnnnnnnnnnnnnnnnnnnnnnnnnnnnnnnnnnnnnnnnnnnnnnnnctctnnnnnnnnnnnnnnnnnnnnnnnnnnnnnnnnnnnnnnnnnnnnnnnnnnnnnnnnnnnnnnnnnnnnnnnnnnnnnnnnnnnnnnnnnnnnnnnnnnnnnnnnnnnnnnnnnnnnnnnnnnnnnnnnnnnnnnnnnnnnnnnnnnnnnnnnnnnnnnnnnnnnnnnnnnnnnnnnnnnnnnnnnnnnnnnnnnnnnnnnnnnnnnnnnnnnnnnnnnnnnnnnnnnnnnnnnnncacgggacattgccctttaaaggcaaaggactccaaccgggatcgggattactgtttgtccaaactgggaccaaagagtccctatataaaggaacctgggcctcccaacgggaagggcgccaaacacgtcttatagggcgaaagcccccttccggaaccctttccc

SEQ ID NO: 317649 - DNA, 602 bp, Homo Sapiens
caaagagggtctaagcctgaagcgcgccgaaaggccatgggcaagtgaggtggtgctgcgagacctggaagaagttgggagctgtggtccctgtccacagagatgctggaacttgtggctgggagtggctctgaggccgtgaagagagagcatctctgccccacggcatctgcgggtgagggcaaggtcctcaccagacaagtgcagctccaagtcccagatgttgggctttttcttggtactgagacagcagtggggcagggtggggcagtggcaggaaggcagggagcctctcttgctacctcttctccatgctctgcatctgcagactgagggaggtgaagctggccaggaggtcagtcacttcatccacctgctctttggtactggtcatctgcaggcgggtgcagaggtcatccaggcgttctcgctgctcatgttgccctaggcgctccagatactccctcagcatatggatgatctgcttcacctccagacgcacagcctctaggcactgggcatggccctcctgcaggatattcagctttgacttggccaggtgcaggcgtgtggaccagctcggtccagggcatctacacggg

SEQ ID NO: 317650 - DNA, 814 bp, Homo Sapiens
agtagagacggggtttcaccatgcaagcccagctgtccacgtaggttttaaagcaaggggcgtgaagaaggcacagtgaggtatgtggctgttctcgtggtagttcattcggcctaaatagacctggcattaaatttcaagaaggatttggcattttctcttcttgacccttctctttaaagggtaaaatattaatgtttagaatgacaaagatgaattattacacataaatctgatgtacacagactgagaacacacacacatacaccctaatcaaaacgttggggaaaaatgtatttggttttgttcctttcatcctgtctgtgttatgtgggtggagatgggtttcattctttcattactgttttgttttatcctttgtatctgaaatacctttaatttatttaatatctggtgttcagagctctgccatttcttgagtacctgttagttagtattatttatgtgtatcgggagtgtgtttagtctgttttatttgcagtaaaccgatctccaaagatttccttttggaaacgctttttcccctccttaatttttatattccttactgttttactaaatattaagtgttctttgacaattttggtgctcatgtgttttggggacaaaagtgaaatgaatctgtcattataccagaaagttaaattctcagatcaaatgtgccttaataaatttgttttcatttagatttcaaacagtgatagacttgccattttaatacacgtcattggagggctgcgtatttgtaaatagcctgatgctcatttggaaaaataaaccagtgaacaaaaaa

SEQ ID NO: 317651 - DNA, 829 bp, Homo Sapiens
  misc_feature (72)..(72): n is a, c, g, or t
  misc_feature (252)..(252): n is a, c, g, or t
cgttaagggccctccagaactcccatttggaatttttttcaaaacccctcggtttgccccccggggggtttntttatttggggaggaatcccaagcccttgttcatggcccgggattttcctaggaaaccagctatggcccaggttcccctttccctacgggggcccgccgcccaaaacgaatggttctagaaaagtttctcgaggggccgaggccggccgacattttttaatttaggggttttttataaantaatttggctttgtgttctttattgcctctcccttgggctaagggagggaccagcaccatgtccttctggagacccggaaccccccagcaggccagggaggcaaggcctgggccgccaggaagccatgcttgaacactaggttgggaggggaacaccccagcaccttggtcctattgaggcttgaagtgcctgcttgatcctgatcaaggggccaagtggaagcctgtgctggttgtggggaagtgccaggctcacatggtccagtaggcatagacgagcgtcaggaggataaagatggccacagagagcagcatgttcttccggttctcttgccgaagaaacttcagttccttctcgtagttggaggctttgttcattaggctgtttttctccttctccagggacctcctggcctctgggctcagctcccggctgtggagtctggagttcacggcctccaggtctctccgacactgggacagcttctcctctagcccatcgatctctagagcgacgcccagattctcccgcttctttttagtcatgttacttgccgggatcccccagtcatccccc

SEQ ID NO: 317652 - DNA, 2025 bp, Homo Sapiens
  misc_feature (1716)..(1740): n is a, c, g, or t
catttttcaatttttctttaaatcagtattccatcaggcagataactgctgtattcatgaatcttgagagtgttcctgagacagaattaatggtcatttgggaaaactatcgccatggcttcccatctgtggttttcctctaaaagccttggagattagcccttccttgccagtgagaacggtgaccgcctcctgctctgcacggtctgcggcagttgccgcttctggttaggtgtgtcaggttggcttattttgggttcaggcctggcgtagcacccacaagtggcagacatatcacaagagtccccagactctgcctagaaacagtgtttgccctttggccagtgacgtggttcatcccggcccatgttgagccatgagtggagtttccagcagagggaggaatgtgtgccttgttcaaggagggcacgacccttaggcctttttcaaccagatttagctgaagggcttgacacctttgaattacagcagttgactcagagtgcaagaagtctggccattttggaaagcaaggtttcctttcagccctgtctactgaccaataccccgactcaccttgtgtggcgcacttcagaatcagatatacctagagtatacctgtggtttggttttataattaatcagctcgttacttcagcccatgaaaatggcatccagggctgccaggagattcagagctcaaaacaaggcgagcttgagttctgcactccagatgtgtgccaaaactagtaaaacttaacggacttacaaccttgtcagtttttttaatgaggcagggatactctgtttttcacactaaacatatgaatgcggcactgctgcttcagctcagcttcgtgcctgggttccccactggtctgggaagactgttgtgctccatagagcagtgcacatctgacccagaggttgggtgttcataactgctacttgctctgctctaccatgtttaaagaaatatttggatgttaaattaactcactatggtttttcacctgggaaggaaacaaattacgtactagagggcattgattggttaaaaacttgtgtatcccgggaaggacctgcggtacaggagtcagccatgtctgtgctgtgtggaaccacctgatgacatggttaacgaggaagacgatgtgttgaccgggctgccgtttgagggactttgggtcacccaggactaggacaccttctgtgcttcatgtttgggaaagctgaaagggaaggacagctgtgccctcctgggagctcatgtgtccctggcgctgtgctagctttcctttacagctgtttacagacaaggcaggcctgaggcagatggccactgctcttgtgatgtttgctcagaggaatatgaacattttatttttgaaaagggatgatgtggttttttgccaggtgtttataattaatcctttaatattatggttattaacctcttaaacatgaatgaattcttgattgttttaacacagtacctaagactaatgctttctgtgggacaccactggagctctgccttcaactccaccctctgcgaccggaggactatgcccctagtaactgctgtcggtgtggacgctgtgctggttctgttttctaaaggagcagaaggacaggtctctgagacaggatcgttgtccctacaggaggaacagtggccttgcttcttagacggtcttcactgtgtgttttaannnnnnnnnnnnnnnnnnnnnnnnntaaaactcttttgacctgtaacttaaagatcataaacttcaggcaataatattttctgtgtaagcttttaaaattatttttggggatcatagcttgttttattttgtgctataaaattaacagtattaaatgacttatattcttagaatacatcgagtgtcttttcttaacagattagtgcctttttatttttgtattccgttttacgttactggtcccagcatcaaaacccttgtttccatggcctgtttgtatattgtctcaataaaacttgcatcagccggt

SEQ ID NO: 317653 - DNA, 426 bp, Homo Sapiens
  misc_feature (45)..(45): n is a, c, g, or t
  misc_feature (256)..(280): n is a, c, g, or t
atggttttaaaccacaagtccccctaagactaatgcctttcctgngggacacccccctgagctcctgccctcaactcccacccctctgcgacccggaggacctatggccccctagtaactgctgtcggtgtgggacgctgtgctggttcctgttttcctaaaggagcagaaggacaggtctctgagacaggatcgttgtccctacaggaggaacagtggccttgcttcttagacggtcttcactgtgtgttttaannnnnnnnnnnnnnnnnnnnnnnnntaaaactcttttgacctgtaacttaaagatcataaacttcaggcaataatattttctgtgtaagcttttaaaattatttttggggatcatagcttgttttattttgtgctataaaattaacagtattaaatgacttatattcttag

SEQ ID NO: 317654 - DNA, 615 bp, Homo Sapiens
gcttatggaaaagtaatgagtgattttagatcagtttggcacagacacaaggagcttgttatgagtatttctcaaaaggatagtaagaaggaggaataagctataaactctgttagggggttaagaattaaggtgatttgtataatcctatagccatctaattttaggagtactgctgtgaggactattgacctggcaattgcggcctctatgtgggcttttgggagtcctaggtggagtccatagagagatatttttagtataaatgctatgatgcatgctaatcataaaaggctattaaaccaggaaattgttagttcttgaagctgggtattggtcttaaggtagactcgaaagtgctgataaatttctcaagcatcagtgtttgaataagcggagtttcaaattttggtctgctgtacattagctgtgagacactgttgagacagagtcttactctgtagctcaggctgtagtgcactgggacacatctggctcactgtgacctccatatcccagggtcccattcaagagattctcctggctcaagtcccccaagtagctagcattacaggcatgcaccaccatgctcaaggtaatttttggattttaagg

SEQ ID NO: 317655 - DNA, 638 bp, Homo Sapiens
  misc_feature (387)..(387): n is a, c, g, or t
  misc_feature (622)..(622): n is a, c, g, or t
caggttataacaatggataccaggacatcagaatatctgataaagcaaatatttatatgctaatttaaaatatcaaattgctactggacataaaatacatctggaagcttggggtaagaagaaagaaaagaagtgttccgttctgttttcaactaagggtaaacgaagtcccagagtgttttccctgtaggtcaaattaaggtaacatgtctttatttgatcatctattgtacaccagatacctggctaagggctttccttttttctcatgtagtcttccaaatgttctttgataattgtcactatattatagatgacaaagtgaagacttacgagaaattactttgccccaaggttacaacacttagatggctgtccaagggcggngaagagccctgcaaattctgtgtcttgaagaaagcagtggccacgcagtagttccgtgcccaggatctcccagaactagacttgggaaccacagctgtgccagccttttttgttagaccattctttctgacttctgcttaccatcaagcacccttaaaatgacgaaatcagggcttaagttgcttttaggttacacagaactggagtgtaggccctctcaggccaaacatctttnctcttctggggtgcta

SEQ ID NO: 317656 - DNA, 658 bp, Homo Sapiens
  misc_feature (73)..(73): n is a, c, g, or t
cttttggtaggtagttggctgaaaacttgaagttgaaataatactttggaagtactatgtttacattgcattnatgaaaaccttccatttttgtagctgtctcttgatctgcccaccatgtcacccaattatagaagaacgggaatctgcattaccacaaccattacttcccattttgacatgggcataaccatctactccccaagaacttccccaggaattccgcacaatccaatatggagtgcttcctgttttatcaaacccagttatgagaactgcatgatttgcttctccactagagcagtgatgctgtataatgcctcccagataatcttgccagctcactgcatctactatgactaccaaagggccaaaggtaagaagtgcttttgccatttcatcttcttggtcactgaagtcatatgcagaataacctttgattgaaaatccagaatgtgaaccagaaaagtaatggcacagaccattttgtgctttaaaaggatattctgaatctttcaccagttttacttgcatcttgtttaaccagttcaaagcattgagagtagagcctccattgcagccataattattatacgaacagtcaatgacctgctggacacttaggtcttccaggggcttcccctttattgcataagca

SEQ ID NO: 317657 - DNA, 641 bp, Homo Sapiens
agctaggaccaaggttgcaaagatttctgttggtggctgagagtcaaagcaggccaatccaccccattacctgaaatatttttcaggctaatttataactttatggatttcctcgatacaagtttattagtttattctccatatacaagtttattctcccagaatagcagcaaataaaacttgaattggatgtacagctcctaataaccttgatgtcagagttgtcacttggttggaattattatgatcccccaatttaaattttcttgataaactcagcgttgtttgttttcagtgacaagaaaacatacatggaaaggggacccaagacagttcaccaagatagttcacagccctttgcaggatatgcctttggtgggtgggagcacctagattttagaggactataaaacgccatgtttactttgtttgaaattttctgatgaaaagtcttttgtaacttaacattccacattttcatttaaaaagtcccagaaatataaactatccaatttacaactaaggtgggtatctgtaaaaaccttaagaatagttactcttcccaagagaattacagcgtctaagggggggaaagaaagcatctgagcagtaaaagtcaagctggtaaaatccaatacaga

SEQ ID NO: 317658 - DNA, 491 bp, Homo Sapiens
  misc_feature (33)..(33): n is a, c, g, or t
  misc_feature (46)..(46): n is a, c, g, or t
  misc_feature (52)..(52): n is a, c, g, or t
  misc_feature (273)..(273): n is a, c, g, or t
  misc_feature (291)..(300): n is a, c, g, or t
accaaattaatttaaaaattatttaaaatcccnaatgtttttcctncaaaantaaatgttacaggaaagaaaaccatgcccatgttaagggcaagacatgaaaggccctgaaaagggttaacccctatgttccgtgcctaaggtggctactgctgaatcactgctgggctgcttgtctccttaggatttattggctgagccagaggaacgacgcagcttcatggacatgcggcttttgctagttcgaggagacattggagaggccaggtcagnccccaattttttttaccnnnnnnnnnnttttgcgttgctgtgggagtttcactgggtagaatctctgggtaggagccttcagataaacagaactgatatttaatgatcggcatcagatggtaaatggtggtagggagctggagaaaaaacctgtgctgcaaaatcttcaaatgttgttggttctaagtggtgctggacaattgtttgcaggtatcgtg

SEQ ID NO: 317659 - DNA, 835 bp, Homo Sapiens
tttttatttttagaatagcaatataccttttaatttttgagagacatatgcaatatatgtgacaatgacagaagtcaattagcatagagtatacacagctaagaacaaggtggtacaaacacagtaagcagacttaaaatttttacatatagatcttcataagtactcatggaaaaatcagcatttacacaatttgaacaaaaaaccaacatctactttcagatatctgttttatacaaagagttaggcattctaaggcaattttatatttatatatttcacataattgatattcataaaacagaatagaaatattcaataaagtacatttcagttccatagcataggttttacaaaaaaatgtttctttcctaggcagtaaaatgaaatagaaccaaaaaaataggaaaagcccgtaagtgcaatgtgtcctgctcacacctgttttataaaaagaacctttgaattgtatttaatcaagcaatagctccaacacaatcattgtaaattatttgtattttgacttgttccaaaaaggagttaacatgggatgaagaatgaatttgctgtactgcattaggcatcagcaagatggtgaccttgtatgttgaatttcaagcttttcaaaatttcaatatgaaatatatcctacttctaaattgtatgtataaaatgttaaaagcaaatgaacccattatgtcgattgttatttatttagcaaaagtatcattacagagattcattttctatgcaaattgaaatgctataagccattgaactgcatgaaaagccaatatggttaattaacaaatgtattttagagctacaaaataac

SEQ ID NO: 317660 - DNA, 491 bp, Homo Sapiens
agtgagatcatgcagtatttgtctgtctgagcctggcgtatttcacttagcataaggtcctccaagttcatcggtgttgttgcaaatgacagaatttcttttttcagactgattattattacattgtttatatatatatgtgtcacatttcctttgtccattcatctgttgatggacatggctttattccataacttggctattgtgaatagtgctgcagtgaacatgggagtgcacatgtctctttgacatactgatttcaagttcttaagatatagattcacaagtgggattgctgaatatggaattgatttgtgtgggtgaggcgggcatccagataacatttttgtccaaatggatgcccagttgacctagtgccattgattgtgacctgtgttgtgtgtggttctgcttttgggtaagccagatgctctgccctttcatgaatgcgtgctgcctttattactataatttgtcaggcattttgggac

SEQ ID NO: 317661 - DNA, 812 bp, Homo Sapiens
  misc_feature (636)..(636): n is a, c, g, or t
tacagacttttttttaatagaaagaagacaaagctgctggtataggatttgttcctttgaagaaaaaatgagggaaacaaacacaaaaacctcaatgcagtgtataaataacattttgttcaactacctcttaatgtggaattatctactttaatagtttcctgacagtaatgttaaatagtaactgccaaatttgttattttcccatctctcttaaaaaagtctttatgattattttatatagttttgagaactttaaagccacttttttttaaccttacatttgcataaaaatgtttagcttttaagtagagagcaaattatgatcatatattttgatattcatgacctgtttgactataggagtttttttaaaaaaatgcactttggctataaaaccatggatgatttgatccataagatttaaatgtgccaccattatagtattcctagacatgagcttgatgaatggtattctgtaattataacgtgccacacattattgtgtcttaattgcccttagcctgaattttaatgatcaatttgttattgttgcagatgtgaatattgtgcataaacttactaaatttatgtaaaattgtataaaatagaattagaagtcactaagttctttcntgtgtagaagtaataaatttattgtaacacaatgcagttgtgtatatgacattctgtaattccttgaactggatcatatattcataagttctgtagatacttatgcatgaacattttctcatttagttcttgggttcattatttgtattgtgtttactacttgtgatcatgtagtt

SEQ ID NO: 317662 - DNA, 741 bp, Homo Sapiens
  misc_feature (63)..(63): n is a, c, g, or t
tggaattataactggctttacaactaactagtgcatcaccttgaacaaatgatctctgtatgnccacatttctaagtgtaaagcatggataacaataatgtcagcttcactatgatgtgaaaatggcataaactaagcacacaaggaacctagagagcactagctcacctgctgagttaatggacccaatcaagcaatcctggattctaatctctagatttggctgtggaaaagggagctccttataacccacaactgaaatcttaccctctgtcgacctcagctttaggattttgagtggattactgatctccttataaggtgttcccttaggatagactgaactttgcataaatcataaaagacaacattttaagttcatcatcctgaacatcccttcaaatatggtgaaaattttagcagtatttatcctgtctcttgattcttggaccagtaacataatgttttaatttttgatcatataatttaaaaaataaatctaacaggttaaatatgtgctccctcccacacacactccccctattcattaatgtttaattagttattcttttcctgtgttttgacaggtgattacacataaagtagaaagataatgttagaaacatatcattttaaaccacagtccaaaaattcacttggtttatagacatttgtgtttcacacagcagtaatatttcttagttagaggggcgcttttctcctttttctctcctctctctc

SEQ ID NO: 317663 - DNA, 611 bp, Homo Sapiens
  misc_feature (138)..(179): n is a, c, g, or t
tttggtcaaatgaggtgaaggggaaaaaaaatgatgatcaaacttcacttttttccaaatagatgattttccaagtttctctactggggatagaaatgttctctgcagttttgtaatgtttctttgagagagagaaannnnnnnnnnnnnnnnnnnnnnnnnnnnnnnnnnnnnnnnnnaggaattatcagtatagcacagtagcttttatgcaagttctgaagtcacattggatttataactggctttaccacttactagtgcatcaccttgaacaaatgatctctgtatgcccacattttctaagtgtaaagcatggataacaataatgtcagcttcactatgatgtgaaaatggcataaactaagcacacaaggaacctagagagcactagctcacctgctgagttaatggacccaatcaagcaatcctggattctaatctctagatttggctgtgggaaaagggagctccttataacccacaactgaaattcagcatctctgccctgtggctttcaatttggggaggctcatatcgggtcttttcttaccctctgtcgacctcagctttaggattttgagtggattactgatcttcctttaaggggg

SEQ ID NO: 317664 - DNA, 1108 bp, Homo Sapiens
  misc_feature (920)..(951): n is a, c, g, or t
gcatttaaaaacttctttattcaagacttttattcagaacttttatcacaaatgtgtcaaaagcacttcaaccctgtttgggggttcatgggggaagatgggggggcggtcagagccaaagaagagccaggagcaggagaagaagtcatttaagtttttattaaatatactctcttggcacaaatctttaaaatatataaacattagatataaacagtgtcttcatggcatcaaaatataactccagaccaagaccagtgaccagcagggaggcgagtgaccgcagagcctgagggcctggctgtgtgcaggggtgggggacagcactgtcccaactcctgccgggtcccactcagctaggagccatctccggggagacacactggggtcagcagggactgggggaccctcccacctaccccttgtctctcctgcctagcctgtggccccaaatccactcatttggtctcacccaccttggggcagacccccaattcctacttgctgttgcattgcttgtgggagttgggtgccctcccatctccctgtgagggttgccctgcctctcctgccaagtttaagtgctgggtaagggattaccacacagtgggacagcccctcacagccatcacaggctgcctgggcctctggggacaagatcagggatggctggtggccacatgcaaggaaggcagagagagcggtctgcacacctgcaggtccaaggcaagaacaggaggaggacagaaggaagggaaatgaagtcacgactggagatgaacaagctcagatcccttcacacagcgtgtgctgagccagctgtcgaaagcaacactcacggtcacgctcaccctggcaccaggcagaccagtcaggggttcgatgtgaatagatcatagacccggggtcagccaagttgnnnnnnnnnnnnnnnnnnnnnnnnnnnnnnnntcaagaaactcaccatgtcattaggaaatgggtgtttctgagtccctgtgatagctggcgggccctgggcctcacctcccacccccaagctatactctatcatgaggctcccacttcgggggattgaggctagcaggcaccccatgctccatttcat

SEQ ID NO: 317665 - DNA, 590 bp, Homo Sapiens
  misc_feature (167)..(198): n is a, c, g, or t
  misc_feature (425)..(425): n is a, c, g, or t
aatgaaagtccacgactggagatgaacaagctcagatcccttcacacagcgtgtgctgagccagctgtcgaaagcaacactcacggtcacgctcacccctggcacccaggcagaccagtcaggggttcgatgtgaatagatcatagacccggggtcagccaagttgnnnnnnnnnnnnnnnnnnnnnnnnnnnnnnnntcaagaaactcaccatgtcattaggaaatgggtgtttctgagtccctgtgatagctggcgggccctgggggactcctctgagagaccagttagctgggggttcccctgggtacctcagattttcctcacctcccacccccaagctatactctatcatgaggcgtccacttcgggggattgaggctagcaggcaccccatgctccatttcatagaaactgaacaaccnctgtgggctttaaattgctccatatcccagccaagtgcctgctcaagtggggacccaaggacctgctggataccacagctgggcagagggttggggcactgagatgctaggcctggggggcttctgggccaaaggaggtggtttgtgtgctcacatttcagcaga

SEQ ID NO: 317666 - DNA, 951 bp, Homo Sapiens
  misc_feature (940)..(940): n is a, c, g, or t
atacttcacagcaagatttattaatacatccaaaagaaagaaagaaaaatgattttgtcacactatatacagataatacatacagtgtttcatacacatattacatcagtttttacacaagaaaaatatacataaaaatgtaaacttttgtatacaaaaacccttaaacaaattaaacaaggaccagataacaaaaggagaccaattcattattatttcatcaaatttttaaaacagtaatacagtacattcattgagatatatatggaaaatgtgagccatctcttcttgtttaaagggaaattacaaaccaaaagtcaatcgcctcccaagacgtggtcctcccagcaatgccgcacccaatgccacaagtatgcctgtccaccagaactgggggctcttaccaaaacctgcccatctcctcatcttgctcctacagtctgtgcagaaacaagtggctcctaacttttgtgcatataattaaactcccagccactatgaacacaaatacagaggagagattgtcagtttgtaagttccctttaagcggcttttatatttttgtatttatttttaatgcatggcctgttaaacatacttgggtgccaaggtgaatgagaacactgaaaaagaagggctttgagaaccgctagtccttgctaccgtgcagtttctttgttagaagagattttaaaactgtccaacctgtctcatttgctggtttcaaataagctacctcacctttgatttcccactgcaacttggtttcaacttacacttcagtactctagttgttagtaccatacaattgccaagaggctttttgttaaaggctacttctgatatcaggttccagctaagctactcagtaaaatggctcaaaccccagcctctctattttagtcttcaggagtactcttacttcactgttttttgtaanctgtgccgaat

SEQ ID NO: 317667 - DNA, 365 bp, Homo Sapiens
ttaaatccactagctaaaggactaagtaaacaaaaattttccaaacaaatattgatctcacttagcatttctgatcatttcatagccacagattaatagctacatgacaaaaagacttcagaaggattaagctacacaacactatactagtgttttaaatcatttaccacagtgtacatttcttgaaaacattctactactaaaactcaaggtcaaattaattagtttttgaacttttcttatatttttgaaacatatgttttaactaacactacaagaaaaatacagaacacaaggcttcttataccttgagtaactatatctagggcagttaatttcagggccatgtatactctgctctaacg

SEQ ID NO: 317668 - DNA, 772 bp, Homo Sapiens
  misc_feature (83)..(83): n is a, c, g, or t
  misc_feature (351)..(351): n is a, c, g, or t
  misc_feature (403)..(403): n is a, c, g, or t
ccagtaaaggacccgaaaattctttcaaaatggtaaagtgatcacttccaatgaatgatgtaataggaaaagagatttaaacnctgtattatggcttacacaattacgcagaacaatatgtgcaaacttttgaaaatactgtgcctaacacttccaccgccaaccaataccttcaatataactaagtttcattatttatcacagttacataaaatccaagagcctatgaacaagctgttattaccaataaatgtagttctgcctgaaattcttatctatatgcaggcctcttaagcatccaagttttaaattctactgcattgttattgcaaaatgaagcaggcacaacanaattaaatccactagctaaaggactaagtaaacaataatagaaaaagaaaancaacaacagcgaaaacccttgggttgtttcccaagattttttttccaaacaaatattgatctcacttagcatttctgatcatttcatagccacagattaatagctacatgacaaaaagacttcagaaggattaagctacacaacactatactagtgttttaaatcatttaccacagtgtacatttcttgaaaacattctactactaaaactcaaggtcaaattaattagtttttgaacttttcttatatttttgaaacatatgttttaactaacactacaagaaaaatacagaacacaaggcttcttataccttgagtaactatatctagggcagttaatttcagggccatgtatactctgctctaacg

SEQ ID NO: 317669 - DNA, 730 bp, Homo Sapiens
  misc_feature (67)..(67): n is a, c, g, or t
  misc_feature (123)..(123): n is a, c, g, or t
  misc_feature (213)..(213): n is a, c, g, or t
ggccataaccaaggaaagtcatttccagagtgggaatggcctcagtaccaaacagtagggattgagnccttgggtcctatggtaaaagaaactgaattctgccaacatagcaaataaccaagnaacagatttcttccgacctagagaaatgttaaataaatttgtattgtttacatcactaagtttgtgataatttttaagtcagcaagaganaacttctctacattttcaacttataaagttgtatacagtagtctcttacagcaacttatccttcttctgtatcttcagttctttcataattcttattttgaatgtgttagtatttttctctcatttattcttgatcggacttactgaatgttggattacttcactgtttttaaagaactaccttttggtttcactcatgtaatctgttttattatgtgctgttcatcttttcttttatctttattcatacctttacttactttagttgtattctgatgttcactttctatcttcctgagttgtatgtttagatattttacagtctttcttgttttctaataatttcttttcttctgagtggccttttatctctgtctttcagggttttggtaattggcactatcattatcatgaacttctacactggtaatttttaaacatttccttattagttcaacagttctttagaagaatgattttacctttacaagtgatgggatatgtgtgtgtataaaat

SEQ ID NO: 317670 - DNA, 372 bp, Homo Sapiens
ctcattttctgtccctttatgctgtgtacatgcagagtcaatccattgttattacacagccaattataggaccaaaacataatttgcatttcttttctcctttttagtcataatcttgatgattatagccaagctctattttgtaattttaaagaaatcccctgaatgtacttccacaagccattttaattattctcatgatatctgcggtaggtaggtgtgtgttaggagacacatatttacgggatttttatttaaattgattagcattgcttcatgcatacaccagtggttctcaactgtccatcagactaagctggcaagattgttaatagtttagatactcaggttcatgcccagagatggttctca

SEQ ID NO: 317671 - DNA, 754 bp, Homo Sapiens
  misc_feature (448)..(448): n is a, c, g, or t
  misc_feature (629)..(629): n is a, c, g, or t
  misc_feature (650)..(650): n is a, c, g, or t
tgtaagtatttacttttaattctactttcaggtggaaaatgatgagaactccttagggggtctttaatctcaagattgtcagtctagctaaatataattaaaagactgccttctgtgtttactgctgaataatgatgagaaaaaatagtgtaatttttttaatgtttgctaaccaggttctccatagacaactttagtcagtggtcataatattgtagatttagctgcaaatttaagaggtgagaaaaggaatatgtttgttcctaggtttgttctaatcagaccaattcaaagttaatattgcaaggctatacaacatctatctcatccaaattgttgttttatagctttcaaacatcctttttaacttctctgctctgccactcatcattccattagggcaaaaagaaacaaaacttaagctttgaagctcattagatacatactntaaaaaatagatcaaaataagcaaaaagtacaatttgtattatctgcatgagtttctagttttcagtgacctaagctaagtctggcttttagtagcaagattttagcataccaggctctcaagggaggtatttctcagtattatttcaatttttaaaggataaagacatgttctaatttanatttattgaaatttgataatncatgtgacttttcagtactgtgcttggtgctttagatgggaataggataaatatctgactcaatcatccaaggagtcatgatacatactttacaatctgattta

SEQ ID NO: 317672 - DNA, 534 bp, Homo Sapiens
  misc_feature (18)..(18): n is a, c, g, or t
  misc_feature (31)..(31): n is a, c, g, or t
  misc_feature (49)..(49): n is a, c, g, or t
  misc_feature (57)..(57): n is a, c, g, or t
  misc_feature (106)..(106): n is a, c, g, or t
aaattttttggaaacccncaaagaagaaaanagtaacgcttaaatccanggtaccgnagtggctggaaaaatgccagtttgacctcgaagttttcctctcccaccnaatcaaaaatgtgaatctgtttttggatataactgtgattctgtctcccagcttgaaaattcaaatcccccggctgctgtccttcaaatgaatacagcgctgtcacttctatgggttgattcaaattgctttgagagccagagttcagctggactggtgcagatgactgctgtggtcttgacaatggctttggaggtaattctttagcagaagacttcctctgctcccttgctgcttttcttgcattgattcgttgtccttcattttcatacttttcagtaaaggaatcaagaatttcataaagatcttcggcttgagcaggccgcggtgtatctccaaataaaatgtcataagctcggatatcttgacaataaaatcttcccaagggcccaaccgccacagtcaagttccctccgagggtcagattt

SEQ ID NO: 317673 - DNA, 1476 bp, Homo Sapiens
  misc_feature (163)..(175): n is a, c, g, or t
  misc_feature (194)..(252): n is a, c, g, or t
  misc_feature (289)..(348): n is a, c, g, or t
  misc_feature (449)..(601): n is a, c, g, or t
ccacaagggccccccaaaaaggtttggaattaccccccggggggaatttaaaaaggtctattccccacccccctttgtggagagggggttctccgatggtggggggggaagggtttatatgaggaatgtcgcccccccgttttcccccaaaaagatgtacaannnnnnnnnnnnnaaatttttatttagagggnnnnnnnnnnnnnnnnnnnnnnnnnnnnnnnnnnnnnnnnnnnnnnnnnnnnnnnnnnnttgggaatttttttagaaaccccttgggtttcccccnnnnnnnnnnnnnnnnnnnnnnnnnnnnnnnnnnnnnnnnnnnnnnnnnnnnnnnnnnnnaaaaccatatggcccccgtttccctttccctttggggccccccgccccaaaacaaagtttttagaaaaattttttggggggcgcggggggcccccaaaaannnnnnnnnnnnnnnnnnnnnnnnnnnnnnnnnnnnnnnnnnnnnnnnnnnnnnnnnnnnnnnnnnnnnnnnnnnnnnnnnnnnnnnnnnnnnnnnnnnnnnnnnnnnnnnnnnnnnnnnnnnnnnnnnnnnnnnnnnnnnnnnnnnnnnnnnagatgttgagagtcagttttattgccatctctgggaggggctcaaatccgcccaatctccttcagcttggccaccaggtcctcagtggtctccaccttgacgccggccgtgcgctggggcgggtcctccacactgatcacagagagcttggaggtcaggtccacacccaggtccccaggcttgatcacctcgatcttcttcttcttggctttcatgatgttgggcagcgtggcgtagcggggctcgttgagcctcaggtcagctgtcaccacagctggcagcttcaggcgcagggtctccaggcccccatcgatctcccgctccactttcaacttgtccccctccagcatcacctgggaggcgaatgtgccctgtggccagtcaagaaatccagctgtcatctgccctgtctggttacagtcatcatcgatggcctgtttgcccagcagcaccaggtccaccttctccttctctgccagcttggccaggacccgagccacctgcaggggacccaagcgttctgcttctgctgggggcacctccacgtggatacctcggtctgcacccatggccagggcggtacgaatcgtctcctggcactgtgcaggcccacagctgacggcgatgacctccttcaccagcttcttctccttgagccgcacagcctcctccaccgcgatctcacagaaggggttcatggagtgcttcacaccatccgtgaccacaccggtcctgtcaggcttcactcggatcttcacggcgtagtcgatgaccctcttgacagctacgagcacgcgcagctccgccatcttcccgccgcagccacttacagggtcagcccgcaccctcagcggctcagtccagaagccccacca

SEQ ID NO: 317674 - DNA, 384 bp, Homo Sapiens
gataaatatctgcttcacaaatgttcttccttcctttatggtctataagcccctgcagaaagtcttgcactcaatctgtccttttgttacattgcctttctgtccccagtttccaagctttcttcactttatcctggtatctttatacttttaatctactctaagtcctgttgctgcttttgttctaaccaactcaatggtctagttttcctcttgcaggccctacaccttcttctacaaggtagttatactgtaatcctgatacaattctctgataggcagctagtctctcttttgggccaccccatatgacactgttaggtggggaggccaggagctgccaagggtggtgtgcagagggtagcatccaaggggaacctgaag

SEQ ID NO: 317675 - DNA, 1114 bp, Homo Sapiens
  misc_feature (669)..(669): n is a, c, g, or t
cgggagttgaggacatttatttcacattcacacaactgtacattttctataaataatgtggggctgaaatatttacagtcatttcttgcccatacccaggctgtctctccctcctgacaccccgtgcctggagagacagcctgcagacagatgtgcaaacccagcttggtctttcctgccccctccctgatgctcaggcagagcagccagcggtccctgggactccactagcctcgaccactccatcctctgatgccgaaggcgtggcaggccacagggaattcgccgctccactgcagtcacagaggctgtggcaggcagcagccaacactgcgggccctgggcagtagctgccggcttgggaatgcagaaggaagcagggaggctgccactcactccggctgccccccaattcttcccttcctctctgtgcccttcctctgagagggtgagccccagggttccctcactcctcacagagtgaaactgctccaggcgcccagtcatgccgggtcacagagaagggagagccagactcttgcagtggacagttataacgccagggacaaggacaaggaaccacaacacaaatgtctcaaggacacaaaatagtgggttcacaccggccccacagactgtacacattcttgaagccctgaggggaaggcnagtttggtcttctgggagtggagagggagaaggtggacacgctcaagacacactcagagggacacataaccggtaaccaaccaagccacagcagggggcttgcagaggacacacgagcatcatccactcctcagtcacagcagcatcgtgcacttgggaacagcaaggggccaggggcgtgccctgggctggggcagctgcgtagcccctctccatcagctagagacaggccggggcggggttctgagatcttcctcactgctatgaactgcagccacgtacgagaagagacataatacggagtagcagatttcgtgggccattggtgtcttgtacttgtggctcaccacttctttaatttcaggaacaaattcctccaggacaaagacgcctcgaactgtattgcactttttaatgtgattcagctctatgaaaacctgattgt

SEQ ID NO: 317676 - DNA, 732 bp, Homo Sapiens
actgcgactcgagacagcggcccggcaggacagctccagaatgaaaatgcggttcttggggttggtggtctgtttggttctctggaccctgcattctgaggggtctggagggaaactgacagctgtggatcctgaaacaaacatgaatgtgagtgaaattatctcttactggggattccctagtgaggaatacctagttgagacagaagatggatatattctgtgccttaaccgaattcctcatgggaggaagaaccattctgacaaaggtcccaaaccagttgtcttcctgcaacatggcttgctggcagattctagtaactgggtcacaaaccttgccaacagcagcctgggcttcattcttgctgatgctggttttgacgtgtggatgggcaacagcagaggaaatacctggtctcggaaacataagacactctcagtttctcaggatgaattctgggctttcagttatgatgagatggcaaaatatgacctaccagcttccattaacttcattctgaataaaactggccaagaacaagtgtattatgtgggtcattctcaaggcaccactataggttttatagcattttcacagatccctgagctggctaaaaggattatggccaaattaggacgattaccagatcatctcattaaggacttatttggagacaaagaatttcttccccagagtgcgtttttgaagtggctgggtacccacgtttgcac

SEQ ID NO: 317677 - DNA, 378 bp, Homo Sapiens
ggaaaataacctgccaccaattaagcgagtgacatagggctactttgccaaaacactcagaatgagtatgttacacagatccagttcactaaggattaatgcattttgaagttcttagaatttgttgggatgactgatgcaaagccaagttctacagcagattaaaagtaatacaggtttctttcggggaatgtcttcagtatcctcacatttatagttgctattttcattgtgagaggcttagcaaatgatacattttagcgaacttcacttacttgatgagaacagaacctccccacttccttttactgtagatatttaggataactttttttctgcagtgagccaaagcccaattttgcttactgccctactcag

SEQ ID NO: 317678 - DNA, 412 bp, Homo Sapiens
aagagaagtattcagtctagatgcagacttcccgtatggagctcttaggggcataatatccatccagttagtcatttggacaggcttgataaactaagcccacagtcaacctgccattaaaagcagagtgagttagatttgtggcatcctcagtattaattaaacattgatggtgggcgtcactgttcagaagaagggggcatctttacctaatgtgcgtgcaaatctcaacagtcttagagctgaaagggcccttagagatcatctattcatctggtctaatcctgttggaatggtgaatctcatattagaactgcgggtaagagagtaggtgaagaaggagcctggcattagaggggagactattaaaataatacctggcaggaattgatgtggatggagagtatagaca

SEQ ID NO: 317679 - DNA, 462 bp, Homo Sapiens
  misc_feature (48)..(48): n is a, c, g, or t
  misc_feature (84)..(123): n is a, c, g, or t
tgggaaacttacaatggtggcaggggaagcaaacgtgtccttcttganaatgtcataatctgtgacccgtggttggtgttttgnnnnnnnnnnnnnnnnnnnnnnnnnnnnnnnnnnnnnnnnggcagagcagggaaggcagtgatcagtagacctacaattaagtaaaaccagaggatacagctgataagtggtggtaaaatctcaacttgaacacaagcctccattgattctaaatcttgagtgctttagaccaaccatattattctagtgtctttctatttctctcagattccccagaacacctaacacagtggcaggtactttataaaagaatttttaacaaatatttgtttaaataaattaattttgttataggccctcaaatttaataaatctctagtgtaaatctacattcttgaaaggctcttatattatccattccttgatttttttcctggc

SEQ ID NO: 317680 - DNA, 432 bp, Homo Sapiens
tcattctacgtactttttaccctcagcatttatgatgtaaatctctttctctatggattatatctgtttaaagcattctttctaggttattttggggggacagtgccaagtccatctttgcccagtcaattcagtgattgatagcaatttacattaattgcagtaaagctctttggattagaaattagtgtggggaaagcttattctgttgttgtttttgtttactttcatatgatgaaaatgctgtgtttaagtgtttgtcaataggaagaatggaaaactgttgggatgatgtggtttgcaggttgctgtgcctgattcacagtgtatgttgtataagccagtgtccatacctgattatgagagcttcttaaattatatgatatcaaatttgttcctgtaactctgtatacagtgcttttctgcaaggta

SEQ ID NO: 317681 - DNA, 1235 bp, Homo Sapiens
tctattattccttttaatttctttattctaaataatgatcaaggaatttttttattcattaagtttcagtatcattacagaaaatgttatggtacagaattgtttaacattattttgtctttgctcttgatttccacatgaatgctggtaacactaatatctgtacaagatcagtctttgattttatttttttgttctgtacaattttaaatgtattggttaaaaaggctgtcagcacttaaggaagcattttttcttcagtttgtttcttcaaataaaaggtgtccagttactgcccaagagtactgtgccgtgaggctattggggcgagaaacctccctggatgctctgcaggggatggttcttgaggcaaggcagagcctccacccagtcagtcttcttttggcactgtgcacataaacacgagatacatgagaaagaacaagcaaaagctctctgtaaagcagttatgaagcatactaagaagggaaatccaagtgttgcctacgctagtataaataagcagacagccttgatttaagagcataagtagttgtattttaaagatgagaaaaacacaagttctgcaggcacctaccgctgtctactaaaagctatcgctatcagacctagcattgaacacacaaagcaatttgcaagaaaggaaaaatttgccttgatataatcagaacagaattttctgttaagatttatttttaggtgtttttttctttaaaagatatttaaattcatttgaaatatagttcaagatgttgactatacagatcaacttttatccaaatcgggaaaactagctgtgccgttgcatattacaggatacagtcaatgatatgtggacatgcatcaaagctttctcctgctgggtgaccatcatagccgtccaatgaccatgacatccaccacctcgcctttgtgggagctccacggtactgttctgtctttggaggtagcatccacaatccattggcactgcgcatgctcatcagacggctgctcatttgattacctgtactctgtgcccaaggtagtggttcttggtgatgccaagttagtatacaccgatggtattctggacgaggatcaagttttacatcacatgataaccttgctttgatgatggttggccgaggatccaagatgccctgcattttcctcagtgcaggcacaacaaagagattgtaggtgaccacagccgatacaggatttcccggtag

SEQ ID NO: 317682 - DNA, 587 bp, Homo Sapiens
  misc_feature (541)..(541): n is a, c, g, or t
attttctttattcattcatctgttgatggaaacttagtttgcttccaaatcttggctattgtgaatagtgctgcaatgaacataggagtgcagatacctctttgatgtactgatttcctttctttaggttatatacccagcagtgtgattgctggatcatgtgatagctctatttttagtttttaaggaacctccaaatggttttctattgtggttgtactaatttacattcctaccaacagtgtatgaggttttctttttctccacatccttgccagcctttgttattacctgtcttttgggtttttctgatgatgggtgatgttggggaaagggaacattttgagaatgaggaatactgatgaaagagccagaagttcattttaggcactccgagatgtcagccgagcagttgtcttaagtagctccctgcccagtagtagccttcacggttaggcctgcaggtcaaaggagcagaatttaaccatctccccagggtgcttacatgcacgatctggctgcaggaccttcttttcagtgnggctttcaaggtagaaatctgcctctttctttgactgctgcactat

SEQ ID NO: 317683 - DNA, 612 bp, Homo Sapiens
ttacctctcattgtttctggggatcagcattcagacagggtagggtccagataagttgtttccatgatccacaatgttcaggcatctcagtaagaaaattcaaaggctgaaggctgcactcacttacaggctcattcattcatatgtctggctgttgatgcttgctcttggctgggggcctagcacggaccatcaagtcaaacccccgcacatgtgcctggtcttccttacacatgacacctgggctctaagagccagacagaagctgtattgccttctacagtctaacctgggaatccacgtggcatcacttctaccacattctattggtcaaggcagctacagagacttgccccatttcaagggaagggaacagaaacaatcctccatcgccacccttaaggtgatgtgtcaatttcttattgtaaaacaaacctgtgagatgggaaatacattgatgtggctatcttggggaaatattttctgccacagtcaccttcaataattcccaggtttcctgccattctaactatattccctcagtgagttcagaatatcctacacctaacccccctcttagatggtagctatgctcagtgagttccagatggt

SEQ ID NO: 317684 - DNA, 1159 bp, Homo Sapiens
ctttttggagttacttaagagttttacttattgctgttcttaaattccttcccctaccacttcctcttgggcttttttatttctcttgttgatcaatctcttttttgtgatacttttcattgaatcatctcgattcctttatcccatcctttactgactcaaactccttatgctgaacttttcaatccaaaatttctattgttttaggactctgggaagcagttgataaaaagataacacgagctactgatatggtcaggagatgttttctaaacaaattgtagaaatataaacatgaaatgtggcaatgatccctttaattagatcattgagcaataaaggatatgaaccattagtataaatattcaattcagtctttccggattgtgttgttagataagaatacatccaaaaagggccacagatcgagggagaaaccaaggaggggtgaggtcatggttgagtgtaaattggttctgtcatgtggaggccggaggtgagggactgtggtgggacatcatctggtgccagccccatcctgtacctcagataggtctccgtgaaaaggagggacatcagtgcaagcagtggggctaaagaccagcacagcaacagagactagaaccttggatgcaagtattttgggcaaagaggaataattagtaatctttggtataatttaaggcacatcaaaaaaatcccctattctcaaatatctgacctacaccttgaaattcctaccattggacattcttttgatttaagcctttaactaacaaatgccaatatcctactgctcaaatattgacattctatctgggaggggctgctcattatcatccaccaaatgcccatagatctctaggacagggtaggttttgatgaaaaagcagcgcatgaatattataatgggggtcttagacaagatgatgatggtgaggaactgaggagtaaaactataggactataataaagaagaaattcagagcaccaaaacaaaacattaaggaatgctaatttcctccttaactcccaacttttcctagtcaggccccggctcataggtcaaggagctgacaggacggtgggtacctcaaagcgaggctgagctcataaggccacagggaagggtgcaactcaaatttgggaggttctgttc

SEQ ID NO: 317685 - DNA, 718 bp, Homo Sapiens
ggaaaagagaaagtaaagatattcctaattcagagccagaggtacacagcagctgttggcggtgaggccacctggagatttatcaaggacgcgccaccccaccaggagcccctcttgatcaccaagtgctttatcttccaagtagtaagtcaatcaagaggtttctaaagataatccatttttgataaattagaatggaaacagtgtctctataatatacatacaaaagtgtccagttttcaactgtgagcaacacaggtgcacagaccaggttttcagcgcaggaacccgacggcaggcatgctgatgccccccatttcccgccactcccgacagctccccgggcatggccccgattcccgccactcccgacagctccccgggcatggccccgattcccgccactcccgacagctccccgggcatagcccgtgattgcctggcctcagccctcggccccctgcgtgggcggctcctccccggcctctggtttcttgtgcctgcgcatgtgcctgtacttgtccacgtacgccttcaccaggttggccaccttcacggggttgatctctccactcttgctgtggcagatcttctgcacggccttgcgcaggatgacctcacccctccttggtttctccctcgatctgtggccctttttggatgtattcttatctaacaacacaatccggaaagactgaattgaatatttatactaatg

SEQ ID NO: 317686 - DNA, 1795 bp, Homo Sapiens
  misc_feature (1615)..(1615): n is a, c, g, or t
gggctcctcctcttgcgctgtcctgttaatggcgggcagtagccgctgaggggattgcagataaccgcttcccgcacggggaaagtctaccctgcctgccactttctgctcgccgtcagcgccggagctcgccagcatgtctgtggtaccgcccaatcgctcgcagaccggctggccccggggggtcactcagttcggcaacaagtacatccagcagacgaagcccctcaccctggagcgcaccatcaacctgtaccctcttaccaattatacttttggtacaaaagagcccctctacgagaaggacagctctgttgcagccagatttcagcgcatgagggaagaatttgataaaattggaatgaggaggactgtagaaggggttctgattgtacatgagcaccggctaccccatgtgttactgctgcagctgggaacaactttcttcaaactacctggtggtgaacttaacccaggagaagatgaagttgaaggactacaacgcttaatgacagagatactgggtcgtcaggatggagttttggcaagactgggtcattgacgattgcattggtaactggtggagacccaaattttgaccctccctcagtatcccatatattcctgcacatattacaaagcctaaggaacataagaagttgtttctggttcagcttcaagaaaaagccttgtttgcagtccctaaaaattacaagctggtagctgcaccattgtttgaattgtatgacaatgcaccaggatatggacccatcatttctagtctccctcagctgttgagcaggttcaattttatttacaactgaattcctgcgcagtggagaagtaaaagaagccgcttgtctctgtgagcacagctatatacagtgtagaataaatgtggtagaaaaagtttttttggttttatctctttttgcgatccctaaattgccacttttctattgtttgaatagtaaaattaatatgaagaactagatagtggtgtaaacaaatgtgataatgtttatttactttcggttctgctcatacttttttgtacaacattaaagaaaatggactttttttattttaatttctcattaaacttctaaaattcttataggtgaggatcatttttccccccaccttaggatggtgaatgttgcaacacaatgacaggtttaagtcagtcaagtttattggacccttgctttgataccattcttgggcacatactccaagattgtattagatttttgtgatgaagagcttccattacttctgaaaactatatttatctgagtgagtccaaggtgcaactcctaaatgaattgtgttgcagagaactcccagtataattcactgaccagtacattttataaccatccaggccttggtttgcaagcaacagaccttaaacatacaggaaactattaaaattggctcgatcagtagtcataggaattggtataagaagagactcatttagagctcagagttttcttcacataatgggggtattaattatttgtgctgttgcgaaattatgtgtcttattcttaaagccatggtaaaaatagggatctgtgaaggaaatttctaaaattggatgtattangttttgaactctgagattgcacaaatattcaattaacttgaagttgtgtacatagagaagaaaatttggttttagcaaatgacagagccttcaaaaatattttttgggaataatgggtgaataaaccgaaaactggggggcaaagccagaaggcacaggttttttctcaagttaaggaag

SEQ ID NO: 317687 - DNA, 694 bp, Homo Sapiens
  misc_feature (56)..(56): n is a, c, g, or t
  misc_feature (167)..(167): n is a, c, g, or t
  misc_feature (173)..(173): n is a, c, g, or t
  misc_feature (181)..(181): n is a, c, g, or t
  misc_feature (340)..(493): n is a, c, g, or t
cttgagagtatcctttgaaatttttaattgtgataaagtaccatttaccctttttnttcttctgttgctcatgctttatggtgtcatatctaagaatccattactgaattcaaggtcatgaagatttctcccatgttttcttctacatgtttcatagttttaactcntacatntaggtctntgaaccatgttatagttaatttttatatatggtctgaggtagaggtctagtttcactcttttggatacggatatccagatatccttgcaccatgtgcttaagagactcttcttttctcattgaatggttttagcaccctttcaaatattaataggacannnnnnnnnnnnnnnnnnnnnnnnnnnnnnnnnnnnnnnnnnnnnnnnnnnnnnnnnnnnnnnnnnnnnnnnnnnnnnnnnnnnnnnnnnnnnnnnnnnnnnnnnnnnnnnnnnnnnnnnnnnnnnnnnnnnnnnnnnnnnnnnnnnnnnnnnngagatagttacggctcttcagttgtcctgcaattcaataataatttcaatatcagattttccattaaaaaaagctgctgagatttttacagagattccattgactctataaagtgctttgagtaatactgccatcttaacaatattaagtattttaagatgaatagtgggatgccttttcattatgtagggcttctttaat

SEQ ID NO: 317688 - DNA, 1073 bp, Homo Sapiens
  misc_feature (95)..(95): n is a, c, g, or t
ggcctttttgcccatgaacccgttcttggccccggaaagctaggaatcctccattatagcttttccccgagggttcccactttgaggccttttcnccttttccccccaaaccccaaaaccttcggggttttaataccgtcgtttagcactgggccccttccctcattttgttggcctttgggctcctgccttcttgcgctgtgccagaggtttctgatctccctcaagggaaatccagtttatcagagaagcctttctgatatttcttaatagcattcatcatatgggctttctcctgctgcctcttctgaagaacctccgtttgcaccttcttcccgtatttcctaagtgctcgcagttgcttagctttttcagacctctccatggcagcctgtttagtctgcagcttctgtcgaatcttctgcatctgcagatcagatttggccatttccgcaaaataatcagtgggtcgcttcgtagggactttgagctgatggaggcggggtaagactgcaagcactgcggcctgggcttggcgatagaaactcatctctcgctggaagtcgtcttctggatcaacagctttctggtccttgttctgaggtgctggcgcctcagatccaccgatctccggtaccggacccagtgtcacatcgagcctttcaacccattccagatcccgcttgaattctgccaaacattgcttcaggccattcacgtcgttcacggccttcttcggcccctctagcacgacattgaggcctggcttcagaagccctcgggaaaacgcatcctgcaactctctgtctgtgacaagggattcatcggattccgactccgaatccgagagcgggggagtgtccatctcgccgcacgcacgtcccacacctacaggaagaaacggggtatcccgagacccaagcggctagcagagggcggccctggccgctgctgcctgccttcagccccctactcccacgccgtggctccacgtgccaccctcgtgccgaattcgccacccaggctcgctctcagagcctaatttggggggggccgggccgcgccgcgcggca

SEQ ID NO: 317689 - DNA, 1366 bp, Homo Sapiens
tcagttaaatcattatttatcataaaatgaaggcaatttgaactcaatgtctaaattatcaatagatagcaatggaaagtaacttctcaatcttttagtctagactatttaaccaaaggtatgtgttcctttaataatttttctttagtttattgaaagaaatgtttacaacatgacaccaacagaagggatcaaagtgtgtcgtgaaattgcgagtcttcattcctttttcttggttctttgtattcaaagatgctatttagtgtgttctgttcttcatcttctctcttgttcgttttccaggtctcttatttgaccctttcttgccaggcctcttgaggcctctgccatgagctgtcttggcccggaagctagatacatcatcatagctctcccgagtgttccactttgagcctttcttctttccaccaaaaccaaacttctggtttttataccgtcgtttagcactgggccccttcctcatctgctggcctttggctcctgccttcttgcgctgtgccagaggtttctgatctccctcaaggaaatccagtttatcagagaagcctttctgatatttcttaatagcattcatcatatgggctttctcctgctgcctcttctgaagaacctccgtttgcaccttcttcccgtatttcctaagtgctcgcagttgcttagctttttcagacctctccatggcagcctgtttagtctgcagcttctgtcgaatcttctgcatctgcagatcagatttggccatttccgcaaaataatcagtgggtcgcttcgtagggactttgagctgatggaggcggggtaagactgcaagcactgcggcctgggcttggcgatagaaactcatctctcgctggaagtcgtcttctggatcaacagctttctggtccttgttctgaggtgctggcgcctcagatccaccgatctccggtaccggacccagtgtcacatcgagcctttcaacccattccagatcccgcttgaattctgccaaacattgcttcaggccattcacgtcgttcacggccttcttcggcccctctagcacgacattgaggcctggcttcagaagccctcgggaaaacgcatcctgcaactctctgtctgtgacaagggattcatcggattccgactccgaatccgagagcgggggagtgtccatctcgccgcacgcacgtcccacacctacaggaagaaacggggtatcccgagacccaagcggctagcagagggcggccctggccgctgctgcctgccttcagccccctactcccacgccgtggctccacgtgccaccgaatcgctccagcgccagcaactcacagctactgctcaacttttgattccc

SEQ ID NO: 317690 - DNA, 772 bp, Homo Sapiens
  misc_feature (701)..(732): n is a, c, g, or t
tttagtttccacaaaaatatatttaataagcttgttatataaaatcaaacacttaacattgtcaacatttcttcagttattcaaactcactgatatctaactgggagtagtttgtattctggaagacttcctaagctaaaagtatatttacatatttacaacacatgtaaatataactgaagaactacttcaaataatgttgaaattcacagaattctagagatttatagttatagtttagaagtatcaccaatttgtttgcaatcaaatgtacagcactaattatgaaaaatgttttaactattaaaccaaaaggggagaaaaactgggagggaaatatatggtgttaaagtcctgtgataaatacttagaaaattaaaaagtaataatatacattcgatttaatgaccaaaaattttttttgaatccctggttgtcatttttggtagcttaacccagtctgtcagaaggcagtatgctatgctgtcaggaactctccactgcctcgtcagagccatgctaaatgcagtaacagcactggctgaaaataaggaagatgatgttagcacctttgagtttcacgcaccttcccaatacaggctaagtattcctgcttatatgtattcctgaaagattaaaaggcccgtcacccattcataccaaaaaatactttctcaacatgctttaaaaggattccttannnnnnnnnnnnnnnnnnnnnnnnnnnnnnnngagacaaggtctggctctctctctctcaggctgcagtgca

SEQ ID NO: 317691 - DNA, 1516 bp, Homo Sapiens
  misc_feature (339)..(339): n is a, c, g, or t
  misc_feature (812)..(821): n is a, c, g, or t
aattgggtacgggccctcacagtaaataaatctgtatgttattgaacacttaaaaaaatctaaattagtacatatctgcaaatttataaatggcaatttcaatggaaaacaaattttataagtgccacagagcagacaacaaagatgtctctttaaacaatgaccaaattcaaatgtataaggaaatttcagctcattttttcttcatttcctaggggaacgcaattgttttcatgctaaagatggcgcttccttgaactaggggacacgtcaggcatgggccaccacgtggaggagggagtctaacagcatctgcccacatcccagccgcctgtgacnggaatcttccatacacatggctcccagatgagcaccaaagggagaccacagcagatacgattctgtggacttgagaaccaaatctatacaaatattttcaactctaagtccccaagagagcattaacatttttgtctatgaaataatttttccagcaatgaatttttttgatattccacgagctgggagggaacaagcataccttgaagacatatgtattggcatcaaatgtcacataaacacacaacagctgggaacacacatgctatgtatgtcaccatgtgatcacaaccacagcacatgtgaagtgctacaattactcctcagagcggtggaatggcagaggagcttgcatgaaaaatcagaacatacccgtacaccaaagcaattcaaaaggaccaagtcaccctcagcaaaatgacattaatgggaatgacttaaccaacaggtttaaatttttcatactaaactcnnnnnnnnnnggtgtgctattgtccatccctcaatcatcagtactaatttaaaaatgtgtgttaagtggagcagagaatcctaatctaattccatatttagagaatctcttggtaatataaaaaaggcacatatcaatacctagtgatttgaaaaattacatagcatatgctattacatatttttcgtgtagtcagttgtattaacatataactgtgctactgttagacttgaaatatttatacattggcctacataaagtacctggacttttggaaacttaaatacaaaaacagtttgacagctaataaaaatattctacctaaagcagagtatataattagtggtggacttcatgggtccaacaggcactgtctgctggtggcctctcattgacggggactgctgcaggattgcgtcccccctgagtagacacacctggctatgacggtgacccatgggtaagtcctcctgggagctaccagtgcagcccctgatgcgccctgcctgagactgcgggcggaggatgacaactgtgcggctttaaggttctggatgtaactgaggagatcaatagattgagagagaactgttaatattttgcaggcactttcacctccacactctcagtgagctgtatccagacacttccaggagtgctgagtcaaatctgcatacttctttcaatttcagggtttatcaggcc

SEQ ID NO: 317692 - DNA, 804 bp, Homo Sapiens
  misc_feature (271)..(271): n is a, c, g, or t
  misc_feature (330)..(330): n is a, c, g, or t
aaacctcctgcgggcttcttccaaattttgtcctaggtttatattcattgaaatctttgccattctgaaagtcaaaaattacttttaatatttagctcaacttctctttttgccttgcaatcctgaacatattttctcatggtattcgccgtttgaacctctcatgtggactgcgtgtccacccacatctgccatcttatacagggggcccacttatttaatgtcaattcactagaactctgtgtatattacagagattatgaatcgtatntaaaagatggcacatgtggaggaatagttgtctaagttgtagaaaaccacatcagctanaatgtcttggtgggagttagtgtgatcatagcagagagggagatgggaactagattttcagaagcagagagctggaaactcacgatggaaaaagctggaggggtaggttaggttcaggttagagagccactgaatgctaggtttggaggcttgttttgggataagaaaatagatacataagatcaagcaatttgcccaaagccatctggggagctttggaaagccttgaaaagcagagaaacttaattttgccggagtagttattgagttctcaattaatttaaatggtgaggaactgctcacctaaagccttgaaatgccgatgaatgcttataagaaaatcctgccaatatcctgcttctaacatatcaaccttggtgggctccagccagccctacacttgattcccataagataccccaaaagataaatgagtatgttaattaattccattcatagccttccccactaatc

SEQ ID NO: 317693 - DNA, 1653 bp, Homo Sapiens
gggagaggcgtgtaggtcaggagcaggaggaagcccaacgctggactgtaccagatcatctaaaactggcaattccaggcacagaaaaccagttcttcagaagcagaagggtggtcagccagggggtgaaagggacaggggtctcgcagccagtttccaacatggctagatccatcagaaactgaagccgtggagaacgctctcggggcctttgccacttcttggagtagaagccgacagagagctgtttggaaacttctccttcacacaccagttgaagactaggctttggaggttttcaaagcagacggtgcttggatgggcagggagaagtaacattctgcaaatcgccgtcagaggtcctgaggacacagacctacctggcttgcattccccttgctgaatggcgtgtgctgcagctgcccactgagggctcttttccctgggattctggacttcagagtaggacagcaggctgggaagatgctgagttccatcaagtgcgtgttggtgggcgactctgctgtggggaaaacctctctgttggtgcgcttcacctccgagaccttcccggaggcctacaagcccacagtgtacgagaacacaggggtggacgtcttcttggatggcatccagatcagcctgggcctctgggacacagccggcaatgacgccttcagaagcatccggcccctgtcctaccagcaggcagacgtggtgctgatgtgctactctgtggccaaccataactcattcctgaacttgaagaacaagtggattggtgaaattaggagcaacttgccctgtacccctgtgctggtggtggccacccagactgaccagcgggagatggggccccacagggcctcctgcgtcaatgccatggaagggaagaaactggcccaggatgtcagaggcaagggctacctggagtgctcagcccttagcaatcggggagtacagcaggtgtttgagtgcgccgtccgaactgccgtcaaccaggccaggagacgaaacagaaggaggctcttctccatcaatgagtgcaagatcttctaaaccccaagagacttcacacaacacttatgtatgcaccccaaagactaatggggagagggagggccgggaagccaggaaagcttggtgttttctctgggtacaccccaagcagcgtctccttttggatacagttattgatgaggcttggccactggatgttttcactaactacactctacaagtgaactccttgcccaggccagttagaaaatcccttggggaactgtgatgaatattccatctttgattaaaaaagtgaaatagtctccataattttggacgatgaagtgagtttttcaaagaattccatatttaaagacacattttatttaactaataacaaaatgtattgcttttgtatatatttagttttcacacttggaaaatcttttcctacatcctcgaaaacataaactcctctgtgagtgaaatggcttgtacgaagctctgccatatgtttgtagtgttattattttcacctcaagtagaaagtctgttgaaaccactttggtgctggatttaaatgggtaatcaaatttaaaaatgaccataaatgaatctttgcaatttgttttctacttacctgttattcac

SEQ ID NO: 317694 - DNA, 589 bp, Homo Sapiens
aaaatagctgtatcagtcatttctaaaacgcttctgatctcactctttcttaacagctttctaaagaacgcgaacgtcttcaagcaatgatgacccacttgcacatgcgaccctcagagcccaaaccatctcccaaacctaaattgccccaaactatgaattttataaaaatgcagatgtcagacctccatttacttatgcaactctcataaggcaggctatcatggagtcatctgacaggcagttaacacttaatgaaatttacagctggtttacacggacatttgcttacttcaggcgtaatgcagcaacttggaagaatgcagtacgtcataatcttagcctgcacaagtgttttgttcgagtagaaaatgttaaaggagcagtatggactgtggatgaagtagaataccagaagcgaaggtcacaaaagataacaggaagtccaaccttagtaactgccttggcagagagcagtttacctttgctaagtaatcctggactgataaataatgcatccagtggcctactgcaggccgtccacgaagacctcaatggttctctggatcacattgacagcaatggaaac

SEQ ID NO: 317695 - DNA, 912 bp, Homo Sapiens
  misc_feature (154)..(214): n is a, c, g, or t
tttcacagttgacttcaccacaggcccaggtcttgtattgaggacaaggaaatactgccccataatgctgttgagaatatttaagagcagtcaggaaaccctttgtagcttggctttattgcagcaagtgtgtatgtgctatttatactggccnnnnnnnnnnnnnnnnnnnnnnnnnnnnnnnnnnnnnnnnnnnnnnnnnnnnnnnnnnnnngttatattgcagcaaagaggaggatagacatcataatattcattataaatacaaaaagaaaaatgaggagaaggagggagaggttggggtaagtagcaaagagaaaattcaaataggatttgactatttgagttaagccaccagagcccgggtgctccaggtgagctcagcctttcagccatccctggcaaggcagcagacacacaggatgagctatcttggggtctccagaccagttcatccagcagttactaaatgacctctgtggctgacgtgtaaaatggacaaattgcccagccacactcttactggaattcccccgtctgggagcccatgcactttccaaaagattcccatgatagttatgggagccacaaggaaattaaccaagctagaatgcccagtctcttctctatgcacacgaagagcatcttatgccctcaaatataaaggctcccaacagcacgcccttatgttatttcccaaatatacgtatctgaaatctatacttggtgtggctagccgaattgcctattcatgccatcggcccaggggaagcatactaccccttccacagaatttctatgcccatcctctcctaacgaatcgcaaggaacacattgcatagttacgcctatcgacgcattgcagagtaaccccatccgttcgctactctaggataatctctacgtaccact

SEQ ID NO: 317696 - DNA, 584 bp, Homo Sapiens
agatttctattaatttatttaaggcaattaacatattagttctcaggccaaaggatttgtaaaacattacaccaaaaggagaaaaacaagcggtcatgaaacagccacgcaagcgcacgtcagcccttgttgcctgggcgtacaactcttccccaggaagcctgggaagaggcaggtcctgggagcaagatcgtccatcatggagtcaccaggccacctggagccatgccgggggtggcatggacacgacagtgaggtctgcactggctacagcagatctgaggcacggagggagctgcacagccatgggcagggctgagcacagcacccttgaaataagttaaataacaaagccctaaaatcactagtaacagcataactgccacctcccccagaggccggcagccgccaaaatgtagtgcttggagttaaaggggtgaccccactcttaactacccacaaggaggactacaaagagttgtcagttattgctttaaggaccaaaggtctctaggtaggatttataagggctctaagcaggactgtcagctctgaggctccccctccatgctcttcaaagcctg

SEQ ID NO: 317697 - DNA, 1414 bp, Homo Sapiens
ggaagggagctgcaacagccatgggccagggttgagcacagccacccttggaaataagttaaataaacaaagccgtcctaaaaattcgtaggtaacagcataactgcccaccttccccccagaagggccggcagccgccaaaaatgtagtgcttggagttaaagggggtgaccccacttcttaaactacccacaagggaggactacaaagagttgtcagttattgctttaaggaacaaaggtctctaggtaggatttatcttctgctaaggcattaaggtaaactgagtccccagtgaactttcaagtctttttaagggctctaagcaggactgtcagctctgaggctccccctccatgctcttcaaagcctgggtgggtgtcagggtgtctggcagagtgggagtggaggctggccagctggctgggccaccccacccgggaggagggggcagtgttcttcccagtcgcagtctccagtgatgagcatcccctgttggggccttcggtggctctcctcagcggctaatgcagttctggacatccacaaagcctaggcgttgcctgcgtttccgctgctccgtcatctgctccttgagctcgttgagctgggcagtgaggtgggacaccagcttcatggtggagttgagcttgtcctggagaatccgaatctcattctgctccccctcgccctcattgctgacaagggacatggcccgcatccgggggaaccagtccaggttcttgttcttgatcatctgggccacgtagctctcagggcccgtgtagtcggtcttgttcttcacgcggaccagcacaatgaagtacaagtagttccacatgttgtgctccagcttgatgtgttcctcaaatgacactgtcttgttatcaaacttgtccctctccagaccacagatgaagcatgtcgtcttaagaatctcctccttcttctgcttctcactacgcaggtcagcgaaggtgtcgatgattaccccaaagatgaggttcagcacaatgatgatgacgatgaagaagaacaggaggtcatagaccactcgggctgggaagagagactcatctttggagggcttgcggagaatgtcgcccacgccaccaccgttgcgtagcccatggttcatgacagtgacgatgcacatcaacagagtgtcacaggcccgctctgtgctgtccagctccctgtcctcttccaggacctcaggcaccgagagccctgagacacagtccatcttgtccccactgcaggtgtccacaaatgcagcagctccatgtggcatccccagggggctggctgtggagtggttgttgggcagccggtcgacctcgagaatgaagtcatccttgaggaagaggaagccgacgatgagaagagatcccggaatccggccggtccagcc

SEQ ID NO: 317698 - DNA, 334 bp, Homo Sapiens
ataagtaactcagttgtgcacaagcaagctttaactccccctaccccatcccatgaaaaagaaatggttctaagaggctgacctaaacttattaaaagggaatggacagattacaagaaatgaataaattacaagatgatacagtgagaccaatgattaaggaaataagagcggacactaaagtgcctttgggaaagacagctattgaaatgactacaaaagttttaccataaaattcaggacctatacctgaaaatcaccatcctgtattgtaagtatataaataattcactttcctatcagacccaagagagcactctagttcccattttcc

SEQ ID NO: 317699 - DNA, 415 bp, Homo Sapiens
agagctcaggcatttgtgaagttttcgtttccctgggtagggaagctagaggccgcggggcactggcatttgagaagctgtaggctgcagcttccatcctgtctgagctgcttgctgtgcagaagccaggctgagcgtgtgagcttcatttatttttctctgcaaggggctgctgaaccatgatgggggcacaaagtgggcgaagggcgggaagataagtggtgtacacccaggaaggtggggactgtgcaggcttcagagtcacagatgtgggtttgacctttgactctgtcagtgctttcttttgtgtcagtggcagggccttggattcttccttgtgaaactggagcagtcattttaggcagagctctttccagtgtaagggacagagaccccttggagccagacaaagttg

SEQ ID NO: 317700 - DNA, 432 bp, Homo Sapiens
atcttaactcctttaaaagacgactctgggaaatccagtgtttgtatgtaaaaataaaaggtaagttaattctagattgaggggcagaggctatttcttaatctccaatctccttgggaagggaaagtgttaggaggcagtaatggagtataaaggtggggatggcaaataagagaaagatttaatgtgacaacaactgttttgtccctcttcttaagtaaataattattggaataattagtgtaacatcacatagtaatgtgtattttgtcttgactaagttgtgtaaaggaatgtctttttaattcagcttttcttttctccatgctagtgttatcaggttttggtatttatttacttacagcatatgttatgaagctggtttgaaaattggttttagatatatctgcgaagtttactactttgactgtg

SEQ ID NO: 317701 - DNA, 148 bp, Homo Sapiens
agttcctataggggctcaatatcttatcattcgtgttcttttccaaactacacatcactgtatgactcaaccagtagcagttatattggcccttggtttttattcagtttaactactgtgttccaagataaatgagctaataagcttt

SEQ ID NO: 317702 - DNA, 419 bp, Homo Sapiens
gtcatttgttggctatactcggaaagaaatctcacaggcatactaaagagagtgcagatgagttttcccttctgctggtggcaactcttcttaccgtatccttttaggtgtgtagcgtcaatcactctgctccatcctggattcatcagacaatcgagaaaactcattagtttagatgaccaatctttatttagtaaaaggcaaaaagcgaagcgcaaggaagccaagtccaaactaaatttgccaatttcattttccttttaaccaatttactcggttaataggaaaatctgtggccatttgtactccagttgtcttcttgtaagaaaatgatagtgtttggttatgaatctaaattagtcaaattataatctaaactgtcttaaaatatcttcattatattgcaagtatgatgtttc

SEQ ID NO: 317703 - DNA, 373 bp, Homo Sapiens
tgtttcataattactttagctcaagtgattgcatttaaataatgtttgatgtgtaatgtaatatttctaaatggcttattagttcttttacagacaagccttataatgtacttagtaatttttattaatagaatcctatatgttcagacactcaagggcaagccatttcttcggtgattgccactaatttgataaatttaaatgatgagccaatatgggaaggaatacaaacatacagctcaacaagataacctgtataaggtgaacctagatctgaatgtggtcaagtccaatttcctcaagcacattcacaaaattagttacatttaagaatgataagactaacatttcattattttcacacagttatttc

SEQ ID NO: 317704 - DNA, 1224 bp, Homo Sapiens
tctaactacatcgccactctctcacttcctgtttattccacttatttctagtttccatatctcccccacaagagttctcccattcccagacatttcccacacacttttaacccggccatcctattttttatccgcccccataggcccccttgaaccagcaacctggaaccctaacctggccccctcggggaaacttctagaccgcccccctttgttttttatatttagtggtataactatatttattgtgcctgagaggcaaggtgagggaaaaatctcaacagaagcaagtttggggaaaatctggagtccccagtaaaaagcaggaaggtctctgctgtactcatcacagaatgggagagagggctctcaatagatcattccctttgtttctcccctgggcttcttgagcttctcgaagttcttcaggatgatgtcatataacacagcataagcattgcggatctccatgaccatcagccggatgtcccggtactctgcctcatccagctcgtgcaccagctgccgataatcacccacatggggctgcttggctgctttagtcactgcatcaccacgctcagagaaatacttagagatttgagtgtggaagccttctagcttggtgtggaggctggtcatcagctcaaacaccttctcctggacagccactccaaaattgttaccatcctcaatccgaggtatctgcagctgcaaccaggtggtgaccaggttgagctgctcaatgacatccttgatctcaggcttcaagcgctgcagaaggaccacgatcttttcattgcagttcactgggccacagggaggacctttgtcttcatcctcccccttcttcttttcatccttgtcttccttctcctgctgtttcttccgctcctctttctctttctccttgactggatcaggcactgggatgtccaatggggccttcagattgctcaagttggcttcattgagagctggctcctttaaaaatgcatccagctcagaaatcttcttggggaaatagctcccgagcaggttctctgtcttggtacagaggtcttcacgaaacacatccaccttggcttgggcctcgggctggaccctgagcatggccatgaccgggacggggggcctagcgccgcacaaggagtggagtgggcaccgcgaagggaaagcgaaagcggtagggcgctcgcacccagctccgccttcctgggtagt

SEQ ID NO: 317705 - DNA, 826 bp, Homo Sapiens
agtttttcttccccctgggggctttcttggagctttctttcgaaagttcctttcagggattgatgttcatattaaccacagccataaggcatttgcggatctcccatgaaccatcaagccgggatttccccgttacttctgcctcatccaggctcgtgcacccagctgcccgataatcaccccacatggggctgcttggctgctttagtcactgcatcaccacgctcagagaaatacttagagatttgagtgtggaagccttctagcttggtgtggaggctggtcatcagctcaaacaccttctcctggacagccactccaaaattgttaccatcctcaatccgaggtatctgcagctgcaaccaggtggtgaccaggttgagctgctcaatgacatccttgatctcaggcttcaagcgctgcagaaggaccacgatcttttcattgcagttcactgggccacagggaggacctttgtcttcatcctcccccttcttcttttcatccttgtcttccttctcctgctgtttcttccgctcctctttctctttctccttgactggatcaggcactgggatgtccaatggggccttcagattgctcaagttggcttcattgagagctggctcctttaaaaatgcatccagctcagaaatcttcttggggaaatagctcccgagcaggttctctgtcttggtacagaggtcttcacgaaacacatccaccttggcttgggcctcgggctggaccctgagcatggccatgaccgggacggggggcctagcgccgcacaaggagtggagtgggcaccgcgaagggaaagccc

SEQ ID NO: 317706 - DNA, 625 bp, Homo Sapiens
aagcttctctcataatagcaagtagcacgcatcatctgtgcccagatttgcattaattaccatagtttatttttgtgcatgccactcaagggccagatcctatttttagttagcctcagttgtattctgctcagcctttgcagcttcgtaggacttagtacaagaagtcacatgccggtggaaactgtccctccacataaacctctttgcacagatattacactcatacggctttatgcctgtgtgaattttcatgtggcccacgagatggtgcttcattttgaatttcttaccgcagaccccacagcggtaaggccgaagaccgaggtgcatgctcatgtgccgatctctctgactcttgtgagtgaaccttttcccacactgacaaggatacagcttgtcggtggctgagaatcctaagtgggaagcttcttctttaatccctgttaccatttcaatattctcactgtaacttgctgcagagggcagcttcctgtctgtgcccaattagattcccatctgacctctctccggaaaactcttccatggaagagccatagatatccacgtgctcatcataagtgctttcatcagcctgttcatcaaactcagcttccactctcct

SEQ ID NO: 317707 - DNA, 490 bp, Homo Sapiens
  misc_feature (51)..(69): n is a, c, g, or t
gaagcagttctctttataaagtgttattttgatagtttgtggattctaaannnnnnnnnnnnnnnnnnnaacaccatataagtcaaatatgtatttaacaaagcaatatgtattcattcactttcaagatttgtgtttggtgtcaaaataacatgaaaaggtagatggagttgcttctgttgaattaactctgccaccaatatgtatcttcatacacgtttggaaatgtttcctgcagcattaggtatgacttggtctgagtactggttccggtgctaaaatgaacaaagaatttgtacttaatggcatggactctggagaatctatgcgaatcaacctttctaccttaatatctccccaaaaatgtatagtgccttgtttttatgtacagtttatatacagaaaagttgctctgcatttttgatgatggtttggaacattatctacaattttactctcaaatagtcaaaataaaaacatctcaatttct

SEQ ID NO: 317708 - DNA, 413 bp, Homo Sapiens
agagagtggtatattttttggtccttgggcttctccacatacaggggagactcctgttcttgaaaaggagggctttccatgtttgcgtcttcatgactttaactgtcttttttaaaaattggcgtacacataattatacatatttattgggaacatagtgatattttgatacatgtaatgtatggtgatcagatcagagtgattcgcatacccatcatctctaacatttatcatttctttgtgttgggaactttctgagagagtgtatgctgtgggagataagtccgtcaccttttcctcctgatgtaaccagagtggctgcagccaggtcctcagaaactcagagagtacccagtgggaaatccctaagaccaaagtcagcatgtggctctagccatgggctgacaccatac

SEQ ID NO: 317709 - DNA, 369 bp, Homo Sapiens
agtagttatcactttaatagagttgtagtttgggtgatgaaaaacttctggaaatagaaagtggtggtggttacacaatattgtgagaattttaaccaacctttggattttctcatgggagaccattgtgtgaaatgacttaattaggttttcacagctctaaccattaccttaaagcaagacttagaggacttttgtaaatccctcttttaaaatttataaatctggatacattcaactcatacctcaatgagctaatgcacctaacaaagggcttctataactcagtaagaggaaggatcaactatctaatagaaaagtaagcatatatgaaagagatcatagatttgagaggtgggggctcgtgcc

SEQ ID NO: 317710 - DNA, 758 bp, Homo Sapiens
attttcctgagaaccctcgccatgtgctagtaattggaaaggcagctctaaatgtgaatcagcctaattgatcagcttattgtctagtgaaactcgttaatttgtagtgtgtggagaagaactgaaatcatacttcttaagggtatgattaagtaatgagtaactggaaacttcagcgggttatataagcttggattcctttttctctcctctccccatgaagtgttagaaacacaactatattggttgcgtatagcattccaactatctcatttccaagcaagtgttagaataccacaggaaccacaagactgcgcatcaaaatatgccccattcaacatctattgagcagtcaggaaagagaacttccagatcctggaaatcagggttagtattgtgcaggtctaccaaaaatctcaatatttcagataatcacaatacatcccttacctgggaaagggctgttataatctttcacaggggacaggatggttcccttgatgaagaagttgatatgccttttcccaactccagaaagtgacaagctcacagacctttgaactagagtttagctggaaaagtatgttagtgcaaattgtcacaggacagcccttctttccacagaagctccaggtagagggtgtgtaagtagataggccatgggcactgtgggtagacacacatgaagtccaagcatttagatgtataggttgatggtggtatgttttcaggctagatgtatgtacttcatgctgtct

SEQ ID NO: 317711 - DNA, 757 bp, Homo Sapiens
ctgctacattcctatccatataccatatagtttttcattcagggatcattgattcagtgagatgatgcctattagtaaaaaagaagatacacacacccagaggttttcaaagtaattgagtatttaaattcataatttgtgtaattttgaaggaggaaaagttttgctaataaattttagattcatctcttataaacctggggtaatctctgaaccaatgagtagcttatcatgtgttatagttcaaagagcttttatattcacttctagttagatattcataagtgctccataaagtaggaagggaagcaccatttccccgggtgagaagattgaggcacagcataggagaaatagctactccctgtctttgccagtggtggacaggacatcttgtctggtaaacccatgtcattttcttgggtgcttcccaggaagccccttcagtgccacagcttgaaaagctgaccttaaggcaactaaagaaaagccagaaatcttcctgtttcttccctcttgagttagaaacaaattcttgcagaagcagtgtgaggaattatgagagaatcaaaagacgggttcttaaacaaacagagtggtgtcatcatccatctggaaagcacagagggtggaatttgtgcttgtccctgcagatgactgtgtctcagtggggttggccaggcgtgggcaggaggatgaggcaaggttttcagtagagttcagtggggtcactagggggaataatggtggcggctat

SEQ ID NO: 317712 - DNA, 394 bp, Homo Sapiens
ttttttctctctcaagatggttaatacctccagagactgttgaaaagctttaataggagaatgtatgtgaagtaccagacacacagagggacccagtaaagagcaggtgttttaacaagtgctggttattcctctcttgaaatgctgattatcccctcttgccaattcttatttttgaatcttcagagggtccctataaatataatctctagaccagcccagaggaaaattattctcccacctataaattatcagaatttgctgctccttggtatacacaccacaattgcttaggtttttaaataaatgcacagcctccacagttttactgatatagctgttattccattgcattacaacaggaatcctaccacattttaaaattattttgtcc

SEQ ID NO: 317713 - DNA, 864 bp, Homo Sapiens
  misc_feature (736)..(736): n is a, c, g, or t
  misc_feature (748)..(748): n is a, c, g, or t
ctaatacatgataaattttgtagaatataaggtgaatttgcattaaaggttcactttaatgaaggtgaaacatgagaatgagttgtgtgtgaaattcttatttgatatccagaggatagtttgcaaacctaaacttctgattgtttctgatttcagagatgcccgagtggtaaaagacatgtgaacaggaaagtctaagggatatggctttgtctcctttttcaacaaatgggatgctgctaactgggcaacccgaaagcctcccgctccaaagagtacatatgagtcaaataccaaacagctatcatatgatgaggttgtaaatcagtctagtccaagcaactgtactgtatactgtggaggtgttacttctgggctaacagaacaactaatgcgtcagactttttcaccatttgggacaaataatgggaaattcgagtctttccagataaagggtatttcatttgttcggttcaattcccatgaaagtgcagcacatgcaattgtttctgttaatggtactaccattgaaggtcatgttgtgaaatgctattggggcaaagaaactcttgatatgataaatcccgtgcaacagaatcaaattggatatccccaaccttatggccagtggggcagttggtatggaaatgcacaacaaattggccagtatatgcctaatggttggcaagttcctggcatatgggatgtatggccaggcatgggaaccagccaaggntttaattcaggncacagtgtttctggcaccatgggatggggacccaaattttgggagttgcaaccggcttcaagggcaaaatgggcagcctgttgcccaatccggccttctgggtattccgagtgggc

SEQ ID NO: 317714 - DNA, 945 bp, Homo Sapiens
aggttcgtggccgcggtttccccaggcagctggcgctggaggcttcggcgtcacgtgctgaaactcgttttcatcttcttggtttcatcttaataccaacgtcatgtctggttctaatggttccaaagaaaattctcacaataaggctcggacgtctccttacccaggttcaaaagttgaacgaagccaggttcctaatgagaaagtgggctggcttgttgagtggcaagactataagcctgtggaatacactgcagtctctgtcttggctggacccaggtgggcagatcctcagatcagtgaaagtaatttttctcccaagtttaacgaaaaggatgggcatgttgagagaaagagcaagaatggcctgtatgagattgaaaatggaagaccgagaaatcctgcaggacggactggactggtgggccgggggcttttggggcgatggggcccaaatcacgctgcagatcccattataaccagatggaaaagggatagccgtggaaataaaatcatgcatcctgtttctgggaagcatatcttacaatttgttgcaataaaaaggaaagactgtggagaatgggcaatcccaggggggatgggggatccaggagagaagattagtgccacactgaaaagagaatttggtgaggaagctctcaactccttacagaaaaccagtgctgagaagagagaaatagaggaaaagttgcacaaactcttcagccaagaccacctagtgatatataagggatatgttgatgatcctcgaaacactgataatgcatggatggagacagaagctgtgaactaccatgacgaaacaggtgagataatggataatcttatgctataagctggagatgatgctggctcaattcatcaaacttgtggctgagaaacgagatgcacactggagcgaggactctgaagctgactgtcatg

SEQ ID NO: 317715 - DNA, 363 bp, Homo Sapiens
aggattcagggaatttttcctaattctgatttccctgtaggattgttcagatttaaataaagcctgtaaagcagaagtatgtgaccaagcttgggtcctaaagttaaatattacagaggcagataaaataagtctgaggaaaattcatgcatttatttctatctattttgcccacatagttatgctgatatttcattcacttggattcaccaccctaaaatttgtacctataatggagaatcttttttctgtatttgaacaaagtgctctgagccaattaatagtataaatatgatttcaaggatagctaagagaatatttctttctatgtatggttaatccacatgcccccttacacactcc

SEQ ID NO: 317716 - DNA, 146 bp, Homo Sapiens
agagtaagactccatcttggagaagggctccatttctcttgaagaaggtactgcccggccagatgggtggacctgatgtgctttgatatgcctgagtcaaagcctgaattagattttgtctatactctgggtctatgcaccacaac

SEQ ID NO: 317717 - DNA, 554 bp, Homo Sapiens
gagactgcatagggctcggcgtggctccggaagctcccctcgctgccctcgctgccctcctggctccccttggtggcaaactcatagtggtcgtcggctgaggaggaggaggaggagatggagtcgctggtgggcgaggtgctccgggcgttggaggacttggcactgctgtagttgtgatcctccttggggtctccgctgaccactggggagccacaagatggctcactctcagtccgcatccggcagctggtgatgccattcctcatggccgctgtcaccccaatgggagtgattggcagcggccgcacgccaggaaacagccctcggctcaggacccgcgctccattttggatcactcctggaggaacttggagaagggctccatttctcttgaagaaggtactgcccggccagatgggtggacctgatgtgctttgatatgcctgaggacaggtgggaggtgtattgaacacgtgtgggtgtgggtgataaggtgctttttcaaagcctgaattagattttgtctatactctgggtctatgcaccacaac

SEQ ID NO: 317718 - DNA, 564 bp, Homo Sapiens
  misc_feature (77)..(77): n is a, c, g, or t
ccaaacacccacacgtgttcaatacacttcccacctgtccttcaggcatatcaaaagcacatcaggtccaacccatntggcccggggcagtacctttcttcaagagaaatggagcccttctcccaagatcctgacattgatgctgccagtgccatgatgcttttgaatactccccctgagatacaagcaggttttccttcccaggagtgatcctaaaatggagcgcgggtcctgaaccgagggctgtttcctggcgtgcgccgctgccaatcactcccattggggtgacagcggccatgaggaatggcatcaccagctgccggatgcggactgagagtgagccatcttgtggctccccagtggtcagcggagaccccaaggaggatcacaactacagcagtgccaagtcctccaacgcccggagcacctcgcccaccagcgactccatctcctcctcctcctcctcagccgacgaccactatgagtttgccaccaaggggagccaggagggcagcgagggcagcgaggggagcttccggagccacgcgagccctatgcagtctc

SEQ ID NO: 317719 - DNA, 742 bp, Homo Sapiens
  misc_feature (262)..(262): n is a, c, g, or t
  misc_feature (341)..(341): n is a, c, g, or t
tcctcaatcctttctgaaagagagggtgtaaatcgaggtaattggtaagaaggcatgaccaattcctcagtaatgtccagagcccagaactcctattctgggggtagaataaaagtttccatgtctgattacccttgctcagggatgaacccatttagcccccaaattgaagcctttggatttccctatgacatgtgaattgtatttatgtaggtattctgatgaaattgcacttccctcaaaaagatgaaacttaaatganagaggatgaacctggaacatgtgcagtgtgaaaatttacacagcgaaggagctaagtctcagccatgatcagtctattntgagcttcctgttaagcaccaaagtgatggaataggacaaagaaaaattgtacccataataaatagaggatgacccctgtgaaaagtaaagatagagcccatattggattagaaaaagacttgatatttccctccacctttacctccttctaagtctatccaggagtaccaaaaatgatgaacatgggatcttaagtagtcaaaaacctgtaagattaggaaaggaagctgtaattgtttagaatctactatgtgctagggattttatgtgtactgactcatgcaatagatgagatgagagcacaatgaagaatacttttctccactttacaggccaaagaagcagaggctcagcttggctcaagtgcatatcagtaaatgacaggaataagatctcgtgc

SEQ ID NO: 317720 - DNA, 884 bp, Homo Sapiens
  misc_feature (736)..(783): n is a, c, g, or t
ttaacttacaaacaaaaataccagtaataataaacccaaacaaagaccctcagcttgctgccacgttctctatgcggtttggcggggcgggtatttacaagcctacagctgggactgaaaccccgcacgcagccgccggagtttccaaactgcgatcccttctcacccaaagaaacaaggggagtatgatccatgatcaacaacatgctaaagttaaacaagaaaatggtacaaaatagaaattattaccatacatgtccagcatgcaggattaatatttttaatgcagattttttgtatttttctatataaccgagcaggcaataaaactgatgagatttggggcgccgagcgtccctaactgaggcctgtgtctcggggctgaggagccagtgttctccgaactctgacagacaggtccgtctgtccttccttctttcgctcagcctcgcctctcgcctgccgggacgccagagtccctctcctttcctcgttgctctcttcctggcgcggactactctccgggcagcaaagcagctgtcccggcttaacgcgcaaagttcagaaagccaggagtctccagatggccttggtgacttctcgggactatgcctcgccgcccttcagcctggagagaagttactccgggacctcccaccctctcgtctctctctccggctctgctcgagtctagaaggcggcgctggcgtgcgctactctcgccttagccaaggtnnnnnnnnnnnnnnnnnnnnnnnnnnnnnnnnnnnnnnnnnnnnnnnntcctccctctcgctcaagtcacacaggtcaaggctggggccgcgacaggcacagggtccggggtagtctgggtctaggcacgtggcacagggagtccgggc

SEQ ID NO: 317721 - DNA, 488 bp, Homo Sapiens
  misc_feature (437)..(446): n is a, c, g, or t
agaaaagtcattattcccttgtatttcagaatcatgttaatgaggtagcttaactgctattcagctgcaggctcaactgagtgaaaaaggacatctagtaatggtaaactgaaggaaagactagtggaatcttgagaaagaataagagaaaaaagagaaatgttattgttttgatattacagattaagctaaccacagtacctgattcttagcaggtgcacaataattatttagtcaataattaatggagcaaatatttattaagtaacattgtatgtctgtgctgtctattgaagaatatacacaagaaacctgaggctgggtgtggtggctcacacctgtaatcccagcactttgggaggctagacagaaggagcacttgagcctaggagtaggaagaccaacctgggcaacatagggaaaccctgtctctaccnnnnnnnnnnttagccaggtgtagtggtgagcaggagggtcactctagccca

SEQ ID NO: 317722 - DNA, 1062 bp, Homo Sapiens
cggcattataaaataatatttattgtgtcctgctgaaatggagcttgtagtctcatttcttaggcacttacaaggtaaaatttatgaaccatactttattaatgggcatttacaaatgcctgaaataaaaggtgacttgtagaagggataatatatcttattgcaaacatgacacctagcttctggaatacggttaggggcatttgccactagtgagcataatttccatgttcaaatgaataatgaactaatcaaaaaacctttttttgaggaactgaggcactcagacacaaaacacaaaattaggcactcagacaaaaagcaacttattagccagttggagagagagctaagaaataccatatctatataattatcagagaatgtgataaaaagctactactctgtacttgtgtgccaaatgctgtaaaagtataaatagagggcaatatatttcgctttggacgggaggttttagaaggccgcacaagagggatattcagtctgatgcttgatgtagacagaagggagagaagggcatcccagacaacatgggcaaaggcatgggaggatttggtgggtgtgtgggcccatgataattctgtgtggctggagccttagggagcaggcaggagacagcctggaaggtctgatgggtcagattgctaaggagtgtggttccccaggaaaaacattttagtgtggaagtgaagtgataagatcctcattttagaaagattgctctttatgtaatagcaacccaggtaacacgtgataaagcaatgatctgagggagtgagcatgtagagggaaggtgtattagagaattaggccaattaagggcacatgcctgagaggagccatatagagaagttggaattgacaggacctattctctgactagatgtagaggggatctggggtgacagggagaatgaaggagccaaggatgaaaaagttttctgccttgggtagctgctgattggtgaagcagtgaagaatagcagttctgcacccagcccctggagttgaatcctggcttttctatttactaggatgagc

SEQ ID NO: 317723 - DNA, 800 bp, Homo Sapiens
tgcttttcctggcttccgtggtgtgtgcctgccagcctcatggtgggggcgggggctctcagtgacagtctgcaggagtttagcaacacccaggttcattcaccacggtgggaaggattcctgctaagcttccttgcctctgtccagctcccagggcgtctgcctccctcctgccccagggagagcttctgggtgagtcttcgctggcactcctgccccgggcttcctgctcttcaggccttggcctgctgcaccttggccaactgcaccacccggcacatcatagccccactcaggtcagagctgtgtctcagccgacgtggggttctgaggttctcaccaagatccagactcaacgcttgtgggtttgttgtctcagttctggcggtggaggttctcccgaggcctcagcgcctctgttctcggaagtctctttacatgttagtggaaccctctgttcctgttgaatcattcttcgtgttaaatgtttctgtctcttgactgatacatgatagtcatcatgtatgtattctgcggctgcttttgattttttctctttatccctggttttctgtaatttgataagctttagggtattgtgtgtgtgtttgggggggttgtcaagaatttgaggctttgtcatttttatgccatttggaaatatctagctatccggcctctccccctgctcctgcagccccagtactcgatgggctgtttgtgtggacaatgggtccgaagttgctcatcttttcagttgggtcatttttggagatttgttcacgcttaagccatgtctt

SEQ ID NO: 317724 - DNA, 483 bp, Homo Sapiens
  misc_feature (49)..(49): n is a, c, g, or t
  misc_feature (137)..(137): n is a, c, g, or t
  misc_feature (213)..(213): n is a, c, g, or t
ttaaagaaagttaagcggtattaataatttcaatagttcgcttaataanaaatcactaaaactctatttatacattacctattcaaataatttcctagagtaatattctttaaaattcttttatagcagtacactancaaagaaaaagtttcctgtgtctttgctgttatcaaatgtaaaaaagccccttaaatatcaacagttttcaacaantgtatacatacacatatattttaaatgcaagttacttaaatgtaggtttacatccacagagacattttaatacctgctacgtactctatagcacttctatataatatatattgattaatttcaagtactttaataggtttttaaagttcattcaatttttttcttgaaatttgccttctttatttataaaaagtacctttgttctccaaaatattatttaaaatataatggtgttttgcagatggggaagagtatagtatgccttagtat

SEQ ID NO: 317725 - DNA, 371 bp, Homo Sapiens
acaaatggttatctacaggagaataatcaatccactacctgtcatctccatatacaataatttaattaattctaggattatagatttaacattctcataacagaagtaaactttactcaaactcaacagagtttccagttctacacctcctcccagttcctccatgtggtcaactcacatatatttgttccacaactgcattctggtgaccacctccctgtaggacagctaaatacaaccttgttggggtggcctttccttgtcttttgggatatttctctcttcacagttgagacaatccaaaggacaggaatcatttctgtttttcctcaatagcaacatccaattagctgattggccatgtgtctcca

SEQ ID NO: 317726 - DNA, 463 bp, Homo Sapiens
  misc_feature (17)..(17): n is a, c, g, or t
  misc_feature (314)..(314): n is a, c, g, or t
  misc_feature (347)..(347): n is a, c, g, or t
  misc_feature (372)..(372): n is a, c, g, or t
  misc_feature (389)..(389): n is a, c, g, or t
  misc_feature (416)..(416): n is a, c, g, or t
  misc_feature (427)..(427): n is a, c, g, or t
  misc_feature (451)..(451): n is a, c, g, or t
gccggttatagtaaagnaaattatattgatatgttaccttagcatgcattttgattatagatttaacattctcataacagaagtaaactttactcaaactcaacagagtttccagttctacacctcctcccagttcctccatgtggtcaactcacatatatttgttccacaactgcattctgggtgaccacctccctgtagggacagctaaatacaaccttgttgggggtgggcctttccttgtcttttggggatatttctctcttcacagttgaggacaatccaaagggacaggggatcatttctggtttttncctcaatagggcaacatccaattaggctgattnggccatgtgtctccaattaatgggnaaactggaggttagggngagagaagggtgaggcacccagggatngggggtttctngggtggaaaggttttaccgggggnttttcctgccac

SEQ ID NO: 317727 - DNA, 399 bp, Homo Sapiens
  misc_feature (356)..(356): n is a, c, g, or t
  misc_feature (364)..(364): n is a, c, g, or t
  misc_feature (376)..(376): n is a, c, g, or t
  misc_feature (383)..(383): n is a, c, g, or t
atagttatatgttaccttagcatgcattttctttatggatttaactttctcataacggaaaaaaactttattcaaacttaacagtttctagttctccacctcctcccatttcctccatgtggtcaactcacatatatttcttacacgactgcattctgggtgaccacctccctgtgggacagctaggatataaccaatttgacttgtaccactgacccttacaccccacatgggatgggtacaggaccacctcttaatcacaggtatggactttcacaggaactaggtgcctggctttggcttcttaaatccaccaggaaacaactccctgaggcgacgtcttccttgttcaattnctgggganctgtgggaacgntttgggnccacagggtccctgtc

SEQ ID NO: 317728 - DNA, 471 bp, Homo Sapiens
tttagtttgcatcagtaagaaagtttattgaaattcattagtaaatgagaacagaaagttgtttttctttccattaaagaacactttctggtaaagtgaaaagaagaaatacagaaaccacaaaacaccttgtagacaccttattttcaaggtctatttccatagaccatcaagacagaagtgttttcttggagactttgttttccatgcatctgtaaataatggtctgtgtgaagggagactctttcctcttgatgcagtttaatagtagtgtttcttggtttctgattcaaccatagatgaaagaactctaccgtcgggcgccacctcttcaataattgtcttgattactctggttttgttagtatcttggtcccttagatgaagactcgcccacggacccggaagaggaggacttgtggcctccgctggagctgccgccgccgtatccgccgccggagttgtagccgc

SEQ ID NO: 317729 - DNA, 272 bp, Homo Sapiens
aaaaaaattgcagggttttaaagtagcttcgtagaaactaaaagtagaaatataatttattagctggaactgccacatggagatctcctgtcagattttaggcaatgcaaatagtctcagattattgacagtaatcatttaagggtcttagaaatttcttcggctatgagtaacacactttggggggttcattacaatccaaaccagatgatttactggaattatacagatgctctggagccaataccactgtctgactcgaagcccacttt

SEQ ID NO: 317730 - DNA, 2006 bp, Homo Sapiens
aattggcgcgctcgtctgaatggcgtttggcgcggagcagtgacggctgcgataatagcgaggcagcagtgcagctttcagagggtccgggctcagaggggctatgattcggagggttctgccgcacggcatgggccggggcctcttgacccggaggccaggcacgcgcagaggaggcttttctctggactgggatggaaaggtgtctgagattaagaagaagatcaagtcgatcctgcctggaaggtcctgtgatctactgcaagacaccagccacctgcctcccgagcactcggatgtggtgatcgtgggaggtggggtgcttggcttgtctgtggcctattggctgaagaagctggagagcagacgaggtgctattcgagtgctagtggtggaacgggaccacacgtattcacaggcctccactgggctctcagtaggtgggatttgtcagcagttctcattgcctgagaacatccagctctccctcttttcagccagctttctacggaacatcaatgagtacctggccgtagtcgatgctcctcccctggacctccggttcaacccctcgggctacctcttgctggcttcagaaaaggatgctgcagccatggagagcaacgtgaaagtgcagaggcaggagggagccaaagtttctctgatgtctcctgatcagcttcggaacaagtttccctggataaacacagagggagtggctttggcgtcttatgggatggaggacgaaggttggtttgacccctggtgtctgctccaggggcttcggcgaaaggtccagtccttgggagtccttttctgccagggagaggtgacacgttttgtctcttcatctcaacgcatgttgaccacagatgacaaagcggtggtcttgaaaaggatccatgaagtccatgtgaagatggaccgcagcctggagtaccagcctgtggaatgcgccattgtgatcaacgcagccggagcctggtctgcgcaaatcgcagcactggctggtgttggagaggggccgcctggcaccctgcagggcaccaagctacctgtggagccgaggaaaaggtatgtgtatgtgtggcactgcccccagggaccaggcctagagactccgcttgttgcagacaccagtggagcctattttcgccgggaaggattaggtagcaactacctaggtggtcgtagccccactgagcaggaagaaccggacccggcgaacctggaagtggaccatgatttcttccaggacaaggtgtggccccatttggccctgagggtcccagcttttgagactctgaaggttcagagcgcctgggccggctattacgactacaacacctttgaccagaatggcgtggtgggcccccacccgctagttgtcaacatgtactttgctactggcttcagtggtcacgggctccagcaggcccctggcattgggcgagctgtagcagagatggtactgaagggcaggttccagaccatcgacctgagccccttcctctttacccgcttttacttgggagagaagatccaggagaacaacatcatctgagcatgtgtgctctgcactggctccactggcttgcatcctggctgtgttcacagccttgtttgctgcttccatcttccccagtactgtgccaggccttctccccctccccagtgtcctctcctctcaggcaggccattgcacccatatggctgggcaggcacaggcagtgaggccgaggccaatagcgagtgatgagcgggatcctaggactgatctgtagcccatgctgatgtcacccaccagggcaatccatctggaggcctgagcaccctggcccaggactggcttcatcctggcactgaccaggaaagactgcctctgaccctcttagcagacagagcccaggcatgggagcactctggggcagcctggctcaggtttattgattttcgtctgtttaccctatccattaatcaatacatgtaattaactccttccctcc

SEQ ID NO: 317731 - DNA, 1540 bp, Homo Sapiens
  misc_feature (224)..(237): n is a, c, g, or t
ggacttaagaccgttttggcgcgcgggggcgcggcgtatatggaaacgacgattggggggaagggataaagggcggtaaaatatggggggcggcgaggagacacagcatagatgcgcgcttgtgcccccggggggggcaaaaaatttggcagtgtaaggggggattgtaccccccctggggcctttcaacttttgggggacagagcaagaattctgttctcagnnnnnnnnnnnnnngttttgcatttgtcctggcccctgccagggcatttctctcctggtggctgccctgccctgtggtcacagttcttggtccgcctgcagaatcttataattattgttgagaatgtttagcttctcctccagctcctgagccaccttcttcagctcctcagctgtctctgactttgccccctcatgtaagtgctttgattcgtacacgaggtagactacatccagcacaagaaagaagcttacaggggccacatccgtgagcttgactcctctgctcatttccaggatgctgggttcattaactctctccacctgttcaccgctttcagctgagattggctcagtgacccgggggcgtgaggctgaggcatgcggtactgactgaagattggctctggctcgtctgagggcacggatgtccttcccaatgcctcgtgtgagttggtaagtattgccagctaaggaaagaaagttggatatgttctcacccaaaaactccttcacctccttcaatttgtcaaggcttttgatgaccaggtcgtgggcttgggcttgtgtccaccacttctttccgtagtctatggtactgctggtaatcccggtcaaagctgctgtgattcccaactccatcccaggttccaagagtacaaggctgcctccctctgtgaagggtgccagacccatgccgacgagggtcaggatgccagaggtagtgctgagagagttggacaccacattggcgatggtggtgcctttgtggaccttctgaacctcctctgcaagggcacggagctttcttatgttatcctcaagctcccttttcaaccgaggaaactctttcaaaaaccactgcctgtgctgctggtctttatcgtggcggtttttgtccttcatgaccatgtgacttgcaagcttgttcagagctttacggagctcatctgcctcatccctgggcagttcagcagcagccacgaatccattccaggcttcatcatcagtcagcagttgtagcagattctctctgctcacttggtcctggaaatacttaaggtaatcctcaataaagatactgctctctgggttcatggtgccagcggctgggttaccgaggggctttccttggagctctccagtcactgtccagactggaaggttttccttaaccctcgttccagcttcctcttccctcactctcacaccaaggcagggtcctcttgtccaagggatcttcctctgacagagactgagcaagatccaactgttctgagctgtgtggatcccacgtccagctgtgcatctgtgtaat

SEQ ID NO: 317732 - DNA, 586 bp, Homo Sapiens
ttcagaaaccagtttctgtactgctggcctttatcgtgccagtttttgtctttcatgatcatttgtcttgcaaggttgtccagagctttacggagctcatctgcctcattcctgggcagttcagcagcagccacgaatccgttccaggcctcattatcagtcagcaggagtagcagattctgtgtgctcactttttccttgaaatacttaatggcgtcctcaataaagatactgctctctgggtccatggtgccagcagcccagtcaccgaggggcttactttgaggatctccagtatctgtcccacttggaacgttttgttgcaccctcgctccagcttcctctgccctcactcccacaccaaggaaaagtgcactcatccagatgcagaggacagagactctcagcaaagcagctccctccatgtcgctgcagggcctcctccaaggaatcttcccctggcagagactgagcaagatccagctgttctgagctgtgtggatcccacctccagttatgcgtctgtataataaccagacaggtcctccagtccccaagatataccgaggaattcgaaagggaaagt

SEQ ID NO: 317733 - DNA, 910 bp, Homo Sapiens
atctgtccttttgagatcttttacttcagaggaagatttaggcaagagagcaacatataatagtcagtgatacaaagaagggcatggaacatttggggaacacaggggtttggagggcctgaagcacaggggtggtggtattagaaatgtgggaaatatgggccatgagcctccggacagaatggggtccaggaaggacagcatcacacactgtgctgtgagtttgtgatcctcctgtgggcaacctcagcagtctggttattggcccttttttcttacagcctggaaaactggaccaagtttcgattgatctcagcgaccgaccggcagcctgtaagggccatggaagtgtggaactcatttgttaaaatgttcaaaacttccttaacaccatgttcaccctgctcccgaggcagacagacagagacacaaagagacataaaggaacattctgaccatccactagtataaattctagatgtagtcagagctataatgggaaagatggggattatctgtgaagtgagaattaccttgggaataaaggaaagcacagagacaaagataggggatgaaagctattgaacatttgcaatgggcttgaaaatgtctaagcttggaaaatgaaccacaggaaagcacagaaatgaatgagaagctctgtatcttcttgctggtttgctttgccactctcaccttgcaggcaaggccccataggattggtctcccaagaaaaatgcacttagctccaagggccagagccttcagcacatcattgccagttcggaccccgccatccaggtagacttcaattttcccctttacagcagccaccacttctgtcaaagcatcaatctgaaaaggagatacacatgggctggagggctttctattttgactctcagacttg

SEQ ID NO: 317734 - DNA, 476 bp, Homo Sapiens
ttccagtcattaatgatctgtccttttgagatcttttacttcagaggaagatttaggcaagagagcaacatataatagtcagtgatacaaagaagggcatggaacatttggggaacacaggggtttggagggcctgaagcacaggggtggtggtattagaaatgtgggaaatatgggccatgagcctccggacagaatggggtccaggaaggacagcatcacacactgtgctgtgagtttgtgatcctcctgtgggcaacctcagcagtctggttattggcccttttttcttacagcctggaaaactggaccaagtttcgattgatctcagcgaccgaccggcagcctgtaagggccatggaagtgtggaactcatttgtcaaaatgttcaaaacttccttaacaccatgttcacccttggaggcaagggcccataggattgcgtctccaagaaaaatgcacttagcctcaagggg

SEQ ID NO: 317735 - DNA, 388 bp, Homo Sapiens
agaggaaagtgcttctggagtcagacctgggtcaaattccatctttgctacttcctagctgggggaccttgcatagatcacgtagcgtggtgaggattaaatgagatgatgtttgtaaggagaaatgtgcaaaaggaacataggacattctaccgggaatcatttccactggaaaaacatggttagactgggttattgaaggacatgatagcaacttttccagagatgatgaaaaatactcctgtattttcaccagacatgttaggagatcctaacttgtttgagctggttggcgctcattataaaatctccttttaggaggggtaatgaaggtgtcctaaagattgcaatgccctgcaggagagcacccaagcctggtcaacagagc

SEQ ID NO: 317736 - DNA, 1079 bp, Homo Sapiens
tttttaaatcaaaattagatgaaggttatttattggtgtgacttttttcctttagtgagcttcctttacacagcatggtgtaaatagcatcagattgaatgaaaagtttgttaaatgcaaccataaataattataataaatatacatcaagtaactttacagcacacattttttagggccaaggtttggatctgtctggacctcaatgtgctctcggagaagcagccacgttagcagcagataccttacagcttgtcatctactcaagtgatggccaacagaagcttctgaactcctcctggggaggtagctgacaagtccattcaagggatgaggactaaagagaaccaagaatttaaagatgtagggaggaaaaaccacttctaataaatcgaaaggctctttcattatgcagaaatgaaaataaaaggatccttattgtcaggaatacatcctggctgtgaccccccacactcaaaggagctgtggccgctggggaggcagcgggctgaccatcttctttcaaagcaggggaactgcttgcgggcactcacctccagagttgacttgcatccaatacaactgatgcagctgtcatgattaaccctaggtcgatttcatccttaggtcaggggatcctttctataatggtccttgatgcatttcctaagagttacagggaggagatggatgctaacggctctatctctagaattcacaatctttccagcaggccagggcacatcttctttcttggaccagcatccacactccaaaaccttctagacagcactcactcaaaacttccaatattcacaatattatacaataaatacagcgatgtgattctgtgagacctggcaaggcccaaagtgacagtgtccaacaagatggcctgtgctgctcatgaacaaagtaccactggacaaagacctatttggggcaaagatgcagtgggtgagcctggaggcagctcagccctggcatacacacttacatggggtgatggggagtgctgggtggggctggccagaggggcagaaggacccccctggagtctccatctggacttgagtgtc

SEQ ID NO: 317737 - DNA, 454 bp, Homo Sapiens
cctggtccgtgaacagtgtacactccgtgcaggaccaccactccagcagcatgaccagttggctccagagtgagtaggcgaggcggcagttgaggcggcggtagagctgcttgctgaccggccagagcgccagcgtgcacagctggacgaagttgatgaccagaccactcaccacgaagacaaagccgaccagcaggtgcagcacgaactgggtcttcaggaaggccagcaggcccatggcgctgctcaggagcgggtgcacggcccctcgctgaggacagccgtccaaggcacaaggtcagcagagccagtgggaacagctgccctcagggcttccggctggacaagcctctgatttgaccagggatagcatccgtggactttcagcacccggacgggtctgtggaggtgggagttccagggatgtaagcctaaaggcggccctgccgttccg

SEQ ID NO: 317738 - DNA, 1036 bp, Homo Sapiens
  misc_feature (163)..(163): n is a, c, g, or t
  misc_feature (189)..(189): n is a, c, g, or t
  misc_feature (220)..(220): n is a, c, g, or t
  misc_feature (241)..(241): n is a, c, g, or t
  misc_feature (248)..(248): n is a, c, g, or t
  misc_feature (259)..(259): n is a, c, g, or t
  misc_feature (279)..(279): n is a, c, g, or t
  misc_feature (281)..(281): n is a, c, g, or t
  misc_feature (301)..(301): n is a, c, g, or t
  misc_feature (308)..(308): n is a, c, g, or t
  misc_feature (321)..(321): n is a, c, g, or t
  misc_feature (333)..(333): n is a, c, g, or t
  misc_feature (335)..(362): n is a, c, g, or t
  misc_feature (382)..(383): n is a, c, g, or t
  misc_feature (419)..(419): n is a, c, g, or t
  misc_feature (425)..(425): n is a, c, g, or t
  misc_feature (429)..(429): n is a, c, g, or t
  misc_feature (450)..(450): n is a, c, g, or t
  misc_feature (455)..(455): n is a, c, g, or t
  misc_feature (459)..(459): n is a, c, g, or t
  misc_feature (465)..(465): n is a, c, g, or t
  misc_feature (468)..(468): n is a, c, g, or t
  misc_feature (496)..(496): n is a, c, g, or t
  misc_feature (507)..(507): n is a, c, g, or t
  misc_feature (542)..(542): n is a, c, g, or t
gagggttcctctcattttcttttagtaacaactgctctgaaaagaagatatttttcaacctgaacttgcagtagctagtggagaggcaggtaaggaaaaaggaaatgaaaccagagacagagggaagctgagcgaaaatagaccttcccgagataggaggaancccggagagagacgcacggtttcctncccgcccctaggccgccgccccctctctgcnctcggcggcgagcagcgcgcngcgaccngggccgaaggngttcgcggtgactgttcttnancgcggaggggcgagctcgcnggcggangccggagcaagcngaggcgcaggancnnnnnnnnnnnnnnnnnnnnnnnnnnnnccgatcacccgagggggttnnatctctggcatctgtttatttttgttctaaaaatgnatttcntttnctgctcggtattttgcattanttatnaatnttcttngtnattgaaaagaagaacctggacccttaanaagaaaaagtngataaagtgctgcagataaccccatccctgctganatgcggcggctgctagcagaacattggggactgctacttcttgaaggctatcgaccagtactggcacgaggactgcctgagctgcgacctctgtggctgccggctgggtgaggtggggcggcgcctctactacaaactgggccggaagctctgccggagagactatctcaggctttttgggcaagacggtctctgcgcatcctgtgacaagcggattcgtgcctatgagatgacaatgcgggtgaaagacaaagtgtatcacctggaatgtttcaagtgcgccgcctgtcagaagcatttctgtgtaggtgacagatacctcctcatcaactctgacatagtgtgcgaacaggacatctacgagtggactaagatcaatgggatgatataggcccgagtccccgggcatctttggggaggtgttcactgaagacgccgtctccatggcatcttcgtcttcactcttaggcactttgggggtttgagggtggggt

SEQ ID NO: 317739 - DNA, 386 bp, Homo Sapiens
gtcaaaatccagggtagaatttggcccccaaacctaaagctagtggacaagaggaaagtcaatcaatcagtaaatatttattattttctgtaactaaagtactgggctgtggtaggggagacaacaatcaaagacatagccttgtcttccagaagctcacaatctagttgggaattcaagaataccccttagaaaagttcattgacaatttacgaggtgctattagacagtaggagagaaaggcatacataccagggcccagggaagaagagctttgtgaatgaagaaggaaaaagtgtaagttgactttcaaaagtctctggaaacactggactttagctggtccaggaaatatagggaagaattggataggcaggaataaatga

SEQ ID NO: 317740 - DNA, 508 bp, Homo Sapiens
tttttttatcaatcagtaaatatttattattttctgtaactaaagtactgggctgtggtaggggagaggtaggcaagatcaaggagtgtttaggaaggcaagactggagtatcaaagaaagtgaatttcttaagccctgcttactcagataagccattaggcttgtgtgagaatgctgatgtcctagataggagactctgggaggggaatatgaaggaagaaaataataatgaatcaaagagcacttccattcctggacactttatacattttcaagactattgcgcccccatcagcactctcatggtgtgtgtagacacagcccagggctgtatttccctgagatgccacacttttcccctggtgtcctcagatataatgcctcagttcctgcaaagtcacataaaataacttgtgagaacttggtgcttggtgagcatccttgtatccagctggcagtccattcgtcatatcccatctgccctggcctagagctggtaagcatgtg

SEQ ID NO: 317741 - DNA, 382 bp, Homo Sapiens
aaaattaacactttattttttaaaatgacacatgataatagaaatgcatgataatgcttcattggtaaacaaagattggtaggagaaagtattaaattaagagacatatattctcccactatgttttcattcgtttttcttgtatctgttttatctacctttgtttttcctttaattccaacttaaaatatattctcctgagttcttccttttcctcccctcattaatatgactgctgtgttttgctcaggtaagactagaaagccttagaattctataatgtgatggagcaatgcaaagaatgctaaagtgaacttttccccataggtcagatgcagttatctgaactccaggaaattgctggttctcttggacaagctgt

SEQ ID NO: 317742 - DNA, 775 bp, Homo Sapiens
atgactttggggttatttagaatctcgcttgtatttttgtgttctagatcccagtagatcaatttaagccatctgatgtggaaatccaggcttgcttccggcacgagaacatcgcagagctgtatggcgcagtcctgtggggtgaaactgtccatctctttatggaagcaggcgagggagggtttgttctggagaaactggagagctgtggaccaatgagagaatttgaaattatttgggtgacaaagcatgttctcaagggacttgattttctacacttcaaaggaaagtgatccatcatgatattaaacctagcaacattgttttcatgtccacttttcctaaggacctccgaggaacagagatttacatgagcccagaggtcatcctgtgcaggggccattcaaccaaagcagacatctacagcctgggggccacgctcatccacatgcagacgggcaccccaccctgtgtgaagcgctaccctcgctcagcctatccctcctacctgtacataatccacacgcaagcacctccactggaagacattgcagatgactgcaagtccagggatgagagagcttgtagaagcttccctggagagaaactccattcaccggccaagagccggagacctactggactctgccctcttggagcgcaagaggctgctgagtaggaaggagctggaacttcctgagaacattgctgattcttcgtgcacaggaagcaccgaggaatctgagatgctcaagaggcaacgctctctctacat

SEQ ID NO: 317743 - DNA, 1257 bp, Homo Sapiens
  misc_feature (11)..(11): n is a, c, g, or t
  misc_feature (33)..(33): n is a, c, g, or t
  misc_feature (60)..(60): n is a, c, g, or t
ggtgtacaatnacccactgaagccccaaacccnttggaacatcccttaaaaacagggtgnaagaacttaaaaacttggatgaaacaagggctggcaaaccacttggaaatgggtaaaggacaaagactgggaagatcaatttggctggaaccaggggagcttgtgttaaaactgtgaatgaatgaaggggcaccctggaacagaggttgggtccgtgggcaaatgagaagacatgttactccctctcttgacatgaagaccctggtgggcttgtggcctcctgctgccttcctttccctgtcttcccatctccactctctcctaggaaagtggaacctggatgctggtagggccagagacagaggcttaacaccctgctggggaacccggtcagaactcccgaggcaggagaggttctgctccactggatgtttgtcttggtgtttttggatgtgctgatcaagagcaagatgttctggattcttaaaactcccctcacaaggaccaatctagagataatttattgatcagtgatcacagcttgtaccccaaagccgtgtatgtctggatccttccctaagaccacagatagctccagggagtcccacctccttggctatggaaatatgctcagccctggtttcagagaagcctggactccactctggaccccatgagatgatatgcgctggtactccaggctttaaatggcctgggaagcctcagtggattttgtttattttcagcattgccatgtatgcttaactctgagttggggtggggtaggtctgtttaaaatgccagggaaggtgggcagcagagtggatttgtgcaagaaggaacctggggggtttaaggacagcaaaatgatcttaggcgtaattgactggtttttctgaggtcttgccacactgggcaagaaaatgctgcatcgggcccttattccagagagtgcagagctggggccaaggtcgtggtcaaaaaggaaaggagccctcatggactccagggtcagaagttccctcgggaaaccagcaggaggtgggaaaagagccccattagggcagtagatggagcaacagcactgagtgagatttcagggggccacagcaatggggaggtggctaccagtggatatggggtcccctgctccaggtgcttaggccaggcatcccgtccccccattgagagtcctggaattccaaagaagtgaagcatctgagcctcgtgccgaattcgccacccaggcctcgctac

SEQ ID NO: 317744 - DNA, 529 bp, Homo Sapiens
ccttattcaacaagtctttattgagcacctactctgtgcccagcactgcactaggtccatgagaatacaagagtagtataagatgttatccgccctccaggagcttacaaaactagaggcagaaataagatgtacatgtgactcaggcagcatgtgacacacacaaagtgggcagctctgagacaatggtggtcaagtgaccactgaggcccagagccgttggaacagtctcttagaacagggtggaggacttaaaacttggatgaacaggggctggcagagcacttggaatgggtaaggacaagactgggagatcaatttggctggagcaggggagcttgtgttaaactgtgatgatgaggggcacctggacagaggttgggtccgtgggcaatgagaagacatgttactccctctcttgacatgaagacctggtgggcttgtggcctcctgctgccttcctttccctgtcttcccatctccactctctcctaggaaagtggaacctggatgctggtagggccagaga

SEQ ID NO: 317745 - DNA, 535 bp, Homo Sapiens
  misc_feature (386)..(439): n is a, c, g, or t
taccttcagacgaaaataaaatgctacaatcctctaaggcatgaacaataatgtctgcaaacaatatatacacataatacatatttaaaacaagacttaatataaacaagaatgaacagtatatacatgtcaattttttcactgttttgaaatacaatttaactacacaagtgatgcagcaacatatatatataaatgtacttgtaactctacagtaaagtttctttttggtgcttttatagcacatcagtgtaaacagtttaacttggctttgttttatattttaaaacattccttgtattttcaagatttaaagcaattttctagttcttccttttcacagaaaacgaagattctggatgtggtttaatcataaataattcatnnnnnnnnnnnnnnnnnnnnnnnnnnnnnnnnnnnnnnnnnnnnnnnnnnnnnngatatttattgagagggaaaggagaaccatttcccacattagagctctggtgttgagtattcagtgcgatttgatatattttaattgctattgcac

SEQ ID NO: 317746 - DNA, 400 bp, Homo Sapiens
tttcactttaattatatatgtttgtctgctttattcatattcattcataagcacagaagccttgctaatatagagcaaggaatacaactgaaattggggatacaagtagggtgaggaagagactgatttaggagcttgtttaagaaggctattctagaagatggccacaaaatgtggagagagttaaaatagtataaaaatgctaatagttccttaatcgagcatgtgactagaggattatttacatttgttgtctctgcctcatccttttatttttctacttcatcagagaggaaaggggaggcaacattggcctacagacagtttacggtttaaacacactaccgactgactaaagccaacttaaaatttccctagttcctggctaatgttcctgatc

SEQ ID NO: 317747 - DNA, 391 bp, Homo Sapiens
atacttctgaaataattccagatctcatacattaagttgaaatcaaaagctgtggatcatgttataatataatatatttgaggtcaaaagccttcttgctgagaaaaagagaaaagggttgataagcgcaagagtgcatgtgtgcctgcaacagcaatttggtgtggggagttctcgaggacagcaaggatgtgagccatggcagcaaatcaggaggaagctaggtgttcaccacattaaccttatcattaagaaaacaatctgcctctcttggcctgggaatccctcctgagtgcttctaggctgcgagtgtcaaattgttctttacagatgctgagcagaagaggattttccatttcatcttttggccttcccttgggccgaattcctg

SEQ ID NO: 317748 - DNA, 315 bp, Homo Sapiens
ggattttccttcattatgaatagtcagtattttaaaagctcaaagtagaagaggagtcactaagccctaacagcttgtccaaagatttaaattcttatttcaaatttgatttgtcctttaaggtttagggctattttatattcagagttctgaataattactttgaaattgtagtatcataaaattgaaataaaatacatctactaggctgttagccaaagcatcaccattacaagtccatgaatgttaaaatgtacaggtgggattgtgaagatttactgacatcaaaagttcttctggaaacaaacctttgtt

SEQ ID NO: 317749 - DNA, 841 bp, Homo Sapiens
aagtttctcacctgggatgcggccatctgagttccagtttcggagcaccttttcctgataaagctggacaaatggactctgtaaattttcagccccaactccacaagaggtacatcgagttttaaataggctaccagggatctccagaaggttcttgtgccagccttgcggtgcagctcatcgatgttctgggtgatgaccacgactcgccggccctgcttgcccagccgggtctcacactcggctatggcgcggtgcccggcgttgggctccttgctccccatgacctcccgccggtagtggtagaactcccacacccgggacgggttgtgggcaaaggccaggggagtcgccaggtccctgggcttgccattttctccaataacctccagctcctctgaaggtcggaacaccactttctgcactaacaccagctcctgagatgatgactatgtgctttgcttttgcaaaaaactttcgaaaatctgccatacttgcaacttggccgagccattttcaggcaaatctggtttcgtgtggacgctggaggcttcaggccacaatatagctgggaaatcaatcgacttgggacaatctggagaggtcgcatcagggtttgtctgtagttctaatgcttgaggcgggctttagttatttctcccaaaatgaagatggttgtctccacggctgctttctaatatatttgaatctggagacatcaatataatacagacttctaatttgatccagaaaattattttcttcttctgtaggtttttatatgttagaaaacatttccatttactggggcagctcgcgcccccgaatacagtctcccccc

SEQ ID NO: 317750 - DNA, 792 bp, Homo Sapiens
  misc_feature (21)..(21): n is a, c, g, or t
  misc_feature (31)..(31): n is a, c, g, or t
  misc_feature (51)..(51): n is a, c, g, or t
  misc_feature (60)..(60): n is a, c, g, or t
  misc_feature (65)..(65): n is a, c, g, or t
  misc_feature (74)..(74): n is a, c, g, or t
  misc_feature (96)..(96): n is a, c, g, or t
  misc_feature (110)..(110): n is a, c, g, or t
  misc_feature (120)..(120): n is a, c, g, or t
  misc_feature (143)..(143): n is a, c, g, or t
  misc_feature (160)..(160): n is a, c, g, or t
  misc_feature (191)..(191): n is a, c, g, or t
caacccttcttaaacccttgnttcccaattnaagggttaaattaacccaantctgctggnccctnaattaatanaaccagcaaagttccccaacanaatggaagggtcanatctggccgngacgtgggccggaccatggttgnagcgacggtgggtatanacgcaggggtggtccctggctgggaagacgngccctgcacctctctgccaatctttgtccaacacaccagcagaagtcgctctttccgtggcactgcagggggatgaagtggcccaggtcatcgcactggggcacgtactggtcatctcggggggtgccaccgtagtgctccagcaggttttccctccagcgctcacagatggtcgggggcctctgggtgggctctggtgatggtccacagtgaggtggggtggagccaggtggagtctgggtaccaggaacttcatgaccatcagggtccacgcaccagcagaaaccagtgctgccatgacactgtaggggcaggaagttgccctgctcgtcgcattgggggatgtggaaccgggccccagggtaggcatactgggcctgggcatggcgctgctgttgttcacagggtgtcaggcttgaggtggagtcaggtatgcactgaaatccatccccataatatccgggttgacaacggcctgagcattcatctacatcagtgcactggtgcccatcgccggcataaccaggcaggcaggcacagctgaacgtgctgcctccatggtgaacacaccgggcctgcccagcaggagcacaggtatgac

SEQ ID NO: 317751 - DNA, 864 bp, Homo Sapiens
  misc_feature (255)..(316): n is a, c, g, or t
  misc_feature (401)..(409): n is a, c, g, or t
ggatcactttatagaaaagggtagtgagggaaagtggcatggacaagcccccgaatggtttctgctagaggggggcgggttgattgggcgaggatttacaatacgctattgagtgcggacccacgggggtggtaataggggtgctagggaaaagggttttgggagaagtgtaaataggggggacccctagcaccagggtgggttggttttaaaacaggttctaggggcgccccggtatggcccgccccgagtaannnnnnnnnnnnnnnnnnnnnnnnnnnnnnnnnnnnnnnnnnnnnnnnnnnnnnnnnnnnnnttggtttgtttaatgggaaagacgtaaggcttgggttcatcaaataaaaccaatttcgggggggagaaaatcaaaacccgcaatnnnnnnnnngttaacactgtctgggccacagcagaacccaaagaacatattcgtataattgaaaaattctaggtgcttcataattgaccttttgatacaaaatgacctattaaatttgcaatttgtaatccttggtgttgaggtccataggacaagctaggaagtcttcaaaccttgagttgaattccataaggggttatttggcttttgaatcggtttttccttgtctaagaggtagcagcagcaacagcgcccaccttctgggcagcttctttcttggcatgatgagcctgtagaactgctacagcttcatccaccttggagcggagagactcgggggactctaacatgtgcagcagctcagagttgtctatctccagcagcattcccgtgatcttcccagccagatttgaatgcattgtttggatgagtgggaacaagcgttctcccagcatctgcttccc

SEQ ID NO: 317752 - DNA, 392 bp, Homo Sapiens
  misc_feature (31)..(31): n is a, c, g, or t
agaacacaagccactgtttcagctccagaanaaagaaagggctttaacgttttttccagtgaaaacaaatcctcttatattaaatctacagcaactgcttattatagtagtttatacttttgcttaactctgttatgtctcttaagcaggtttggtttttattaaaatgatgtgttttctttagtaccactttacttgaattacattaacctagaaaactacataggttattttgatctcttaagattaatgtagcagaaatttcttggaattttatttttgtaatgacagaaaagtgggcttagaaagtattcaagatgttacaaaatttacatttagtggtattattaaagttctttttattgcagtttggaaagcatttgtgaaacttt

SEQ ID NO: 317753 - DNA, 1645 bp, Homo Sapiens
  misc_feature (98)..(98): n is a, c, g, or t
  misc_feature (982)..(983): n is a, c, g, or t
  misc_feature (1016)..(1016): n is a, c, g, or t
  misc_feature (1022)..(1024): n is a, c, g, or t
  misc_feature (1026)..(1026): n is a, c, g, or t
  misc_feature (1028)..(1028): n is a, c, g, or t
  misc_feature (1032)..(1032): n is a, c, g, or t
  misc_feature (1055)..(1055): n is a, c, g, or t
  misc_feature (1072)..(1072): n is a, c, g, or t
  misc_feature (1076)..(1076): n is a, c, g, or t
  misc_feature (1097)..(1097): n is a, c, g, or t
  misc_feature (1144)..(1169): n is a, c, g, or t
  misc_feature (1224)..(1233): n is a, c, g, or t
tcacagaatggaaatctgcagaggcctccgcagtcacctaatcactctcctcctcttcctgttccattcagagacgatctgccgaccctctgggaganaatccagcaagatgcaagccttcagaatctgggatgttaaccagaagaccttctatctgaggaacaaccaactagttgccggatacttgcaaggaccaaatgtcaatttagaagaaaagatagatgtggtacccattgagcctcatgctctgttcttgggaatccatggagggaagatgtgcctgtcctgtgtcaagtctggtgatgagaccagactccagctggaggcagttaacatcactgacctgagcgagaacagaaagcaggacaagcgcttcgccttcatccgctcagacagtggccccaccaccagttttgagtctgccgcctgccccggttggttcctcttgcacagcgatggaagctgaccagcccgtcagcctcaccaatatgcctgacgaaggcgtcatggtcaccatattctacttccagggggacgagtagtactgcccaggcctgcctgttcccattcttgcatggcaaggactgcagggactgccagtccccctgccccagggctcccggctatgggggcactgaggaccagccattgaggggtggaccctcagaaggcgtcacaacaacctggtcacaggactctgcctcctcttcaactgaccagcctccatgctgcctccagaatggtctttctaatgtgtgaatcagagcacagcagcccctgcacaaagcccttccatgtcgcctctgcattcaggatcaaaccccgaccacctgcccaacctgctctcctcttgccactgcctcttcctccctcattccaccttcccatgccctggatccatcaggccacttgatgacccccaaccaagtggctcccacaccctgttttacaaaaaagaaaagaccagtccatgagggaggtnnttaagggtttgtggaaaatgaaaattaggatcncatgannntncnttcncagcccccgtgaaggagagcccntcatttggagattatgntctntcggggagaggctgaggactnaaaatattcctgcatttgtgaaatgatggtgaaagtaagtggtagcnnnnnnnnnnnnnnnnnnnnnnnnnngtgatgtcccaacttgtaaaaattaaaagttatggtactatgttagccccataannnnnnnnnnccttttaaaacacttccataatctggactcctctgtccaggcactgctgcccagcctccaagctccatctccactccagattttttacagctgcctgcagtactttacctcctatcagaagtttctcagctcccaaggctctgagcaaatgtggctcctgggggttctttcttcctctgctgaaggaataaattgctccttgacattgtagagcttctggcacttggagacttgtatgaaagatggctgtgcctctgcctgtctcccccaccaggctgggagctctgcagagcaggaaacatgactcgtatatgtctcaggtccctgcagggccaagcacctagcctcgctcttggcaggtactcagcgaatgaatgctgtatatgttgggtgcaaagttccctacttcctg

SEQ ID NO: 317754 - DNA, 677 bp, Homo Sapiens
  misc_feature (455)..(466): n is a, c, g, or t
  misc_feature (521)..(547): n is a, c, g, or t
taggcattttcaagattttattgtaaaacagagctgaagtcacaggaagtagggaactttgcacccaacatatacagcattcattcgctgagtacctgccaagagcgaggctaggtgcttggccctgcagggacctgagacatatacgagtcatgtttcctgctctgcagagctcccagcccggtgggggagacaggcagaggcacagccatctttcatacaagtctccaagtgccagaagctctacaatgtcaaggagcaatttattccttcagcagaggaagaaagaacccccaggagccacatttgctcagagccttgggagctgagaaacttctgataggaggtaaagtactgcaggcagctgtaaaaaatctggagtggagatggagcttggaggctgggcagcagtgcctggacagaggagtccagattatggaagtgttttaaaaggnnnnnnnnnnnnttatggggctaacatagtaccataacttttaatttttacaagttgggacatcacnnnnnnnnnnnnnnnnnnnnnnnnnnnctaccacttactttcaccatcatttcacaaatgcaggaatattttaagtcctcagcctctccccgaaagaacataatctccaaatgaagggctctcccctcgtgccgaattcgccacccaggcctcgctc

SEQ ID NO: 317755 - DNA, 575 bp, Homo Sapiens
atgcgctcactataggaacaaaaatgtgcagcaccccgcggtgcctgactgctctaaaactagtggatcagccgggcggcagaaatgtggcacgaggccaacgcaggggttccaacagccgttttgaaggtagaggagagagatgttgtggtatttgttccccaccaccccactccctgcccaggtgcagttttggtggtgcctgtgttgctgctacatccatggctcctggtggggacccctctcccaaagctccagctcctgcaatgcttcagtaactgcactcagctcaggctgttgtagacctagggccagcagtcccacagtgcctcaccatcgcttgttccctatgcctgcccacacatctgtaaatagtcccttcatttcacatccttcagttagaccctttgagtatgccatctgcttccggtcaggacaatgattgattctatctgaatcaaacctgtcctttatttgaacaggacatcaagtctagaaagaccagttaacaccttgggatagcgaacaaatccatgttttgggaccatttactagtctggttctttcaaaggtca

SEQ ID NO: 317756 - DNA, 1006 bp, Homo Sapiens
ttttactatcagtggtgctttatacaaaatagcataatctgataacataagacattttagatttatgtttttaaatagccaaataaaacaaaatatcaagtcacagattacatatatttacattaattcaaatgtccaaagcacagtacagtagggtctatttaatagttcacataatttaagatttacatatacacaagcacatgaaccaatattagtttgctagaacagggatttaagaagttactcagacattttggtattgacacttacatatttatggcaacaaattatgatgactttaaattttcaatgagatctttttgtaccagaatacagaatgggaagaatgtacaaaatgaaaaggacaggcaaacaagatgtactttccttgcactatttctataacaccatataggatgtggcattatccagtacattttatcagtgtagtctattcattctggtctaaaacggtaattttggctgaataacccccaatctaactttgctttaggctttataattaattgatgcttgattcttctttctacatcttttaaaaatgaaattggacactagtgtttttctttaaaataactctggtactagtaagttagcaaagtctatttttaaaggacactaatacataaagtttattttttctttcaatatcctaaataaagggacaatgggagtcatatcacctttgggcctactctgaaattaccaatagtgctaaaagctaagatattgtgatctagaacttaaactttggaaaacaaccccatctttctctggcacattgaggaactgaagtactttacctcatttcctaccaatcattttaagagaatttggttgtatttcaaagaacaaacaacacaatttctgtcctgctgtttattttgcagaccacacacaagttaaatatgaacagattaaattatgacatcatacacgacgcgtggtcgacgatatcccgggataccgaccggtaccagcc

SEQ ID NO: 317757 - DNA, 389 bp, Homo Sapiens
ggtgagtcttactatgcctactttcttgagggtggagagccacttgtatgcgtgttcatcatatcttaaaacatcttcaaaatccaaagtgggtagctggagctctgagccccagtattggcattctggcttcagccaatcagcctggaattcactgtaatgctcatcgggccatgtgatgtacaccttttttctgtcaaatatcaagcctttaattccaatgttcacatcaagagcttccactagaagtttccgtgcttttgcagaatccaggtagcaatcagagcacggacagttgtctctcaaccatacagctgggtagagagactcttcctcatcataccagaggatctgcatcaaatgagccccgtcaagtgcttctgcctttt

SEQ ID NO: 317758 - DNA, 396 bp, Homo Sapiens
ctcatgtgcaaggttgttctgagcctgaaagagatctgtaaaacgcccagcacggctgctggcatgccatagtgctgcatgctgttggatgctacctatgttttcgttatctccttgtccgggtccaccttggataagggactcctctcagaaccctagatccctggtgcccagcaaagagctggcaaacccctttctccattgcacacctgggcacagcccttcaggccttcaaagccacccactttatagttttcaggaattagctgctctgcattatcggtcctgctcttctcccccacacccttgacctcgcatccctcctctgtcccctcttctacccttctccaccctcctccctgcaccccattctctgggactggaagtaggcaagag

SEQ ID NO: 317759 - DNA, 1345 bp, Homo Sapiens
gggtttcatttgagttactggtgaagcggcaaatcaaacgtctagaagagcccagcctccgctgtgtggaactggttcatgaggaaatgcaaaggatcattcagcactgtagcaattacagtatcaggaattgttacgatttcctaaacttcatgatgccatagttgaagtggtgacttgtcttcttcgtaaaaggttgcctgttacaaatgaaatggtccataacttagtggcaattgaactggcttatatcaacacaaaacatccagactttgctgatgcttgtgggctaatgaacaataatatagaggaacaaaggagaaacaggctagccagagaattaccttcagctgtatcacgagacaagttaattcaggacagcagaagagaaactaaaaatgttgcatctggaggtggtggggttggagatggtgttcaagaaccaaccacaggcaactggagaggaatgctgaaaacttcaaaagctgaagagttattagcagaagaaaaaatcaaaacccattccaattatgccagccagtccacaaaaaggtcatgccgttatcttgctagatgtgccagttcctgttgcacgaaaactatctgctcgggaacagcgagattgttgaggttattgaacgactcattaaatcatattttctcattgtcagaaagaatattccaagacagtgtgccaaaggcagtaatgcattttttggttaatcatgtgaaagacactcttcagagtgagctagtaggccagctgtataaatcatccttattggatgatcttctgacagaatctgaggacatggcacagcgcaggaaagaagcagctgatatgctaaaggcattacaaggagccagtcaaattattgctgaaatccgggagactcatctttggtgaagagaactatgtaatactgagactttgttgactcaaaacttgctagttactgcctacctgagtagaatcttatttatgaactcctgtgtattgcaatggtatgaatctgctcatgtggagactggctataaactgaaaagtgtattccaaattgcagaacacatcacacatttaatccaaataataaatggctgtttctaaagtttcccagtatatataaaatacatcaagtctgtcttgtgacagtttcatctgaacttaacttaaaaacaactgttaatgttctagttgtgcaaagcagtttgcctgtggataagatgacctgtgtaataatctttgttagtagtcttaaagctgctgccatagtcctccaagaagatagcaccaagacaacatttcatgtgactataatgcatgtactatataagctgatctggc

SEQ ID NO: 317760 - DNA, 1287 bp, Homo Sapiens
tttcgctcctctgtgtctcgccgcaggtgccgtttcccatttgggccccttgttcctgcattcccgtttcttccgccctggccgtccccgtgtgggcgggtcgtccctagggtgttatacggcgggccctttgctcccttcgagggtgtcttttcaccggtgtgcccggcaattcctttcctgccttctgccacctgtgctggaatgattcgtttccggacccgatgcaggagtattgatttaatgagtcgtttcatacctcacatctcgctgttccccgagcagatagttttcgtgcaacaggaactgtcaccatctagcaggttcacggcatgacctttttgtggactggctggcataattggaatgggttttgatttttcttctgctaataactcttcagcttttgaagttttcagcatgtcctctccagttgcctgtggttggttctgtgaacaccatttctcccaaccccaccacctccagatgcaaccttgtctcgtgatacagctgaaggtaattctctggctagcctgtttctcctttgttcctctatattattgttcattagcccacaagcatcagcaaagtctggatgttttgtgttgatataagccagttcaattgccactaagttatggaccatttcatttgtaacaggcaaccttttacgaagaagacaagtcaccacttcaactatggcatcatgaagtttaggaaatcgtaacaattcctgtgtactgtaattgctacagtgctgaatgatcctttgcatttcctcatgaaccagttccacacagcggaggctgggctcttctagacgtttgatttgccgcttcaccagtaactcaaatgaaacctcaggcacaaataaagcaggacgaggaccagtagcatttctaatggcagtcaaaatgtcaatagtgttaaggccaccaagtggatcaacagattctaaggttcgcccaaaagtctcatggaaaatataacaaattctagcaccaccgcatagctccgaagtttcaatatattttgcagttccttcaatagtgttacaatattctgtggcaaatttggtaataagttggagtaaagtagcacttttatcatccacgggttcaccgtagctatttagaagagactgatactgagcagctagaacatttattcttgttttcaactctggtaaacaatctctgatgtgatgcatcagtaacctgtttagagtcctagcaagatactttgttccatttctattggcccctcgtgccgaattcgccacccagg

SEQ ID NO: 317761 - DNA, 488 bp, Homo Sapiens
  misc_feature (405)..(405): n is a, c, g, or t
  misc_feature (427)..(427): n is a, c, g, or t
  misc_feature (468)..(468): n is a, c, g, or t
atatatactgggaaactttagaaacagccatttattatttggattaaatgtgtgatgtgttctgcaatttggaatacacttttcagtttatagccagtctccacatgagcagattcataccattgcaatacacaggagttcataaataagattctactcaggtaggcagtaactagcaagttttgagtcaacaaagtctcagtattacatagttctcttcaccaaagatgagtctcccggatttcagcaataatttgactgggctccttgtaatgcctttaggcatatcaggctgcttctttcctggggctgtgccatggtcctcaggattctggtcaggaaggatccatcccaataagggatggattttatacagctgggcctactaggctcactctggaaggngtggtcttttcacatggatttnacccaaaaaatggcatttactgcccttggggccaactggtncttggaatatttcttttctg

SEQ ID NO: 317762 - DNA, 482 bp, Homo Sapiens
  misc_feature (35)..(35): n is a, c, g, or t
  misc_feature (48)..(48): n is a, c, g, or t
  misc_feature (55)..(55): n is a, c, g, or t
  misc_feature (90)..(90): n is a, c, g, or t
  misc_feature (96)..(96): n is a, c, g, or t
  misc_feature (101)..(101): n is a, c, g, or t
  misc_feature (167)..(167): n is a, c, g, or t
  misc_feature (434)..(434): n is a, c, g, or t
  misc_feature (436)..(436): n is a, c, g, or t
gaagttttgtgttgaaaataagcccgttcaaatgncccactaagttanggaaccnattccatttgtaaacaggccaacctttttacgaangaaagnacaantccacccacttccaaactatggccatccatgaagttttagggaaatcgttaacaattccctgtgtnactgtaattgcctacagtgctgaaatgatcctttgcatttcctcatgaaccagttccacacagcggaggctgggctcttctagacgtttgatttgccgcttcaccagtaactcaaatgaaacctcaggcacaaataaagcaggacgaggaccagtagcatttctaatggcagtcaaaatgtcaatagtgttaagggcaccaagtggatcaacagattctaaggttcgcccaaaagtctcatggaaaatataacaaattctagcaccnancgcatagctccgaagtttcaatatattttgcagttccttcaatagt

SEQ ID NO: 317763 - DNA, 767 bp, Homo Sapiens
  misc_feature (455)..(545): n is a, c, g, or t
ttctcaaaatatttacatatctgtacaaagtaacagggtttgttagttctgcaggtaacagcagcagcttggctttcttctaactttatttaaaaatagcttcattcacttattcaataataaatacaaaagtttctcttattttacagaaatcaaaatctccaataatctgactcatggaatcaagtatttaaatgtatttagtgcaagttattatcccttagctctatccctaaggaagtcatttcagtacattccttgttcagtggtgtctactttatttaaaacacattttgaagttagagggcctgcccctttttaataaggccgtggccagcactctctgtccccctcgctggtgatttcagtcttacattcataggaaggcccctgcccgggacagggcagccatcggctctttgccccagtaaaagtttctccttagtgagactagnnnnnnnnnnnnnnnnnnnnnnnnnnnnnnnnnnnnnnnnnnnnnnnnnnnnnnnnnnnnnnnnnnnnnnnnnnnnnnnnnnnnnnnnnnntgctggaccattccgtgattccgtttaacctcggccacttcaggaacgctgcttctgtcagcttcctcctggcgctgctttaacctaaaggactgaggaaatcagaactcccagaagctttttcaaaaagtcataaaacagaaaacaaaaatctctttctgtctgcaaaattccaatggtgtgttgaatcgcctcttcctagggacaagccgcccgctgagc

SEQ ID NO: 317764 - DNA, 685 bp, Homo Sapiens
ttttggcttttcacttcttttatttgttaaaatagtcacatccatatacatgaaaagatttgaccataatgcattcattgattgtggctcttgccatctcgtggcatccaggatcctggctgaaaggttttaccagtgctgctgggagccactgagggttcttcctttccaaagtatggagcagaggcatggcctttaatttgagtttgaactggtggaggcaggagttcctcactggtctctttactaaggagtttttctttttcataaaaatcttggctttttattttgatttcttctctgtgtttttcattctttagtatttcctccatagtaggtggagtctttcttgttcttctaatccaagcttcccattctgttggaatatcccctgcttcatagtctacttcttttttatttgctgcttctacaattcttttctctcgaatagtttgtcctctccagttcttgtactgcgggatgtagtagtatttgttcccgaattggtccgtgcccacgtgctctttcacttcccttgacagcgatctccacaaggcgcggaacaaatcctgagaccaacccatgccgtccacccagtttccagcgctgccagcagcgggacccgcagtaggggtaatgctccagccgccgacccagcccaccgaggcggagaagtcaggccccc

SEQ ID NO: 317765 - DNA, 1022 bp, Homo Sapiens
  misc_feature (262)..(262): n is a, c, g, or t
  misc_feature (287)..(287): n is a, c, g, or t
  misc_feature (340)..(340): n is a, c, g, or t
  misc_feature (352)..(352): n is a, c, g, or t
  misc_feature (359)..(359): n is a, c, g, or t
  misc_feature (824)..(824): n is a, c, g, or t
cagtggctagaaacaacaaaaaagcagtggctggaaccctactgaatagagcttaaagaagtactggttacattcacagacacagtagccactagccaagatatagtttatctccatcaaacttaaatagataaagtcagtaagtatgaccatcttactttcactatttacgctctttaaatagtaaaggtatcggtttgaaagatacatagaaccataggaacagtgaatgatcatttataaaacagctccttttcctgantcaatatattgctaaaattcttccngtaaccctccctttttatatgatcacagatccctccacatctattttattttngttatataaaanttattantaaactttggtttccttgcattcggtccttatattttaaaaagtgattaaaaacagtactggatatgaatcacttctgcaaagtttaatgagtgagaaacattcaaccaaggtgatttttccttggaaaaccctacaaaaactgaattttataaacagttacttattttgatagatgttccatttataaatagcagccattacttcactgtctacaaaattgcaggctgtcacattttacatgtttagaattcaaatgttttaagattagattttctagtaagagttaaaataaaaacaaagttacacagacaggttagttgtcctatgcaaataaaacagctgattttcatgattttgctatttagacagataagagacaaccattggattgacacttaatgtgtaggataacatattttttgtttaaagaggaaatgatagaaacttggggtggggcagctgncagcaggactttgactctactggaggctcttctgtgctcatgggaccagctatcgcaggatgttagtaccggagaggccctcaagttaagacttgagcaaagtgtgctattcagagaagctgagctatccctgctcccggttctactgtggtgaattggtgttttctgaggtctaggcaacaagagctcagagtagaa

SEQ ID NO: 317766 - DNA, 480 bp, Homo Sapiens
ccctatgccaaataaaacacctgattttccatgattttgcctattttagaccagataaggagacaacccattgggattgaacactaatgtgttaggattaacatattttttgttttaaagaggaaatgaatagaaacttggggtggggcagctgcagcaggacttgactctactgaggctcttctgtgcctcatgggaaccaactatcgcaggatgttagtaccggagaggccctcaagttaagacctgagcaaagtgtgctattcagagaagctgagctatccctgctcccggttctactgtggtgaattggtgttttctgaggtctaggcaacaagagctcagagtagaaggagtagacattttcgggaagtgggatgctgggcatgtcatgttgctctaacaagtgattaatagcacggaaatgggaggaagatgaatgtattttaaatggatactccctatgctagtcttgggaaa

SEQ ID NO: 317767 - DNA, 931 bp, Homo Sapiens
tctagaacaacaacataggcattttatttcttttcattaagcttcttagtttcttagtatcacaatggaatgatgagaaaacaacaaaaacgtgagtctttgcaaatctctgacaaagagcagagatctcaaggcaattggggcgggggaggcttgacagaagtgccagagcagttccaacgtcacatctctccttggctggaatggtgagaaggtggcactgtcgtgagctgtccttggcaattctgccccatgagccacgtgcgcctggtctgcatgggccaccccgcgggatttcctggtgcctcctagtacctggccacacacccctccgcctgctccaacgccctgggagcaccgtccagtgctcaggtggacccagaagccagctctgctgggcagcggcaagatgtggaggagcggcagaggcaggcagcgttgcttgcggtgggagaagccaaggagtgtgaccaaggcccatctgggagacatctgtggtggaaggtagggctggcgcaggtggcagcagcagaagtccgtgtccccaggcagtagcaggcctagagcttcacagtgccagggggcaggctgtcgttgcagagtctgtagtagcgcaggtcgttgaccagcctgtgcacattctgggtgaatgagggcaggtcccgatccatcttgaaattccgccccagcacacttttctggttggcatccacaccatcacagctggtcaggaactctgggaggaaggcggcaaagaagccatcaaagtcgactgaggccatgttgtagatggcgatgccaatctcctcctgcagaagatcatgggacttgtggaccaggacctggagcagcacgttcacaaactggaacagcatggcagtccggaagatcttccctcgtgccgaattcgccacccaggcctcgctacctt

SEQ ID NO: 317768 - DNA, 1020 bp, Homo Sapiens
  misc_feature (407)..(417): n is a, c, g, or t
  misc_feature (840)..(863): n is a, c, g, or t
atggataagctttaaaaagatgtcattttggttttcaacacatataaacagttatcaaaatctgaaataaaaatgctgctgtggctcagaccttggcctgctaatctgcgtgcacaactcttctgacccacgcagacaaagaggcacatggagctttttccttttggcccccccaatccatactcataggccttgtaggatagaggctgtcatgcatggactgctcccatgtggcctaagggcagcaggatggagaggtggcagctgggtgcctagtgctaacaatgcaggataaggttagcttgcttagcatggaatccaacagaaagttgagctgcatgatgatccctttcaaaaggcttcatgggagtctctccttttgcagagcatgaaatgagcttttttcnnnnnnnnnnntataataataaaggattgatcatccacaggcttcatgataaactgtcccaggctgagttttaatagctcattattagctatccaagattaatacctgattttcttgtcttttcattcaaatagtttttattttgcttttaggaccataaagctcaggaagggttcataaccccatccttaaatgtgtctactcaatgtagtatgagcaaactagaaaagagaaagaggatggcatctccaatgtcctcttctcaatcaactcaaatcaagaaaatttcacacaagttttctgctgccattaaaaattgtgatttttccaatatgaatattctgaatatttgttctccttgggaggctctgccccactttttgctaagtatttgcttaaatacaggtcctctgacccttttgttcaagtatagnnnnnnnnnnnnnnnnnnnnnnnnaaagaggagactgcatcatgaacccaatttaagagattgtttgtattgaattggcccagtgaatattttgccctgcactgttatgtcatgctgggttctatgaagtgaatgaaagtttgacactggcactggagtaaccctcgtcactcccaatacc

SEQ ID NO: 317769 - DNA, 442 bp, Homo Sapiens
ggaattcggcacgagcgcgaaatggcttaatccttttgggccttgcgtttaagatttgctaggtggaaacacgaatgtttggggctaactaatcctactacacaacccttcttactgcgtctatgcaacatcatgtaaattgatgagattttgcagtctcactgttggaaatagacactattcccatccctgtgtgaatgcctggtactattctctgtaatccttttgggtgattctttccccagcctcacatgttttctttacacattttgaacactttgccgaatattcagaaatattctcctttggagatctgtgggagtatttctctgtgtagcattctctcctttattactagatctttcaaatttatttgtctttagtcttcctgggttctcatccctttctgctaaactccaggagtttgtcaagagtctacctg

SEQ ID NO: 317770 - DNA, 297 bp, Homo Sapiens
ggaaggtgtaatgcctacccgccagcccagaccaggacagacgggctatacacggggagggcagacctgcgaatggataatttcagtgtcctgtggctcaatagagatccaggcagagtcccatgggcgtgtttaccctagataatgcagccacaacactgtagagccagtgccagaacacaggtcctctttggcttagttctggcctctttgtcttatggtggatttctccctaccatagaaaatgactaattgtatttctctcagaaggatctctgtttaagtcaaagaacttga

SEQ ID NO: 317771 - DNA, 1171 bp, Homo Sapiens
ttttatcgtttggagaagtttattaccacccctaccctccagtgggatctcaatgtcacgatgagtccggggctggctttccgccgggaccctcctgtcctggcacatggcccaccccagcacgaagcctggccgggagggctcaggtgggtggctgctaggccaggcctccccagaacgactgccccatgtccagcctgtatctcctgagtgccatgctgcactggggagggacagggctggctcggggctccaggaaagatgcctcacatgtgcctagaaatgtaggcgtcaagggaaggctgtgtgtgggggcacctgaggggctgggcttcccaggcatctgagttcttacggagccctaataggcacatccccaaatggttgtatgaggatgagcacaaaaatagcagatggggtcaccctcaccctccactgacaatggactgggatccgactcatgcaacattccttctcggccgtaggttccacatccatgggttaggtgtgctggcctggagcccgccggccccggtccccaccgcacaaggaccccatcacaagtgggtgtcatactcttcctccagaaacggattaagcaaccagcatgtgaaccttacgctctgtttacaggctgagtccccacagctcttccagcttcagccaggccagggtcaccttcagattgaatgtgcagggcccctgaggactcatgtcctgagatggcccttcttcctgggatgggacccccgggttcaggtgagaggtgttcccgggccccttcacctggggctcaggttgagaggaggttgttccgggccccttcacctggggctcaggtgagaggaggtgttccgggccccttcacctggggttcaggtgagagcaggtgttccccgggccccttcacctggggctcaggtgagagcaggtgttcccgggccccttcacctggggctcaggtgagagcaggtgttctgggccccctgcatctgaggcctgggagttgaccctgacttcctggccccagaaagaaaagggaaaacacagagatcacaggagaaggacacacagtcggggaggttcgcagttctgccccaagcccagcatccaggctcaggaagcccctcccccgacgcgtggtcgcatatcccgtacttccggccggacc

SEQ ID NO: 317772 - DNA, 422 bp, Homo Sapiens
caatggcagaatctcttcacagatgtcccaggcacaccaggggtgttccgctgaggggtcctcagcctctgggtggcgcaggtggagcagggcctgcacgggaattcgggaggccaggtagcccacagcagtgtagggctcctggatctgggcgatagggtagatccctgccagaacctgcaactgcctaggcagaagagatgggaagatgaggcctgggcagtcacagagcttcacagagggggtaagaaagtaggtctgaaagtatcgggtatggcccggggttctggagacactcacgcctttccgcccccccagcccattgatcagcgaggactttcccacattagggaaacctgaggaaggcaaggacaattagcgtttcacaggtttctactctgtgatgggacttggtctcgtgc

SEQ ID NO: 317773 - DNA, 1011 bp, Homo Sapiens
  misc_feature (66)..(66): n is a, c, g, or t
  misc_feature (81)..(238): n is a, c, g, or t
  misc_feature (258)..(258): n is a, c, g, or t
tgtccgtctcgcctgtcgtgtgtaccacgccgtggggcgcagcagaccctcccagcccccggacgncgtcagcctccgttnnnnnnnnnnnnnnnnnnnnnnnnnnnnnnnnnnnnnnnnnnnnnnnnnnnnnnnnnnnnnnnnnnnnnnnnnnnnnnnnnnnnnnnnnnnnnnnnnnnnnnnnnnnnnnnnnnnnnnnnnnnnnnnnnnnnnnnnnnnnnnnnnnnnnnnnnnnnnntcctcacctctctccctctngcatctcgcgacagggtcttcccccaggcagcgctggcccatcactccaacgtaggggtctcatcatcccgttttcccccttcatccgcatcccggtcttcctctccctcctcctcacaggagctggtcagctcttccttttcctcctcctccctcgtcacctgctggccccaccctgccctgcaaaaccaccagctccgtggtctctggatgggactcccaggtgcctttctgttcactgtagcctgggggatgaaaacacaggctgaggcggccgtccactgccagccgcaagagactgttggctgctctgtacacatcattccgagccgccttggctgtcttgtaaccacgtttctctgcccaggcttcacagatgtcccaggcacaccaggggtgttccgctgaggggtcctcagcctctgggtggcgcaggtggagcagggcctgcacgggaattcgggaggccaggtagcccacagcagtgtagggctcctggatctgggcgatagggtagatccctgccagaacctgcaactgcctaggcagaagagatgggaagatgaggcctgggcagtcacagagcttcacagagggggtaagaaagtaggtctgaaagtatcgggtatggcccggggttctggagacactcacgactttccgccccaccagcccattgatcagcgaggactttcccacattagggaaacccacacagccgatggtcacctcgtgccgaattcgccacccagc

SEQ ID NO: 317774 - DNA, 365 bp, Homo Sapiens
  misc_feature (97)..(107): n is a, c, g, or t
cgcgctctcagagtgctgtgattacaggcgtgagccactgttttccgcctaaatgctacttagttttgtttgctgattttgctgtgtgtttatgtgnnnnnnnnnnncgtctagctattttgaaatataccctaaattataggtaactatagtcaccctagataaattacactttttatattttaaaggtttcttctctctctgtatctcgttcacacaaattctgatgtctatagactgctttgttacaactggcaaacttctgtgatctgggaagacatagtgacccctggtgatgcacagctctgctgctctctagtattggccatttcattttggagtgctttttgctccttattacaact

SEQ ID NO: 317775 - DNA, 373 bp, Homo Sapiens
aaaataaacatggagtccatctttcacgagaaacacgagggctcactttgtgctcaacattgcctgagtaacttattgcaaggagaatattttagccctgtggaattatcctcaattgcacatcagctggatgaggaggagaggatgagaatggcagaaggaggagttactagtgaagattatcgcacgtttttacacggcttctggaaatatggatgacacgtggttttttctctattcagaaatgaaagatcatttatatgcaattataaggaacactggtttacaggtagaaaattaggtacatatcttgcacttttcttggctcaattacacacaggaaggttattctatatttgtcggtaagggtgat

SEQ ID NO: 317776 - DNA, 422 bp, Homo Sapiens
ccaccccctattctgagcgccgatgacctcctgggctcacctaccctgtccgatggcaccaataacccttttgccttctccagccaggagctggcaagcctctttgcccctagcatggggctgtccgggggtggcttcccgaccaccttcctcttccggcccatgtccgagtcccctcacatgtgttgactcttcccccagccctcaggattctctctcggaccaggagggctacctgagcagctccagcagcagccacagtggctcagacttcccgaccttggacaactcaagacgcctggccatcttcagcagactttccatctcagatgactaagccagggtagggagggacctcctggctacttcaggccctaccctgtacccacatcccataccctcttctccctacccataccatt

SEQ ID NO: 317777 - DNA, 367 bp, Homo Sapiens
cctcttgggggttgtggggcaaatctgccaccagtcaaaaaccactggctaaagtatatggaaggagtagtgcactgaggtgtccaaagccaagttacaaggtaggaaagataaatatctttgaggaagaccaagagcaagggaagagggacttacctatagaagtctgtacatctatcccccaggggtctccaagagcagtggttctcaccccagagcatcagcatctcctgggaacttgtcaaaaatgcaaattctcgagcctctcccaagacctactgactcagaacctctgagagggtggggcccagccctctgttgtcttgacaagccctctgggggattctgaagctccctaaagtttgag

SEQ ID NO: 317778 - DNA, 375 bp, Homo Sapiens
gtgggtattgctgcggctggtgcgtcgtcgctctagccagtaaatgacctgcgacataactatttgcaaaacaaatggggaagaccaagataaagataagttatatcacaggaaagcaattgaaaatgcacttatctgcagatatgtacagaccacatcctaagattgacttctgcctcaacagaaatacatgagccagtgccttattggaaatgatttgcgtgttttaagaactggtgtatataggtacatcttgaatgttctgctttccttgccttatgcctgtacttcacctcagccttcaattccattgtgtttccttgctacttggtatcttgaaatctggtacgaaactattgcatgatccctgcacct

SEQ ID NO: 317779 - DNA, 1037 bp, Homo Sapiens
aacaattacagaagggagggagatttaatgttgtccatagaaagacattaaatgtcagactgacaatttagttatggttacaaaccggaaaaccatgccatttggagtaatggaatttgaagttactagaaaacgacaacagatttttgatacagaatgacaaggcttatctataacacgtcaacgttttcgacgactctgaaatttataaatagctggggagttcaccgtttctttcttcaccttcactttttggagttttatccataagatctttgcgtgtttgaattttctgagcaataacgaacaatttcttctctcgttcaatccgctgtgtcaggcagttatactgcttttgcctttctttagctattcgcttaagtccagtctgattggtaactcctttcactttttctttctgcaaggtctctatcctgggcctattaaagactctgtcgactagctccggggctgtttgcaggtgagttgcgacatcaaactgttcaacttcctttttggtgtcaaaaaagaacacatgcttgttctgttgcttcccctggaaatccagcagatggagctctgattttagtctttcgattttcttagcttctgcaaccctcttcatttctatatatttgacgtcctgagttctcatcagctttagttgttctggggttacttcttccttagtctccttaataatatgtactccatcctggagtttaacccgagtcattttgtagtagaattcatctggatttttttcaagagccttcttccgaagagctttgaggtattcttgttttttacggtagtcatctgcacgaagtttgtaatctttctttttctccagcaggcccagatgttttcgaaagccaggctggcttcgctctctgtgttcccgctgccgggacttagccgccttccgaaaagccgccgccatgtctgtacagccttggaaaagatcagtggagaacgccggatccgcactgcctctgccgccaagtccactgattcctaccggaaataggcctccc

SEQ ID NO: 317780 - DNA, 1048 bp, Homo Sapiens
  misc_feature (181)..(190): n is a, c, g, or t
  misc_feature (852)..(852): n is a, c, g, or t
  misc_feature (873)..(873): n is a, c, g, or t
  misc_feature (881)..(881): n is a, c, g, or t
  misc_feature (939)..(939): n is a, c, g, or t
agtttttatggcagtgcctgtgaagacacgcctgggcctccatacagtcacacaggaaatccacagagagcatgctgagagcagccagcggctgtgctgtcatcaggcctgtgttatgatgccacaagtgaatggcacgtttgttcctctttatctctgagcattgaaggacttttggttnnnnnnnnnnttaagttcagagtaatccttttcatggaagaatcttcaggtcaccaaagaattgaaattttaagccccagattgtactgagctgtacctgtgggaaaaggaatggccagggtattgatgatggaaaagattcaaatgaggagttagaaggcaagccctctgtgggcagccgtcttccagaaacctcgaacttatgtctgtctccacctgagaaaggagaagaaaagctggtggtgacccctgctcctgctgggccatgccatggctctgaagatgccccgtgttcttaggaggtgctcacccctggcacctaaagacatttccttctggttgttgctctttaaaaacaaaataagcccctgaacgtgcttgcaggccagtttgtgtgcctgcacttgacgaattaccttgaccaacgggccaaaggcacagagctccaaggcatcatctttccttaaaatcctgagtgtttattcaaagggacatggctctaggtacttattacatttgtatgcttacatttgaaatatcgtagcggctccttcggtttcttcttaagaacattacatctaattatttttcggcaagcttgtagacgacatgtttccagctttgaaatcgattgtcatcctctatgagattcgtagcagtacatacttcatntcgattgcgatgacactgtgnctaaatancttcactgtgacattgaaaaagctctcccgctgggagaagacaacgaaacgctcctcngagtctgcggcgtgtattcggacaggcgatttgacactccggtacgcgcccctctggaggccgcgtgatgcgggtccagctctcccgagggtcctagaggcgccgtcct

SEQ ID NO: 317781 - DNA, 2005 bp, Homo Sapiens
acatccggtagagttagagcccgtgcggaggcggtgcggagcatttcggctctgagcggctgggcgaccggcgcgtcgtgcggggctgcggcggagcctccttaaggaaggtgcaagaggttggcagcttcgattgaagcacatcgaccggcgacagcagccaggagtcatgagcgacagcggcgagcagaactacggcgagcgggaatcccgttctgcttccagaagtggaagtgctcacggatcggggaaatctgcaaggcatacccctgcaaggtctcgctccaaggaagattccaggcgttccagatcaaagtccaggtcccgatctgaatctaggtctagatccagaagaagctcccgaaggcattatacccggtcacggtctcgctcccgctcccatagacgatcacgtagcaggtcttacagtcgagattatcgtagacggcacagccacagccattctcccatgtctactcgcaggcgtcatgttgggaatcgggcaaatcctgatcctaactgttgtcttggagtatttgggctgagcttgtacaccacagaaagagatctaagagaagtgttctctaaatatggtcccattgccgatgtgtctattgtatatgaccagcagtctaggcgttcaagaggatttgcctttgtatattttgaaaatgtagatgatgccaaggaagctaaagaacgtgccaatggaatggagcttgatgggcgtaaggatcagagttgatttctctataacaaaaagaccacatacgccaacaccaggaatttacatggggagacctacctatggcagctctcgccgtcgggattactatgacagaggatatgatcggggctatgatgatcgggactactatagcagatcatacagaggaggaggtggaggaggagtaggatggagagctgcccaagacagggatcagatttatagaaggcggtcaccttctccttactatagtcgtggaggatacagatcacgttccagatctcgatcatactcacctcgtcgctattaaagcatgaagactttctgaaacctgccctagagctgggatattgtttgtgggcaatattttttattgtctcttgtttaaaaagtgaacagtgcctagtgaagttaggtgacttttacaccttttacgatgactacttttggtggagttgaaatgctgttttcattctgcatttgtgtagtttggtgctttgttccaagttaagtgttttcagaaaagtatgttttgcatgtatttttttacagtctaaattttgactgctgagaagtttctattgtacaaaacttcatttaaaaggtttttctactgaatccagggtattctgaagatcgaagcctgtgtaaaatgctaccaaatggcaaaaagcaacaataaacagtttgatttttacttttctttctaacatatcaatgcttagcagaactattcagattgtcagtagtaaatttaaagacaaatgcccgttttcctccagtccatgaaacataccatacttatatacctgcaactaagtgtttaaaattatgctctgtaactctgtactgctagtattagaactaaaaatcttaaaatacagccagtgcttaatgcttatatcaatgtggatttgtcggcttttatgtaatctgtaatatgtatagcaggaaatacgaagagttacacagtgtatgccttaaaaggctgtttcttaaaggtgttacaaggggataatggtatttcaactagttatcagcaagtgacaatacattccaccacaaatacactcttgttcttctagcttttagactatatgaaaaaaccgggtgcttcaaagtacatgataagggaacactatacctgtgtcatggatgaactgaagactttgcctgttcattttttaaatattattttcaggtcctttgcttaccaaaggaggcccaatttcactcaaatgttttgagaactgtgtttaaataaacgcaaatgaaaag

SEQ ID NO: 317782 - DNA, 365 bp, Homo Sapiens
ctcttgtccatgtcaaagtgtgacgcttcatttattaattgtttgctatgatttaactactaaatgctattttaatttttttggcttgaaaataagtcttaagatgtcatcaagcttgatgccagcaaatatggcagagtagggaaccctcaaaatttatctttttttacaattgcactaaataaactggcaaatactctcagaatcaactttactggcattatggaaactaatcaaaagtttacagcaaccagacaaatgcttaataataaaaccccctgctctctagcttggcagtggctctgaagacaacagtctacatttcactgtactagtccactgagtacaggttcttagtacctgag

SEQ ID NO: 317783 - DNA, 572 bp, Homo Sapiens
ttcattatgatcctaacaaaaccagaagtttccaggagtcagcaagctactcagtatctgacgtggtttctaaggtggagttgcatggggagcactctcccgtggctgctgagtgaaggcaacagtgatgtccaaaccaagcccgtccggctctgaaccaccagttggcaggccaggatgactccagtctttagcaaagagctttccattctacctcccgaaatcccagaccagatggatgtctcctcccaactaggcgcagagggtagcacagacttccaaaaggaaacaccttcattaaatgcagcaggcagtcctatatgctgacccttgggtcaaaccacagcttaagcgggggaagaagtggttctgatccatgtacagccagatctgctgaggagtctggggttcccaggaaccagatttgcagatcctggacgatggtgcttcccttgctggcaccgtatcacctaacctaatggtttctctgaagacagttggcggagaggcaaaaatgactgtcttaaacagtcttccgacacgtggacagctcagcaggaccacacacctgt

SEQ ID NO: 317784 - DNA, 342 bp, Homo Sapiens
cggcacgagggagagtacagagcctaatgacgcttgaagagaaatgcggtgatatgactacccacacgcataagtgatttctttaaaaataagttttgaaagttgataaaataaaaacacacaaataagaaagtaagccccctgttataacaacactatttaaaatgagggcgttccctttggctctgtagtttgtgcagcagcttggtctgtcccatgactatgcagcatggtttcgtggacattctggacattttttgactgttttcctgttggtgagatgttgagattgtttgcatattgtctttcttcttttttttgagacacagtctggctctgtca

SEQ ID NO: 317785 - DNA, 796 bp, Homo Sapiens
  misc_feature (710)..(710): n is a, c, g, or t
  misc_feature (719)..(719): n is a, c, g, or t
  misc_feature (731)..(731): n is a, c, g, or t
  misc_feature (761)..(761): n is a, c, g, or t
ctggggatgatctatattatagtgacttcctattacttattataacctgtgtttgtattggagatgtgtctactattgggggaagaggttctcggtaatcgctcggtgggaaatcatggctctgccgtcctgcctctctgtgaccgtgggttcacgtggcctctgcggtgagtctccaagtttctgcctaggcgcctgtgcgtttcctttctgtgacgggattagcttagacatccttgcaaagcgatcactttcaataaattgggaaattgctgctccagcagatgcctcctgcgtctcagatgatccttcctccggcctcgcctggggtggcggcggccgacgggtgaccctcggccctctgtgggcagctgccagactccacccacttgcccaccacagggtcccagccccacggccttcctcccgagaggcagacaaagcttctggaaaaacctcaaatctttaatttctctcttcgcctggtgcagcccagacgtgagacacctgagcttcaaaaacaaacatggtaaaaacagccccagggcccgagagccgttgagttaagtgcgagtgggggagtcccctctccaacacccctcaaagtgcatcgggactggccccccaaagctgggcccataacacccttgataaatcttaggggattaattgaggtggggcttaaggagacgggtacatgtgggaggggnaggctcgtnccaaatttcttnggcctcgagggccaaaatttccctattagntagttcgtatttaaatttcgtaattcatgtcatta

SEQ ID NO: 317786 - DNA, 860 bp, Homo Sapiens
  misc_feature (372)..(389): n is a, c, g, or t
  misc_feature (676)..(676): n is a, c, g, or t
  misc_feature (783)..(783): n is a, c, g, or t
ctggaaaaacctcaaatctttaatttctctcttcgcctggtgcagcccagacgtgagacacctgagcttcaaaaacaaacatggtaaaaacagccccagggcccgagagccgttgagttaagtgcgagtgggggagtccctctccaacacccctcaaagtgcatcgggactggccccccaaagctgggcccataacacccttgataaatctacgggccgacaggcggaggggtggctgcccccaggggcccttggggttaaggggacagcggtgtggtttggctttagtgcaaaaagctggtttctttagaggcactttgagtggtgggacccctcccccgacctggcgggggggagggttcagggtcaagnnnnnnnnnnnnnnnnnnaagtaaaagcagaccctgcagctggtgaaagccagcccctggggctgtcctcgggctgtttcagccccgggcctggagggggtggggagggagaaggtggtagcttatgttcttgaacgagccggacttagtccaggaaccgctggcaggctttcttccagcggcaggctgtgcaccagaggtcccggcgctccatgccatacaccttccggcacttcttcgcgtcgccgcggggcttcctcagggtgactccgatcctggaggacaaggcgggtgggcaggctccnaacctccgtgggctgcggctcccaggcgggcgggcgtcaggcagccctacagggagacacagccagggcttcactcccctccagagagccctgagacccgccccagnctgccacccgtggcctcacccacctggtagacacggtcactgtgacaggactgggggttagcaacggtgctcaggac

SEQ ID NO: 317787 - DNA, 375 bp, Homo Sapiens
ccagcaccagctcctcctcatcttcgtcttccaaccagcaaaccgagaaagaaacacacacccccaagaagaaggagagtaaagtcagcatgagcaacatcactttagacccttcacctaattgcagtgctggtcccaaaggcgataacatctatgaatggagatcaaccattctagggcctccaggatccgtgtatgagggtggtgtattctttctcgatatcacttttacaccagaatatcccttcaagcctccaaaggttacatttcggacaagaatctatcattgtaatattaacagtcaaggtgttatttgcttggacatattgaaagataattggagtccagcactaaccatttctaaagtgctccttt

SEQ ID NO: 317788 - DNA, 819 bp, Homo Sapiens
cccttcaaaatcataagcagctctcttctgtgacagacaaataatgtaagaattgtgaaaccccaatttatgtagcgtatctcttggtccactgtctgggccattctgtcatgttctgctctgttggtcatatactgagtggcaatacttcccaccaaggggtcggcaggattacagtctgtaagaagtgagcagatagaaaggaggactttagaaatggttagtgctggactccaattatctttcaatatgtccaagcaaataacaccttgactgttaatattacaatgatagattcttgtccgaaatgtaacctttggaggcttgaagggatattctggtgtaaaagtgatatcgagaaagaatacaccaccctcatacacggatcctggaggccctagaatggttgatctccattcatagatgttatcgcctttgggaccagcactgcaattaggtggagggtctaaagtgatgtccgccagctccttctgaattctcttggcgctggtggagaggagtttggagtttttgctcatgctgactttactctccttcttcttgggggtgtttgtttctttctcggtttgctggttggaagacgaagatgaggaggagctggtgctggccctcgaatcgtcatccgacatagcgaaccccccaccccaccccgcaaacagcccctctctttgtgtctggctcctccgtgccgccgcggcggctgctgctgcggctgcggctgggcctggccactcgtgtctctctctcgctgggagagaagcggaagtgcagcaacagcaactattaaacaggcaaata

SEQ ID NO: 317789 - DNA, 899 bp, Homo Sapiens
  misc_feature (58)..(58): n is a, c, g, or t
  misc_feature (63)..(63): n is a, c, g, or t
  misc_feature (82)..(82): n is a, c, g, or t
  misc_feature (111)..(111): n is a, c, g, or t
ctcctactgccttgggttccccttttcctcccaacttgaatgccttggtggaatgccncttgncgctgcaagtcactgtgangccaagattgaagaaattcactggtttgnatgggtgaggctggtagagccactgggagaatgtggggcagtgaaggggagggacatcttcctagcatcaccagcatcctgagctttgtcttgtgttgggagtcccacaagggctggtgcaagggttagcagctgctacttgaaccctaatccctgggtggatgtggtctcttgtaacttaagagcaaatgtttgtgatgacatgcacgggtgggcagaggttgaaaagaacaggggtctacggaggagccaggccagccacgtgagacccttctttctaagttggcttcttgtccattcctggggattggggaaagaacgacagaacttaccttccatcttccttctcacaagcagtgttttgggtgtccccaaaaggaggaggcaagaactcaggtgtggggtggaggggatggggctggctaaagaagtgagtatgaccccagaggccagagagggcagggagagaatgcctggccacttacaggaggggatctgtaatctctgggcctccctgttctgcctgaagttgggcagggcccactgctagcacaccttggagagcggtacctcctgaggaaagggctggggagtgatcctgaggggtaaggaccctagcggccttggccatcccttcccagacacagacaagtggatgcttggcttgggaaatacttggccccaggtccagggtttcttggcacaaaaacagttcactgcaagtctcttctcttcttccttgtggtccagcaaactccggctgctctgacacacttgtagcatctaag

SEQ ID NO: 317790 - DNA, 2425 bp, Homo Sapiens
  misc_feature (58)..(58): n is a, c, g, or t
  misc_feature (328)..(337): n is a, c, g, or t
  misc_feature (1629)..(1726): n is a, c, g, or t
gccgtggttttccaggttttacccctgaattgggggcccgcggggggagcccaaaaangaaatgggtttttaaaaaaagccttcttcggagggcccgagggccgggccggccaaggttttatggttcgtttttataaggcggtgcgttgcaaaagccaaccatttattagaaccaatacaagagtatgaaaagggggaaaagaggagggtagaagagggggagagaatgaggtctgcatcagatgtcagttatggaaacacataaatgcttactttttaaacatttacatttaaaaggtgaacatatatatagaccacttatactttnnnnnnnnnntcaaaagcagacatgtttggctgaaataaaaccaagaaacacagctaaaactcccccataaacctaaaagtccatggagaattcaatttctcatttccattcagaaatctggctacaaagtgatttgtttgctatttgggacagtacagagtgctgaaagaaacccagctcttgagtctcttagatcccatcctgtaggaagtggtgggaaagccagcggaccatgggcaagtcaactcctggctacttggcagggagtcagactgtgctctctccattccccaggactccacagaaccatctggtactgctagtgctgggtgaacagtgagagcagagtccacaaaacacagagaaccagaatgtgaccgcaaggagccaggaccttgtgctttttcatggattacaaatctagggccaaggagagggaaagcagaaagagccctattgggaagaggagctggctgcgcccctaaactgagatggaaagagtaaggctcttgagcccacacctggccaagtagaaatagtgtccaaagttttctcaaaccagagggaaaaaaggtcaaggttaggttcagactgcagacactaagagatgacagatgttgaatacggtgaatgggatgaagctttaaggatcaatgcccaattctgagtgttatacacatttctaggaaaaataattccaatgtagcttttgggggtggggggtggaaataaggtggtcacatttattcaatcagctggtccctatgaggaaggagaggcccaggtacagataccacaaaggggtacagtgacccagctgtcctgggattggttggggagtggtaagcaatgacataaatcaaaaccattgagggttgctttgatcctgagacagtctgagtctgcttcaaacccatggggaaaggaactttaatccccaacctgcagagagaaatacgcagtagcatccctgcctcacgattccctaatccaatgctcttgaatctgaaatggcctccctctgtgaatgcaagacacagaaaatcccaagtgccttccccaacaacatcctaagtaagtctggactagtaagattccaacattcatgaaaacactgtcaacatctgaactagcagctttgatgaggggtggggggcagaaaatttgccgagtcactaagtagttccagtcttggagacagctcagtgaggaccaaagcctgtgtgtcaggcttaaactctggctcaagacatcctccacagaggaccctgaagtattctattaactttgatttacaatgnnnnnnnnnnnnnnnnnnnnnnnnnnnnnnnnnnnnnnnnnnnnnnnnnnnnnnnnnnnnnnnnnnnnnnnnnnnnnnnnnnnnnnnnnnnnnnnnnncattatcatcagttgaggaggtgggcacacagagtcagcatccactcgattcttgttccatttcccagagcattttacctctcagagtgtacttgggagcagagggaagttggcaggatacacctcattccacaaactagattaattcaataactgaagggtattaactgagggcctattatttatctagtataatgtgaggaatcttggaaaaatgaactgcttctgaaagtcatgttatagatgttttgaaaataaaattacatctttaacattaaggacatgaattattttgtaaagaaatattcactttatcttaggaggtgaaggactaagtcacactgatttctcagagttttatactgagtaacctgaattcctaaaatccagaaagcaagatcacattccaacagaaacaatgaataagaaccttttccccagtggtggttcttggtagcgctcttataaagctgcaagttggtggcgtgggaatcctagcaccacaaaacaccctcttactacatcacatccctccccacaatacccagagggctgcatttttccaacctttctgcctcagctcaacttcaagagttacagcatcttcaaaaacacctcaagggtaaggatacaaatggtgacccctgcttttctattcagggagaggggatgaaaatattctctgtaactaatcatacc

SEQ ID NO: 317791 - DNA, 1033 bp, Homo Sapiens
gtaacaaaattcagatgtttaatttttttcaaaacttaactatactaatgaaaataaattatatgtagaccaccttcaatatttttacatcatctttatacaactgtaacagtgctttcaaaagacattttgtgaaggacattaatttcacatttaaaacgtgtttcaaaaataagggaacattaaagaacatcaaattagtctgaaatatatctcacaatgctgagaggcatactcttctttatcaaattaactgtatgtgtactcaagataacatggcttttaactaatgacatttcttgtccatttcagtaatttcttggatccaaaacaaaatctgtgtatttatttctttgaaaacatcatttgtcgaccgtgctttcactgccatggaatgatttgccttctcaatccagtggattttatggggagcttgcattttctgtgccactttctccaacaagttcttttcacacatttcatctgctgagcctgacacaaacagtacaggctcttttaaacgaaagaggtcttcatctctgagtttatgctgctgctttggatggtgcagtgggtaagaaatacaaatgagaccccgaacaaaatcatcaccatcatctggctcaatgtgacacattacagaagcagctgctcttgagcccattgaacgacctccaagaaaaacacctgcaagtttgtattctcctgatgtcttcaggtaattcaaaactgatttatacgccttaattctatgtacaatattaaggcctttacaggtaaatctcaggcagaaaaacccatgagatgcaagatgggatgccagtgacatcaaatgaggaagattcatatctcctgatgctccatgtgtaagaattattccatatgttaagctcttgttaggtaccaaacaaacagcatctagtaatttatttccaaaaggtatttttaatttaacccgggaaggcaaaagtggccgcgggcacccaaccgccgtcactcccttcagggagctgactagcgcgctcgaagcgac

SEQ ID NO: 317792 - DNA, 831 bp, Homo Sapiens
ttgcccctttcagttaattcttggatcccaaaccaaaatccgggtattatttcttggaaaaccatcattgtcggaccgtccttttcactgcccatggaatgattgccttttcaaatccagtgaattttatggggagcttgcattttcttgtgccactttttccaaacaagttcttttcacacatttcatctgctgagcctgacacaaacagtacaggttcttttaaacgaaagaggtctccatctctgagtttaagctgctgctttggatggtgcagtgggtaagaaatacaaatgagaccccgaacaaaatcatcaccatcatctggctcaatgtgacacattacaggaagcagctgctcttgagcccattgaacgacctccaagaaaaaacacctgcaagtttgtattctcctgatgtcttcaggtaattcaaaactgatttatacgccttaattctatgtacaatattaaggcctttacaggtaaatctcaggcagaaaaacccatgagatgcaagatgggatgccagtgacatcaaatgaggaagattcatatctcctgatgctccatgtgtaagaattattccatatgttaagctcttgttaggtaccaaacaaacagcatctagtaatttatttccaaaaggtatttttaatttaacctctgtatgactcattttcactgttgaataacaaacttaaagtgcatttacatctgagaagcaaaggacatctccccgggaaggcaaaagtggccgcgggcacccaaccgccgtcactcccttcagggagctgactagcgcgctcgaagcgaccgcctcgcctgcccc

SEQ ID NO: 317793 - DNA, 385 bp, Homo Sapiens
ctgcaggaattggcacgaggcttcatgtttcagtaaacacaaggagtttgtgaccaactatgttttctttcttaattcttctaagttgacttttctttcctcctgaaactagtctctgtagcctttcactctgttccttatattctcagcctctgagcagccctaggtaaggattatgctggcatcccctttttcctgtgcagtggaacccctcttatcttgctttccctaggagttgaatccttctccctgcctacctgcagcatctcctttccctttttaacacttaagttactcttctgaaattgctaggaccattgggggttttggtggtctgctcggctcttacctccgcacctcgaccgcgcgctccccttaccttact

SEQ ID NO: 317794 - DNA, 488 bp, Homo Sapiens
  misc_feature (116)..(139): n is a, c, g, or t
  misc_feature (367)..(367): n is a, c, g, or t
  misc_feature (387)..(387): n is a, c, g, or t
  misc_feature (393)..(393): n is a, c, g, or t
  misc_feature (411)..(411): n is a, c, g, or t
  misc_feature (422)..(422): n is a, c, g, or t
  misc_feature (432)..(432): n is a, c, g, or t
  misc_feature (438)..(438): n is a, c, g, or t
  misc_feature (473)..(473): n is a, c, g, or t
ttttaaaagtgttagaaacatttatttgtcaaaaaatttttttaaaaaagggaggagtggagtaaaacaagggtaaatttcagctaatgctgtaccacgatcacaggtcggacatnnnnnnnnnnnnnnnnnnnnnnnnccccaatggtcctagcaatttcagaagagtaacttaagtgttaagagtccagagctaacagaagagtaaaaggctgcttgccactacatgggtcattttaaaggggaaagggagatgctgcaggtaggcagggagaaggattcaactcctagggaaagcaagataagaggggttccactgcacaggaaaaaggggatgccagcataatcccttacctagggctgctcnagaagctggagaatttttanggaacncgagttgaaagggcttcnaggggactagntttcccgggngggaanggaaaaattccacctttggaaggaatttaaggaanggaaacccttagttt

SEQ ID NO: 317795 - DNA, 361 bp, Homo Sapiens
gtaatcttggaaataaacaaatgtaggggacacttaggaataagactaacaggacttggttgacttttttacttctgtcaatacattgaactgctaaaaagaagaaccaaatctcatgtgaagagcaagagggaggactaagagtataatcagcttcttctgtagggttatttatttttaagtgctgaaattctcacacgttttgtggcatctttctttattttcttaatggtattcatcctccaaaacattcagcaaactggagagctcttcgattgaaccatgtagacttgtgatccccaattaggtttaacaacttagctgaaggtgaatgggaacatttataaatttcctaaaccta

SEQ ID NO: 317796 - DNA, 363 bp, Homo Sapiens
tatgcatcttgatttttaaaccacgtcattgtacagagcattcagttttggctgtggtaccaagagacaggccacacttttactgtatttcttcatacttgaaattcattctgctattttcatatcagggtacagacttataagggtgcatgttccttaaaggtgcataattattcttattccgtttgcttatattggtacagaatgctctgttttggtgctttgagttctgcagacccaagaagcagtgtggaaattcactggctgggacacagtcttataagaatgttggcaggtgactttgtatcagatgttgcttctcttttctctgtacacagattgagagttaccacagaggcctgt

SEQ ID NO: 317797 - DNA, 1717 bp, Homo Sapiens
gctaaaacttggaatttaatgaattttactcactacagttatactcattttacattaaagtaaaaaagaaaatagccaggagagtaattcatctccagaaagcagtttaaagttattgtttttattatttttatttgctaccaatatttttattgtaagaaatacaaaaggtattacaaatatacaaactatttgctctttttgcctcattcaatttagctttcacataagtgaacacattggacagtgatatttcaacaccaattttgaaaaaaacaatgaacttcatcatctgacaataaatacctacattttcattctagcacccagtaagacatccagtttccaaaggattattggtatgcaaccctctgaattttctgacatgttacctttgccactgcaacagaaacaccactgcagttctccctttcccaataagtcagagtaaggggcaggtaagaatggctatctgacttcagaaaccctgggtcacaaagcatcccttacttgagctacttttaaaaccagatttttaatgatagggtacttaaagttttggtggtccttgaatgacatattttacgttacatatttaccctacttttctattctcctcctcagataggaagggtatagataaactggctatattttcatctgcctcttgggaaaggagcaagagcattcagctcagagcattctgaagacagtagccttagagataagctttctttctttcttcttcttttgcttcaagagggctttctgtgtgtaatggagggatggttgctagagtgagacagcccttcccctcttgctatgtctataccatacctgaggccatttttcttagagggcaaaaacgttagaataggtaggaaggttcttgctttcagagagctgtgctgcacccacagggtggacccgacaggccactgtggtaactctcaatctgtgtacagagaaaagagaagcaacatctgatacaaagtcacctgccaacattcttataagactgtgtcccaggcagtgaatttccacactgcttcttgggtctgcagaactcaaagcaccaaaacagagcattctgtagcaatataagcaaacggaataagaataattatgcacctttaaggaacatgcacccttataagtctgtaccctgatatgaaaatagcagaatgaatttcaagtatgaagaaatacagtaaaagtgtggccctgtaagatggagagaaaacagcagcctggaatgtggtttaataattcttgattagtttttctcttggtaccacagccaaaactgaatgctctgtacaatgacttggtttaaaaatcaagatgcatacaaagatgctagaggcatttctaatgggtgccatgagcacagtctgtgcccagcatcaggaaccatctctagatgaatgtggctaggtcaagttgggagtggtggccaggcctagacaggcacacctgtggtccatgatgtggaggaagatggagagcaccatgtggacaagccaggatggtagcagggaacactttagtggtagaaaggaagagatacaggggacagagatgtagaggtgtggggatgttggtcatcttgggctggttcacacagcctagatgagtatctgatatacacaatttctacatttctagaaccatgatttcaaacacagaaactaacaagtcaaatttccaaattaga

SEQ ID NO: 317798 - DNA, 1047 bp, Homo Sapiens
catactccaaggaccaagattagacctgtaagttgcctgtagatagactacttcttgcagagtcctcctaatgagagaaatggcagaaatatgggaaatgtaaatttagacaagtttgcaagaatcctgcctttgaaggagttaatagaaaagacgctgctactactgtttgttccaaatttaatggctttgaccagcaaactctacacgaaaagttcgtgacaaacattatgaacaaaacagcctaactgccaagactacgatgatcatgcccagtgcactccaggaaaaaggagtgacaacaagcctccagattagtggggaccattctatctatgccactccacccagtaagccatatgcagagccagtcaggtcagtgagagaggcatctgagagacggtcttcagattcctagccctctcgctcctgtcatagcacccagaacactgcagtctcaacattggacaacattttataaaccacatgctcccatcatcagtatcagggggaatgaggagaagccagcttcaccctcagcagcagtgcctcctggcacagatcacgatccccacggtctcgtggtgaagtcaatgccagacaccagacaaagcatcagcttgtcctgggcaagcaactggtcaacctaaagaagactctgaggagcttggcttgcctgatgtgaatccaatgtgtcagagaccaaggcttaaacgaatgcgacagtttgaagaccttgaagatgaaattccacaatttgtgtagggatgtcaaatttcagggtttttttgttggtgttgtgttattttgtggtattgtgcttgttttgtgatagaatgttttgacagggccccttttgtataggactggcaaatcatgggtgtttggcttttgttgttggatttatcctctgatgggaaatactgaatgggaagaatgttgttgatagggttcacatttcgtgccctcaccgggaattatccgttaaacttcggtatttttaaaaggtggtgcaataacaaaaggcgggaatttccgcatttttta

SEQ ID NO: 317799 - DNA, 1086 bp, Homo Sapiens
ttttggggcagctaaaatttttattctgttgtcaaggggcaagatgccagcttggaagtgccaaggagctaaagggcccagcactgccggccccagaactgtctgttcaggctgtgcagtaagcaccagagcctcgcctgtccacgaagggtgtaagcctgtgctccacaatgtgctcagctccagagaggcccaacaacctcaggagggcttggctgtggggtctgaatttctttcctttgtgcttgaagctgcgcagtgggttctgggactttgctctcttggccttcctacaagaggaagacagcttcttccgcttcttgtgagggcgtaccaggccacggagagcaggaggaaccaggtagtcaggaacatggcccaggtggggcttcaccactgcggggtgcaaaggtaggtcatgccgcagcagctggaggtccctagggttgtcttcaaagtatgtcttaagcttctcagaatgcagaagctcttccttgatctccttcaatcttgcctcccgaatggcctgcttagtcactgagcgcatggcatccctgcagcgatagcggaagccctcgatctcctccatccggaactggtaggggagcagaatggggcccctgttctctccactgagaagctcctcaatcttgcctaagtggaactgctccgtgggaagcacaaaggttaagactatgcctgggttgttagcgcgtgctgtcctgccagctcgatggatgtaggcctcaggggttgggggaagatcaaagttgagcacagcagacacatggtggaagtctatgccccgggccacacctgcttccggatcagaggccttgtcccctttgggccctcggccccgacgcttgcccttgactggggcccccaggacttcagcatcagttgctatgacacagtcgtagaagccttggttgaactgtgagatgatgtggcacctggagcgcagtggaagctctccattgagcacacaggtggggatgctgaactgttccaagaacaggcgtagccggtaactccgttctagagtgttgacaaagagcagagacttgccccgaatcaatgaca

SEQ ID NO: 317800 - DNA, 848 bp, Homo Sapiens
  misc_feature (199)..(283): n is a, c, g, or t
  misc_feature (568)..(576): n is a, c, g, or t
  misc_feature (774)..(774): n is a, c, g, or t
  misc_feature (795)..(805): n is a, c, g, or t
ggggatacctggtagaaggtattcattttattttgcatttttaattgttttgactttctgttcatttgattttgttgctccctctctcctggaacctagtttactactctcttctgtgttactctgaagttctgtttaagccttgaacatcctcttctcccattttcttggtatgtactcaggaccagctacatcattnnnnnnnnnnnnnnnnnnnnnnnnnnnnnnnnnnnnnnnnnnnnnnnnnnnnnnnnnnnnnnnnnnnnnnnnnnnnnnnnnnnnnttgttttccgaggggaaaatggtaatacttgtgtggcacccggggttaaacagcagaggctccatgtggccagaggcagagattagtatcctggcactccagtgacccactgggtgactcactgatgccacagcacccgctaggaagctctgctgaaccttagtatttggtcctaaattttatgactccatggagttcccgtagtccatggctagttaggaagaaaggaggtgggataagggtcaggcccaggtgacccctaagaaccaggagatgggtaaaagnnnnnnnnnatattctgcttttctgatctgtgagtacctgtttgtctccaggccaaacctttgggcttaaatatctttttccctaaacaggtttttgcctagtgttggaattttcttcttccctctggccttctttctgtgccccctttcccaagccccagactgctttacttccaaagcaaatctaataacaccgggattattttnaaaaggggagggtcccctctnnnnnnnnnnncttgcccccattgggggaatccttttcccaaaacctgcaccaa

SEQ ID NO: 317801 - DNA, 919 bp, Homo Sapiens
agtggtacggtcgcgaatctcgggatatcgtcgacccacgcgtgccgggaattgctaaagcttgtggaaaagctggatgtgctctcctgggaggtgaaacagcagaaatgcctgacatgtatccccctggagagtatgacctagctgggtttgccgttggtgccatggagcgagatcagaaactccctcacctggaaagaatcactgagggtgatgttgttgttggaatagcttcatctggtcttcatagcaatggatttagccttgtgaggaaaatcgtggcaaaatcttccctccagtactcctctccagcacctgatggttgtggtgaccagactttaggggacttacttctcacgcctaccagaatctacagccattcactgttacctgtcctacgttcaggacatgtcaaagcctttgcccatattactggtggaggattactagagaacatccccagagtcctccctgagaaacttggggtagatttagatgcccagacctggaggatccccagggtcttctcatggttgcagcaggaaggacacctctctgaggaagagatggccagaacatttaactgtggggttggcgctgtccttgtggtatcaaaggagcagacagagcagattctgagggatatccagcagcacaaggaagaagcctgggtgattggcagtgtggttgcacgagctgaaggttccccacgtgtgaaagtcaagaatctgattgaaagcatgcaaataaatgggtcagtgttgaagaatggctccctgacaaatcatttctcttttgaagaaattatagacagtactcgggaaccaaatagctctgcacaaattgctattgttatcttcaacaaagccgcagtatactgggttagataaagcggaaagagctggtattcccactagag

SEQ ID NO: 317802 - DNA, 462 bp, Homo Sapiens
ctagtggatcccccgggctgcaggattcggcacgagctttgattcctgccatccgtacctgagagggtcctaggagagctggctgggcagagtcatctgttccccagcttcaccgggtgtgccaaggaagtgcctgggaagaacaggactctgcagctgtgccccagggttgagactaccctgcctcccttgtgaactctgccacacagccatttcctgacttctgctgcatgtgcctggggcccctctgctgccagtctgctggtgtttgctggaggtcccctcctgaccctgttttcctgggtatcaccagtggaggctgcaaagcagcaaagattgctgcttgttctttcctctggaagcttcgacccagcagggaacctgccagatgccagccagagctcttctgtatgaggtgtctgtcagccccaactgggaggtgtctcccagtcagtatacaca

SEQ ID NO: 317803 - DNA, 659 bp, Homo Sapiens
  misc_feature (66)..(66): n is a, c, g, or t
  misc_feature (81)..(81): n is a, c, g, or t
tgctcctttataggcagggaaagggaattccattaattgtagaaattctcaattaaatttcagctntggttcttcaggaangaaacactccatataacttctgcaagtctgctggtgtctgaacaccatcttacctggaggcaggggcccaagtgtcccttcatcatcaaaggccaaaattggattcaaaaggaatttctgggctcctcactgttggtgaacatcttaatctggatggtttcagatccaatgggtaagtttaataatttccttcaaaattttcattctgaacagatacaccattttcatttggttgtttttccaaatcgggagtgctctccactgtcacttttgactggtgtgaggtaaccacatgtgggctgccaactggctttccatttcccggagcgtttgttgtacatggaagtgcagacacctctgttcctccagtgagagctcccttggctatatcaccgtttctctgatcactggttttcttatctgtagcttctgttctcctggttcttttcataatctcctcaagtcgcttctttctctccaggcgctcttgctcttctctctggaaatgcttctctcgttcctgccggaccctctctgcttcttcacgaacgcgagcttcttcttctttctgcctctgg

SEQ ID NO: 317804 - DNA, 636 bp, Homo Sapiens
gcaaaggctgtatggcaggatgagggctgcggacactgaaggcgtatttgtagggggcaacagcccggggagcagcagcagcaacagcagcgcgtggcgctaagttctgcacagctgtgggaacgccttagggaaagaacaaatacaattaaagcccatcagtctgggcaaagacccgtcaaatcccatctttcccccttctgtgtgcatccaataccacctccagactggcagctgtcagtcagcccttgctgggcggcaccagccccaccaaagtccatagccaagcggtccgggcactcagacccgactctctgagtggtagtagggaggccacgagaggccggagcattaccagttggagccagatggcgaagagttggacgaggcccagactggcgtatagcacttggcattccttggaagccttgaggtctcccaccttgctgccagcgtggattaggcctcatctgtgctaactggttaggtgtataatatggaggccttccctgagcctgtgggactgctggcacaaagtagccaccccgctgcaggctggaactgatttaagatggcattggcaggaagtgctctcattccagccactcgttgcatatactggttggtcaggtgagc

SEQ ID NO: 317805 - DNA, 1422 bp, Homo Sapiens
  misc_feature (163)..(163): n is a, c, g, or t
  misc_feature (336)..(337): n is a, c, g, or t
aatgccaattggtttggaatgaatgggggaaacaaagggttttttcccagccatttggttttctgtttccttggggggggtggtgcaagcccagcaatgaaggcagtccagtggctccttgcccctgcaccatggccgcagggctggggtgcctgcagaggcntgtatggcaggatgagggctgcggacactggagggcgtatttgtagggggcaacagcccggggaagcagcagcagcaacagcagcgcgtggcgctaagttctgcacagctgtgggaacgcctccagactggcagctgtcagtcagcccttgctgggcggcaccagccccaccnnaagtccatagccaagcggtccgggcactcagacccagttggagccagatggcgaagagttggacgaggcccagactggcgtatagcacttggcattccttggaagccttgaggtctcccaccttgctgccagcgtggattaggcctcatctgtgctaactgattaggtgtataatatggaggccttccctgagcctgtgggactgctggcacaaagtagccacccgctgcagggctggaattgatttaagatggcattggcaggaagtgctctcattccagccactcgttgcatatactggttggtcaggtgagcctttctctcttccttcctctgggccagggcaacatatagtggcttggagcccacaatgcgtccattcatctcagtgactgctttggttgcttcttcaggagatgagaagcagacgaagccaaaccctttgcttcttccatcctccagcattaccttagcactggtaattgatccaaaaggagaaaattctttccttaatttctcatcatcaatagtgtcatccaagttcttaatgtagagattcaccccctgatatcgactaattctctcctgtttcaactgttcaaatttccgttttaactctgcctgccgttctactttcttttgtgcacggcctacaaatatgattttaccacttatttcttttccattcatctcttccacagccttattggcatcctcgtgtttttcgtaactcacaaagccaaagcctttggatttcccattgggatctctcatcaccttgacacttagggtcttaccaaactgactgaatagctctttcagactctcatcatccacctcttccccaaagtttttgatataaacattggtgaattccttggctttggctccaagctcagcttcccgctctttgcgagacttgaatctgcccacaaatactttgcggtcattgaggagcatgccattcatcttctcgatggccttgtcggcagcctcttgggtctcgaagtggacaaaggcataacccttagagccgttctcatcacacaccaccttgcaggacagtatgtttccaaaagcagaaa

SEQ ID NO: 317806 - DNA, 1002 bp, Homo Sapiens
ccgggtcggcgtatctttcttttggcggcggcccgtgccgcttgtgcgcccgcccttctctctgggccgggtcccgcgtaccagggtgtgtgcgtttcttgggtccccccgcccttggctttttgcgctgggcttgatgcccgttcccctgccgaacctcggccttcaccatggcacggccgagtgttatcccgcacattcccggatctcccgccagattgagcatgttgatgaggggacaagcgttctcccagcatctgctcgttcctggggtgctcaccagcatgaagccagtcatgctcctgcccctgcacatgaccgcagctgggtgcctgcagaggctgtatgcagatgaggctcggacactggaggcgtatttgtagggggcaacagcccggggagcagcagcagcaacagcagcgcgtggcgctaagttctgcacagctgtgggaacgcctccagactggcagctgtcagtcagcccttgctgggcggcaccagccccaccaaagtccatagccaagcggtccgggcactcagacccagttggagccagatggcgaagagttggacgaggcccagactggcgtatagcacttggcattccttggaagccttgaggtctcccaccttgctgccagcgtggattaggcctcatctgtgctaactggttaggtgtataatatggaggccttccctgagcctgtgggactgctggcacaaagtagccacccgctgcaggctggaactgatttaagatggcattggcaggaagtgctctcattccagccactcgttgcatatactggttggtcaggtgagcctttctctcttccttcctctgggccagggccacatatagtggcttggagcccacaatgcgtccattcatctcagtgactgctttggttgcttcttcaggagatgagaagcagacgaagccaaccctttgcggacgcgtggtcgacgatatcccgtaattccggaccggaccagcctgct

SEQ ID NO: 317807 - DNA, 799 bp, Homo Sapiens
cggcctatccaatcagattaaaactcctgaaaaaaagaaaataaagtgcttaaaggaggtgtgagggtgggcttcctcttgcagctgcatcacagaatcaaagtgctggtgataaatatgggcataaaccctgaccagacgcttagaaatagtctttgccacagacataaagtttttgggaaatgggacaccgatcttagaaggaaaaagagtttcatcatcaagctgatcttgaacccaagtcatcaaatagtcaatgtattttggtgcagaacatttgattggctttttaatattagtaccatctgcccagtgatattcatatctcggacctgcagacatgactggacagcttgcttcagtgcagaattctgtaatagttccatataacatgttgatctggttaaagaaatccacagtgttcacagcaatccattcattgagatcctctccctcaggcaacataacagcttgtctcagattcccacttcctagagttgcttctgcatgttttaagagttcatactgatgagatccttcagggatattcttctttggtttgaatgttttagaagagcggctgctgaagaggaagctcatcttcggtcctcagaggggaggcgaggggcccctggcccccgcctggatcaggattcggagctggctagagggagcggaccgtccttagctcacgggcagcggaagccgggccgccgccgctcggagccgggtttctggccgctgcgagcctttgcaaacctcggcgcccgccttgcccgcctaccccacctcgcagacc

SEQ ID NO: 317808 - DNA, 453 bp, Homo Sapiens
ttttactttgagaagccatttattttgcagccttcagtccaaaaaaagtcaacattttcagaatttttttatataagttgtaggtcatttttataacaataaactttctattatctatttatctctcacatacatttcatgtatcctgagtattatgttacaacaatctgctcttgatattaatgttcctgatagattaaaagattgagaaatacttgaagaacgatcaaagatacaatgagcatgggtatacttttggggttaaaatgtattctttgataactgatgtcatatagatccctaagtaaatcaaatatttaatttcctacatctgtctaccttagttaactggcccattcctataagcttaacaaaaactcactttacaattatttaaaaaaaacatttaagagatttttagaagttaaatggaaagatacttttggacattac

SEQ ID NO: 317809 - DNA, 366 bp, Homo Sapiens
gattgctaaaataatattctttatttaatcttttactaaaatagtctttaaaatgcttacactatgagttgcagagcttcagccttccacttatcttctttcaccaaaataccatgaataaattttgtcctattaaccactatatcatttgattaaacactaaaggagatattaataatatacaaacaagaaatatattctaaggactctgcaaggtccggaagaaagaatgcttctggcagatgtgatacctagctttcaattgtgtggttaaaggaggcagatttctaacaattaggacttcctggcaaagattttcttatgaaatgttttgcacattggcaggcctctaaggcatcttagcaa

SEQ ID NO: 317810 - DNA, 367 bp, Homo Sapiens
aagatgtgcaaagaagacacaacattttaggaacttgccaaaatcagtgaaatctccctttttgtcaggcccacattgattcttttgagattaaaaattacagaatgccagaagataattcagtcaaaagtatttctcttcagtgcagtaaaatattaaaagaaaaaatatttctctacaagcctcttaaatgtttcagacattcacaatagcacctagacttttgtaatgaacagctgtgcacccaccccgacttaacaaatattttacttttgctatatttgcttcggtgtttttttcttctccctcccagccttaagaagtaatcaccattgtgattattttatccatgtttttgtgaatattt

SEQ ID NO: 317811 - DNA, 974 bp, Homo Sapiens
gcagggccctcacaaaacacctgttgggaaggatccccttccctggccctgcagttttgccccttgcacccagtcagaattccagacgtttccagatttcgggatcccgtctccccctctggaaatgataagtcattccctggtcttctgctgtaaaaactgtgaagagctttcacaccatttttgcgggaagactgttaacctgagagtttgagccagaaatcttcttttttggttttcagtggtacctttgtgcttaaaacatttgcaccagaggtgggataatcctcaacaggctccacaaagttcagggggaaaatcccagttctgcctcgaacttctcctctggcccattcctcattcacatactctttaagaataataatttctccctctgagaaactcaactcatccttctgctctccaatatattcaaaccgagcaacacatcttgagcctttaacacaatgagatgaaacacattctcttttcccatttcctccttctgggatatcaataatcactttgacatagttggcaggaaatatgccaatctggtttctacagttccctctgtaccaatctgtatctatcttctccagaagataaacaatttctccagaagtgaggttcaaatcatcaacttgctctgctgggaaatcatgaagaacgacagcatgaggagcaccactgtcaacaggcttctgagcgtggcttggatcgtttggtctgcttctaagatgttcatcaagtggagtgataatcttcatttgagacaggtgaactctgccagtgtcttctcccttttggcactccaagtaattattttccgtctgcttcagcatcacaagtacatccccacgcatgtatttactgtagagagggtgtcctggtttgggacgagggggtagcaccggatcttgatttttaaaaactgaccctcgtccgaattcgccacccaggcctcgcttctt

SEQ ID NO: 317812 - DNA, 283 bp, Homo Sapiens
gaagaaacctgttacagttcggatgggggattggtgcaaactgaagtctatggggaatgaagtgccaggattgatctggaattccactggcgtattagtagaggctgtggattctgaatgatttattcaagaatcaggaagtaactccatagaagggtttgctcagtcaattgttcgtctaagttgtttagccttctcgaactttgaacttaccctgccattcttcttgcttttaaagcagtatggcagttacagctttttgtcaatttaaagtcttttttca

SEQ ID NO: 317813 - DNA, 970 bp, Homo Sapiens
catcaaaatattgtttcaaatgctgctgcctttctcaaatgtgtggagcatgcttatgagcccactcctgatgatgtggccatatcctgcctccctctggctcatatgtttgagaggattgtacaggctgttgtgtacagctgtggagccagagttggattcttccaaggggatattcggttgctggctgacgacatgaagactttgaagcccacattgtttcccgcggtgcctcgactccttaacaggatctacgataaggtacaaaatgaggccaagacacccttgaagaagttcttgttgaagctggctgtttccagtaaattcaaagagcttcaaaagggtatcatcaggcatgatagtttctgggacaagctcatctttgcaaagatccaggacagcctgggcggaagggttcgtgtaattgtcactggagctgcccccatgtccacttcagtcatgacattcttccgggcagcaatgggatgtcaggtgtatgaagcttatggtcaaacagaatgcacaggtggctgtacatttacattacctggggactggacatcaggtcacgttggggtgcccctggcttgcaattacgtgaagctggaagatgtggctgacatgaactactttacagtgaataatgaaggagaggtctgcatcaagggtacaaacgtgttcaaaggatacctgaaggaccctgagaagacacaggaagccctggacagtgatggctggcttcacacaggagacattggtcgctggctcccgaatggaactctgaagatcatcgaccgtaaaaagaacattttcaagctggcccaaggagaatacattgcaccagagaagatagaaaatatctacaacaggagtcaaccagtgttacaaatttttgtacacggggagagcttacggtcatccttagtaggagtggtggttcctgacacagatgtacttccctcatttgcag

SEQ ID NO: 317814 - DNA, 421 bp, Homo Sapiens
tttaacatcatatttcaacattttgggaaaaggcattttagaatccataccccatcctgtcactcccccaaaaaaggtttaaacattgttttggcttaaacgttattgccccagtcaattctttgctattaaatacgtagctcttgggaaaccaaagaaaggctaaggcatgattttgttcagttggtctgtgctcacatagccacatgatgagagaaactctttgtcaggcaagggcaaggcagtcgcattgagtatgaggccctgtggggactgtactatatgaatggaggtatagtctgggacaggcatctcagaacctgggaacatgttctcctgtcccaggggctcccagcagcagtggtaaggctttctgtggtgatgtaaatgtcctcttggtttaagcttggctgtatgtgtg

SEQ ID NO: 317815 - DNA, 412 bp, Homo Sapiens
cattacacttttcaaatcatccagcagattgctttcaaataaagcctccagtccagcttgggttagtgatattcttgacagggatttgatagccgcttttgctacagatagattctctccaccaatgcaataaacaatttgttttagtaattcagcattatttagaatctcagtaacagcatcagaattttcaacaattcttccaatctatggttctcgttaagcagggagaagagcgggccgaggcgcagctccgccgcttgctggcgaagctcgttgagcggcactgcctgcagcacggagtgaagcgcgcgtagctcctccagcggcgcttccagcctcgctacctctctcagcagcgccaaagcctgggctgccatctctctgccgaattcctgcagcccgggggatc

SEQ ID NO: 317816 - DNA, 956 bp, Homo Sapiens
tgccccgtgcgtcccttctgcccccagggcgcaggcggctcgaaccacgggccctgtctagcgcgacagtcttccgcagccgcagcgtccccccccgggcccgatgacccgcgccgctcctaggtcacgtcctcttccttttctctcctcaactactggcatctcgacgccctgcggatttcatggctcccacctcctctccgccacccacgggccctttctccgcgccccgcggcctcgagccccgtccttcagacttgccccgccctcttatcctccctagcgcacatccccccctgtcgcccggatgcagatgtcccatcccccccgcccttccttgtttctcccgcccattgccaacgtccagtcgcccgcagaacttccgttgcctgggcgcgaccccatcgccaccccggggctgccgctcgggaccggcaagccgggtagccgcgaggcggccgcggcatgctagggccgaggagggggcggcggccgccaccatgtctgcccgcccctcccagaagcagtgtgcccagcggacaaagcgcagcggcggcgcgggcgcccaggccgaccccgccgacccccgcggaataagcggggccaggagccccggaaacccggcgccttaatgcaataaacaggaaatcgcggggatgatctgggttccgggggaagtggaattattttttaccagcgaagagatcaacttccacatccggtggtaacagggccctacacagacccgcactgacctggaaaagcttcgggagcggcgacgggaaggcagcaggaggtggtgcggggacccgaggcgcctcgtacccggccgggctgacgcggccccgctacacacaaagcgcttcagctgcacagggcgctattttccgaaaatgccgcgtctggtcggcgcccaaaatcccctcgtgccgaattcgccacccaggcctcgctcc

SEQ ID NO: 317817 - DNA, 1439 bp, Homo Sapiens
  misc_feature (1391)..(1391): n is a, c, g, or t
ggggcggcattttcggaaaatagcgccctgtgcagctgaagcgctttgtgtgtagcggggccgcgtcagcccggccgggtacgaggcgcctcgggtccccgcaccacctcctgctgccttcccgtcgccgctcccgaagcttttccagatgtccctggtagatttgggaaagaagcttttagaagcggcacgagcaggtcaagatgatgaagttcgtattttgatggcaaatggagctccctttactacagactggctgggaacttctccacttcatctagcagcacagtatggtcattattccaccacagaggtactgctgcgagctggtgtgagcagagatgccagaaccaaagtggaccgaacaccattacatatggcagcttctgagggccatgccagcatagtagaggttttacttaagcatggtgctgatgtcaatgcaaaggacatgttaaagatggacagctctccattgggccacagaacacaatcatcaagaggtggtggaacttttaatcaaatatggtgctgatgtacacacgcaaagtaaattttgtaaaactgcatttgatatttcaatagacaatggaaatgaagatttagcagagatattacagattgctatgcagaaccaaatcaacacaaacccagagagtcctgacactgtgacaatacatgctgcaacaccacagtttatcattggacctggaggggtggtgaacctaacagatgaaacgggtgtatctgctgttcagtttggaaactcttctacatcagtattagctacattagctgccttagctgaagcatctgctccattgtccaattcttcagaaactccagtagtggccacagaagaagtagttactgcagaatctgtggatggtgccattcagcaagtagttagttcagggggtcagcaagtcatcacaatagttacagatggaattcagcttggaaatttgcactctattccaaccagtggaattggtcagcccatcattgtgaccatgccagatggacaacaagtattaacagtaccagcaacagacattgctgaagaaactgttataagtgaagaaccaccagctaagagacaatgtatcgaaattattgaaaaccgggtggaatctgcagaaatagaagagagagaagctcttcagaaacagctggatgaagcaaatcgagaagcacaaaaatatcgacagcagctcctaaagaaagaacaggaagcagaggcctacagacagaagttggaagctatgactcgtcttcagactaataaagaagctgtttaattgaaatgaacatgtagtttgattttacttttggtcaagaaagaatacaatcttgaactgtacacaacaaaggtacagccatgggaatancgaatgatagaagagactaccgatggataattggacttaagccatgac

SEQ ID NO: 317818 - DNA, 370 bp, Homo Sapiens
aacacgccttaaaagatcttaatcttactcttgctaaatgtagtataagtctaagccagcctcagctcttggcctgagattactagtctccttgtttctattctacatgtattctctacacagcagtgagggtaatcattgcaagtaaaatattgtcttacttatttgcttaaatctctcccatagtttccctttacacttagagtaaaatccagaccctttctcctgatctgtaagattgtatgcagtctcttgcctccctagttcttcacccatgttacctactggtatcctacttgtctcctgatttagctacaccagcatccttgataaattattcaactgcttatcccttcttatcattcagtgc

SEQ ID NO: 317819 - DNA, 559 bp, Homo Sapiens
  misc_feature (437)..(437): n is a, c, g, or t
  misc_feature (496)..(496): n is a, c, g, or t
  misc_feature (529)..(529): n is a, c, g, or t
gcagaaagggcaagcttcatctccatggtgcctctccaggctggcaactctggtcggcctctgttctttggacagagagggtgtaggttacagggtcagtagggatgctttctggatcaaagaaagtgggtgtagtgcttagtctgttgtgtggaagagggcacctcctgggctttcgtggctggagactgtctaccaacattccttccttcaaactagacaaaccctcctctgccacccccagcaaattctcagaggtttccaagctgtagaaaaaggaaggaaggaaggacggcattcacatagctttactttccgcttcaaaatgtcttaagtagcatatgttgttttactgcttttaactttggtgagttctaatttcagaacgttttgttcactgaggcaaaaaaacagatgaaacaaccacaggccagggnctttcaagtgagggagggacgcctttgtttgccgtgggttgggtggggagcacacgccnggagcccggttaacgtggcctgttggggagttnaccaaggggcccacccgccccaaggggaaa

SEQ ID NO: 317820 - DNA, 392 bp, Homo Sapiens
ttcacaattaatgttaaagctaacagtagatcacgtatcagattgaatgataataaatttattgggaaatgagttagatttggacagtctgccatttttcaaatcacagttgaaagacaatcaatcataggttgactgtaggagttgagcaaaaagcaattaagtatccttttaaaaaagcattttagttctttcctgagcaactaagtatactgtgagaatcaactggctatatgggatttacaataaagtatttgtatcttattatttgttaattgtgttatatgttcttgctatcagcaaaatttataacaaacatgtatagttgaatacataattttctcccagaagagtgaactgctaaacctcgtgccgaattcctgcagcccggt

SEQ ID NO: 317821 - DNA, 368 bp, Homo Sapiens
caacccatagcaatgcacccatgataattggaggttgagaagggctgactgatttttaaagaaagcagaaaggtatgttccattatgtttgaagaggaaccaacaaggaggggtaggtaaaggccaaggggaagaaagtaatactgacatggcataaagaattattatccagaaataatgtaatatattcaagaaaatcttcagtcaggttagtctaacaacagcttcatgaaagtgatatattttagattataccatttgatgaacaaaactaatactttttcagtgttttccaaagctctcaagtaagtttagcccaatgcttatgttgctgtatctttgtttttctaaacctgccctgttagcag

SEQ ID NO: 317822 - DNA, 421 bp, Homo Sapiens
  misc_feature (187)..(195): n is a, c, g, or t
gtttttgttactaagcaaaaattgaaattatatgcatatgtatatagagatgtccatttaatcaatcaagtcaggaaggatacaaacaggctgtaagcagatgtggggaactttcacttctgacattatacaaaaaagtttaatagagattaaagatgactttttacctatttaatctttcaaattnnnnnnnnnttcccactgcaacttctaggttctactacccaggcttctaagtaaaacttaagtgaattccgttaacagctatcacatacatgtacacatgctgctaaaaacctcgtataaagaatccaaaaacgttgcctcagattcaaatatttatcacaaatttcatgaataactctttgcaatttaagaaatagagagtgcctcgtgccgaatcctgcagcccgggggatcc

SEQ ID NO: 317823 - DNA, 377 bp, Homo Sapiens
gttaattggaattggtctagtttttagggctttccagtttttgaacaacttgaatttttgtgtgaactctgtccattttcatttcaaagacttatttttcttcacttcagtgtgtatataatatgtgaacaaaatattggtgttataagggacaaacacaaacgaatacgttttttatctaaaatttaacttttgtgctgtggtgatttcagtttcaattcttagaaaacaaatacatttttcatttgagagaatgtgggaagaaggaaatatacagcaaatgtcagacatttgtagtcttttcaattttattattcattacataatattacatagaatctaattattctgttgttagtgggattggaatataaacg

SEQ ID NO: 317824 - DNA, 364 bp, Homo Sapiens
aaggaataaggtgaatttttattaagtgaaaaaaatcaataacaatataggaatgatcacatctatacaaatacattgctacatttctacatataaaatgtataggaaaaagtctgaaagaatgcacaccaaattattctgtttttaggaaaagcagtaggattggtcagggcatggaatgtcggctaagtgaagtgagatttaaaatttttattctacatgattttctagtgttgggaatttttgacagtgagcatacatgcacttattacttgcataattctgaaaactattttaaaaacaacagaaaatatatgaaagtctattggtgtatacagcattaatagtagtgaaagtttaacag

SEQ ID NO: 317825 - DNA, 958 bp, Homo Sapiens
  misc_feature (3)..(3): n is a, c, g, or t
  misc_feature (19)..(19): n is a, c, g, or t
ctntgcagcttgtcccgcncttttctgcctgctcttcagtttccaagtttctgaaacaccccgtcaagctcctgctgagtccctgtcttacgctccctcacctctgcagaaacctccgccagatgctgcagatgcttctcctgttgtagctgccactggttctggactgctctgcgttttctccatggccatttgtttcttggcctggagctgctcaaaggcttcccggagttgtgtccgtttcctctgggcttcctccatctgagtcagggccttggtgaggccaattttgatggcctctacgtgctccctgtaggtggccttcagctctttccattgttccttagctgcaattgccttctgtcctgagatgagccaccaggaatgagtacatgagtgagggtggcctgctagcctgcctccctgcaacactgggcctccttcccatcagccaaatgggagacctaactgaaatcctccttccttccccactcaggtcagctgctactacaatcccctgcctactcacggctcgtgtcttcagaagccaaggggtcgagacccttagcagtgtcctcctgagccaggatgttctgcaggaaatccgctacctgaagctggctgcagagcagcttgtctttcttctgagagtcctgctcagagggagggcagagacagggaacatccttacctccttacaggtttccttaagtctgctctctgccaatgctgccctgtatctcagtaagaggagccaggaccagaccctggcttctgaaaggctcgctctcatcttgtacataccaccacaaactcaaccaggatcttggctggcagttctgcctcctcctgcaggcctacaggttccaagatgcctgccacctcagccaggacctctagggctgcagcttccgcctctgtctccgctgcctccatctttcatcccgggaattccgga

SEQ ID NO: 317826 - DNA, 1631 bp, Homo Sapiens
  misc_feature (28)..(28): n is a, c, g, or t
aaaacaaataaaaatccaaatacgtganttgatcatctgataaaagtaagaattgacaaaaaaggtacatcttctccaatccgaaaacagaaagtgggaaagatcaaggtatcactagaggtcaatgaaacaaaacatacaatagtggatgacaaaagccaatctctgaatctttgaaaagaatataataaatgaacatctgaaaccagtgatcgagaaatgttttagataaggcacaaaaagataccaagaatgttaacactaggctgtacatcctaaaacagtcagatgagctcactgttataattctggttcaccgcaagaaccttagcacaaagaaaggactcaacaaacatttggatccatgaataaaattatcttcccacatataaccacctgcctaagacattctcctcctccttgaattaaattcaccatgtctgcatcataggtggcccaaggccagttccccctccccatctgcacaccctgtgttcaaaccagtcccagctcctgtcatgttattggcttctgagtatctgtattaatagttgttcctgccagcatatgaagatgaacaaatacacaactgagagagatccagggattttaatccaacagatgccagagcttgctgggatgtagtcagaaatcaagctgaactcaggagttcacagtctttcctgtaatgatggttgggaggtgagggaagtcagaggccttttctaggatctttctccatgctgctgtcctccaggaagtcatggcaaatttacatctccagcaggttgtagaccaacagccttgaaggacacaccagggtctctccccatggtgtctcctgtactctgctcctggggtcgagtcggctgctggggtttatcatctggaagattctctgcctcagcctcagcctcagggaacaacagcttaccctgcagggtatacagaagctggaggaaggtctgatacctctgcagcttgtcccgctcctgttctgcctgctgcttcaggtttccaagtttctgaaacaccccgtcaagctcctgctgagtccctgtcttacgctccctcacctctgcagaaacctccgccagatgctgcagatgcttctcctgttgtagctgccactggttctggactgctctgcgtttctccatggccatttgtttcttggcctggagctgctcaaaggcttcccggagttgtgtccgtttcctctgggcttcctccatctgagtcagggccttggtgaggccaattttgatggcctctacgtgctccctgtaggtggccttcagctctttccattgttccttagctgcaattgccttctgtcggctcgtgtcttcagaagccaaggggtcgagacccttagcagtgtcctcctgagccaggatgttctgcaggaaatccgctacctgaagctggctgcagagcagcttgtctttcttctgagagtccaccacaaactcaaccaggatcttggctggcagttctgcctcctcctgcaggcctacaggttccaagatgcctgccacctcagccaggacctctagggctgcagcttccgcctctgtctccgctgcctccatctttccaggcgccgagttcagctgccttcccacccc

SEQ ID NO: 317827 - DNA, 1041 bp, Homo Sapiens
  misc_feature (16)..(16): n is a, c, g, or t
  misc_feature (19)..(19): n is a, c, g, or t
  misc_feature (24)..(25): n is a, c, g, or t
  misc_feature (50)..(50): n is a, c, g, or t
  misc_feature (83)..(83): n is a, c, g, or t
  misc_feature (97)..(97): n is a, c, g, or t
  misc_feature (153)..(153): n is a, c, g, or t
gctgtgggttatatcnganatctnncctcagctcagctcaggaacaacanttacctgcaggtatacagaggtggaggaaggtntatacctctgcagntgtcccgctcctgttctgcctgctgcttcaggtttccaagtttctgaaacaccccnttcaagctcctgctgagtccctgtcttacgctccctcacctctgcagaaacctccgccagatgctgcagatgcttctcctgttgtagctgccactggttctggactgctctgcgtttctccatggccatttgtttcttggcctggagctgctcaaaggcttcccggagttgtgtccgtttcctctgggcttcctccatctgagtcagggccttggtgaggccaattttgatggcctctacgtgctccctgtaggtggccttcagctctttccattgttccttagctgcaattgccttctgtcctgagatgagccaccaggaatgagtacatgagtgagggtggcctgctagcctgcctccctgcaacactgggcctccttcccatcagccaaatgggagacctaactgaaatcctccttccttcccgactcaggtcagctgctactacaatcccctgcctactcacggctcgtgtcttcagaagccaaggggtcgagacccttagcagtgtcctcctgagccaggatgttctgcaggaaatccgctacctgaagctggctgcagagcagcttgtctttcttctgagagtcctgctcagagggagggcagagacagggaacatccttacctccttacaggtttccttaagtctgctctctgccaatgctgccctgtatctcagtaagaggagccaggaccagaccctggcttctgaaaggctcgctctcatcttgtacataccaccacaaactcaaccaggatcttggctggcagttctgcctcctcctgcaggcctacaggttccaagatgcctgccacctcagccaggacctctagggctgcagcttccgcctctgtctccgctgcctccatctttccaggcgccga

SEQ ID NO: 317828 - DNA, 1756 bp, Homo Sapiens
  misc_feature (47)..(65): n is a, c, g, or t
  misc_feature (73)..(90): n is a, c, g, or t
  misc_feature (93)..(93): n is a, c, g, or t
  misc_feature (96)..(96): n is a, c, g, or t
  misc_feature (101)..(251): n is a, c, g, or t
ggaaaaaaatttgccccttttccctttccttttggggcccgcccccnnnnnnnnnnnnnnnnnnntttttttnnnnnnnnnnnnnnnnnnaanaanttttnnnnnnnnnnnnnnnnnnnnnnnnnnnnnnnnnnnnnnnnnnnnnnnnnnnnnnnnnnnnnnnnnnnnnnnnnnnnnnnnnnnnnnnnnnnnnnnnnnnnnnnnnnnnnnnnnnnnnnnnnnnnnnnnnnnnnnnnnnnnnnnnnnnnnnnaaccttaaatatttatttgagaaaacaaataaagatccaaatacgtgagttgatcatctgataaaagtaagagttgacaaaaaaggtacatcttctccaatccgaaaacagaaagtgggaaagatcaaggtatcactagaggtcaatgaaacaaaacatacaatagtggatgacaaaagccaatctctgaatctttgaaaagaatataataaatgaacatctgaaaccagtgatcgagaaatgttttagataaggcacaaaaagataccaagaatgttaacactaggctgtacatcctaaaacagtcagatgagctcactgttataattctggttcaccgcaagaaccttagcacaaagaaaggactcaacaaacatttggatccatgaataaaattatcttcccacatataaccacctgcctaaaacattctcctcctccttgaattaaattcaccatgtctgcatcatagggggcccaaggccagtaccccctccccatctgcacaccctgtgttcaaaccagtcccagctcctgtcatgttattggcttctgagtatctgtattaatagttgttcctgccagcatatgaagatgaacaaatacacaactgagagagatccagggattttaatccacagatgccagagcttgctgggatgtagtcagaaatcaagctgaactcaggagttcacagtctttcctgtaatgatggttgggaggtgagggaagtcagaggccttttctaggatctttctccatgctgctgtcctccaggaagtcatggcaaatttacatctccagcaggttgtagaccatcagccttgaaggacacaccagggtctctcacccatggtgtctcctgtactctgctcctggggtcgagtcggctgctggggtttatcatctggaagattctctgcctcagcctcagcctcagggaacaacagcttaccctctgcagaaacctccgccagatgctgcagatgcttctcctgttgtagctgccactggttctggactgctctgcgtttctccatggccatttgtttcttggcctggagctgctcaaaggcttcccggagttgtgtccgtttcctctgggcttcctccatctgagtcagggccttggtgaggccaattttgatggcctctacgtgctccctgtaggtggccttcagctctttccattgttccttagctgcaattgccttctgtcggctcgtgtcttcagaagccaaggggtcgagacccttagcagtgtcctcttgagccaggatgttctgcaggaaatccgctacctgaagctggctgcagagcagcttgtctttcttctgagagtccaccacaaactcaaccaggatcttggctggcagttctgcctcctcctgcaggcctacaggttccaagatgcctgccacctcagccaggacctctagggctgcagcttccgcctctgtctccgctgcctccatctttccaggcgccgagttcagctgcctccc

SEQ ID NO: 317829 - DNA, 361 bp, Homo Sapiens
aatgcattatgaatgaatggggtaagagaaccttcagtaggagaagcaccaaactgatcagtgtagttatatccatttcgagagtagtatttatatacatctccatctttgtgcatttgcatacgttcaccatctagcttggtttctatgtagaaactctgatgtttcatatccttctcaatgtgctcaatatctgcaatagcagctagcattggtttaaatgcagaaaataaagtgtccagatctgtagtgacattatgcaactcagcagcatcattatgaaaaacagaaaagatagtttgctgactaacaccaagctttaaatcctttatgatcatccgtataagccacttttgctcaa

SEQ ID NO: 317830 - DNA, 372 bp, Homo Sapiens
  misc_feature (323)..(323): n is a, c, g, or t
  misc_feature (359)..(359): n is a, c, g, or t
ccttctgcataacaagttagtgtcttgtcttatacagtattacttcctattcccaaggaagtattgcattataaaataaatgtgctagaacgttaactaactgaaatattgaattaattctattcctcctcattcccccactccagggaaggaaccaatcatttgctctttacaaaaagcaacacatttctacaaaaccaacagcatgggaaattcttcaaataagctcttccaactgggcacagtgggcccatggcctatttattaatcccggcactctgggaagggccaagggtgaggagggtccgcttggggcccggggngttttgaggaccagcctggggcaacacaggcgaggnccctgtcttttac

SEQ ID NO: 317831 - DNA, 502 bp, Homo Sapiens
  misc_feature (473)..(473): n is a, c, g, or t
  misc_feature (484)..(484): n is a, c, g, or t
atatgcatgccatacagcagtaatactttcagtttcaagttctttagctacagttcatagaagcttggtttgatttttattaggttgatgataaatagaataaattttatcaataaatatttttaaatgattaatttgttttatttcggatatagactcatcaagtgacaattgtaatcgatgatttaaacagttccaaatgatgatttcaggaaaattttctaacaattttgtagctactccagactttcttcccaggattgtattagcaccatcagaacaaaatgcaattaaatttgctttcaaatattcatttgtaaaaccacaatcatttaaagtagtcaataatgtattgacaatacactctgctataggttgacacccaattcttttaaagccaccaaataaccataacagggtgcagggagctggactggaattgtgcactggggggataaatcactggggtgggntttctttgganactgtagggtgccctcca

SEQ ID NO: 317832 - DNA, 440 bp, Homo Sapiens
tttttttaaatatataatcaggcaatctcccaagccagaatcgtcaagagagactcccaagtcctacattttcaagttaaaattcaggcagtgaaactccagagcacacaactgggccatggctgtaaaccagctatgttctgaatctcagatccatgaaaacacagaggcagcctcaccactccgcaggctgtgaacaggacggacggctggctactggccatctccctgcctgcctgttgatccactttcaacaggcctgagtctttctctgactcacccatcaggtgggaccccctgcagcagggagttttcccgggccacaggaaagccgtttccctcatcttcatcacttcaatacctatctactgaggtcctccctccttaggggtccagccctgcggtggggggggcacagaggagggagttcaggttccccg

SEQ ID NO: 317833 - DNA, 897 bp, Homo Sapiens
tttgaaatatataatcaggcaatctcccaagccagaatgtctcagagagactcccaagtcctacattttcaagttaaaattcaggcagtgaaactccagagcacacaactgggccatggctgtaaaccagctatgttctgaatctcagatccatgaaaacacagaggcagcctcaccactccgcagtctgtgaacaggacggacggctggctactggccatctccctgcctgcctgttgatccactttcaacaggcctgagtctttctctgactcacccatcaggtggaccccctgcagcaggagtgttcccggccacagaaagccgattccctcatctcatcactcaatacctatctactgagtcctcctcctcagagtccagccctgcgctgggggcacagagaggagtcagctccccgctgagacagaaaccaggtactggctgggcggagggactgcaggagggggcagggtgctgaagaggggtccatggcagttggtgatggatgagctgagcctgggaagggaacagaggtgggctagggtctggagacagacagggaagcctagagcagctgaagaacgggaagtcagtgggacaggaagacaggaggccgggttagaaccagatggccgtcagccttaactccaaggaattgaaagccaacatggttgcatggatgatgctttggaagcctggggggccgggtgctagtcttccctttctgaagataacaccccgtcaaggaccgttcacagtgcggacaccctggcagcacttaaaaggcaccagaagcgaatgagaagcagaatcgttgatgcgtctgagcacgtgcacaaagcagacacggttctcaggactcgcattccttcacccacttcattcccacaacat

SEQ ID NO: 317834 - DNA, 442 bp, Homo Sapiens
cttcttctcttctagtttttatctgatctactatttcatttaatttttcttgcacagctgtcactagagtaaaaatcatcaccataccaagattttcttcagcctgtaatgctagtaattttaaaatgtctgagacatcattatcttctagattttcctgggagaatatttcataaaggggagcttcatctgggtatttttcactgtatgtaaacttgagggtagtctggacagtttcatcattttctccagcctcagacgtcacagtaatggtgaagctgggtggattttctgataatactgtgaaggagtcagggtagatggactccagggcctccagctcgttgcgctgctcctcgccgtaatctgtcatcgtggcccttgctcttgcccatagatcgcccagacacctaggcggcgcgcagcagcccagacagctccc

SEQ ID NO: 317835 - DNA, 343 bp, Homo Sapiens
aatattcaatatttcatttcaaaataatagtctgttttaattatgcattctataagggaaaaagaaaagtccaaattttcactggagaaccattaaccaccaactatcgtaactaatttatgcctggctttctccccaaatgcttgttgtcagaaaccaaaaagaaaccttctcaaattgctgtgataaaatgggcgggcatgcaggaagcccctcaacaacagaataggagaatctcagctttagttcttaagtttaaaaaaaaggtttattcttaaaaagggcagaggttagctagcatctacagtactttcagtatgacccatgatggaaagccagaaat

SEQ ID NO: 317836 - DNA, 426 bp, Homo Sapiens
  misc_feature (355)..(355): n is a, c, g, or t
  misc_feature (363)..(363): n is a, c, g, or t
  misc_feature (386)..(386): n is a, c, g, or t
  misc_feature (405)..(405): n is a, c, g, or t
aactttattttcctttaatacaaaattaaatagcaaggggttttctttgtacagtgataaattagaaatttacagtacagacatcgatgcagacatacttttgtacatccttaaaagcagggtccatttcctttgaaatttagcaattcattcagggcatgtgtagcaggaagtttgcctgggtacctctttgtcaaacatctgaaagtcccccagattgggcttcaaggttccggggagctgtgggggtgggcatgagggacccaaggaaagggccacaggggcatccagcccgactgcttgcacagaggcagggggaaggtcacattttatcttttttttcaggttacatccnatatgggnatctaccctttctttacaaaggngcttcaggggggccatccntttttttgacccttttcaagg

SEQ ID NO: 317837 - DNA, 500 bp, Homo Sapiens
ttttaacaaacaaaactttattttcctttaatacaaaattaaatagcaaggggttttctttgtacagtgataaattagaaatttacagtacagacatcgatgcagacatacttttgtacatccttaaaagcagggtccatttcctttgaaatttagcaattcattcagggcatgtgtagcaggaagtttgcctggtacctctttgtcaaacatctgaaagtcccccagattggcttcaaggttcctgggagctgtggggtggcatgaggacccaagaaaggccacagagcatccagcccgactgctgcacagagcagggggaagtcacattttatctttttttcagattacatccgatatttcatctacctttcttacaaagagctcaagggggccatcattttttgacccttttcaagcctcacaacatccctgtgaggtagacaaaattcagaaacaccttccatgcctcactggggagagtctaggaaaggcagctg

SEQ ID NO: 317838 - DNA, 622 bp, Homo Sapiens
cacgaggtatacagtatgttcagtacactggaatagcatgctcgattggaaacaaagcatctatctctgaaagctgtttggcgatgaaggagattcttcgtgttgtgttcaaagatgagtccctctcccttgtccagaaaaatgccacttgtatcaactttactgcctttgtcggcagaattggtacttaaccttattctcattttagcgggaaggcccgaaatcatattatgtagatttaacagtgttgattctccaaaattcagaaccacgataaagattctgtcgatgccatccagctctcttgtgtacacaacatagtggctgtcattcctcaaatggcaaaaccagcccctgttgaggagtagctcattggcatgaagtagacttaaatcttgatataacttcaaagccgatctgggctgagtcttttggacatcaacattcacagtgtggtaatctgaattggtaggtaaccaggtgttactagcttcagaaaaaccagcatttgaactattgtcccactgcattggtgactttgagcgaagggtattaatatcatagctttcattgagatttgcggctacaatatttcccattccaatttcttctccatagtaag

SEQ ID NO: 317839 - DNA, 641 bp, Homo Sapiens
tttaaaaaaattttatttacagcaccattgaacatctttgaaaggtatgctcatgtacatacattactgggggattcacatgcaattattaatgagttatttaaactttatgtcttagagttttgacagttctctcaaatgtgaggattgcaactctagcaaaattgcctgtgaggacaggaggagaattttaagcaacaaaactccacaatactgtaacataacctcagatctccaggaagaggttcactctcccttgaaaatcatcctttccggattgttctcattagagtgcagagtaggtgcagtgtctggcatggctttgtactaagaggtgacagttgatccatctagcaaacatttcaagaaaattccatgtaaacaaaaaggtacgaaataaaacacatgaaaagagaagcaccagaaaatgactcgtctgcattatctaaactccagatgggtaagaacatgcagattacattgaggattatctttcaatgcaatttccacttgagaaactaaattcctggtttgacaacctcatttctacctgtggctactcaagggtaaataatctaagaagcacaaatacgtgacactttatcaggtgcatgacttctatagagcaggcatgcagtttc

SEQ ID NO: 317840 - DNA, 746 bp, Homo Sapiens
tttttccatataacacactcatgataatataattaaatgctgtttttggtgttttgtgaaaatacagaggccatgaaagcagaaaaatgtagcactattacaaacagtaaggtaacattctcaaagaataaacacataacacataaaatttttaaatggtatctaataaattttcatgtcaaatcttttaactaaacatataaaaattttaaatggcaactaataaatcttcatgtgaaatcttttaacaaaatccacaaatagattataaaaattgaacaatcataaatgtcttatgtataaagttttaagggaaggtttaaattttgacattattctgtttaatcaaatacttgaggaattttagttactgctgagcagcagtcaattgatacatttctaaaataattcagttatgaaaataatatcacaattaaggtttggcatagtagcattccatcaatcttcagtcatccacaaatgttaaccgcccaggcccttcattcttcatccatctcctgtatctcttccatctggggtcatttgccaactttttctttaattcttcctcttgttcttgcttgtagacctcataattctccttgatccagagctctcgtttaagaaaagtttctttctgatgatcttctagactatcaaattgagactttgacatcttcatagatttacgtataatgtataatctctcttcctctccatattctttgcctttgatgttaaaatta

SEQ ID NO: 317841 - DNA, 551 bp, Homo Sapiens
ttagacctgtacagtttttattacataaaatatcacaaaattcacaagtacaacactgcttattttcttgcttgaagatcagatctctggtttatttaatatcaacattcaccacagctgaaggaaattaaactgaacctttaaaaggtaccgcatacggacctggttggggttatatacaatatattcattgtagttgagggtataaccatctggattcagaattcctgtgtcacttgctggtcctaatggcactgtactcccattcctgccaaatggaaaaaaagtgtgtcaacatcagtctctggttcagaagctgcaatagagaacgtagtcttatctggccaaaaggagtcttctagtcctcctggttctgagtacttacagggtgacgaagtgggcagaactgggagccatcttgcccagccccttggtgctatgtttaccttgaagcaatccttcggccttaggattggcctctagtagttcattacactgacctagagctacctgataagagcagcagtcctgtattctttaggcgagaggca

SEQ ID NO: 317842 - DNA, 411 bp, Homo Sapiens
gaacgaggccattggtaccctcaccgccaggggggaccggaatgcctgtgtccccaccatgctcagtgtgtctgactctctcatgactgcacatcccattcaggcagaggccagtacagaggaggagccattgtggcagtgccctgtgcgccttgtgacatttattggtgttggccgcgacccacacacctttggcctcatcgctgacctgggccgtcagagcttccagtgcgcagccttctggtgccagccccatgcagggggactctctgaagctgtgcaggctgcctgtatggttcagtaccagaagtgtcttgtggcctctgcagctcgaggcaaggcctgtggtgcccaggcccgtgcccgcctgcggctcaagcggaccagcttcatggattccccaggaggtcc

SEQ ID NO: 317843 - DNA, 1503 bp, Homo Sapiens
  misc_feature (134)..(134): n is a, c, g, or t
  misc_feature (148)..(202): n is a, c, g, or t
  misc_feature (1070)..(1085): n is a, c, g, or t
atttgggggagaatcccaagcccctttttaaatggccggattttcctagggaaacagcgtaaggcccggggttccctttgcaacaggggggccgcgaggcacatgtaatggtttgggaagcttctccaagggcnaaggcgttgtaaannnnnnnnnnnnnnnnnnnnnnnnnnnnnnnnnnnnnnnnnnnnnnnnnnnnnnntggtttattttttataggaaagtgtcaacatgtttattgctaatataagcatttaatgtcaaagaaatgaaggtaattttacaaactcagtttttgtaagtacatgaagtttctatttgattatgtggttttatatcacattcgttcaaatgcatttctctcccttagagggactattccaacatcactcctttggaattatttcagtcatccttaacatgtgactttaccaaagaccttgaagctaaacaaacaagcaaaacaaaatttcaatgactcttagatgaatggaataagaaatagtcatcacatgtcaattagggatgttcatctccaaccaagacactgtcaaaatgtttcttctgatacagcagttataagtcagagccttcaaaaaacaagggcagaacaagagtacaataaaagaagcatctgcaacttaagcctcccacagtcctaagcctgatatgcgcaaagcaaagcctctttcccgcaaactaaattccatccatttgagctttcagagatcgatgcccaagagctatcattaatatatacagcatattgactctagttgcatcaattatgcctgaagagtttaatacccatccaagtccaaaggtggaagaatacatacactggtatggtaataggcaagagcaggctgtaaaagcaaaggctggctgtgctagtgcaggcctgtgggaagttttcttccacagaggctgagtagaacagtcctgctaaagaaaccagtggaataagaacagtcaacgtaggaagagacagaaacattcttctcttccacttattacctgccactgtgttttaaaaggtatatggtattaagaaaagttggctgttgcgnnnnnnnnnnnnnnnnaaattatgaactagcgctgctccacttcttcttgcttcttactttgacgtgtcatcctagctgcctgtggtatcatattagggatcccatcaatgattggataagctattcccaactcttcattaatcaattcgtttgttgatgcttcatatctgagcggcttcttggagagcgggcacaccaggaactccagcagcgccggatcgaagtcgcggggcggctcctcagtcttcttgccccggtcggccaaaggccgcgaccccgacgcgtgcaggcacctacgggcgaccgcggacggcggcgcgcgcgttccccgcagcgctgaggcgagcctgcagcgtgctccactcagcatggtctggcagccggagaccaggcctcaccgcagcctcgccacccgtggccgagctcccggctt

SEQ ID NO: 317844 - DNA, 959 bp, Homo Sapiens
  misc_feature (51)..(60): n is a, c, g, or t
  misc_feature (408)..(408): n is a, c, g, or t
  misc_feature (418)..(418): n is a, c, g, or t
gaccccccttttgggattaccaagggcgcttttttctgggagggagaaaannnnnnnnnntcggggggttgggaaaattggtttccccccacacaaaaaaacacccctcccggggggtttttgttagaattccaaattccttaaaaaattccgggtggaacccaattccccagtcccatggaaccaaagccatacctttccccttggaaaggggccaatttggaagcattcctttcctttggcccagtattgaggggcagccctgggggcaaggttgacttcgtttaccatccccatggagggtacagccataaatcatacccttatttcccagaagttttttacagtgtttggcagaggttattgtgtgacgatgaaagcagctgttgccctgtagctgtccatagnagcagcatgnatgtagttactgctctccccatcaatgtaaattaaaaaaggcagacatctgtcaggtggcagcatgtccatgaaacggttcttgtcatggttccttggcaggcacgctatactgcagtcttcagcttgtagtcgaggggtgactgaattcagagtctgaaattcatccttgagatgtgaagagttagtctgggagtctattctaatcatatcaaaatatgcagctttaaattcacagacaggtatggcagtttctccacataagcaggcttctaaaatggcatcatgaataaaaatgtactgttcctctgtctggaccatattaatacgccgagatcttaaggctttgacacaattgtaaatatcaccaacaccctctctttcagccatgtctagcatgatgtcaatcacaatgtagcagccagttcgtccagcaccagcactgcaatgtacaacgatggggccagcactgggagggtttgataacttgactcgccggataaaggaaagcagccctgtagcatggtagggcactccatggt

SEQ ID NO: 317845 - DNA, 455 bp, Homo Sapiens
ctctgtccatttaaaatgttttatttttttaaaactagatgacgtgccactgaaataggcaatgttggcaaaacaatgtctgttacaataaaatacattagacatttaaataaataaccttaaaaactatgtgaagggacataaacccagtcgattgaatctggaacaatgttttctgcacaagcgagtacaggcatacctctcgttaaaactgattgatgtaaacagaacgaaccatcacaatcctaaagaagaagccaagcggcggcggcgggtaaggtggggagaggtggggtggggtggggtgaacggaggccaaagtgggtgagggaagtagcaaaccaaaacaatactgactggaggtagcaagactctgctcagtgcagaaaaattggcttatgaataaaaattagactgtgatatcaaatttaaatccggatcatcatgcaaaagac

SEQ ID NO: 317846 - DNA, 1779 bp, Homo Sapiens
  misc_feature (772)..(810): n is a, c, g, or t
  misc_feature (1092)..(1154): n is a, c, g, or t
  misc_feature (1202)..(1250): n is a, c, g, or t
  misc_feature (1533)..(1558): n is a, c, g, or t
  misc_feature (1658)..(1658): n is a, c, g, or t
  misc_feature (1668)..(1668): n is a, c, g, or t
  misc_feature (1678)..(1686): n is a, c, g, or t
ctgaaactatccttgcccgtgattctcctggatgagctgctcaagtttgtgccccgcaactacctggaacctggtaaagagtgtgtgcagcctgccaccaaatcctgctcgttctcggcatgcaccgatgggatttcctggccgttgtgctgctcataatgcccctggtgatctgtgtctattgcacagacactaactttagcgatatgttctggtcttgcctgaccgttttccataaagaagatgtttaccttaatcaattaatttttttattgtttaaagcaactgtctatttctgctgaattttcacatgaacatactggctggtgatggaggtttcatactctagattttgttttgctttttctgactccagtggggcaagattttccttttttatacacataattaaagtgtccattgacatgtacagagaactaacactattttatgcaaatatttttttgtagatgaaaaagcatgtacagtgttctgtttaatactcatccttgtataaaaaaaatagttgagccagcagacattgtcagcaaattaattggcagcagattttaggaaatgaatgtgtgtggttttttttctaaaactaaatagcatgtattgtgtcttttgcatgatgatccggatttaatttgatatcacagtctaatttttattcataagccaatttttctgcactgagcagagtcttgctacctcagtcagtattgttttggtttgctacttccctcacccactttggcctccgttcacnnnnnnnnnnnnnnnnnnnnnnnnnnnnnnnnnnnnnnngcttggcttcttctttaggattgcgatggttcgctctgtttacatcagctttaacgagaggtatgcctgcactcccttgtgcataaaatattgtcccagattcaagcgaccgggctcatgtcgctccacatagcccttaaggccattcatttccatgcctaatgtattttatcgccacagacatcgctttgtcactattgcctattccagcggctcgccctctagttttacgaaaaaccaccatttttaattgggcacatccccacttctagccgtttattnnnnnnnnnnnnnnnnnnnnnnnnnnnnnnnnnnnnnnnnnnnnnnnnnnnnnnnnnnnnnnntttttgtcccgcccccccgtttttcttttcactgttacaccgcgtaannnnnnnnnnnnnnnnnnnnnnnnnnnnnnnnnnnnnnnnnnnnnnnnntccgcgttgttatatgaagacactctactcgcgaccttctaggttcaacattccttccgcatcctgacgtgtttatatacacattgaatccgcctcccccgggtcgcgcgctccccccttatccaagcgagcctcgggtccgccatccgccaaaaaacaaataccgctcccccgccccgtgtggggagacgcccccgctccgccaaggtgtttcccatatgtaaaacgggggccccctaccccccaccctaattaagtggtcgcattgtacaaattcggcggnnnnnnnnnnnnnnnnnnnnnnnnnnacagatattatttcccggcccctaacggccccccggcggggtttatacatttactcccctccgcgcccttataagtgtggcgtcccataaaatgccgctntacatgcaantattcacctnnnnnnnnngttctgcacgcacgcgcgttattcacgtcaccgctcccacaccgcaccatatgtaggttttatacacctcacccgcgcacaccaagtccctta

SEQ ID NO: 317847 - DNA, 426 bp, Homo Sapiens
gcctcctgtgacccatatactctctgcccagactgtgaagatagagcgcctgcccctgtagggaaataccatgaggaagacagaagcaaaggcgttccttcatgtcccggctaaagtcatcattggactggcctttgactgcgtggacaagatggtttactggacggacatcactgagccttccattgggagagctagtctacatggtggagagccaaccaccaccattagacaagatcttggaagtccagaaggtatcgctgttgatcaccttggccgcaacatcttctggacagactctaacctggatcgaatagaagtggcgaagctggacggcacgcagcgccgggtgctctttgagactgacctggtgaatcccagaggcattgtaacggattccgtgagagggaacctttactggacaga

SEQ ID NO: 317848 - DNA, 424 bp, Homo Sapiens
gcacgaggaaaaagcatgtagacttctgagaagaggctaaaaattctgccctataatactaaaaatgagtcacaagataatgtggtgaagttaggccatcttgatttgatagaaaaatcttttacattgtttaaaaatgagaatcgaggctaattaatgttgatttgacaatagaacatgagctaattctgcaaccgtttggggggtaattttatggtttccagttcatttagagctgtatcaagaaaagctaaaaagcaagcacttttagttaatcatagatttattggatatagcaaatattattataatatttaatctctattatttgaatgtggaaatgaactcttttaccccatcttgaactgtcattgaacatgctcaagatgatcaacactggaaatgaccctacacacataccaaa

SEQ ID NO: 317849 - DNA, 739 bp, Homo Sapiens
ctaaaggtaaccttctgtgacttatttgccaacacgcatggcttaaaaagaccatgaaggcttttgctctgtaagtcaagaagcaaggcagtgaaatactctagtaattaaaattaaaaaatcaatattatctataaataatgagcatgcaaggatctgtaagatgatgagtaaacattttggcagggagtaagtgccacatactggtgtgaggagcaacgtcttcattaagcttctcctatttctccttgctctcccatcccatcaatctaatgggaatttcccaggcaaaagccttctgcttagcttgtaatgaattaaacattcacatttctcttgctctctgcacaggtggacaactgccacgtcatggaaagactactggatacgcatgcagaggcctggatgaacaggcacagagaggcttggatttatgcctaggtttggcatgtaacgtttttgtctgggggcctccatttgtaaggtaaggaggttgaactgcgcttgatgatgcttgcatttcctttatagccttgaagttggtaatttggaaatgctctgtccctcctcaaaagactgttctacattagatttctgagagatttccaatatctacaacttcagtgccttcctctgttaaggaaaaaggtttaagcaagaaagaatgttctcatttttatgacaaaactctccaagttatatccctcaaaaagattccatgaagtcatgtctaacattt

SEQ ID NO: 317850 - DNA, 607 bp, Homo Sapiens
  misc_feature (16)..(16): n is a, c, g, or t
  misc_feature (34)..(34): n is a, c, g, or t
  misc_feature (41)..(41): n is a, c, g, or t
  misc_feature (69)..(69): n is a, c, g, or t
  misc_feature (88)..(88): n is a, c, g, or t
  misc_feature (99)..(99): n is a, c, g, or t
  misc_feature (142)..(142): n is a, c, g, or t
aaataacctaaatccnacgccaccatttactttnaaggggncaaattttaagggcttgtgaaattacantccaataaaaaacagatgngggaacccctnggatatgtcacaacccccaggcccacaaacctaccttacactntcccaatataaaaactatatccaacaatagtttacatcacgttcattgccttgcctaaagtaaggtcatgaatgtatcaaaatattttataaaagttaaaatttaggagatccatcatttctcttttcaatccatcactgattcattcaatatatatttatgtgtatgccaggctcttcatcaggtaaagtgtttaggagagatataaagataaaactgatgagaattctgcacttgagctacagcatactttccaagaattacagcatgagatataaaatgaaaagaaggcttggaggagattcacacgaaatagtactgttcaggagagggggcgataattccaatggaagagataactgacttcatggaggatagaaggagatggtatttgaactgcccttgaagtatggttatattttggggatgtggagatgtggggtagggtgatatgctggggttcca

SEQ ID NO: 317851 - DNA, 963 bp, Homo Sapiens
  misc_feature (320)..(328): n is a, c, g, or t
gggattttgcaacatttaatcaaaaaagaatttggtatcttaaaagttaggtttacaaacttgacacattctcaatattagcaatttatctatttaaacattgtctaagaaaatatgatctatgaagacattaatacattaataagatacttaagagttcattataagctacaacactttgcaaataagtatccagtttaattgtaacaaaccacaatttgtgagcaaatttaagaatataaaaaacattaattagttaaatacaattctctgggaatatacattatacctacagctgtttttacagcgagaggcttccnnnnnnnnnccttttaattattaaaatggtaaatcactgtatggtcctggatctccatgctataaaactgaaatatgtatttccagcgtagcagatggtgaccaggaaggcaaagaacgatgaggccgcccagctgttgaagttgtgactgtccctctcagggggagacggaagatgcatctacaacagcggcagagaggtacaagacgaaggcactgccgttaaagcacaggcccactgttgtccagggcacctggggaatcctggtgtaggtcattgttatgtagataatgaggaagaagacggtgaggacccagtaaaatacagctacaaacatgacccagccaaatgcggggacccggaagtactcagttccagcaataagcgtccataccagcagccccagaacgatctcggccacgatgaggaagccgggcagggtgcggaggaactcccggtcgtaggcgaagctgctgctgctggtggagaagttctctgcgaaggagctggcggtggtggtgactgtgtgcgagcgggcgcgctgcggctcctccatcgtcgagccactgccgggctggcgcgtccccagggaccccggcgggtctggggctggacgcgcggccctgcgccctggggacacaggc

SEQ ID NO: 317852 - DNA, 456 bp, Homo Sapiens
  misc_feature (46)..(46): n is a, c, g, or t
  misc_feature (51)..(51): n is a, c, g, or t
  misc_feature (66)..(66): n is a, c, g, or t
ccacgggattaccatccaggttttcctttccaaaggaaaggtcccngcccntaattcccattatancccatggccaacttatcacctggttaatgctaatgttagtgtataaaaatgtattccatcatatacgggagggattatccaagtactggtcaataaaggtgtacagctgaccctgagaataaatttttgcttgcttaaaagattaagtaatacaaaataaaatgaaaatgaaagatgcctattctcgtacttgggaagaaatgtctttaaaatgctgactaatgtataacctaatatatttaaagacacccccaaacactgtaattatattgatatgtttccagaaataatctgaaaaagtgtacaaaaaaagtaaatgttaaaggcaaggcattatgtgatacacagcatataaatctgattttcaagatagtgtctaaatacactgat

SEQ ID NO: 317853 - DNA, 396 bp, Homo Sapiens
tctggaactgggctgtctacaaacctccagcattttcaggaagaaaactttaggaaaagttctccccagttagaacatacaggagtttttttgtctacccatggtgttggaatgaatggaaataatgcagcagcagggaaaagcgtaggagaatgtactactcatcaccttccacctgtgaaagcccctcttcagacaaagaagaaaacaacaaatcattgttttctttgtggaaagaaaacaggactggctagtagctacgaatgcagatgtggaaacaacttctgtgcatctcatcgttatgcagaaactcatggctgtacctatgattacaagagtgcagggaggagatacttgcacgaggcaaatcctgtggttaatgcaccaaagctttca

SEQ ID NO: 317854 - DNA, 1328 bp, Homo Sapiens
  misc_feature (800)..(800): n is a, c, g, or t
  misc_feature (1208)..(1209): n is a, c, g, or t
  misc_feature (1211)..(1211): n is a, c, g, or t
  misc_feature (1240)..(1241): n is a, c, g, or t
  misc_feature (1245)..(1245): n is a, c, g, or t
  misc_feature (1247)..(1247): n is a, c, g, or t
  misc_feature (1250)..(1250): n is a, c, g, or t
  misc_feature (1261)..(1270): n is a, c, g, or t
  misc_feature (1272)..(1272): n is a, c, g, or t
  misc_feature (1280)..(1282): n is a, c, g, or t
  misc_feature (1284)..(1284): n is a, c, g, or t
  misc_feature (1287)..(1287): n is a, c, g, or t
  misc_feature (1295)..(1295): n is a, c, g, or t
  misc_feature (1297)..(1297): n is a, c, g, or t
  misc_feature (1301)..(1301): n is a, c, g, or t
  misc_feature (1304)..(1304): n is a, c, g, or t
  misc_feature (1308)..(1308): n is a, c, g, or t
  misc_feature (1311)..(1311): n is a, c, g, or t
gaatattcagggaggggttcttccaaggtgccactcaaacaaaatccaagcaggttcatcataagacgaaaaaggtacactctcagattggtttaaacctcctaacttaaaggacaaggaaggatctgtttttgtcttttggaaacccatgagctatctacttgttctttacttcagccaattagaagttcaactgaagatagctattgaacatcatcttaatgatgttataaacaggcaatttaaatattttattttgcataatccccaagctgggttatcacagagaaagcatctgagcttctccagctcgccaacctgcctgcattcgtagctactagccagtcctgttttctttccacaaagaaaacaatgatttgttgttttcttctttgtctggaagaggggcttttcacaggtgggaggtgatgagtagtacattctcctacgcttttccctgctgctgcattatttccattcattccaacaccatgggtagacaaaaaaactcctgtatgttctaactggggagaacttttcctaaagttttcttcctgaaaatgctggaggtttgtagacagcccagttccagagttctgaagcctgcctgccccacgtgtgccctgtaatctatttctgcttgtgctcccggccagtgaggcaagaaaactgatattatttacacaaccaacaggctctttggaagccttgttagtcatttctgtgatatcccgagcctcaactttggaaataacatcagatcttttcccaagtgaatcaactttaacaccttgaaagcnagttgtcctagagaaagaagaatcagttatgttttgaacatccagtgactgagaagaagaaggctgtagcttcccaaactcaaaacatttggactgtcatctctggtttcaccagagaattatgtagcgacattggtgcagaacagcgaagaggtgacaagagtctattcttgtgaggacttaattcccggtagttaagaactgaagtctctactgattccccattcagcactcctgcaacatgcttgagatgctgctctggagctttcaaccctttgtcagcattagtgagtagcaactccagattcactttgcacgcaccttctaagccgctgctctgttcatcagcattttcttctgcaaatgaagccagtgagcccacctttaggtagaagtgattgtcgggtnncnttcttctgagggaaaaaatgttcccatannagangnaantttccaaaaannnnnnnnnncntggcgggnnntncanatgggaanangtancancccnggncttcccacccaaagggg

SEQ ID NO: 317855 - DNA, 505 bp, Homo Sapiens
caagatttgtatacaaactaaataaacatttgtcagataaatttatgaaaataatctaatcttagccttccttatttatgtaaacaaaaaccaaactttaaataagttgaatcactaccaaggataactactagagcatgttgaaaggaaaatactgacccaaaaaaaactcctgtatgttctaactggggagaacattttcctaaagttttcttccatgaaaatgctggaggtttgtagacagcccagttccagagttctgaagcctgcctgccccacgtgtgctctgtaatctatttctgcttgtgctcccggccagtgaggcaagaaaactgatattatttacacaaccaacaggctctttggaagccttgttagtcatttctgtgatatcccgagcctcaactttggaaataacatcagatcttttcccaagtgaatcaactttaacaccttgaaagcaagtagtcctagagaaagaagaatcagttatgttttgaacatc

SEQ ID NO: 317856 - DNA, 986 bp, Homo Sapiens
ttctttgttttttcgcgccgttttccggagtcgcgttctcctgtttcttgtgttttccacttcctctgccttttgtgttccgctgccattgggactctgtgccggtggcaccggcgggttggagccgtccccgtttttcatcagcggggcttgtgcccaagccgtccgttggccgggtcacatattcccgttaagggaggcttttcggaattaatggatgccgccaggccagttgccgaattcgaccgcctgaagtgttgaaatagtctcaatggttgtttccaagtagaagccacagatgctacttgatctccgccagtacgtagaggtctccagacttagaacatttcacaacagcatactttgattcaggcatatagcaaacagcttcattggctggaatcgtccaaggttgtgtggtccagaccaaaatactaacaggagatgaaccatctataagagatgccaattttggagaaggctttaagagaggaaattttacatatattgaacgactgacatgctcaggattatattcaagttctgcttcagccaatgcagtcctagatgacggagacctaaacacaggtttgtaagatcgataaaccaagcccttatcatacatttggtaaaaagttctcaactgtttggcttcatacttcccatcaaatgtatagtagcaattattccaatctgccattattccccaacgaataaatgctgatttctgtttctcaatggctgctttagcaaatgatctagctttctttctaatttccatagctgaaagattctgagcttctctaccaagttctgataatacttttatttcaatgggcaacccatgacaatcccagccgggcacaaaatgtattttggagccattcatcatatggaatcgattggctatgtctttcaaaatcttatttaaagcatgtccaaccgacgccgtggtcgacgatatcccggtattccgggccggtacc

SEQ ID NO: 317857 - DNA, 353 bp, Homo Sapiens
  misc_feature (115)..(128): n is a, c, g, or t
cgctgcagtgagtcccacagttaacacttgcccagttccccactctaactggggaaaggaactggtaaaacttgttcgcctttgagacacttcagtgagttatttgggattcttnnnnnnnnnnnnnnggtggaaggaaaggcatctgaggggctgtgacacactccggctacctctggccacacgccagcttgcttgtgcctgttggactcaccagaggcaggcaggccctgcggctcctctagagcctgcaaagcctcctcctggcaattctgggcagggccgatgtctgggccacagctagtccaagcctgtcattgaagacccagtcaagcttctgtctgaaattccac

SEQ ID NO: 317858 - DNA, 670 bp, Homo Sapiens
  misc_feature (548)..(556): n is a, c, g, or t
  misc_feature (602)..(615): n is a, c, g, or t
gggagcatttttgggatcaatttttatttgggcttctcacagtggttagagccactctgtcttcagaacaatcacagcacaggaaatgcgtcactgagactgcccagaaaagtctgaccagctgaatcttattgcttaaaatacacatattcacaataactgacaaagggtaacgtgcctcacacaggaatgtgttcgcatttgcaaatcttctgactggctgtagcacccaaaccctccaccgaccccgtctcattcacgtggaaagccagcctcagtcacatctccctggccccctaacgattccttcagctccctattaaatctctctctgagcagggcagcatcctgtagcgggggccaaactgtgacctggggaaccaagcccagctccgcaggttgcatttccgtcttctcgtgcctttaggataggacgctgcagtgagtcccacagttaacacttgcccagttccccactctaactggggaaaggaacttgagaggctcagaactcatccatttgatctgttaactgaaaaaggattcannnnnnnnnacttgttcgccttttagacacttcagtgagttatttgggattcttnnnnnnnnnnnnnnggtggaaggaaaggcatctgaggggctgtgacacactccggctacctctggcccc

SEQ ID NO: 317859 - DNA, 991 bp, Homo Sapiens
  misc_feature (928)..(928): n is a, c, g, or t
  misc_feature (945)..(945): n is a, c, g, or t
cggctctctcatgaccagctctctgcctcccttccaggaggctccatcccacactgttcacccaggctgcggagactcaccttcccgagctaacttaactactgtacataataatatgtattaaactggtatcgtggtgatataatgtggtgcagttacttatatattaaatatctattgtatccatagaataggcagcattatttcaaacatattcaagttgggagtggagatctttgcctagaagtcaatattcaataaatcttgtacataactatttcgatggcaaatgttaagccttctaaaaggaaagtgtagattggaaaatgattttttttccaaatgatgtttttgccttctaatatactgtaaggtaatgagcttcagaacaggcaacctgaccctgcagaggtcgcgtgctgtgggatgacagcgggacgggagctcacaagtgctttcactgaagatttgttcatatactgtgtattgattgttgtgtaatatatcatcattgcttttgtaaatacgtaaaactgtaattttttaatggtgtgcttcccttatacttttttgatcagagaattttggaaagtaccaaagaagcaggggaatcattggccagtgttacgttttcacattgtctgtctcccaccctcactgatcacgcctgccccagagcagtgtgtggcggtgacaccgtcacccaggcatgcgccacgccgtggttctccaccagcagtgccaccgccaccacaccccagatcccacccaccttgcagtggcctttccttgtcatcagagtagagaatgcacaggtgttggtgagggcgtgtggctgagcactgacatgtcaagtccagagtcagtttctatgcccaattctccctgtcagcctgaaagaacggatccttgttttccaatgttcagncacaaggagggtttttntgtggtttgacattttaggcagtttcagggatgagagggagggatt

SEQ ID NO: 317860 - DNA, 479 bp, Homo Sapiens
tgaggggcattttttattataaatttaatatggttgattaatgaaaaatgacaatgaagtaccaagaaaatgtttgtcaatataaaaattttagcagcatttccatagtttcaggctccaacattagtcgtacttcctccctcccgctatcaaaaaaagaagagactccaatgggatggagtagagcctgggggtgtccagctttgtgtgggcctcagagaaatactccatccagcatccaggattctccctccctctcatccctgaagtgctagaatgtcaaagcacagaaaaagcctcctttgtgctgacattggagacaaggatccgttcttcaggctgcagggagaattgggatagaaactgactctggacttgacatgtagtgctcagccacacgccctcaccaacacctgtgcattctctactctgatgacaaggaaaggccacttgcaaggtgggtgggatctggggtgtgg

SEQ ID NO: 317861 - DNA, 1077 bp, Homo Sapiens
cttaaatatagatgtatttttttcatctcatctccggacacactccaatcacacccctcctgccctcccctctcaactgcaaaccaagcggtgcagacacagcacaggacacatgaggggccctccctttcaccaaagctgaaggcagggcacagtttggggatggaagagcctcgaggtaaatgtgggggttctagaacccagtgacctcagttctggatcatgggaaagggatcagtatgcagtaacgtggtaaggttccagatctagaagccaggacctagaacctagtggtttcacagtgggcagagcagttgggaataagccaggttaggggtgggggaagacagccagctctgtcctctgcaggcggattccctggagggagatctcagatttagaaaggaagagttggatctggtccaaaaagggccagaaagacaggaaggcatctggactgagactgtgtgtcctccagaaggaatgagcagccaagttgttctaccacctcttgcttggccaaagtgtaggggatgacaggagccggatggagggatcctccaggcagagcctggctctgacatgccagggagggctagaacatccctcccagagccccatttctggagttgaaatggaggaccatctgctctcagttaccttcaaactctgaaagtgccccggctctggacttgatcgccccattcgcagggacaccacgtggtttccagaacttggtggcccgcatgccgggcatgagcgtggcctgctctgtatgctgtagaatttgtaagccacacggggggctctaaaagccccagacctgaaagcaccatgccaggtttcctaaaacctctggcaccaccgcagagtaatggcagattcctggcctctgggaagcggtccaggcccaggggactccagggcgctgattatgcatattctggagccagagaaaggcacggctttgtggattctggagtgcaggaacttggaaactggagctggagggggtggagtgtttggcggactgggtgggggcactgcggggccacacccagtgcagatctggagcgg

SEQ ID NO: 317862 - DNA, 1134 bp, Homo Sapiens
aggcaaggctttattacagaagtccactattttaagtgactttttgccaattttagatttgaagggaaggtctcaagttaagcttggaaccacttagaatccaagagggtagcaggaagatccaacccctcaaagcaggtggcatgggtgccacctgggaggggatctggggcctgtcttgagccgtaaatcttcctccacctgagacgtgcaccccactgtaccagagatgcctaagactccaatccctgggttctggctgtgtggaaaatgtctctacacagtcaagcttcagctgactacatgtcaaagagagacaaagttaagagcagcctttcatggtgtcaagaagcagttagcatcttgacttcccctccactcactcgctgacctgctgcagcctccccgggcacctcaggcatagaaaatgagctcagggatctgcccaccctggaccccagtccccgttggtgctgtccgaggagcactggaactggaaggccacctttccacactgcacttccgtcatcccctcctgcccaaagtagctgagttcgctgccgtccaggacggcactggccgtgtagaaggtgtcttgttcaacctggaccgggtgttcaaaccagaccgggaaggtgttactggatccgtctgacatgaacttggtcaagttctgagccagaaccaccccgagccgcttgagctcaatcttcacgctgtactcagccttcccagagctggagccatacaggcccagccctgcaataaatacccttctgtccactgcaaactggatgctgtcgcagcgcccgcggtaccgccactggttgctgcggtaggcagaagactggaatcggtggcacctctgcggggcgaggcccttcctcttggtcaggggaaagtccaggcggggcttgttggtggccgtgtaccacaggaagatgctgtgggtctcctccagagtcaggatgtctgactgggcagcgccgttggcaaactcctctagggtcatggttggaattcggaccagatagagggctcgccccagaacatgcctcttgtttcgtggggtgattggcagcccctgcctcttgcactccgcctcggcccagttcaggacggcctcgaagaccc

SEQ ID NO: 317863 - DNA, 1010 bp, Homo Sapiens
  misc_feature (168)..(168): n is a, c, g, or t
taaaactacaaatcatatcattttgttatccctacgaaacctctatttaacccctttttattattcagtccaattatccatttctccccctattttaactgttatattgttcaccctcttatttaatttactaccctgtccctaactaactgagtcctcccatgacgncacattcctattacgctttcctaactataagaggaccacaagaaaaccctatttgtaaccttgacgtctagaaaagtgtacaatttagttttacaccactttctctgctaagaaatcacccttttttgtcatcagaacctttaatcacttggccatacagagatttatttacccttattttgaataacaataatgatgatgataaactattgtcacggtcatataatttttcagaacttacgccaccatggaggcaaatgtgtacagaatatttctaataaacctaaatttaatcacagttaaaatttctcaaaagtattttcaagtgctcaagaatattaaagtttggggggaaatacctaagtcataaataagcaagtattccctccaagattcactaattgggataaaagtctcagggtaagcccacaagaatggtctgcaataaagaaaaatcaggtctgtgtagagtaatttctgccatctttagcagaaaagccaaaacattctgagccaaataaaagcaagatcttttgattcagcgccttttgttgtgttagttttaatttctaacttctcaacatgttatagctcagaaattcccatatgcttactatctgtaataaggaactataacgttaaagaaaaaattcagagacgtgatcattttccatcataggtctgtctctctttggtaagaaacagatcaagacttacttattttctctcacctacagaagagaggggagttaaatgtcattaacctagtaaacatcccctgtgtataaacattaagttggcgacgcgtggtcgacgatatcccgtacatcccaggccggtac

SEQ ID NO: 317864 - DNA, 551 bp, Homo Sapiens
  misc_feature (40)..(40): n is a, c, g, or t
  misc_feature (91)..(91): n is a, c, g, or t
gtggtgaaggactggtactcgggccgcagcgacgctggtntgcctctacgagctcaccgttaagctactgtccgagcacgagaacgtctgngctgagttcagcagcgggcaggtggcagtgcccaagacagtgacggcggtggctggatggagatctcccacaccttcaccgactacgggccgggcgtccgcttcgtccgcttcgagcacggggggcaggactccgtctactggaagggctggttcggggcccgggtgaccaacagcagcgtgtgggtagaaccctgagcgaccctgcctccactttcccccagctgcctgggaggggcaaaggttcgagggtagataggccttaaatttagttccatagcgttcctcacctttccccaagccacacatcctcctcccttcctttgttccgatcccagcccttgagcagggagagagaattttttttggcataggtttgtttaggtagccggcttctagaatgtagatccgtgagggcgtgagcttggactggacccactgctgattccctgcacctagca

SEQ ID NO: 317865 - DNA, 488 bp, Homo Sapiens
tcagtctttggtatagagagctttctcctcctcttatttccccctctgtccctgtgctctaaagacatttcctcgcattcacattatttccttggatacaaaaattgcccagaagtaaactttgtgctggaacccctgcctccattgacagtcccgccggggacccagcccacagcagcccaggggagaagcaggctgtggggactcacacgtagtcgttcagcctgtacccgctgtgcgtggccgaggtcactgagggggcccgattgtctttgtaggcagctggtggctggtaggcaggtgcggtgtttgcagtggtcgtggtggccctgggcggggcctgggttagggcttgtagggtgcctcgtcctggcaggacaggcaaagcagggtgccaccaatgagcgagagggacgaaggagatgaagcccaggtacagggcctggccaatctcaaacttcatgccgctgggcagcagcgggttgtag

SEQ ID NO: 317866 - DNA, 365 bp, Homo Sapiens
cttttttgcagcttaagatctgccttggtatttgaagagatataaactagatcaatttctttcacaggatcaactaaacagtgtaccacaatgaattctgaacttgactattatgaaaagtttgaagaagtccatgggattctaatgtataaagattttgtcaaatattgggataatgtggaagcgttccaggcaagaccagatgatcttgtcattgccacctaccctaaatctggtacaacctgggttagtgaaattgtgtatatgatctataaagagggtgatgtggaaaagtgcaaagaagatgtaatttttaatcgaatacctttcctggaatgcagaaaagaaaaccttatgaatggagt

SEQ ID NO: 317867 - DNA, 445 bp, Homo Sapiens
  misc_feature (20)..(20): n is a, c, g, or t
  misc_feature (28)..(28): n is a, c, g, or t
  misc_feature (33)..(33): n is a, c, g, or t
  misc_feature (68)..(68): n is a, c, g, or t
aaaatccccttaattaatanaatggggnaaggnaagggcaggcaagttgaagggcagggctgggtggngagaggctgaagcccaggagtcttctcaacctcttcccaagaatggggacccccccgaccctgtgctcatgagggaggaataaagaccagctgccatggacagcccctctcccagggcctctgacgctggcaggaaggggagcaccatcaatcctcctgtcccaactccctcgtgggatcaggttgggaccaggggcgggggcaccaggacaaagccccttggaggccgaggcacattcccatgctgatcagagctaaaaatggctccgtgggaacccggactggcagagcccagggagggagtgaaaggggagggcaggaggaggtcaggaaggctgatgagcccagggcagaccaggggcctacatagacccaga

SEQ ID NO: 317868 - DNA, 735 bp, Homo Sapiens
  misc_feature (310)..(310): n is a, c, g, or t
  misc_feature (341)..(341): n is a, c, g, or t
  misc_feature (362)..(412): n is a, c, g, or t
tttgaattgatctgtctttattatgtcatcagaaaacaaaaaaatcccccgagtgtaaacaggagaaatgtgctggttaagttactcatcattatcttattattaacaaaataaagcactatctatgtttacagtcataaaaaaagaaacagcctggagagaagtgggggctttgaggatggagagaagacgggggcagacacagactccacatctggccctgtgggatttggggttcccatactgatccaagggctatttagatcttcagagttaggtgacaatggggatttgatttccttagggaacnaaactttgtgaaactgatcagaggctgagantccagtccctagtatagagtnnnnnnnnnnnnnnnnnnnnnnnnnnnnnnnnnnnnnnnnnnnnnnnnnnnaagcccaggagtcttctcaacctcttccaagaatggggacccccccgaccctgtgctcatgagggaggaataaagaccagctgccatggacagcccctctccagggcctctgacgctggcaggaaggggagcaccatcaatcctcctgtcccaactccctcgtgggatcaggttgggaccaggggcgggggcaccaggacaaagccccttggaggccgaggcacattcccatgctgatcagagctaaaaatggctccgtgggaaccgactggcagagccagggagggagtgaaggggagggcaggaggaggtcaggaaggctg

SEQ ID NO: 317869 - DNA, 392 bp, Homo Sapiens
agttgtacccctccatagaaaagacaaacttccatttaaacccagctttccaatcttggttaaatttgatgagtgccacacagaagaaataacaccgaggaggacattttcattccaatttgaagattctaaatgataagagcaataaaggcatttagtaaccaccaatttatacatatttctcctacttgaagaaccctaaactcattaaatcatttttagtttaattgtgagttataaatgaactcacataaagttgtttaaatgatttgctcaacagaaccaaaatgtgattctacataaaattttattagaatatacttattacaaaaatatggcatacttggccaggagcagtggctcacacctgtaatcccagcacttaaggaggc

SEQ ID NO: 317870 - DNA, 423 bp, Homo Sapiens
gcaggcttttttgcatttactctgctctgttccttctttcccacttatcttcctttcagggtctccactggctgtctttgctaaccaaatatacaggagtttccttggtcacaattagaaaatgagcttccaaaagaagaggcaccgagggcccttggcacaggacacaggaagggactgatcacgtgagctgtctcagttgaatccctcatttctctgatgcggtcgccagaattactcaaagtatttcattttattttcatgtaaaacccatttatacagctgcctcagggatctgttataaaacatgtggagaaaaatcatgatgtaaagtaagaaatacagggatacagatagaggaagccacatttttgttaaccttgttctttggaattctgatcaaaactacgatgtaaaagattc

SEQ ID NO: 317871 - DNA, 413 bp, Homo Sapiens
agagagcctaagtatagtaaaatagaggaaattacaccattgtactcatcccttaactgtttactgtggacaagaaagagcctatttgcaatctttagtgcatcatgatcattctaagaaaggatagaacctactaattgcatgaagttatttaattaactggttactgcatcagtctgatagatcagccttacagggtaacataatctaaaattttgatatatggccatgtttacaagtaataaaaataaaagaaaaatcataagatacctgggcccacaatgatttattctgggttgatagtgaacaaggctgatttgattcatttttctgccagaaggaaggaatcgcccataaaaacacaaatgagagtagttctctcctcgtgccgaatcctgcagcccgggggatcc

SEQ ID NO: 317872 - DNA, 572 bp, Homo Sapiens
  misc_feature (186)..(203): n is a, c, g, or t
atccattgcttttatctctataaaaaagggaaaaatagggccaatttccaatgtggattattttagcattagaaaaaaacgtaattaccgattttcatgtgccaatgaatgacattcaaatgattgtagaaaaggtatttttcaggcttttaaatgtaactaaacccaaatataataattcatccnnnnnnnnnnnnnnnnnngacatttgaaattacaaaaatttttatgttatacgtgtatatacatttgaaaaaacaattcttaaatggattgatctgaaaatttgaaaccactgaatcaaaagcttatctttctgagtagaggtgaaatttaaacttctaaaaactgctatatacacccaccaagaagcaccaataattcattcttaaaccttactttctgaatgtatagactataatatttgaaacattttaggccaattaattgctttgcatcaattaaaacatactgagtgtagaaaagggagtaaaacctcatatatatagattctaagaggtgtctgtcttacgaatgtaataatttgggctgggcgcggtggcaaacacctg

SEQ ID NO: 317873 - DNA, 348 bp, Homo Sapiens
ttaggatttgaaaatccctttctattgggttatatccattaatctacatttcaacttccaagccaatctattttaaaaagttacctccattttgtgtccaatatcttactgtattagaatagtacaggtagactcttgcactgctcatttctagtaggccattaataaagaaaagaaaaacctttgtgctttctgttctttccttaaattacaaatgtaaaactgacttttttcccccaaagtagaaacagtagtttgcttgacgaaaaatcttttattcacttgggcattacattacctaacattacacaggctattttgcttttaaacattgttttccatgtgttg

SEQ ID NO: 317874 - DNA, 436 bp, Homo Sapiens
catcttcaacatctcggtgacttccagatgatcgggactgagcaatgaaaaccttgatgggcttggtgtcgttggggccgaggcactggccatgcatctcctccatggccctgcaggcctgtgagctgcgggcgaacttgacgaaagcaatgcccttggactccttggtgtgcttgtcccgcaccacccagatgtcctggatgtcgccaaaaggcgagaagcgctccctcagcaccgactcaggtgtgtacttgctgatcacaaggaagatgcggctgttgggcggttcgtccaggctgtccacgcccgggcggaagcccccgccgctcgcagagctgccagcttcgtccatggtgctccacccgaatgcaggagcctcactgctctttgcttctgcggtgtctgccaccgctgctgtctcacacccaagcctttg

SEQ ID NO: 317875 - DNA, 449 bp, Homo Sapiens
ggaaaaaagcatcatttatttcaaagtacaacacaaagttgtatttttaagaaatacacattcaatcttgtatctcaagacttggctatgtgcatttcagttcatctttaaaataagttcaggtatacaaatgttacatacctcaagtacaaacagcacagaaaatgcatatggtctcgactgaatgtttttacattcattcactgttcttaagttgacttacatttctgtaatctgcttttaaaccaagacagccttactttaaaaaaatactctattttcagcacaaagtcctcatacagttttaaaattagatcttggcgcataatattgagaaattattaaaaaccaaacttggtaatttaacaaaattgtcacatgccaggatttctgaatcaactcaaattatttccttagctgtaatgtcaaatctgtgttcatacagataa

SEQ ID NO: 317876 - DNA, 137 bp, Homo Sapiens
ttttttttgggatatatggatgggattctttattattacttaaagtttactgttctcataattacaggctccaccttagaggtttgaaactttaagagaaaatctcgtgccgaattcctgcagtccgggggatccac

SEQ ID NO: 317877 - DNA, 404 bp, Homo Sapiens
tctgcaggaattcggcacgaggaatattttaacatttaattggtcttgaataaaaaaatgacactaatatgagctaatgtctaaggaaaagattatcatgtaatgggaaagcatagataaagacattaagacttcttggaattgtggatggctctgtttggatttgttcgttttgtttttggtagaggagaggtatgttgagtagaataaaagtatatactggggctgaatctgggtaatggaatatcataaggaattagaatttctgtgaaaaaatatggaagctttgaataaatgaatcccaagctttggtgtaaaacaacaacagcaacaaaacagcattttgtttgtttgtttgttttggagatggcagaagcttgtagaagaaaacaaagcttactatg

SEQ ID NO: 317878 - DNA, 547 bp, Homo Sapiens
tttggcttgaacaataaaaagagtttattggttcaccatcaccgagaggttgaaaggtggggaggcttcgggtgtggtgcagtcagggcttcaactccgggtctatgtgattaccctggccatgtccttcttctgtaggttagcaccttccttgggctggtttcttccagggtcacaggatggctacctcctgagcaggagggaattctgcctgaatcactggacaatggttggaggatggacgttgagaagtagaagtaatgtctctgatccttggcagctgagtggcagtggcaaatcccttagcttctcttcacatcattttccaaatctgtaatatggctgtacaaattcttagcccaaactccttagcatgacgttggagtcccttcgcatctggatccacgtgactccaggcggcagagtttctgtgttgggctgacagtgctcttcccgtcacaaggtggaagcttccaaaaggcaaaaacaataactctacagccagttatgaaagttctgttttgtcccaggggattttgtacctggt

SEQ ID NO: 317879 - DNA, 1026 bp, Homo Sapiens
  misc_feature (8)..(8): n is a, c, g, or t
  misc_feature (10)..(11): n is a, c, g, or t
  misc_feature (15)..(15): n is a, c, g, or t
  misc_feature (28)..(29): n is a, c, g, or t
  misc_feature (38)..(39): n is a, c, g, or t
  misc_feature (42)..(43): n is a, c, g, or t
  misc_feature (48)..(48): n is a, c, g, or t
  misc_feature (56)..(57): n is a, c, g, or t
  misc_feature (66)..(66): n is a, c, g, or t
  misc_feature (68)..(68): n is a, c, g, or t
  misc_feature (71)..(71): n is a, c, g, or t
  misc_feature (74)..(74): n is a, c, g, or t
  misc_feature (77)..(77): n is a, c, g, or t
  misc_feature (81)..(81): n is a, c, g, or t
  misc_feature (85)..(85): n is a, c, g, or t
  misc_feature (89)..(89): n is a, c, g, or t
  misc_feature (92)..(92): n is a, c, g, or t
  misc_feature (94)..(94): n is a, c, g, or t
  misc_feature (101)..(101): n is a, c, g, or t
  misc_feature (113)..(113): n is a, c, g, or t
  misc_feature (120)..(121): n is a, c, g, or t
  misc_feature (135)..(135): n is a, c, g, or t
  misc_feature (137)..(137): n is a, c, g, or t
  misc_feature (141)..(143): n is a, c, g, or t
  misc_feature (146)..(147): n is a, c, g, or t
  misc_feature (149)..(150): n is a, c, g, or t
  misc_feature (152)..(152): n is a, c, g, or t
  misc_feature (154)..(441): n is a, c, g, or t
  misc_feature (951)..(951): n is a, c, g, or t
ctggaacncnncccncaaattatgtggnnttacccatnngannaatcncccacctnnccctcatgntntcnctnaancccntctntttngtngnttcacanaactacgggcancaaaagnnttttctatatcgtntncgtnnncgnntnntngnnnnnnnnnnnnnnnnnnnnnnnnnnnnnnnnnnnnnnnnnnnnnnnnnnnnnnnnnnnnnnnnnnnnnnnnnnnnnnnnnnnnnnnnnnnnnnnnnnnnnnnnnnnnnnnnnnnnnnnnnnnnnnnnnnnnnnnnnnnnnnnnnnnnnnnnnnnnnnnnnnnnnnnnnnnnnnnnnnnnnnnnnnnnnnnnnnnnnnnnnnnnnnnnnnnnnnnnnnnnnnnnnnnnnnnnnnnnnnnnnnnnnnnnnnnnnnnnnnnnnnnnnnnnnnnnnnnnnnnnnnnnnnnntggaagttaatttttatggttgtgtatgtgttgcttgtcactagaatgatggctgtgtggtgcaggtttttgtctttgttattccttgctgaatgcccaggcctggcacagggtgagtactccatagatgaatggatgaacaaatggttgatcaccagacatctgtccctcttcttgcccatcacccaggacatgttcctagctggcctcgtcccttgtcatctcttcatccagtctgtcctctaatcaggagtccacttgtcaccttcagcttccagttgggacctggatcttccgagatgccctggagccatgcctcgttgaaccaggaggggtctatctggttcagcacataggctacggcaaggccgctgctcaggtcctgagggctggcacagggagacggaacgtggaacgtctgtaaccaggtgagcagagactccgcatagctcagctttgtccacgtctcatggctcccgatcggattcaatcctaggccacggagccccngctgccgcatgcagcctcctgggtcctgtctcaccagtcgagcgcccgcagccccgacctcccgctcggcctaga

SEQ ID NO: 317880 - DNA, 860 bp, Homo Sapiens
  misc_feature (762)..(762): n is a, c, g, or t
  misc_feature (776)..(776): n is a, c, g, or t
  misc_feature (791)..(791): n is a, c, g, or t
  misc_feature (848)..(848): n is a, c, g, or t
gacgagtccgagcgcgtcacctcctcacgctgcggctgtcgcccgtgtcccgccggcccgttccgtgtcgtcccgcagtgctgcggccgccgcggcaccatggctgtgtttgtcgtgctcctggcgttggtggcgggtgttttggggaacgagtttagtatattgcggatcccagacgtggctgcattgtccatgggcttctctgtgaaagaagacctttcttggccaggactcgcagtgggtaacctgtttcatcgtcctcgggctaccgtcatggtgatggtgaagggagtgaacaaactggctctacccccaggcagtgtcatttcgtaccctttggagaatgcagttccttttagtcttgacagtgttgcaaattccattcactccttattttctgaggaaactcctgttgttttgcagttggctcccagtgaggaaagagtgtatatggtagggaaggcaaactcagtgtttgaagacctttcagtcaccttgcgccactcccgtaatcgcctgtttcaagaaaactctgttctcagttcactccccctcaattctctgagtaggaacaatgaagttgacctgctctttctttctgaactgcaagtgctacatgatatttcaagcttgctgtctcgtcataagcatctagccaaggatcattctcctgatttatattcactgggagctggcaggtttgggatgaaattggggaaggcgttattgggggaagactctggaaccatttcagaggatggnttcttaggattccntgtttggacgctctngcaaaagttttgcaggatgaccttgtaacagtctttaacgggtggggaattgcagtnggtaggagttag

SEQ ID NO: 317881 - DNA, 392 bp, Homo Sapiens
  misc_feature (325)..(325): n is a, c, g, or t
  misc_feature (331)..(331): n is a, c, g, or t
  misc_feature (350)..(350): n is a, c, g, or t
aaatgaattatttatttatttttaaaatctgaggaataaatgcaagtttttaaaagtagcaaggacatgtaaacagaaattgcttctatatattttaatacaaaatccacatttattattagcaccaatgatttaacttacaaatatattctgactccctggttttaagagcaatagcttaagttaaatacacagttcatctcttccaaagtcaaaaacaataaaataaaataacaccgacaagcaatagtagcaatggcaatttgaaaacatatactttaaggttaatggggacttcaatagctcagtacaaactatataatantatgtngcatagatggtcagttggncttttgattcttacagtctggttgtaatccaggttgcataag

SEQ ID NO: 317882 - DNA, 820 bp, Homo Sapiens
catggaacagtttttatttttagcaactggctttcaaagcaaggaaagatgtttttttaagcataattactaagaatagaaacaactttgaggtgttctttttgattcttaatatttaaggtgtctcatgacatttgaagtctctaaatgtcattaatcatttgttgcaggtttaatatgagttgtcatgatgcttaatatactttaatgaaaatagaattttggccacatgctgttcattaaagaaaatatccaatttaatataagtccctcaattaaaaatcccatcaaaagccttgttccaatttcaccatgattctggctataacacaattatttcattggagtgaatcaatggttaatgtcaaagtttttaattcttcaagtcttggtttcaatctggtttaagtgaaagtaaaattagtttggtggtttccttcttgagtcttgcaaacttgagtctaccttacacaaacatctccatcctgccacggttcggatgactggcagtctgtttaggcgaggcccagaaacagaaagcaagtcttgtgaaagtcagaatctgggagctttgcagatgcgtcaaggtggccttcagattgcctctctgttttcaatgtgtcccctgtctcactcttccaaacatcctatgcttttaattcatcaggtatgaaggtcaggcagaaagaaaatgttggtgctacacaactcatctctcagtcttcaaattcctcatgctcttttttttgccgagagttcctagggttgcgcagctgggggacggcggcacccagcctttttcccgcttcggggcgccggg

SEQ ID NO: 317883 - DNA, 1463 bp, Homo Sapiens
ttttgatggatgtattatttttttaatagaaaccacatcacttcatatgttacagcatgtaattcaagaggtccccagaaagttttttcatctacaaaataacagaaaggataagcaccctcaccacccaagcctttggttcattttttttggttttgatctctattctcttaccacaatgacatgctgcttccagaatggaactctgtctttaagttctatactagttaggaggctaatctatcagcttgctttaataatgtaatggatgtcctaatttaactgaggaacctggacaagtcttccttgatttcagcttcatcccaaggcccatgaatgttttctttaaaaagctgcaagcgagatgaggtagaatggacacagacatgagatagacatcagcagaagggcaaagagtacggctcccacagcactaatggacagtaggcctcccacggctgaaaatgcaaaaagcagtgtgacccccacatagctccggggagtacatgcctttagtttcttctgcaacatgggccacagggcaaaaatctgaatggcaaatgtcaccatgatgaaggcatgcagggaccggggaagacgtgatgccaagcatacagaagcaaagatggccatgttcaaggatagtgtgctggatacaatggcagcattggcaccatagtcaaaaaagatgagatggcctaacagcatgaagactgacatggcatagatggtgtcagtgctgacagactctgtaagggtcttcagcactggtgaaaacccataagtgaaagtaatgaagactagggcactcttcaggtcagcccaccgggtctgcccactcttcttccgcccttcacctccatcaatgagatcaaacaaaacatacccaatcagtgaagaagccagaccagtccctaaaagccaatggggggccagaagaccctcatccatataccaccagataaccacaaaaacacaaacactgcacagctgctggatcaccacactggactcaaataccacagcccaatattggtatttccgagcatggatgtttttccggagctcttccaggaatcgccggtccacatagttatcaggaaagggctgtcgctcatacaagaccttctgccacttgacctccttggtgttagtcacaggttgagcatacattatcctttcattcaaactcaggccagtttaatcatcgccctcacagaagtccaggtggttcttgttctttatgaagttttgaaatgagacctccctggaaattccatgctgtgttgatgttctaccaacctttccttgttttcaaaggcaggggctaggcctacaatagatgaatttgtctctgaggcaggacaacacagccaagttcccgagagttcctagggttgcgcagctgggggacggcggcacccagcctttttcccgctttggggcgccggggctgcgactgt

SEQ ID NO: 317884 - DNA, 431 bp, Homo Sapiens
agaacactctgctttaaacctttagtactaaattcaatttgttaaccaaaggaaagtgccgtgttgcatttttcattctaaaacttcattgtcttaaaagccacattgagctatagtttgttaggtagtagaaaaatggcatgttctgagaaacagttgactgagtataaatttttttaattgtataattctgattcttaacatacacttcatagtatcctagaatagtaaaaggaacaaagttattgtgacacagactggttgtcaacctattttctgaagagctgtaaacctgagtttttgcatatgtcaaggtatgcatcctaagtgcttgagcttgccctcatgggaatattatttgttaaagtaaccagttttgcaaagtctaaatcagcgtccattccgttaagctctttagagaattactcaat

SEQ ID NO: 317885 - DNA, 1293 bp, Homo Sapiens
  misc_feature (850)..(850): n is a, c, g, or t
aggctggaccggtccggaattctccggatcaggccttgagtgggtcagcattgcccacatctatccgcagggatccacggggaagctggtgtgcgccggataaagatggcaaccgccgatgagattgtgaaactcatgctcgaccacatgacaaacaccaccaacgcgtcccatgtgcctgtgcagcccggctcctcagttgtgatgatggtcaacaacctgggtggcctgtcattcctggaactgggcatcatagccgacgctaccgtccgctccctggagggccgcggggtgaagattgcccgtgccctggtgggcaccttcatgtcagcactggagatgcctggcatttctctcaccctcctgctggtggatgagcctctcctgaaactgatagatgctgaaaccactgcagcagcctggcctaacgtggctgcagtctccattactgggcggaagcggagccgggtagcccctgccgagccccaggaggcccctgattccactgctgcaggaggctcagcctcgaagcggatggcgctggtgctggaacgggtgtgcagcactctcctgggcctggaggaacacctgaatgccctggaccgggctgctggtgacggcgactgtggcaccacccacagccgtgcggccagagcaatccaggagtggctgaaggagggcccaccccctgccagccctgcccagctgctctccaagttgtctgttctgctcctggagaagatgggaggctcatctggggcgctctatggcctgttcctgactgcggctgcacagccccctgaaggccaagaccagcctcccagcctgggtctgctgccatggatgccgngcctggaagccatgcagaagtatggcaaggctgctccaggggacaggactatgctggattctctgtgggcagcggggcaggagctccaagcctggaagagcccaggagctgattctgttacaagtcctgaaccaaagcagtcaagattggccgaagcttgcagccgagggcaccaagaatattggaagctggagccggaagagccagttatatcagctcagcacggctggagcagccagaccccggggcggtggcagctgctgccatcctccgggccatcttggaggtcttgcagagctagggtgtgtgactgcctcccttggcctcagctcctctcactgctgtgctgaggtggcctttgtcacttccttctgccttccaaccctcaccttcccccggcctggccccattggcccaccctctaagttgagcaggaaatcctt

SEQ ID NO: 317886 - DNA, 722 bp, Homo Sapiens
cacaaaatggatttttattgtggtcatacatggtttctcagtgccacagaaaattgctatgtagggacaaaaaatttttggatggctctgtaaagaaacatggtaggttttcagaaatgagttgtgcaggaatgtggttaatgaaaagcagaaagggttaagggaagagaaaggaagccaaggagtgtggtatgtacatcaaatgattactttttaagcccctctaggctctgataaccctttccccaagtcagatcccaacaaaattcatcagtaactgaagtgattgtgctaacagatacataaagactaccggagaaaagtgggttgagatgggctcagacttattgttaggacaactctgggagtcttgtgtctgtgccaaccacgtatccgtgggctacctggagatgagttctaacaaccagcacagaacccaaagctgctctccaacacctttgtttagtagggaaaacctgtagtggggcaagagagaagtctgtgcccttcccccaaccaccgtttcatcttctgctcgctgacccttgatgtgacttgagagctcgtgttgtgcactgtggtgcctcccaggacaatcctcactccaggagtggtgcggttcaggttataaactgttagagcctcttcataggtggctcctccaattacaaacacaatgatatcctgaggtctgtctctgagtgtgctggggcctaaataag

SEQ ID NO: 317887 - DNA, 596 bp, Homo Sapiens
  misc_feature (344)..(453): n is a, c, g, or t
taattacgccatgcttcccatttaaaccctcgctaaaggttaccaaagcttggagctccagcactggtgccgaacgatataaaactagtggatcctccgggctgcaggatttcggcacgagtctgcgcgggtacctggggcagctccatcagcttccatcattccaggaccagccctgtgagcctgggtccaccctgggccaggaagctctcctgacctgaggagctgggcaccagggctgctcccagaaccctttatccgagccactcttactctctctccaagacctctgttaattctctgtagaaatgggcatgttccggccgggcgccgttgccacgacnnnnnnnnnnnnnnnnnnnnnnnnnnnnnnnnnnnnnnnnnnnnnnnnnnnnnnnnnnnnnnnnnnnnnnnnnnnnnnnnnnnnnnnnnnnnnnnnnnnnnnnnnnnnnnttaactgggcatggtggcacgtgcatgtaaatccgacccctcggaaggctcagacagaatatattgcttgtaaccaggcccggggagtcacaggtacaccgaggccaagtttgcacccctgcactacagcctggtcttctgag

SEQ ID NO: 317888 - DNA, 603 bp, Homo Sapiens
tccttccaataccccctcaaacagagtcacatctctgtaagaaggaaaactttcaaccaccaggtgcattaacttctgcgcactattctcactttctcggacgcagttgagaaaagagcctccaaacttctccagcagaattttcccggtttcattgagaatccgatgcctctcttctactaaaggcatggaaacgtctgtgtcagaacgaagtatattccgaacctgatccagggtcactgtcgcgtagtacgaggcactagttattggtatcccttcgtcgagggctctgttgacgtcggcgcacagggaccagtacccactgtatgttttccctctgtacctcaccacacacttgtgctcgtcctgctccgaccaaaaggagaagttgagcgtgtctgtcacgaacacccagttgaccgcggcctcgtcggccgccctggggttcagctcatgaagggctttccacccctccacgcgcagctctggccccgccgccttggccagcagcagctctgccaccctccgtacgcctccgctgtcaataaacacatcccgactgttttctgcaatgaatttagaggattccgtgggatttaggag

SEQ ID NO: 317889 - DNA, 622 bp, Homo Sapiens
  misc_feature (58)..(58): n is a, c, g, or t
  misc_feature (100)..(100): n is a, c, g, or t
  misc_feature (102)..(102): n is a, c, g, or t
  misc_feature (309)..(309): n is a, c, g, or t
caaatgaataaatactttttgaataaactgtgtccataggaaactgggggtggcaaantccctgccagggtgaacaggtcctgcaaatagtacaggtganantcaggaagtcggggctgactcttcggggaaacgttcagcaggaaatgcctaacgtctgtgtcgctctcattctctctgttatttcctctcttctcctgtcccttggtgccaatgagaggcagcgtcggaggctccagcccgaggctcagaatgggtactgcgacacatatatccgcagtcggatcacggagctgcctctgaagttgnatgacagtgttgacagtgatcatttccaagtccagctggatttcccggggccctttgatggggcgtgtcatcaccagggtggcactgatggggcccgtttgccgcatgtaaaattctctgccctcattcccagatttgatctggaaaatgtaataggccccagggtagcgggtcgtggcttgcatttggaagatgtcagcgggaacggagcgtcctgacaccacgtccatgtcccggtacaagatggtaaagggctggtctctgcagccagggttctcagcaggacacatacagcggttatcactgatcctca

SEQ ID NO: 317890 - DNA, 368 bp, Homo Sapiens
  misc_feature (19)..(19): n is a, c, g, or t
cccgcaatcggaatcacgngagctgccctctgaaagttgaatgaacagtgttgaacagtgaatcatttcccaagtcccagctggatttccccggggcccctttgatgggggcgtgtccatcaccccaggtggcactgatggggacccgtttgcccgcatgtaaaattcctctgcccctcattccccagatttgatctggaaaatgtaataggccccagggtagcgggtcgtggcttgcatttggaagatgtcagcgggaacggagcgtcctgacaccacgtccatgtcccggtacaagatggtaaagggctggtctctgcagccagggttctcagcaggacacatacagcggttatcactgatcctca

SEQ ID NO: 317891 - DNA, 306 bp, Homo Sapiens
tgagccactgcacctggccgatattcctgttcttaatggaaatttgataattgtactgtgggttattagcacatcaaaacaatgttgtagggaattagaacacaaagcgttagtatattgagtcttgttcttaaagttaactgtaggacgttgaattttttttataaagtacaattttgctgaactaaaactctaataatggcacctaaactgaatatttgaaaatgtcttggtaggcttaggacttatttttaatgtaaggatagcagcgtgccttagttttgagtaggtattcattacccccct

SEQ ID NO: 317892 - DNA, 352 bp, Homo Sapiens
aactggaattattctgtaatgaggaaatctccctcacaaccatttagttaccccgaggtataaattatataaggaaggtaggatacttctttctttcctgttctcaggcaccacaaggctcataatcgctctccatagcttatactgttaaaataatctgacgtttctgctccaccatgtttagagtgtacatcataaaatgtgatgtctggctatggggtctagattcctccacaaggtagttgggcacttgctacaacattgtaagctcttaaaggtgaagtacctcctgcagtgttatcctgtttaggagatagaaaacagccctggctgaccaggcgcggtggctctt

SEQ ID NO: 317893 - DNA, 443 bp, Homo Sapiens
aaagatctctatatgtcatttttgagataatgagtgaaaggccttgatatgtaataggttagggcagaactggagtgaaatttgtaaacctgtgggtagacctggtgatccacagatgagtgaagtggcagaagatggccctcctagccccttctagggctttctctcttttctatggctcttgcctccactctgcagtcctgttttccaagtgactggaagtctccttggtcccactaccgcccattaaacaacatcgaaaacgtctcccaccccaccccagaccccaggacccactcctgaagctgccttctccaggatgtgccctggtttctcctctgtcttctcaaccttgggtagatattctgtcctgaccatctctccctgagcagccacctcatgagaaaggaaattttcttattgagtactacccaagtgtcagg

SEQ ID NO: 317894 - DNA, 292 bp, Homo Sapiens
tccagcactgtttcatttcctgaattccttcttcctaactgtccattagcggctttgacaatagtgttagccagatagtctcctttctacacatataaggtgcaaaaataaaagattttaaactgcagcttgaaggaacaaagtattgttatgttggtcaggttttctatggattagacgttaaaaaacagtggcaatagaaatattggtactcttctctgtgagttgatatgaaggctggaaatcagccgcctaagatgatcatttaaaggtaggggatggggccaggcgc

SEQ ID NO: 317895 - DNA, 518 bp, Homo Sapiens
gcaatcagtaccaagaattagtccagaatgaagccaaatgtccggtcaagatgtcacacagctccagtggctcagccagtctgagtcaggtttctccagggaaagaaacagatcaaactgaaaccgtgtcagttcagtcttcggtattggggaagggtgtaaaacatcgacccccaccaatcaaacttccctcaagctcaggaaatagttcctcaggtaactattttacaccacaacagacaagcagctttctcaaatctccaactcctcctccttcttctaagccatcaagtattcctcggaaatcatctgtggatctcaatcaagttagcatgctttctccagctgccctatcacctgccagctcatcacaaagtgagtcataacttaaattcttcattaaatcttcataagcttttgcattagtgtttcttaagacagcttttttcaacctgtgaagtagtgatatctgaatgtactgtgtaccctatgtctctattgtaattgtacttgttttt

SEQ ID NO: 317896 - DNA, 741 bp, Homo Sapiens
atggaaggaataatcagcagttcagttgtcacaagccgcccttgaagaaaacgcagcaaaatattttaaaatgaagatattgcagtccccagagccagtgaaggtttcttttggtaaaatgaaattgtgccattgtcaaagtaccccgtagtgatgagcactgactggttcactggccacattttagttcttcataataataggccacaaaagggctctgtggtttgcctccatgtgcactggcccctccccacccctagggggcactcagtagctgctgagaaggcctgtccacgaggctgttggaacccctccaataaatacttagaggtagtgtatctgatgcttgttttcgtggagaaaattgtattggagaacttaaaacatcacgaatatttttaataggatccgcagacacccaaaggagaagcttggtcttttccaggtatttccaacttgagttcaacccaaagcctttgaaaggaatgcattaccacatgaccacatgctgagaccccatgggtctaacacgggacctaagaaagtctctgcagccagatagtacatggtgtcttcacaaaactaggcattctggagattgcccagaaagggatgtgaggggaccgttaagatctgtcttgcttatctcatgcactcacattccttcagcctcctggagttcctgatggatcagatgtacacccacactttcttctctgtctaattccgtttttctggaaa

SEQ ID NO: 317897 - DNA, 622 bp, Homo Sapiens
  misc_feature (502)..(502): n is a, c, g, or t
  misc_feature (504)..(504): n is a, c, g, or t
  misc_feature (506)..(506): n is a, c, g, or t
attggaggtaatcttattttcctaagggtagtttcatgatgacagtgtcaaaaaattactgtggataaagaaaaaattgtctcaatgaaatagaatttttcactgaacacagaaaccatctcaatagttgctgctccctggtttccaggccacgcaacagacatcaaaccaggaagccaaactttcatggacctgtgttaagaaaaacacacatacatgggcatactactttttccagaaaaacggaattaggcagagaaggaagtgtgggtgtacaactgatccacaagctattgggaaatcaatagctaaaaaatgtccacaccctggcttccttttatcaggaactccaggaggctgaaggaatgtgagtgcatgagataagcaagacagatcttaacggtcccctcacatccctttctgggcaatctccagaatggcctagttttgtggagacaccatgtactatctggctgcagagactttcttaggtcccgtgttnancncatggggtctcagcatgtggtcatgtggtaatgcattcctttcaaaggctttgggttgaactcaagttggaaatacctggaaaagaccaagcttctcctttgggtgtctgcggatc

SEQ ID NO: 317898 - DNA, 392 bp, Homo Sapiens
gctaactctctttgtttgatgaactgccagactgttgtccaaagtggctgccctattttacaatctcactagcagtgtacaagggttctgatttttttcacgtttcctgctgatttttaccaactgccgtattgttggtggagtggaatgtgaatgttcttgctctcttcccggctttctgctgatgtcttctcccttccccaccttaccgactgatttagtagcttaacagtggctgattctgatgtcttattcccactgccaggtcatgtgatgtgaaaatggcaatgaaaggtttcacagactactagttgccacgtgcagacaacacaagctatgtgactctctcgcagcatatgaagtattacagcattcatcccctagtgacatct

SEQ ID NO: 317899 - DNA, 461 bp, Homo Sapiens
  misc_feature (56)..(56): n is a, c, g, or t
gttccttttcactttttcccacaaggataaattacgggctttacaacattttctcnagagcccgaaccatggacttagattctacaaaattaatttcacttttaaacctcaaattccacaaaaatgggtttaaggggaacctcatttatatttaccccgggaaatcctaaacttcttgataatacccacacattttagtttccttcctcacttccttccccacaagataaataatttcagctttacaacattttctcagagcccaaccatgactacactgtgcaaaatgaattaatttcacttttaaatctcaaatcccgtaaaaatgagtttacttaaaatgaaactcacttgcatttaccacagaaatttaaactcttaattacaccatataccttaattccttttcacttctttccataagataaatcacaactttacaacattttctgagcccaacc

SEQ ID NO: 317900 - DNA, 829 bp, Homo Sapiens
caggaatataggtttatttcattaaaaaataaaacaaaacaaaccagactcatcccccaaagagtactttatcctttaaagcagcagcaatcacaaggcacatatgtacaaaatacctcaagcaaaatagaaactgaacattcaaaaagtatgtgttgtttaaaaagatgttgaagaccatttgagtaataagcacaggttataaaaatcacaattttattcttctacctttaacaagagaaggaatgatggcataatatttatatgctatattgtggcacgtataacaaacctttacaccacataacctggtttgctaaagaaaaaacaggtaaagtactgcttaaaaatggtatttttagtgctttcacatcttttgtagatatctggaatttgtaagatgaaaagaaaaattctctttttccttggcttagtaaaagcctgtagttacacgtccctaggcaaacccaccatacaaaaaaggaatacatttgagatattctaaaatataaaggatatgatttatattatgggatcaacataataaccaactctcttcctaaaacagattagaggtgaacacataagaaatgtaaagaaaggttaattacattaaaataaaatagcttctgatttaaattattgctcccttaggaagtataatgaatattctctggctaaggatgctcagattagaaatggtgtgacatcaatatttagtgtgtacaaaagttctagccaccatttagcttcacacaacgaagactggaaaatacgtggtttatttagatcttcaatataaatttgtaccacatatgttgaagtgttc

SEQ ID NO: 317901 - DNA, 563 bp, Homo Sapiens
  misc_feature (159)..(159): n is a, c, g, or t
tatttactgccccagaacaaaaagtggaaaaagggatgtccaccatgagcaaatctgaattccccccaactccctgcaaaggctgtggtttccagaatccaaatcatcccaggactttgtaataaacattgaggtaagtggccccagtgttccagttgnactagtttaatgccagttatttcaattcctcccaaaggggtttagtggttggtgatggaagaaagcataaatatgtctgtaccaatgtaataagtccctttagaggtttccctctgccatccagagtcatgattggttctagtctcagatttttcagctgcatgggaggggtaaggggtgggaggtgttctgccaaggcgtttagggtttgcatagttcatccattggtaatgggaaaacactctgctttcctgatcatgtgttttgtgcttggccacgcttctgcagcaaactcttaagtcctccagctcctctaggggtgtaaagactgtgagggctcaaatacatcacctactcattgcatggtccttcctaaagagcctagaaaatggtttctcctgctg

SEQ ID NO: 317902 - DNA, 169 bp, Homo Sapiens
cagcaggagaaaccattttctaggctctttaggaaggaccatgcaatgagtaggtgatgtatttgagccctcacagtctttacacccctagaggagctggaggacttaagagtttgctgcagaagcgtggccaagcacgcaaaccctaaacgccttggcagacacctcc

SEQ ID NO: 317903 - DNA, 583 bp, Homo Sapiens
ttacaagggattgttttgaaaattaaataaaataaaatactcagatgtaatgtatacattataaagcaccagaaaaacgtaagccagtattattattcatgtccgaagatggttcattcattattcaatgaatatttattaaacattcccacttggcagactttttgcttggcagtgaagatacaaagtcaagaaaagacagccatcgcccgtgaggagcttacattccagtggaggaaccaaaactaaaaggcggaggaaagctctgggtgcttgggagccagaaggagctcctagactgggtatgggaagtcgagggaggcctgggagcctcctgtggggctgacaccagaaggaactccatcactacagatccagcaagagtaaataaatctgagtccctctctgtggggtggtccacacactccacagtcctgggccttaagctagttcaaaagcatcccagccccttaagtcaggttttctcaacctcagcaccattgatatttttgtctggataattctttgttgcaggggctgtcctgtgaaaggcaggtttggcagcatccctggtctttaccca

SEQ ID NO: 317904 - DNA, 780 bp, Homo Sapiens
ttctgattgggacaatcttatagtgcactcgaggcagccgcaaaagaagcctcacagtgtgtctaatgggttccagtttgcatgtctaaacttactaaatctcttcctgcttcaccttccacttcagacttttgccagacacgttcctgcatatctgaacatagttcaatcaatgtactgaatataactgctgaagaaattaaaccaaatcaggttggaggagaacgtacaaatcaaaaatggagtgtggcgtcaagacctggatcacaggaaggttgctatagtggatgctccttgagctacacaaattctcatgtagaaaaagatgacttaccttagacatgtggactggaatttttttcattaatgtgttcatcaagtttcacatctaagttgaaacagggtgtgtcataaagtcagttatctctaataacttaagatggtctgagttgtttgtttggacttccctgtcttcccccaaagagttgaaatcttaaatctatttaaaaggatataaaagctttggatatgtatttttagtaacagaagcatcttgttctgtgaataaaggaatgtatagatgtttggatggaaacaaaagcactagactgagttttctcttataggtattaatagttggcattggaagtttagcctttacttgaatgtatactgtagatttttaacaaagcgagttctatatttattatgtttagtgtggtttgaaattacctctttcatatgttttaaataaagtgaaatttatggtatgggtctttt

SEQ ID NO: 317905 - DNA, 358 bp, Homo Sapiens
ttttaagacttctccatgcagtcaatctttattatagcagtattcgcatattcacatcaagtacatagaactttttttgccttttatataatacagtttttaaataactttacacagaaataaatttcttcaatctgaatttcagctatctttttttattctccatgctttctatccaaactgaacaatattttctgttatacaaatttacatgagaaaaactccaaagtacaaatgaagggacctgagcaggaaagagaaccaaagtatcaggaagtgggtatgggggagaattaaaaaaaataataaaagattcaagcaaacattgagaataggggaaaagagggagacatcatcc

SEQ ID NO: 317906 - DNA, 615 bp, Homo Sapiens
  misc_feature (60)..(60): n is a, c, g, or t
  misc_feature (184)..(184): n is a, c, g, or t
  misc_feature (554)..(554): n is a, c, g, or t
gagacactgttccctgctccagggtagacctgagatgaacctccctggaggagacttatntcaatgagtccaccatgacggatgaggcacctcctttccctgctgaaggacaaaccttgtttccctgtggccctcattcttgtgctccctgaagctttcctaatattgctgtgctccccaccanccccatggcagtccctccgcagccccagtccctggccacgcccaagggaagagggaggtgaggacttgactttcctcccagaggtcagcccatgtcaccctccaggccccagaatccatgagtggcctcatttcctagacttgctgagaactcagcacttgtttgagaaccagtgcttatgtggtgtgcccttggcttctgggggagagcttggggcagcagaggcccctgtgcagcccagccaggggagccacagccccgaggatggtcttgctctgggaattaggtgaccttcctggggaggccccacgagagtgaatcacggactcttgagaaattcctaaccagcctcctgtgacccaaggagcanggtcgctaaggtcctgcccactgaggggacagccttctgggcagggacacttcgggggggg

SEQ ID NO: 317907 - DNA, 419 bp, Homo Sapiens
caaaggtttctcttgcattgaaaccctcttggatattacagtatttttaattgaaagtcctaattctgttaaggaaaggagttgattaaattttaaggtaccactggtattttgggagattataatcagtttgttttcaagataatagaaaataaggtccatgagaatagaagttatgtgatttcagtgagttgatgtgtacagcatggctgtgctccatctgatttaccccattcttaagttctgagagtatgttctcaaggaagatttaactctctttggttttaaattactttttaaccagcctaataaataagtcttactacttttcataatatttcataatagttaaaagtaggtgtttttttcgtgctcaatttggcactcaaaataatgttcattatggaagttttggtcaa

SEQ ID NO: 317908 - DNA, 428 bp, Homo Sapiens
gagaaagcttgtgagtgagttagtcacactttgaccgggacatggaatgacatgatgttgttaaagtatgaccactacaatcaagcaactgctggcgacgtaggtacaggtcggacccggatagttggacttcacgggcaaggtcaagtgatatgcctggaacgagctggaagggacatttcgggatgacggcatgaaagcttacatcaacactgtataagaggctaagagaaaccatcgtgatacgagagactggttatggttactgggccacgtgataatactaaactgtgacaaggactagtcttttccttttactgaggatgaagggaatcttttgaattttatctgacaaaccatatacttagggctgcgcaccatacgggtctaacacattaagggccataacgaatactgtacgttatgtt

SEQ ID NO: 317909 - DNA, 252 bp, Homo Sapiens
aggcacaatgtctcttgttcattgttgccaagtatagtatccgggtgtttaaagcaatataagaatggttgctaagcagtaatgagtgtggtaagttatgttcatccttccctagagaaggtcttgaatgcatgttgagaaatttgaactttattttgtaggcaattagaggttaaaaaggtaacgtttgagctgttattaataggcataattttatgtgttttcctcggctcgtttcggttagtacgtgtg

SEQ ID NO: 317910 - DNA, 363 bp, Homo Sapiens
acaggagtgtgccgctgcacctggccaaatcctgcttcccaacagagccatatctcatgaatatttggttatatcattaaatagtgttctacagcatcatttttaatggctttatagtatttcattgagtgaataaattgtcattaacttaaccattctcctgtatttgaacatttggtgtgtttctggtttttagataatataaatacgtattttgtgcataaatgctttccatattgaggatcacttttttagtatttctagaagtagtgtttgaagcaggaactgtggatatttttaaagccctgaattcaattttggattactatgtggatgtagtacaaattggcttcagtgttagaa

SEQ ID NO: 317911 - DNA, 366 bp, Homo Sapiens
ttaagaaagcagtaagaaactgctggaagacaggacattctaccctggagactttgcattaaatttccatgtcaaataattatttatcactcccaccaagcagcagagtccaggattataactatattcccaagataaaatgctgagagagagcagtccctcctctctgccagaactcacaacatttcttctctgacattcgaagatttggggttttggtttcatagctgttgttgttctgttctgaggaagatgccccagacatggcagctcttcagatgtcgtgcgatctctcctaagatccctccctgccttggccgcggcgcctgccctgtaacgcgaccgaaccgagccgacagcttgtgg

SEQ ID NO: 317912 - DNA, 370 bp, Homo Sapiens
aaatgtccaggataactcacagggacagctggaaaaatggaagcctagacatttaatccctatttttaatgttcacatctgaaaaatctttcaaaaatatggaaaaaatctaattatactaaaattacttccacacattcaaaaaaaatttttaagggatattttctttcctgttttctgctaaaagcattcctctgagctatggggttaagttctgagccacgactgactgcttactagcatgcctgttttgcataccagtagaatcaagtccagttttgccatttgtggataactatgacaagatacaaaagcatgtgtttgccataaatagccctggctaacagcaaaccgctcacactgagcagat

SEQ ID NO: 317913 - DNA, 1127 bp, Homo Sapiens
gttaatggccccaaaaaggtttccgtgttttttggttaaaaggggaccccatatgtgggagaaataaaaaaggtccaggcccattccctattaatccaatagaaaacccaatgaagggtaattaaattggcaaaggttcattaaatttccattcccagtaacccattgcaatcagcaactttttgtatatgtatttcaataatgcccaacaaaatttgccaaaagttctcttaagggtggctgtgagctaaaaatggtttctcgccttcagaaagcagcagctctgccacagtacttcatagccaattacgttattcatcgctaaaaccatcactacttacagccttgggcaaccgatggagatctttctggtcacctccgaggttcctccatttgctgatctggcttctggactcaatggatctctccttccaagatctatcttctctacttgggttcatctgcttacagctccaacagagaacaaatgcccatggtaatagcctggagagacttctagcactaagttacaagattagaaaagagctgagagtggtgctgcttctccctgccactcagcagtgaggattgatagtggctttcatcatcttttactgaaacagggagggaaatgcaagccttaatctaggaagaagagtccaagaggcttatagctccacagagggtttttccaatggaataaatttggttctcagcaagtgttttcagatttttgacacagtaagactcatgactggtgcccaggatgttctgaatgcacctgtctctatagctttgctgccaaacatattctgccaaaaaggaagcttcctagcatggtgcacagagtagagctgctatagtaccacacagattcaggggaggcaaagagagtgggccaagagaaaaatattaaaaggagctgaatctgcctaaagacacatttgctctgatttctgaaattctttcagaaagcaaacagcaggtaataattctgcgttcatgagtggagtctagggatgttaccaagttgttcacttctaaatcagtcatatctaaatcacacgtttgtgaacaaagtataggcaatctgaagccacatactttttaaactatgttagagttac

SEQ ID NO: 317914 - DNA, 386 bp, Homo Sapiens
gttgtttacctctaaagaaggttgagtttttctctagcaggcagtaacttgacttggacaccattttgatgcttggacacctgcctttcagccttgctaggttttctctatagctgccttaattctaggaatacactaattctactcctaaagtctggcttttctggggtctctgctgaatgcccaagatgttcagtgtggtcactctcctctggctggtcagaactccaaccgcccccagtgctatctcagctctgtgagctttattgagctcactgttgccttgtagttgctgttcctcagtagatgtcctttgccctagtctcttgtggaacatttttctgtgcacaaaaaactttatgtttagtcaatgacttgaagagatt

SEQ ID NO: 317915 - DNA, 391 bp, Homo Sapiens
atgacatggacaaaactcagtaactggagaaggggagtgaaaggaacctggtcacgaagttacaagtggtcaggttggcaccaccctagggaatggaacaaggtttcagtcacaagtgaatccaataataagcagccatagctggaagccagtaagtggagaacagggctagcaagtttggagtgagggcaagagcaaagactcacttgatgctgtgttggtaaattaccaaccttgagctccctaagtgaccctcacctttctaagattaagaccaggtctaccatctagaagctgaagtgggactgcacttagaaatatgtgccacagttgcccaacctcctgattgtattcactcgtgccgaatcctgcagcccgggggatccactag

SEQ ID NO: 317916 - DNA, 779 bp, Homo Sapiens
gcttcttttagaggctggaccacataatcttttctttctcttaatatctttgaagaaagaaactactttttattttaagattatatgggggtatatcctatggcctctctgctacttttcctaagagctaatatccaaacataacatgatgtaatggttcttttatcctctgttttatgtgtgtgtgttttagttttccagttctcaagatgaggaggagattgatatggatactgttcatgatagccaggccttcatttcccatcatttaaacatgcttgaaaggccgtcaactccagggctctcgaaatatcggccagctagctcccgatctgctttaataccccagcactcagcaggctgtgacagcacacccaccacaaaaccccagtggagtttggaacttgcacggaagggaacaggtaaagaacaagcacctttggagatgagtatgcatccagcggcaagcgctccactctcagtctttactaaggaatctacagcctccaaacacagtgaccaccatcaccaccatcaccatgagcacaagaaaaagaagaagaagcataaacataagcacaaacacaagcataagcatgacagtaaagaaaaggacaaggagcctttcactttctccagccctgccagtggcaggtctattcgttctccttccctttcagactgagaaggggacaaaaagacctttcctttcatgtccagaagaatgtatgtaactaaagctttgtcctctgtgaagaattatagttctaagcatttga

SEQ ID NO: 317917 - DNA, 687 bp, Homo Sapiens
tattttttatacatatatatatatgcgcaatctgttttatgtacaacaattggttctatcaaatattcagaccaaggcattctactggtaatttccccccaaatcaattcaggtaaaattagatacttatgcacttcacgggctatcaaaacttgcaacttcattatcaatttcagttctgaggtcatacacacaattcaaaatatacattaactaggttaaggcgataaaagtgggctgaaagaaaccacaggattcagaacaatgaaactgtgtattttgcttgcatgagagtcataacgtgaacagcaagtattgtgcgtatctcataggctcttcagtggagaggaagcggcttctgaacatctaaggtgactgcacagcaggtgggaaacagctggtgtttgggttcttgttccaatttgtaatcagccagggcggccttgattgcatcttcagccagcatgaaccagtgcagtttcacggaaggaagccagagctccttggcgatatctgtgtttttgatagtcaaggcttcctccacggtctttcctttcacccattcagtggctaatgagctggaggcaattgcggaaccacagccaaatgttttaaacctagcatccacaatcttccccttttcatccacttgaatctgtaatttcactcgtgccgaatcggcacgag

SEQ ID NO: 317918 - DNA, 937 bp, Homo Sapiens
aattaagatactatggcctttcccgggcttatcaaaaccttgcaccttcattatccatttcaatttggagggtcatgccccccaattcaaaatgtccattactaaggttaaggggataaaagtggggtgaaaagaaaccacaggtttcagaacaatgaaactgtgtattttgcttgcatgagagtcataacgtgaacagcaagtattgtgcgtatctcatagctcttcagtggagaggaagcggcttctgaacatctaaggtgactgcacagcaggtgggaaacagctggtgtggcctgctggaggcttcgccgagggagggctcatttcttctctgcctctccttttttgggttcttgtttcaatttgtaatcagccagggcggccttgattgcatcttcagccagcatggagcagtgcagtttcacgggaggaaggcagagctccttggcgatatctgtgtttttgatagtcaaggcttcctccaccgtctttcctttcacccattcagtggctaatgagctggaggcaattgcggaaccacagccaaatgttttaaacctagcatccacaatcttccccttttcatccacttgaatctgtaatttcattacgtcaccacatgctggagcccccaccagtccagttccaacatttttagatgtcttgtcaagggaccccacgtttctaggattttcataatgatcaacaacctaaaatgagagggttaagataaatcatgttcactctctattggtactggtctctggtttgatggtaagctcctcggtcagcatcttgaacctggcaggcaatcactaaataccaaatttcacctgagtagaaaggtctacactcatgtcaatgagaaccatttgtgacccccaattccttttgtgtctcctctacaatacttcacagatttgagatacctaga

SEQ ID NO: 317919 - DNA, 711 bp, Homo Sapiens
acttggcagcagcttttttaatttgaacactttcttcttgaggacacaccttcagtacagttaacaaatggttacacctgaaatctgctgagagcagagcttaagatccacaattgcaaaggccactgctggctcacttcctcacaggctgtattacctttcagagctgagtgaggctgtgctctacgtcccaatacttgttactgagtggacatgaggtgcaagtttagcaccttaaagggagaaaaaaataggttagtatgcagaatgtgattttgtcctcacttcaccttaagtcatctttttacacttgccaatgtgagttctgaaaggtactactatatctgcttagaaatggctgagtgactgtcaattaaaagccacatgataaggtaggttacaggtaagaggtaaatcaggttagacatgcatgagaacatgtaggcacagactgaatataagcacaggaacactcgtgaaacccaactgagcttttcttttgcctagaagggctaaatcctgccttctacatcagttcccatttatgctgaaaacccagttgaaagaattgtttcctacctggacagtgacacagtagtttgtttcataccagaaacacattgctaaacaaaacttaagagtctcagtttgggtttttctacaataaagtgaattccaacagttggcatttgccacagtagagaccactaa

SEQ ID NO: 317920 - DNA, 413 bp, Homo Sapiens
  misc_feature (316)..(316): n is a, c, g, or t
  misc_feature (393)..(393): n is a, c, g, or t
aagtccattacagtgcacatttattgactctgtgtatcttcacagtgtgatcttcaccacagcttgcaaagtgtaaccactcagcaccttctgcttccttctgttcagttttctccactgcaattcttccagcataattttctgatagccagtgtatgactttggctttgacttgtttctacacagtgggtccagtcatttatttctgggaacttgatcagtctttttccaggtatataagcaaatctttccacactccaatcctactgcaaccacgtatcgttgaggaaggggtgggagcactggggcaggacgntggacaggctggtcacaggccccacccacggtccgggggctgagggaggcaggggggccaatgttggtggctcaatnacaggtcattcagtgggggg

SEQ ID NO: 317921 - DNA, 150 bp, Homo Sapiens
cttgccccagtgctgactgactacgctgggtcgcccagtgtttgcagcagtaactaagtacacggctgcatgtgtgtgcgcattgcatttgaagcacggattgcctaaccttctcccgcctctccaaggattttttaaatcctaaggagg

SEQ ID NO: 317922 - DNA, 374 bp, Homo Sapiens
tttaaactcttaattttgaattgtttgtttggggatctccctctaaccacccatgccctttaagacataccagaaattcttgttaaaggagttggtctatgtatactgtacatttcatacagtgaaaattaatttaaatctatattttgtacgtagttcttatttgaaataaaatcctttaaggattactttcacttgaaaattgaactcataatcatactagaaattttgatgtgaaaaacttaataaatttattttcttcctaagaatttatagcgtttacatatataaaggatcatctgcctaaatgcataagttactgtaatgaaaaaccaaaggaaaatactattgccatgtagccaggcacagtcata

SEQ ID NO: 317923 - DNA, 368 bp, Homo Sapiens
gcctgcccagctttcagcctctcgtggccttcaacatgactttctcgctaagtttaatcatttctggcttttgatttaaagaagagtgagagatggggactattccttttagttgaacacttagatgcaattgtagggttaataattggcctaatttcaatcttgttttgtctcagggaacagggaggcctgaggagagagaagagaaatagggaaaggctgtttggtgggcattcaggacatttattgatgaaaagtttaccatctttaatgggcatagttcatgacacaaatgcttaatttgtaaaaaatacaatgtaacaagggtatacctgtattgggaaatgagtcggagctttaaggcaggg

SEQ ID NO: 317924 - DNA, 496 bp, Homo Sapiens
  misc_feature (96)..(96): n is a, c, g, or t
ggccagcctcctgggcccaacctggttaaatcctgaccggtcctgaatggggaagctgttgaaggatgtgcgaaggggatccccagtcaatctgtncacctgcaggcaggtcggtcatggcctcttcccttgccttcttcagcttctccctgaccccagggaaactcctgtagggaatctaggaatgtatcaaatgctttagggcccctggaaggtaggatatccagcaggagcattgttttccggaggcctgtggtttgagcattgatttcttgaatatggttttccgtcaagattccttcctggtagaggtactgaagaaccagtccctccaccaatacctctgcacccagctccaggcgaagtgagcggagtacttgtttgtctctggcctccatttctccgtctgcaaccacgtatctttggggcgggggagaaaaactgcaaccggaatcctgactgttagggaacctgccccataagcaccatctttgtt

SEQ ID NO: 317925 - DNA, 489 bp, Homo Sapiens
  misc_feature (386)..(386): n is a, c, g, or t
  misc_feature (417)..(417): n is a, c, g, or t
  misc_feature (427)..(427): n is a, c, g, or t
  misc_feature (442)..(442): n is a, c, g, or t
  misc_feature (476)..(476): n is a, c, g, or t
caaagtttatttttggccaaaggtcagctagctctaaagaagtgtgaaacgcagctcaaacaaggcgcctaatttcatgggtctgagatgaccaggcagatgacacgcaggttaaacttcctgcagggctttctctgaagtcacagccattagttctgcagaggcaaacctaccggggctacatcaatcccgggccagggcagcccaggctgtgctgactgcttgctcgttacattcgcagaaagggtcagggactcgctggatatgacagtctgcattttgaaccctactttgttcaggaggaaagaagccgggtctaaatgaggagattgggctttgctttctcattccctgccttgaagggcccttttttcttggggggaggngtaggaaggagggggaaaagggaaaggggangggttagccntgttaaatgctcccncgtgccttcctaagcgtgtccccgtgggaaaccngggcccgggaatt

SEQ ID NO: 317926 - DNA, 3003 bp, Homo Sapiens
tttttcttttcaaagtttatttttggccaaaggtcagctagctctaaagaagtgtgaaacgcagctcaaacaaggcgcctaatttcatgggtctgagatgaccaggcagatgacacgcaggttaaacttcctgcagggctttctctgaagtcacagccattagttctgcagaggcaaacctaccggggctacatcaatcccgggccagggcagcccaggctgtgctgactgcttgctcgttacattcgcagaaagggtcagggactcgctggatatgacagtctgcattttgaaccctactttgttcagaagaaagaagccaggtctaaatgagagattggctttgctttctcattcctgccttgaaggccctttttcttgggggagggtagaagaggggaaaaggaaagggagggtgagcctgttaaatgctccctgtgcttcttagcgtgtcctgtgggaaccggggccgggagtgggggtgggggagcttcattttaacttggggtatgtttgatttcagcagcggggggcagaagcagtggaggctggagatcatcagagtggggaggtgaacccagatgccactgagattctgcacgtcaaaaagaagaaggccctgctgttgtgagccatgccaccctgattcctgagaggccagagaggaagtttgttcaccagagacaggcttcagatggctttgatttcggcaagctggaatggcccaccagcccatcccagatcttcctttattaaaataataactctgaaagcagatggagaatgttgtatttgtggtcctctctgatacctagacgtggatggctgattctgttgagtgcctcgagtgtctgggctgaggaataaagatgtgatggtggttcccgctgatgctggggattctggagtctgcatttgcaggatgcctgtggtggaggcagtctctgtgaacactgattttctagaaggtacaattgggtaaggaaagcaaacatactatgttgtgttgattccatcattccttgggttaccaagggaggcagaagaagcctggtgatattgtgcaaatgctggtctgggaaggcccaggctgggtggcagttgtctctgcttagagtagggatagtctactgtgtggtcccctggaggctctggaggtgtccattgttggccatgaggcctcccggtgtcagggtgccaaggagagtgggctctgaggtccagaagacagtaccttagaagccactttcacttttgatggtggctttgatccaattcaggaatttggtaacttgggtgtagacccctggcctcttcccacactccaggccccagctcactatcccatagacgtagtaggtgccgtccttctcacaggtcagggggcctccagagtcaccctggcaggtgtcttgcccaggtttctgaagatttcctgcacagatcatactgtcatcaatcatgtggtcatagagttggcgggagttgcacaaagtgttggcaatcagcttgactttggcatccaggagctggcgggacccttttcctgtttctgtaacaccccagccagagatgtggcactcactcccagagggaaaggacccatcaggcaagcacacagtcttcacgtatttggattctagagcacagtgaccatccactggctttaacttgagcaatgcaatatcattgtggggaatctcatctctttcattgtagtggctgtacttgaatatcttctccaccctaaagctctgctcatgaaattcttctttcttcaggtcctggtcccctagcaccacctttagatgtctggtttttatgtcggtgcagtgggcagcagtgagcacccagcaggggtggatcagtgccccaccacagaagtggccctggggcatggagatggtcagaggcagcgaggactggagggacgcctgccatgggtgcttgcccgccgtgcttttaaagcctccatagattctcttgatcttcctctctgctatctcagtctttccacaggagtcaaaccccggaagcttggttgatggctcagtggggctttcctctgggtaggcaacgtcctgggctgagcaggctgagacatcacagtattcccatttcaccttgtcattggtaactttaataaagcaccagggcttttcgtccgcatctgggtttctgcagaaattgtgttccccaatcccatgggtttcagcatcctccataaacatgttgtaattctcctgcaagaggaggtgggagttccagtaaaggcacgcatgctggttgactgtcctattcattttccctcggtaagagtagccatcgccaacatagcagtcatcagaacctatttcacagaatttccccttgaactggtcgggacaggcacaggtgaacttggatctccgcttatgccgggagcaggtagccccattctggcaggggtttggcctgcatacaggaaccacttgggagcagtctgggacctgtgtaagggtgtttacagacacagcggtagtagggaggactctgggtaatgatgtacatttgccccggccacatgggttgtccttgcacgtattttgcatctttctgatcacttattcccagagaaaggagccaggcagctgcatgtgaaggttttcccatggacgaggcagtccccaccgtgttcaacaggggttgggctggcatggatcagcttggtcctcaagtgtagtaccagtcaggattctctagcgtgggtaagtgtgctactggtgttctcttcctgattataatcctcgtagctgtaatcatactggttcaggggtccagtctgggtccaggctttccaataaagacatcagggagaacccacaggctgtctttcccaccagagccattaacagcagaacatggagatcagacatcctggcaaacatctttgcagtttataggacttgtgttttcctctcaataaaatttcttttgttgtctatgcctttagggggggaaaac

SEQ ID NO: 317927 - DNA, 433 bp, Homo Sapiens
  misc_feature (263)..(263): n is a, c, g, or t
  misc_feature (284)..(284): n is a, c, g, or t
  misc_feature (393)..(393): n is a, c, g, or t
aaactttttttattttacattctggggaacatgtgcaggatgtgcagatttgttaaacaggtaaatggcaactttccttctttagtgagcaaatctttcagtaagcaaagtacaggtgttctctgtgatatttttatttttgcaatttatgtttaaggagcaaatctatgcaaggtagcatctttctagatctggaaagttgaattctttctatatcacagacctacactcacagttgacatcaccattctatgacaaagccnctaactacaacctaagcactntttatttaaaaggaatgttcatcaacatccactctccttggtcttgagccaagcccagaaataacaaggtcagatggtcatgatcaggaagaaagtaaactcagacttngaagaaatatactggccaattccccatattcccacccggc

SEQ ID NO: 317928 - DNA, 128 bp, Homo Sapiens
atgagcctaaaggcataacttagttgccaacacaggttggtcactctcttgacttcctcctcagcctcaaaccccctcattggtctcataagaagagatctatgaccaactaatctctggcttacaga

SEQ ID NO: 317929 - DNA, 365 bp, Homo Sapiens
caaaacaacaagaaaatatcttgtttggatgttttagttttataaattagtcttctctgcatatctaaatatatatttcctaatgaggtttaatattcaaggagataaatatgagaaaatgctttgaaaccaattataggaataatcttacataatctgcaaatgctgatcaaaatacatcatttctacaatgtcaatactgggaaaatatagctttattaggttgaaaataattattttgacttttatgataatggttagatttgattatatgtacatagggataaatacaacattgaaaacactaagccacataaatttaaaacatcgtgtaattcgaacagcttcttactagtggtttattt

SEQ ID NO: 317930 - DNA, 1366 bp, Homo Sapiens
  misc_feature (22)..(22): n is a, c, g, or t
  misc_feature (41)..(41): n is a, c, g, or t
  misc_feature (480)..(498): n is a, c, g, or t
aacaatggtgtggaactggttnatgcccaatgttaaaaaanagaaaataaaacttgggtttttaaggccacccagaagattggaagcacccaccccatccccttcccagaggaatgaacaagacttaaggaaaggggaaagccaggccctggggcagctgcccactggtgtgtgtagatgtctcctcaggtcaatctcagtgtatcttccccgaagtctttgtgccctagactctaggtaagggctatgggatttcactgggagaaagggatgatcaaaaatatgaagacctgcccttgtccacaatgttcaagagcagttaccgggaaactggagcactgggtagacagagcccatatccctggggaaaaggcacagtgtaattcctgaaggcaagatatgggaaagcacacatcccagcagaggtatcaacaaaatcctcactacttgcagccctagtctaatcccatttgttaggcnnnnnnnnnnnnnnnnnnncccctgatacttagctaggacttagggcagttgagaggcagatcatcatgcctctactttcttagcagagacaaggaagactggggctgtttgataatgaggaaggggaaaatgggacaaaatactcctctttcaaatgaacactgtggagaaaatctttctgggtttggggaagtcagagtaaagacttaggggagtaataaagccagagaccccccttcttttcctttccctgccttggatctaaggcaagtgagccaaatttggaagagggagtaggaatttaagcttaaggctgcttaatgtcttcctgggggctggtgttttgggaaggcagacaaagagaaacaggtcaacctcaaagctggtctgctcatcctcttagaagaggtctggtatctgtggagtagagccaagagaggcaccacagagagcacagtctcccaaacagaagtaataaccggctcatattttatcagcagttttcaaaagcaatgttttccggggttggagaagtgccatatcttcctccctttccccaaagctactgctgcgacctttctttcatccttgtacataagttactggctctcttctaagggagataaattctgagatttcacattttccctctcaaccccaataggctacccagcttcagtgagggggaaggagagctatgcaaagggcccctcacttgaggcagctagactgtccttatttccttggtacctgatctccaaaactcttgatctgatcccaaggtccaaaaggcatcagggtacttacactgaaaacttcaagcaagtagcaccagggctccccctaagcataacaggggcctgattagcaccccagaagaaccccc

SEQ ID NO: 317931 - DNA, 627 bp, Homo Sapiens
  misc_feature (38)..(38): n is a, c, g, or t
ccctctcccagtaagttgggaactgcaggcaatgcacnactgtgcccaggctaaaccgtaacattttcttgtggttgattatgtcacccttcagactcagtagttcttgatgtctttccttgtaggaaagcagctgcctgttttggatctcagtttgattgaggtggtgactatccctttggtaccattgagaccagaaaccagaccagttggacattgtttttttctggttatcctgtcctgccttactatgagatttacggatgtttggggacacaggtctctgggctcatttctttttctgaggattcatataattgcctagtttttggcttagaggttggtccttccctggtttaatgatgcttttgttcagactgtcctctaggacttgaatttgaagcagaaacagaacagcacctgatcctcagttatactgcaaagcagggcctcagaaagggtaactccaattactgactttcacctaaggtgaaaaagcatccggcttctttccccttggcatctttggatcttctgagaatggtggctgaaggcagagggcctggggacaagccagcctggacatgcctcctctgctgcttattaattccttacctgaacctcgtg

SEQ ID NO: 317932 - DNA, 446 bp, Homo Sapiens
  misc_feature (28)..(28): n is a, c, g, or t
  misc_feature (33)..(33): n is a, c, g, or t
  misc_feature (49)..(57): n is a, c, g, or t
atcaatttattatggaaccattcatttnctgcncattagcactaaacannnnnnnnngggtcaagtatccatgtcatattatgtagaaaatggtccttcatgccaacagacttacatgtataaaacatgaacacccccaaactctggggagtattccagaatggggcaaaagagaggctgggaagtaccatttactacacaaatgtaataagatggacagaaacctttattagagttggaaaatcaagttggaaacaaacacgtgaattcactacttaatggcatttaattccaacccctcattgggaatcatcttggtaacatttaaggattctacaacagttataatggcgacggttcagaggtggtctcaaagttgttacagtgttaaaaaaattatagtaagcagtataaaattacaatttattatggggccagggggattc

SEQ ID NO: 317933 - DNA, 2263 bp, Homo Sapiens
  misc_feature (230)..(230): n is a, c, g, or t
  misc_feature (307)..(307): n is a, c, g, or t
  misc_feature (380)..(380): n is a, c, g, or t
  misc_feature (590)..(599): n is a, c, g, or t
  misc_feature (1639)..(1653): n is a, c, g, or t
  misc_feature (1916)..(1916): n is a, c, g, or t
  misc_feature (2229)..(2229): n is a, c, g, or t
gggaggtatagtcaggtcggggtgtatgtgggttgcgtggattagaataatggcgggtgtgttgaggctccttacgcgggcaattgagttgggggggagtgcggcggtgttgtaatacgagggggagaactggtgagaggatgatgtctgacgttgagttgtatagagggcgagagagaagcgaggggtgattggtgactcgagcgtgcgtgtatgccggcgggtgtatncagcgtggcattgcgtgccgcgcggggcgtactccgtcaggcttcagcgggaaatctctcggcatttgggttggagnggctttgggtgggaggggtgaccgtccttagtgtggggctatattgcgaacgcgttcgatggcgctgggtctntcacgggaatgggcgggtgcggggtgaatttatagtgtgagatgtttggaggcggcgggtggttaaagatttcactggggggtatgccgggagatgataataaagggggccgtgtgtgggggtatagaagacggagggaaaggaatacgctaagggggtaagggtttaagagaggagattcccgttggggcgtaacggttgggtcgccannnnnnnnnncttggtggtgaatggggtgagttggtaaaggattgtgtataggggcgtgcactatagaagagatggtggtttgatgggggtgttgtcagtttttcagtagacaatgttgttgtttatttaaaatgtttactccaagaaatatatatataaaaaaaataataagacaattacagcactaaaccaggcaccttcgaccaaatcacaacctcctctttgattccccttcacgctaagcctctttcaaattctttttcctgagctggaagaccagtcagatgcccgcagggtcagcgccaagcacattcccaaccgggcaactgtgtacctttctctaggagtgcacgacacccttcccccacaactccttgttttaaaggatttaacccattaggaagcccatgtttcaatctaagccagaaggagctgcgggacaaggcagtcttcactttgaaggtccctttcctgctccagtccctgggctagggttctagaagaggctggctgccacgtttacatgaggccaccgaagatctaagtccagctaagcccagggaggctcctgcaaaggctgggacctcgggtgctgcgtcctcaaccctctcggtgaccacggctcaaaggagagacctcaagggtgccaggagcacaggtgcctgggctgcattccaggaaagagacctgtccagggaaacggatcaggctgtcgcatggaagcttacgtcagagatggtggttttggggtgatttggacaaattaggttagtttagcaaagctctgaagtagcagaagcttctcccctggactactgattgaacacagaacaagagatgcgcgtggcgtcagactaagtcttagagagatgcaggccagtctcctcccacagggccttgggactggcaggacagacactgctacatgccctccaagggcaggagtcacggtaaggagcgactggggtggaaaatagggaaaaaagcaacaacaactacatcatttttggcattttaacatggagacagtgacaagtggtaacaaagcnnnnnnnnnnnnnnncttgaagagaccaatatttaactttcccatccacccaagtctcacacttaagttctagtcccatctcccccataagcaccactgaactaaatatctattttaaagcacccaaaccagtccagaccctctggaaaccaagagccccagccacagctgtcgcctctcttgggtccaggcgagaggagggttccgggaaaggcacctcataactcactccagcgcagcacacacggcggcgagctcgggcacttgacgaggaacgncaggtggacagtcacagcatccgtgctgacacgcaaggaaggggactcttcggtaatccccaactatttggtaccagagccaagcaaacgtgactaaagggagctgggtcagcagaacggtaccccgagtctcagcaacaggacggcccgcgcgaggcaggatcccaggcgggggggagaaaaagagaccaaagcacaaggcgatcgaggctggcacagaaagggctgatccttcttgcaaggactggagaatgcacttgactgctggctggtccatctcttaattggcgagtgcgcgtgacaaggctcagcncactgtccacagggagccaccaagctgactcaac

SEQ ID NO: 317934 - DNA, 412 bp, Homo Sapiens
  misc_feature (102)..(114): n is a, c, g, or t
cattttgtaattttcaacactatgaattttagacagcagctgtgattatctgttagtttaaatcaccagaaatcattttgacacaacacagaaacatttatnnnnnnnnnnnnncagctgtctagctgttctttgtagctgataggtgcattcctttgattgttcgatagctagagtagagcttccaaaattaatctgtaaatttctccatcggccttcttcacctcctaaacctacttaaatccttcaagtaagctcactattaaaatttgtggcatttaacttcttttgtgttattattccaccacggtttgggcccaactcatgaaatcaaaggtcctagaggaatctactcaacacagtgatattcaaaggacagccgagttactatattagcattgcacaagtaaac

SEQ ID NO: 317935 - DNA, 605 bp, Homo Sapiens
  misc_feature (26)..(26): n is a, c, g, or t
ccatcaaaaagcccctatgttaatanggtgggtttggttaagaacaagcaaataggataaactaacagtagttaactaatgagcactttggcaacagactagttccctcaattggtttgggtggtgtcatttggcagagatgcttgactcttgggtgatgaaacctcctagagtcagtgtcctaacccaaaggtgtcccctagtagtgggacaccaggcaccatgcagggccagcaggagatatttataagtattaaggacatccatttttcctgcatcacaagggccatgagctatctcccttatacccgtagccaaaggggaggcagattcccacccagtgggggcaagaaggaagtaaacacaattaaggataccatttttgagactcaggttctcacgaatctcctcatggtcgcagggatgagtgaagtcaaagatactatgtcctgttagctccacctgtgtaagtcccatgaacttgctgatgttttctgacagaaagatcatgtcgccatcttgggtcaccacggcaatgaaaccctccaaggctttcaggtacaagttgtccatctgctggtcagcttcggcttcggactcgtttt

SEQ ID NO: 317936 - DNA, 280 bp, Homo Sapiens
ccaagggctcttttaagagagacatttccctttattcttcttctacgccctcacggtgccactgttttataatctgatgttaaaatctatcaactgcagtgggaataaaacagttaagatagaaataatacataaaagaggtaacaaatgcagttcatgctttttagttcacttgacaaagcatgactcagctgctttgagggattcctatttaattttcttgggtcagcttgtaattaaaccttaaaagaacctgtcaaggccaagcacagtggctcat

SEQ ID NO: 317937 - DNA, 493 bp, Homo Sapiens
tttgataaaagactaattccaaaatggccactttgttcctgtctttaatatctaaatacttactgaggtcctccatcttctatattatgaattttcatttattaagcaaatgtcatattaccttgaaattcagaagagaagaaacatatactgtgtccagagtataatgaacctgcagagttgtgcttcttactgctaattctgggagctttcacagtactgtcatcatttgtaaatggaaattctgcttttctgtttctgctccttctggagcagtgctactctgtaattttcctgaggcttatcacctcagtcatttcttttttaaatgtctgtgactggcagtgattctttttcttaaaaatctattaaatttgatgtcaaattagggagaaagatagttactcatcttgggctcttgtgccaatagcccttgtatgtatgtacttagagttttccaagtatgttctaagcacagaagtttctaaatggg

SEQ ID NO: 317938 - DNA, 1334 bp, Homo Sapiens
aacaggaggacgtaagcaggagtaaagtgcaaagctgaagcagaatccgagccgtggggtacttaaagcagagcgtacaatgacagtatttaatgggatgcatagaaggggtaaagcatagaagaaattcacgcggaggtatcaaggaagattctacatgaaggtgctctcctaaagcttttatcatcatgatcatcaaaccttctatcaagtcaccatgaccaaaaggttgttaaattctctttccaagacagcacgagcctgtgtgttctgcgtcgggatctgtaacagcagtgccagtgcactgaagtcgaaggtttcatctaaggccagaagtgctccgtgaacaccactctctataagattgtttgcatattctttaaggccaattgacaggatccagcgaatcactcgatcattgctccaaacaagcacgtcttttatttcactctgactttcttctctttttctttccagttctttccggtcataatttaaccttctcaggcacataattccacactggaaactgtttctgtgaaaactgtcgaccattttcagctgccctcgaaggtctttcttggtcaagtggtccagcatcctggcgtctacaaggcactccatgaagtagctgcggtactgggggaggcccaggctggggagccactcgttgccgatccactcgtggttcatgtccccataggcgagtgtcgttctagatgtgggcggggcagacgggctggtcagcgacatgatctcctggatggccagcctcagcttcagcctgtgcagggggttgctgatgccaatctcacgctggatctctgtgtcggacagggccgacatgatggccccgcttttcacgtttgctcggcaggcagccacataccaggctggcatcacaacccagagctctagccagaccacaaccgttggcccgtcccattgggcaagaggtaaaccttgtctccgtgcttcctccatcaattcatgctcttgttggagtttaggagttgttcagcctgtcaccctcagttgtctaggttcaagggatcctgagatgtatttatccccctcggaaacaccagcgttgtcctattgcttcctttgccggtttggtcaggtcggtcctctttctttctctgccaaaagagcgggcaattgaagacctaagtgccttccttctttgcgggcttcgtggagcgaattcttgctactgttgctactcgttggggttgccacacgggaacaatcctgggacctgttggaggtccttatcatccccgatggtcttcgtggctagcggtgtgcaggcccccttgttgtcaacggtc

SEQ ID NO: 317939 - DNA, 673 bp, Homo Sapiens
aaaattttatttaacaaaaaagaattaggaaccaaggtatccgagcagttttaaagtttgcaaaacatacttttaacctaaagaaagcaacagcttcctatttttcctaaacaaatatatctgatttcactttgttggtcctagctttcctaacaaacactgtctttgcatttctggtttttccacagaattggattttgaaaataaacgtgttcttccctccttcttcctttcctctaatttctaccaaggtggctaacttccttatgtgcacaagagcctgcagttattagtgcgaacatattgtagccatgagcaacaatgctggggtagggtgaggcaaggcggggtgggggggcagcaaacattttcaaagcttatgtcaaaagtaggttctctgccaaaatgagtatggtcagtacattgattctaaatggcagcaacaaagaatacctagcacccctaaagaactatatgtggaaatactgcctgccagtttcttctaacacacggtcagttcagtgacagtcctactgaagcaatggattctagttttagtgggaaacttctctttatagatgcatttcagctcctgttgctgttttggcgactgcagtcctagaaacagaagagtcctctgtaatgtgattcagaagcaatgcgctgggttgtg

SEQ ID NO: 317940 - DNA, 846 bp, Homo Sapiens
gggggggtttctgtatttccttttacaaatgaaacaaggtggcaacagggtgaggggcggggttgggaaggcatcaggacctatatacatgggacttggagggagtttgaggtgaggacttggggacaggcagggaggggagccctggcagaaccataatcttcatatgtcagtggcagccggggtccctctgaggccccagggcccggagtcccagcagtccagactagcaccctgggggctcctcctccccgcaggatatgttaagtggggtgaggctcgcggctaggaccctgctcacggcccgagtcccggtccttggcctccgaggagggcgatgaggaagacccagagctgtggttgcggcctgactgccggtaggcagcactcagctcctgcagccgttcaggcgtcggcgcccacttggcaaagccagggtcgttctgtaggaagagcacagccgtgttgtggacggccttgtagtgcatttcctccttcttgcagatgtgctgggagccactgcggtactcatgctcaaaggcaggcaggatcaactggtggcgtttgaagcggctctgctccatgcgggtgagcgctggtgttgggggttcccgccactcagggatgaacacgatgaaggacaggggctccggtgagctctcaagcagtctctcaaagtgagagaccatggcatccatgagctcctcgcagaagggagggttggcctcaaatgaaccactcagtggagcaaagtctaggcagggcccgcgggagccaaagtagccgtctgtgtcggggaaggcagaacagtactggcggaagtagcagttgaggggtgaggcgaag

SEQ ID NO: 317941 - DNA, 980 bp, Homo Sapiens
tcaaaggtcctcttttgtaacatttggcccccactaagttcccccattccccgaataaatttccaaaaggcgggaaattcagggccaaaggctcccatatacccaaggcgcaaggatatgcttctaaaaggttgcgtccctcccaagggttaagcaggaaataaatattttgggaagccagaaaaacctaccccccttcccattatccccagcagtgagaatgattcctaccattccttgcaaagaaaatatccctgcaaagctggaaagtaggatcatgggcagaagacaatatcccaggaccacttgcccacacaaccaaaatgaaacacctgtcatactcattaagtttaataaacaaaacattcctagacatccaattgcactgatcccgtatacatagccaaactggattttgccagccagtagcaatgtggctccaaaagcaaggcaaaaaaccattggacctgccaaatcagtttcattcatgatgctgccatctgctacttttaacggatgtaatactgttagtgttttttgccagatgtggtcaaaattgatacctaactcttctaataaaggtggctcatcctcaaagttgtttccatagaaaggctgaggtgaagctggagtatatgcctgagttggctggtaaatctgcccggtgtatggctgttgtggctgcatcatgtctggagggacaaatctgccttgctgcgaatagtcatagccagcatactgtttgctatagggtcctccacttcctccataatcataggactgctgtgactgatcatcgatgctgtaacttgtctggtagaaatccgtgtttaagttttcaaagcctgacattgcaaataatcaaactctgaggctgcgctggcggcaaaggcagtagcttcactaatcccaaacaacccccaaactctgtttcagaccctgaaccagccccgttgctacgtgtcacagggccaaaagaa

SEQ ID NO: 317942 - DNA, 1563 bp, Homo Sapiens
  misc_feature (123)..(280): n is a, c, g, or t
cttccaattttggcaaaggtttcccccccttccctggggtttccaccattttttccctggccttcaagccctccctgaagtaagcttgggaattaccagggcggcccgcccaccaagccccannnnnnnnnnnnnnnnnnnnnnnnnnnnnnnnnnnnnnnnnnnnnnnnnnnnnnnnnnnnnnnnnnnnnnnnnnnnnnnnnnnnnnnnnnnnnnnnnnnnnnnnnnnnnnnnnnnnnnnnnnnnnnnnnnnnnnnnnnnnnnnnnnnnnnnnnnnnnntactgtgactgggtcgttttttaagaaaggttatcagctttgtgtttggtttcccacagttgataaaaatctatcaaaaacattataatttgcaaggaaaaaggtttttcaatggctgcaggaaccagaaagaaatagcatttcttatctgtataaacacaaacatttaaagctagtcacaccgcaggtaaatccaatatagtatgcaaaagttctataaaaatgaacaagagatacacgtttactttcattgctccaacagtcaaatgtaaatctgcatgagagttgcgctgcagcagtttgctggtccaatttaagagttcaaggtcctttttgtacatctggcccactgatgtccacatcccagataaattttcaaaagacggaaatcagggcaaagactccatattaacaaagcgcaaggatatgctactaaaagttgctgtccttccatggctaatgcagaaataaatattttggaagcagaaaaactacaccatccaataatcccagcagtgagaatgattcctaccattccttgcaaagaaaatatcactgcaaagctggaaagtaggatcatgggcagaagacaatatccaaggacacttgccacacaaccaaatgaaacacctgtcatactcattaagtttaataaacaaaacattcctagacatccaattgcactgatcccgtatacatagccaaactggattttgccagccagtagcaatgtggctccaaaagcaaggcaaaaaaccattggacctgccaaatcagtttcattcatgatgctgccatctgctacttttaacggatgtaatactgttagtgttttttgccagatgtggtcaaaattgatacctaactcttctaataaaggtggctcatcctcaaagttgtttccatagaaaggctgaggtgaagctggagtatatgcctgagttggctggtaaatctgcccggtgtatggctgttgtggctgcatcatgtctggagggacaaatctgccttgctgcgaatagtcatagccagcatactgtttgctatagggtcctccacttcctccataatcataggactgctgtgactgatcatcgatgctgtaacttgtctggtagaaatccgtgtttaagttttcaaagcctgacattgcaaataatcaaactctgaggctgcgctggcggcaaaggcagtagcttcactaatcccaaacaacccccaaactctgtttcagaccctgaaccagccctcgtgccgaattcgccacccaggcctcgctcctt

SEQ ID NO: 317943 - DNA, 646 bp, Homo Sapiens
  misc_feature (59)..(59): n is a, c, g, or t
gaactccatttaaacaaggcttgaatggagtgaaacaatttccatggcaggcaactgancctaggcccctgggtatccctgaagcctcaggaaagaagccaggcccctgccctcatgaggctttacagtctgctctcccatcccaactcctgtccctagaggatctgctcaattcaagacaacctttactgagcacctatcataaagcaagcactattttagacgccatataaagatgagtaaggttccaaacctgcccttagggaatgttaagtctaacagagaactagatgaagtttcagcaagggctgtatgaaatgtgcatggcggtgttacagaggcaagaagaggggtcacttcacttagctttggggtggtgggagggaggggttgggaagctttcctgaattgggtggaaccggggtggggttattccagacagaggggccaatgtgagcaggtacctccttcagggtacagcagcagtctagggcttccaagacatgaggcagggtcagacatggaaggctttgcatgcctctaaggggctgggatatatcctaggtcacggggagatggttattcaggcagcaggaggattgaggcgggggtgtaaagaatcagagagcccactcttccagctcta

SEQ ID NO: 317944 - DNA, 754 bp, Homo Sapiens
tttttggatgtttggtttttgtgtggtaaaattcaccaattttaaatatacaagggatactctgtttataccaaaagtaccaagtcccaaaagatccagaaatagatgtattccaaccccttcaacccatttcttccacccattctctccctctacgtggtcagacaatgggactcattgtttttggctcaagaatccctgacctttttgtggtaagaatctactttttcatctccctgagatctcgagatcgctgtggagccaggacctggcagttaaacagatatggagaaggggagggacaggaattggtgctgccattagaagagagtcctcaagaaaagccgggactgggacacgtagtgggagccactgggttgtgtgtgggggatgcctcctgcctggggtctgtcctcccaacccacaggagtggctctggctgtcctgttctagctatttgatcttgcctgtttggattctttcctggactcactgagatggatgctcagcatctttcaaataaatgccccgtttgcttaagactagccagagtcacttgggtttttcacaatcactaaagcttcactaaaatgaccctccaggatcccagcctctccaggaatccatgactcaagaagcggggtcagggaggatggtatggagacttccagagaaggtattctaagcgtatgccaaactactgggtgggaattcctgttgtgtgggaaacctattttccaagaaagaattgacg

SEQ ID NO: 317945 - DNA, 815 bp, Homo Sapiens
ttgagtgttttgtgtgtacatattttgctcttaaagtttataaatatacgtatattgagagtgtccacgtctcctcgctgaaccttaggaatcccttggcaccatgtcctgtgtgcattataaattttcctctaaactcaactatgataccgtcacctttgatgggctccacatctccctctgcgacttaaagaagcagattatggggagagagaagctgaaagctgccgactgcgacctgcagatcaccaatgcgcagacgaaagaagaatatactgatgataatgctctgattcctaagaattcttctgtaattgttagaagaattcctattggaggtgttaaatctacaagcaagacatatgttataagtcgaactgaaccagcgatggcaactacaaaagcaattgatgactcttccgcgtctatttctctggcccagcttacaaagactgccaatctggctgaagccaatgcttctgaagaagataaaattaaagcaatgatgtcgcaatctggccatgaatacgacccaatcaattacatgaagaaacctctaggtccaccacctccatcttacacgtgtttccgttgtggtaaacctggacattatattaagaattgcccaacaaatggggataaaaactttgaatctggtcctaggattaaaaagagcactggaattcccagaagtttcatgatggaagtgaaagatcctaatatgaaaggtgcaatgcttaccaacactgggaaacctcccttcttaccagaggagccatcttcttcctcagaagaagatgatcctatcccagatg

SEQ ID NO: 317946 - DNA, 1362 bp, Homo Sapiens
aaatagcctgatatattttaataattctgttattagtttactgcatcttataacattttcttttgaatcaagtcacagccgtgtgtactttaggctgtggcatcataaacaaatatgtaaagacacagagttaaaatagatgaataccaatggctatccatcagtttgatgtaatctaacacaaatgaccattaagagacttgcgaagaaatcagagaaacagaatttcacaaatgagcttctgcataactgaatgacagcattgctgggtgcctattgtttggtttggtcaaggttatgcttttgggaagccaaccctcccttctagatgactctgttgaaaagtgaggctagtggaagatttcagggtacagagagctagatttctatgaaatatattcaaagatggtaaagtgagtactctcctcttccctggtaaaattagggatgtgttaccatggaaactcacccatcatcaccaccaatgtggacaggtttaaatcttttggcaaggagaggatgactgcctcctcctgtttctaatccctcctcttccaactcctcatctcttcctaacaactggaattcttcccataattggttctaaaaactaatttagtgtcttaaatgatcaattccataaatgcaaattgggtaaaatgaatttccctaatagaaggaatgccagcttgaattacttggtatcagagtggctggagagagataccgtacctcagaagtgtgcctgtagagtgcaactgctctctcaaagaccgtgtgcagggaatgtggtctccaaagtgggagcagtgtcaggctctactttcttcaacagggaactgtttcttcaacagggaactggcctgaacagctcaagtgttgcttcattttctgataataacaatttgtcttgattgggtgctgtggcctgcattcctcagctgggagttgtttgcttagatcagaaaaatctgagctagtgattcagctagggacacaggtcaagggtaaaagccagctgggtctcagggagagctaagccttgagaagccctcccgttggtcacctagaattgaggtatctgtccagattaactgtggagcttttccagaacagcacgaacttcctctgggttgtagttccaagggccagatttacccttgtagaggatcctgccctcctggattatgtagagcctctcaggcagtgctgcgtagagctggctgctctggttctgcatggtgtccaccaccacagggcactgggggctcctggccagcagtagatgggctcctgcaggcgatcctgaaggttctggtgatttctgatgtccatgttgttcttaaaagcccagccatctga

SEQ ID NO: 317947 - DNA, 1127 bp, Homo Sapiens
  misc_feature (55)..(105): n is a, c, g, or t
  misc_feature (874)..(887): n is a, c, g, or t
  misc_feature (1027)..(1027): n is a, c, g, or t
ttctcccccctagatccaccacgaggcccacctcgccctggcgaattctgcacgnnnnnnnnnnnnnnnnnnnnnnnnnnnnnnnnnnnnnnnnnnnnnnnnnnnagagcgcgccgagccgcggccgagctggcccgcccgcccgtcgcacatgttccggaacggcgcccggccgtagccgcctgcggcgcctcctgtcggcccgagaagggagtgcggagaggcgccggtcgccacccgcggtgcccatggagcgggtgaagatgatcaacgtgcagcgtctgctggaggctgccgagtttttggagcgccgggagcgagagtgtgaacatggctacgcctcttcattcccgtccatgccgagcccccgactgcagcattcaaagcccccacggaggttgagccgggcacagaaacacagcagcgggagcagcaacaccagcactgccaacagatctacacacaatgagctggaaaagaatcgacgagctcatctgcgcctttgtttagaacgcttaaaagttctgattccactaggaccagactgcacccggcacacaacacttggtttgctcaacaaagccaaagcacacatcaagaaacttggaacaaacttgaaagaaaaaagccccgcccccgactcgagaaatttgggaacgagaaaagaagattttttaaaggggcgaactgggaacccgctggcggggcccttcaggggaatgggaacgaactcccaatggacccggatttggaatccaatttttttcttccaaaatccggttccgcactcccaaaccgcgaaggaaaattggaactgggatggtttaaaaacccccgaacttctccccctggggccaagcggggacacatacannnnnnnnnnnnnnggcatttcgggggacattgtcgggcgccccaaccgctgtctctggtccccagtattttcgggggagggaaccagagggtttactctcccggggcgcccccaggcccacaacctttctcttatcgccctccgcaaagaaancaccggcccggcgccattaaacagggcgcggcgggggaaagaaatgtcttgtctttgggccgcccctttctccaattaccgccccctgccccctcttgcc

SEQ ID NO: 317948 - DNA, 808 bp, Homo Sapiens
aatatcagtggggcacttgaggcctttagacaggccttgaaattaaccaccaaatgtccagagtgtgaaaacagcctgaagttgatccgctgtatgcagttttatccttttctgtacaacatcacttcttctgtttgcagtggtaattgtcatgagaaaaccctggacaacagccatgacaaacagaaatattttgacaactcacagtcactggatgctgctgaagaagagccctctgagagaggaacagaggaggaccctgtattctctgttgagaattcagggagggactcagatgcccttagacttgaaagtacggtggttgaggagagcaatggttctgatgagatggagaattcagatgaaaccaaaatgtcagaagaaatactggctttggtggatgaatttcaacaggcatggcctttggaaggctttgggggtgcactagagatgaaagggcggcgtctagacttacaaggaatacgggtgctgaagaaaggtccccaggatggagtggccagaagctcttgctatggagactgcagaagtgaagatgatgaagcaacagaatggattacattccaggtcaaacgtgtaaagaaacccaaaggagatcataagaaaactcctgggaaaaaagtagaaacaggtcagatagctcctgtgccacaagggctactagactggaagaccaggaaagtgccatagacataatgtaactggatttcagcaaggcatttaacagagcctcttatgatatccttgtgaaccagatggagagatgtgggcttgaagccttcccattgcg

SEQ ID NO: 317949 - DNA, 765 bp, Homo Sapiens
  misc_feature (69)..(131): n is a, c, g, or t
  misc_feature (551)..(584): n is a, c, g, or t
gcattttgggccgtgaaagtaggtttttaaacccctcattttctcaagatgagaaaaacaggagactcnnnnnnnnnnnnnnnnnnnnnnnnnnnnnnnnnnnnnnnnnnnnnnnnnnnnnnnnnnnnnnntgtttgactctaacgtgtatgttcccaatcaacaagctatttaaagctacaaaaaaatttaaagctctgtttattaatatccttcgtaagtacccaccttttgggtgtgggcccctttaccttacatcaaatcccccaagaaaagagcagaactgtcttgtctgggaagggttttctgaaggagttataatggaataggcaggaaggagaactttagttctgtatagcgctttttatattataggaatttacgaacagtagaaaactgtttgaggtacaggcaggggtttagattgagattttaacaaaacagaaaggaacagttttggaagagtttcaaattaactctgtttaaattaataacttaaataagccataattttcacaaaaaatcttaattttcttttacatttaataatnnnnnnnnnnnnnnnnnnnnnnnnnnnnnnnnnnaaggggctgagaaccataaaagacactaggggtacagaaaggaataattaagacggcctgctcttgagctcacagtctagtaaggaaggtaaacataaacaaatcattacaatacaacaggaaaagagctagagcgaagatatagaacaattgcacagaggaaagagtaactaattctgcc

SEQ ID NO: 317950 - DNA, 1034 bp, Homo Sapiens
ttagagcatgagtaaagagaaagagagaaggaagaagtgcactaaggagagcgccgtcccttcttcagcattaagtgacactggatggtctggattcggttcttggctgggacaaactcgggctgaagcttcaatgtggattcataccacaccagtgctttttcaaattcttccattgccacgtagacattgcccagagtgaagtggttcacagcaaagtgtggtgcgatctctactgccatggtggctactatgacggcgtcattccagagcttggcattgtgcaagatgttggccaggctaatcaggggcacatccttcatctggtgtggcgcatagtgcagagcctggcggaggcagtcgattgccttctttccttggcctttcaccctccagtagagggctgccatgctggagaggacccaggacgtctggttcttttccaaaactttggcaattcgggtgccaatctgttcaagcgactgttgtggatattggtctttgcccgagattttgtaatacctctgttaactgactctcccctgtgtaagtgcaaggctggctcgggttggaaaccccatgcaagtggtcccagggtatgcatactcgtggggagattgccattgcaaagaggctccattgctggctgctgtataggggtggcaaaatctatgtgttctgtgatgtcaatgttttttgaagaaactgcaagccaggtactcacgatggcagtcagctctacccagcggagtttgaggcattcgtccgggctgggccatcccagacgctggtagtcacgtttttttcctggaaggaaagtatgccatgaatccacacaattgcaaaggaagagaacccaaagggccttatgccctggtgattacttcacctggattggtgtatttggaggtgctagtcattcctgtagtctttaacatttcccccatctatgatctaattaaaatctcgtcattatgcaatggaactaaagatcatctctgagtaaagataggggagaagtaagaataaatgag

SEQ ID NO: 317951 - DNA, 1022 bp, Homo Sapiens
tctgtatagcgctttttatattataggaatttacgaacagtagaaaacctgtttgaggtacaggcaggggtttagattgagattttaacaaaacagaaaggaacagttttggaagagtttcaaattaactctgtttaaattaataacttaaataagccataattttcacaaaaaatcttaattttcttttacatttaataatttcatttgaaaaatatttattgagcacctgttataaggggctgagaaccataaaagacactaggggtacagaaaggaataattaagacggcctgctcttgagctcacagtctagtaaggaaggtaaacataaacaaatcattacaatacaacaggaaaagagctagagcgaagatatagaacaattgcacagaggaaagagtaactaattctgcctgaaggtaacaaggaagagatggcacttgattttgaagtttaaggatgagtgatattttagcacggcagagggcagagggggcacagggcattccaggcagagggaatagcatgtgcaaaggcactgaggtaaaaacatgagcatggttggttcagagaatggtgttgaagggtacacagaggcgggctgtaaagggtcttgtacaccacactaggaagtttgaattttatcctgtaggcaatgggaaggcttcaagcccacatctctccatctggttcacaaggatatcataagaggctctgttaaatgccttgctgaaatccagttacattatgtctatggcactttcctggtcttccagtctagtagcccttgtggcccaggagatgccaccttggggccagtgatctctaggtttgcttggtaacgatgtccattttctatctgacctgtttctacttttttcccaggagttttcttatgatctcctttgggtttctttacacgtttgacctggaatgtaatccattctgttgcttcatcatcttcacttctgcagtctccatagcaagagcttctggccactccatcctggggacctttc

SEQ ID NO: 317952 - DNA, 917 bp, Homo Sapiens
  misc_feature (853)..(853): n is a, c, g, or t
  misc_feature (888)..(888): n is a, c, g, or t
gggctgaaggaactaagagtggaaacaatctctgactgcacacaagtgcatttgtgatccaccacaggcacgtttttgtcaattggctggggaagcccaacccatctaacctcctggactctggaaaggcattctccgggtctggtttctcacacattacacagcagaggtttggagttagttcacagaaaagttaacatcccggaacagtgcagaaggcttgggtttcagtttgctagggcccccataacaaaatgccacagaaccaggtggtttaaacaacagatttattttctcacatttggaggcgagaagttcaagatcaaggtgtcagcaggcctggtttttcctagaggcctcttttgttggcttgcagacagctgtcttctcactgtgtccttgtgcggtcttccctccatgcacacacatctctagtttcattatgtgcccaacgttcctcttctaagaacaccagttggactggattttaactttaaccagcctcatttaagttaatcacctctttaaatgctcaatctccaagtacagtctcattctgaggttccaggggtttctcaacgtaagaatttagggggacagaattcagcccgtagcagctgggcagcaggactcatgggtcccagttctcaggccccaaggactcagagcagcaaaggatacgtgacacaagcagggctgaactggacaccagactttctttggggttgtaaaaggagaagtgtgactccactgccaagggtaaggcactcttgtcttatgctacccctttaattcttgaacccttgggggcaagcctggtgtcctcccttccctaaaacggtcaatctggttnccgtttttccaagtctttccagaccttggtccttnggactgggaagaccttcaacccttcctaa

SEQ ID NO: 317953 - DNA, 188 bp, Homo Sapiens
atgcctaaaatatttctaattaccactttcaataaataagaaatgacccataaaggataaatgagattttacaaaattcaatcatttaaggacaaatttgagttctgaatacaattttcatacaaatagtgtttttgcaaataatggccagctccatgttattagtacattgcattaacaggcttttg

SEQ ID NO: 317954 - DNA, 435 bp, Homo Sapiens
  misc_feature (80)..(182): n is a, c, g, or t
gctcaagagatcctcccacctcagccttctgagtagctgggactgcaggcatgcattaccatgtctggttaatttttgannnnnnnnnnnnnnnnnnnnnnnnnnnnnnnnnnnnnnnnnnnnnnnnnnnnnnnnnnnnnnnnnnnnnnnnnnnnnnnnnnnnnnnnnnnnnnnnnnnnnnngagtgagccactgcatctggcaacactgcttcttaacttgagtagaatcttcctgcctagacagaagtgaatgggaaagcttagtgcatcttagagtatcttctaagagaaacttggtgtgaaaccatggggaataaagcccagtacttgacatgggattttaattcatttacttgatatgacatagtgggtgatgcaaaataggtacctttttcttcacctttttccacagtgacttttcacctcgtgccga

SEQ ID NO: 317955 - DNA, 417 bp, Homo Sapiens
ctgaagcagatcaccaccgagctggccgagcaccgctcatatccccccgacaagaaggtcaaagcccaaggacgtcgatgagtaccaaactgaaagacccactatcctggagtttgagaaaacccgctatgaaatgtatgtcagcattctcaaggaaggaggcaaagagctactgagtaacgatgaaagcgaggctgcaggactgaagaagtcgcactcgagtccttcgctgaacccggatacttctccaatcactgccaaagtcaagcgtaacgtgtcagagaggaaggatcaccgacctgaaacaccaagcattaagcaaaaagttacttagagtccatctgcggccaggaagtgctggtcatggagcaaaatagggtttttcaagatctttctggtaatccgtgaatatattta

SEQ ID NO: 317956 - DNA, 410 bp, Homo Sapiens
attctatcaagcatttatattaccttttccttcctagccattttaatggaaatgggtggagaatacacagtaactcaataagaagtcataattgctcattgtagtacatcattgattgtgtgattttgtaatataattgttattgggctcttattgactggattctgggtttctcctgtccttgttaggttttgtgttgactattttctctttctatttttttcctaagacttttaaagtgtttctcaaattatggtctttgttaaactttctgcatcccgtaatgtggatgttcaaaagattcctggtccccactccctacccactgccaacagaatcagattctctggaagtgcgagctagaaaaatacattttgaataagtactcctcccctccttaggtgcttctt

SEQ ID NO: 317957 - DNA, 361 bp, Homo Sapiens
  misc_feature (282)..(282): n is a, c, g, or t
attaaatatgcttattgatgaattgtaatctggatggaatcttctaggatttatgatttgagactttgaagactaattctctcttggagcttcatcgttgcagtgacaacctgtgtctgtctggcgcttctgagcatccgtgccgtctgtcctctctcaggggctttccttgtgggttgttgtctctgctcagatttcaaaatttgtagtagttcacaaaagcatcgttttaaggaaattttccaacttcttctgttctatttttattctttatattagatntttctcgagatgggtgtgaatagagcctggagcacacaccacacaaatgtgtttgctctgttttaactctttcaaccta

SEQ ID NO: 317958 - DNA, 139 bp, Homo Sapiens
aaagtgagaacctgtttattagatgaattgctctaaatccagaacacaagaataaatgcttcttaaaaaaataattcaggaaggtagttgaggcaagaaagttggtggctggcaacttgtgtcccttcaccttgacgag

SEQ ID NO: 317959 - DNA, 919 bp, Homo Sapiens
  misc_feature (214)..(214): n is a, c, g, or t
gtggtgggagaaaatccccaagcgcccttgtttctctttggccccgcggttctttctctgggggaaaacaaggttttgtggcccacgtgtgttccctctaccccttcacgggggccccccggcgccccaaaacagaattggttttaagaaaagcttttttggggaggcgcgagggcgggcccgtaaaaaggatttttataatcttctctgtgtntggtttgaagaaagttgtgtgttggtggcgggtggtggttgggagtgggtgggggaaatccgggggcccagtttcctttattgggggcagggcaccaagaagaggccctccgctccccaaacccagaggcaaaaggggttggcacgctccctcccagcctagtccttgcgtcactgtccatgggcaattcctctgccctgcatcttcaggccatgtcaggtagaggtatccatctcagggacctcagtggacacttccgtgggcactgccagccgcctggggggcacataggatcccatacccgctgccctctccgcctcttcctgactgtagggctcgacgctcagctgcttcagccttttcttgtggtctttggatcggaagtgggtcttcaggttggtggaatcgatgaagtacctcgcgcaggccagacagcggtgcaggccgccccctggcaggtcggggtcgaactcggcgtttgggtcgggctggggtcgtgcggatccctgaggccgcagctcgcggtgaatctcatccaagtccggccgccgccgcttcgccttcatctgccgggctagagagtgcgctcggtgcgcgcctgtccggcgggagcgacccatggccagaaacagcccggccggccaaggggccaggagcagggcagggagcacacgtgtgagcacttccgggccgatcagctacccc

SEQ ID NO: 317960 - DNA, 2339 bp, Homo Sapiens
ctgggggaaattattgacccgtcgctttcgcaagccataggttttggaaggacgaaaattaaaggtataaagaagttaggtgtttttgcggtgtggaccctacctagacgaataaagtagcaggtcttgaatggtgcttgggcccaaggggcctacctgctttggccaggatcctacaaagctgcaaggaccctgggagcattgcctacttggcctcattgttgttgtcaccatcaccactgccaagcattaccaggcacagcaggggcagtctcctgggtgtgaggcaaagtctggcatctctaggaagtacaaatcttctggtcactttggtaaaggaggggccagacgatgccagacatcatccatagaggtgagatttgaatccagcaccccgtgtagtgccaccagagtccctaactaaaggtaccccaggtccatattacaactacttgattaaagaacaggtttattggtgacctgagggagccaaggtctcctttgtgaccctcactcccaggtggtatcaggctgcaaggccctctatgggtagaaaagccaatcacatgatccatgggcattcctggcaagaggtcagatctctctactcctaattcgaaaacttccaaatcctgatttcagagtcaacagcaaggtcagaggctagagtcctgatgggcatggagctcaggaggctggcgagttgctcagcaacgtctgtggggctgcgcacatggaagtagaggccaggaaggccacaggaaaattgccccaaaagaagtttccaagagggtttacgcttggacagggcatagaacctggccgtgagattgcactttgggtatgatggggtcagtcaccgagcaggcctggggagcagagaacctccccacttgccctgggcatgccaaggctccatggtctaggctcagtggtgccaccacagcctgtcacatgtcccagctcctcactgctgggacatctccaggttcttgatgggatacaggtaccacatcactacccctgaagggttgatgatcactgtgaagttggtttcatctcggaggccactgatgatgtcacctgagtagacgtcctgggcctcatatatcacagacccggtgaagttcagctggccaagggaggagtggtagcgataaggcatatcggtcctgcagctgaagaagactaaggcgctagccttgttggacagaggccgcatgtacacttcgatgagagatttttccttgtgaatcctgcgtccctggatgcctaagggatcctggttgattttgatcatgagtggattctgcagaatgtccatgttctgggcggagatggtacgcaggtctgtggacatcaagaggggggctgccagcaccgtccacagggccatctgggcccgggattgctctaagctgagaccaaagttcccaatgagcagcatgtcagggtcattccagtgcccagggccggccactggctgcagtatgtcctggtgctccacgaaccaattcaggatggagagcacgctccaccaggagtcctggatgtcatcatagttacgccagaggttgcagatgtccgccagcagactgtagttcacccttggggggaggccgccttcataggctggccagctgcaggagaaggcgatggggcggcctgtggcattcagggcagcagccatctttgggtacccctgggcccgctcctcgggggtggagaagcagccatccagcttgagcatgtctaccttccactcggcgaaggtctgagcatcctggaccaccttgtccagtgtggtgcctgggtaacccatgcaggtgaagttgcccatgtccgcgtagatacccaacttcaggcccagggagtgaacgtagtcagccaggaaaggaatgccatgagggaagcgcttgggatctggcatcaggcggccactggcatcgcgaccaccgatccagcagtcatcaatgttgaggtatgtgtagcccatgtcccgccatccatcctgtgccatccggtcagccatctccatgaagagctgttcacttatgcagttctttgggtcctcatcacagttaatgttgcagcggaagcgttcccaggccagccagcccatgggtggtgtctgcaggagcccattgtccagcatcagcacctgggccacatgtcccagcaagagcactgtcttcagcagcatcgctctggactcagcttccgaggacctgaccagatctggtctgcgtgtatcagctgtatgtgttgggctcgaagcgttcagacctgccgccgcttctgactcgaatccggtaacctgataagtccgaagcgttcca

SEQ ID NO: 317961 - DNA, 380 bp, Homo Sapiens
ccaagtacataaaggatgcaagggtttctcaggagatcctagtaccgaacagacaccgaacaaaagctggttaaatgaccgttctctgtctcatcaaaagtaaattaacaaacgagctggatagctagtacaatttctactcaggtcttatcctagcatgactaaatatcatactgcttatggtctctgccagagaagaaaatttaagaaatgaagatattgcaaagatgggtaagaaaatctaaaatgaaatgggagtggaagttatttacacaggaataagacgacattaatgaagaaaccgtgcacgcagatataattgccaaatatattgtagcactatgggaggcctaggttaatcacttgaggatcaacgtgag

SEQ ID NO: 317962 - DNA, 489 bp, Homo Sapiens
  misc_feature (289)..(305): n is a, c, g, or t
  misc_feature (317)..(318): n is a, c, g, or t
  misc_feature (329)..(329): n is a, c, g, or t
  misc_feature (357)..(357): n is a, c, g, or t
  misc_feature (375)..(375): n is a, c, g, or t
gggctattcatcttagtgacaccattgagtactctctctgtgtacgtggatgcgataatttgtgtagcagtgtttaccctaaggttctcaggcagaaaggaagctcccttctcaaaatgacaaaatgtagagtattctaatctagagcttcgtttcattctggcagttctagcctaggcctggcagatgcttcattaatttagaaagttattttcaaaatattttttaaattctgttttaaatttatagaaatattatttgttcattgtaaaattcaaaaactgtaaannnnnnnnnnnnnnnnngctcctttcccnnccccccctccntttccttccccctcctcccactcccatnttcttacttcctttctcnaccccctccacttccttctttaattttccttcctcactctcctcccaatatcccaacatcttctccttttaccttttcattccattcctccaccctaccttcctattttcctcc

SEQ ID NO: 317963 - DNA, 1219 bp, Homo Sapiens
  misc_feature (592)..(622): n is a, c, g, or t
ccctgggttaaatatagagaatttaatggctacatttaaaaatgtacattattatgtcaaagggtaaatttacaaattgataatcatagtttgcaacaattcaaagtttattctcaaatttatccaagtttacttttatttacaatgaataaaaagacccatgtgaaatgtaagagatgtcagacattaaaagtatttttggtattaactcttataatatttcagaattcagggtagcaatttttaaacccaataccaatagaaaaaatgtaacccatttactaattaagattgcattaaaacaattgttggtctttaaagaagtattcttatccttagacactgtactttcaattgaatagggtgtattgcaagaatttggcccacttcatattgcccataagcctctccagctcaaatgtttcaactagtcctctcttcttattccaggtggaaaaaattctttggaaaagtaagaatacatcaaatcccattttgtagtctatctaatagagtttaaggtgtaattttgttctttctcccctccaagtaaagctaatgctaaaatcatcactagttacatatgcttttnnnnnnnnnnnnnnnnnnnnnnnnnnnnnnngaagtgaacttaaaagtgcttttcggtatggtcatgaactttactgttctcaactgcattaagggattctcaactgcattaagggattcagaaattatttggggacaagtcctgtacatatagtagaagcagatacttccttatgttccaaaatgtctatggcacaaagcagacatcagtccagaacctacttttcctcacagctttgctgaaatgcccctcaagtcaaacataagttcataaatgttaagacactaggaagaaagttcgccatcaacctgaggcatcagacgttaatgtctgtctatgtgaatcagtggtcaagtgacattaacaagattggcacatgtacaagcttaaattcatgtctacatagttcctcaatagtggaagtaacttctggatgtctaaatgcactgatcacctgtccttttccttgaaggatataccagaatacaaattctactagtatctgctttataatttttatactattagcttacaagtggacagaagtaacagtgctaattattttggctatgtgtacagggaatataaaagctttggtttaaagcgattctgataatacagattgcc

SEQ ID NO: 317964 - DNA, 1187 bp, Homo Sapiens
  misc_feature (105)..(121): n is a, c, g, or t
  misc_feature (1021)..(1049): n is a, c, g, or t
gctgggtggcgaattcggcacgagggagggaagcctattttgttaactggtttgggatagggaatggggtttctttttctttaatctcccttgtttcttgggctnnnnnnnnnnnnnnnnnaacaactggctattcagtaccaaggggccagagtggagggtaggagtgccactctctctttggtttaggtttttgaccttttcttcctttgttttttaaaagtttatgacagttggctcccctcccacccccagcaaccccatcccagaatcctattttcctgggaagtccttaaagcccctaaccatcccacactcttcactttcctttccaccttattcattctctgtacttaccacagtattttgcacttgattacatatccttcactctcttctcttcatcccatcaccccctaaataggtcaggtgagggaggctgggaagaggtgggaggaggggcagaagtgaaggaagaataggaaggatattacctcttctgttatttttttaagaaacattgtttggtggcagcaatctccctgtccctatcactgttagaggcctaattttatatctataaatatattaaaaagcaagtcaaacttggatgtatcaaggtaaaattattgtcaaagtttaaatacctatatattctctgaatgcaataaagggacttaagagtgaacaagagtaatggtgtggaagtgacaccctggggtcagtttacctctgtgtatggtcactagagattgggacttaccctttaggttttaggaggcttgagaatggaaggatcctcatttctgcccttcctggttccctgctttggtgtaggggttgggaaaaacaggaaattcctctcagctctgcctcagatctcctacctctccttaagtcttgtagggggttccaaggatggctcttctaaccagaggctggcctgtctttaaaacttaactactttagggtggtgccaccactgcagactattgtggtactttgtgacagaagacatgtnnnnnnnnnnnnnnnnnnnnnnnnnnnnntctctcactctgtctctcttacctttagctgcttgatcattaagccatccaacttcatgccagttcccttctttatagaagagtgaagggaaagacttcctgggtttgacttaaaccttgtccacctcttgatatttt

SEQ ID NO: 317965 - DNA, 1458 bp, Homo Sapiens
gtgtatgaattaagcattttttaattgaatgtaactctacagtacacgtgggggacggcagcgccacgcagcgcgtggggacgcagtgtccttctctgacagcagcatcagggctcaggcaggccgggaggatgcatcacagctggcggccttggacggggcagtggctcccccggcctgaggagtgccgccccttgtggccacgctgcccagcaggccggctccttccctctcgggcgccagcagcagctcctactccttctcacgagtccacttgatcatggtctccggtgagcggtagaggaagatgagcttggcgtacaactcctcctccagctccagctcccgagtctcccgcaccaggaagatgtcctggcagagcttgaggatgcggtccacgcacggcagctcctcgaacataatggagtgcgagatctcgctgaagaatccgcgcacgaacttgccgatgaccagcacgatggacacgtacagccccatgatgccgtagccagccaggaagccgaggctcggtgggctgaccttgtcactgaaaatgaccatgggcagcaggttgcagtcggtccggcactcctgcagctcgatgacccaccattcgaggaagccggtggcccccgcaccctgctccctccgcagctggatacgcacgccgaggtagtcggcctcctcattgggctgcagctgcttcacagggttggcttcgggcccgttgggggcacggatgtacttggggaagagattggggatgaccacagactggtccgaggtgccctcgagcaggctggccagctgccgccgtgcagtgctgttgggggccagggccagcatgtgcttctcgttggcatactccacagtgcctcccttcgccaggtccctctggaagttccaggtgaagcgcagggtgatgtcggccgtgccgttgtagagctcccgcttcatctgggcacggctggggggactgatgcgccacagcgccccggagctgccctcaatctgcgccgtgacgatgtcctcagggctgtactggctgatgaactgcatggccagcggctgggggtcaaactgccgggacagctcctcataggcctgggccgtgaaggggatgatggacggctgctgggcgctcatggtgaacagcggctcatagccgcccagcttgagggtgacggtgacatcgatgggctggttgacaaccccaaccacggagcgcaccagcgacatgaagagcagcgggaaccagatgatggcgatgaggaagaggatgatgaggccacccatgccgtacttgacgatcttcttcttcttctgccctttgggctgcgggtatttctggaggggaacgacacaggtcatacgctcagctctgcccttcctgcgggtcacacaaccgcattctccagctcacccagcagcccagaaaagccccagcctgacctcagt

SEQ ID NO: 317966 - DNA, 648 bp, Homo Sapiens
attttaaaaatccatgacaccttgatagaaattagagtttacccaaacaaaaaaggaaccttcgatattgccagcagctataaagtgaacgtactgagaccgacaggacagcaagaaggcatttgcacatttatatctgacacccgaccatactttcagtcaccagaatatcttctctccagatttaaaaaaatagtatgctgatttctataacaaagctttttttccgtacaaaaatcaaataatggcccaacgagtcacaacagtgcaataggtagaggattaaaaactgcatcaaacaggtgctgaaaataaatactacctaggagaaggaggtgagagccctcgtgtggggtttgttttcgaccccttgagtgtgtgtggggtttgtcttccgagccacgagcctggcctgtactcgcggtgctgttcactctgacagagtgcgcctgcagcacgttgcctccagggcccagcctcccagaagcctcagagcatcagagcatccgtctcatcggatggaccagaaacaagaaaatggggtggggtgaatcacagctatcattcaaaggaaaggaatttttttctattatccatatcatctcagtgaacctactggtggactcccaattgacaagattgagcaat

SEQ ID NO: 317967 - DNA, 486 bp, Homo Sapiens
cagaaatcttttaaacgactgaccttccttaaaaacagaatgactcctattgcttgcttgggctagaatgtacacgtctccttgcctgaataagccatatatatgctcttaaacaaaagtttgaaattatccatatcatctcagtgaacctactggtggactcccaattgacaagattgagcaatagaaaaaaattcctttcctttgaatgatagctgtgattcaccccaccccattttcttgtttctggtccatccgatgagacggatgctctgatgctctgaggcttctgggaggctgggccctggaggcaacgtgctgcaggcgcactctgtcagagtgaacagcaccgcgagacaggccaggctcgtggctcggaagacaaaccccacacacactcaaggggtcgaaaacaaaccccacacgagggctcttcacctccttctcctagggtagtatttattttttcagtcacctgttttgatg

SEQ ID NO: 317968 - DNA, 919 bp, Homo Sapiens
  misc_feature (903)..(903): n is a, c, g, or t
gtctaagctttcaatgacagatattttaattgtggaatttttaaagcaaacaaagcaatggaaacttcatttttattctagaccagtctatcccagacatgctgattatggttggctgtgctgagtcctcatttaccgtatgaaatgcaaatgtctgtcaattgcaatgcctggggccaagccaggccagtggacttgtgtgcagttcccaccggagccaggagctgctcagacagcagacccagcccagtccactgggttttgcaaacacaggctccctctgcagcagcatgggcttgtggaagggaggcatgccgccgccagcatgcatgccaggggtccggggttctccccgtgtctgcagaggtgaggggtacaaagtgagctggaaacaaaacactgtgttcccccttggccttgaagaagtgcctcaaccaactcctcgccagctgcagagtactcaatctcctcacagaaagaatgtgtacaaaaaaactagaagcttttctttttcccaaatggctgttgaatttatttgcttgatcaataatggtcctggcaaaaattagttaaccaatgctgagacatttgtaatgaaatactaattttaaaaatccatgacaccttgatagaaattagagtttacacaaacaaaaaaggaaccttcgatattgccagcagctataaagtgaacgtactgagaccgacaggacagcaagaaggcatttgcacatttatatctgacacccgaccatactttcagtcaccagaatatcttctctccagatttaaaaaaataggtatggctgatttctataacaaaggctttttttcggtacaaaattcaaataatgggccaacggggtcacaacagtggcaatagggtaggaggggtttaaaaanctggcatccaaacggg

SEQ ID NO: 317969 - DNA, 670 bp, Homo Sapiens
  misc_feature (27)..(27): n is a, c, g, or t
  misc_feature (35)..(35): n is a, c, g, or t
  misc_feature (64)..(64): n is a, c, g, or t
  misc_feature (91)..(91): n is a, c, g, or t
aatattccatttaaaaggtcattagtncccaaatnccccaaggaccagtggaccattcctaagnattaatatgccagggggaaagaaagcntcattttacacctttccctggggaataaaggccaaaatgaactttagttgtgagaaacaaattccttatcctgtagatatattccatttgttttacttgttgggcaatttatatataatttggaataaagatcataccttcccctggatttgtcccacaagattttctggagagacccttgaacctggtctttgatgatggacagactgagcctgggattctgggctgtaacggtttgatgttttagtcctcacaggtgtagataccaaagcagaaggtgagttctggaatgtagaagtaggaggctgctggggagtctgcgaggaaacttgatttctagcaaaatcttgtgtgataatttgacagatgtgatcagcaagtgtgatcagccgatgggtccctggcacttgccccattccctctgcctgtgaagaagggggcagctgttgttggggagatggtgattcctgctgtggtcgatagtgatgtaatggtccttcatattgtctggtaggatcatctaggagagaacacatagatgtcttactccaggaatgtctgtgcttttcactcattatc

SEQ ID NO: 317970 - DNA, 454 bp, Homo Sapiens
cctatctactaaacaataacttctttgagaactggaccagtgtctcttatatttatatccctaataatacttattaaacacgtagtctattctcaacattgaattccatcttatactcaaagaataatactttaacatagccattgttcatagtgtatatataattaagaacacatccatatttttcttgagattatatagtgttaaatttttcaaaattataggatatgatctaaagatatattttaaaactcaaacctgtaattttatcttcagttatgctatagcatgtacatttccattctcttgtcgaagtttctttcgttcctcagcttctccttcatatttcctgacgtattgtcttctaagccttcagagaacaaggcattctaatgttatcaaggttctattcatctatatgtttgattggggtttttatgagtagagggggttc

SEQ ID NO: 317971 - DNA, 559 bp, Homo Sapiens
  misc_feature (265)..(320): n is a, c, g, or t
gctccaccattttctggggaccacagtgctgatggatttgaggttacctcaagaagtgagatgtcttcagggagtgagatttcccctgtgagtgaaatgccttctagtagtgaaccgtcctcgggagccgactatgactactcagaagagtatgataacgaaccacaaatacctggctatattgtcgatgattcagtcagagttgaacaggtagttaagcccccccaaaacaagacggaaagtgaaaatacttcagataaacccnnnnnnnnnnnnnnnnnnnnnnnnnnnnnnnnnnnnnnnnnnnnnnnnnnnnnnnnaaatccatgtaatgcagaatttcaaaatttctgcattcacggagaatgcaaatatatagagcacctggaagcagtaacatgcaaatgtcagcaagaatattttggtgaacggtgtggggaaaagtccatgaaaactcacagcatgattgacagtagtttatcaaaaattgcattagcagccatagctgcctttatgtctgctgtgatcctcacagctgttgctgttattacagtccagc

SEQ ID NO: 317972 - DNA, 1219 bp, Homo Sapiens
  misc_feature (592)..(649): n is a, c, g, or t
ggttaaaaaagtttaatgagctgtaaaataaatacacttccattaaatattaaataaattatttacaacttgaaaaaatactttttaccttcgtgcacctttatatacagaaatagcataaaaagtgacaattgaaagtttaaaaccatcataacaaaaagggtccattgtcttatgatccactggaaagaggaccgactcatcatttatggctatgacttggcagtgactccaatgtgatatcctgtaattttatcttcagttatgctatagcatgtacatttccattctcttgtcgaagtttctttcgttcctcagcttctccttcatatttcctgacgtattgtcttctaagctggactgtaataacagcaacagctgtgaggatcacagcagacataaaggcagctatggctgctaatgcaatttttgataaactactgtcaatcatgctgtgagttttcatggacttttccccacaccgttcaccgaaatattcttgctgacatttgcatgttactgcttccaggtgctctatatatttgcattctccgtgaatgcagaaattttgaaattctgcattacatggatnnnnnnnnnnnnnnnnnnnnnnnnnnnnnnnnnnnnnnnnnnnnnnnnnnnnnnnnnngggtttatctgaagtattttcactttccgtcttgttttgggggggcttaactacctgttcaactctgactgaatcatcgacaatatagccaggtatttgtggttcgttatcatactcttctgagtagtcatagtcggctcccgaggacggttcactactagaaggcatttcactcacaggggaaatctcactccctgaagacatctcacttcttgaggtaacctcaaatccatcagcactgtggtccccagaaaatggttcacgcttcccagagtaggtgtcattgaggtccaatccagcagcataatggcctgagccgagtatcaagagcgacagcaccaccggcgccggcggtagcagcggggctctcattggtccttcgcagcggcggcgtctcggtctctggggcaactcggtctctgggacacgagctgccgccaaaacgagcgggtgttggaagagcgagtggagaccgggagtgtgcgccgctctcgaaggcttggggagctcggggcggcgggcgcggcgcctcgggctgtcccgggacctctggggcgctggcacccaggt

SEQ ID NO: 317973 - DNA, 981 bp, Homo Sapiens
  misc_feature (579)..(643): n is a, c, g, or t
ggagacgttcgcacacctgggtgccagcgccccagaggtcccgggacagcccgaggcgccgcgcccgccgccccgagctccccaagccttcgagagcggcgcacactcccggtctccactcgctcttccaacacccgctcgttttggcggcagctcgtgtcccagagaccgagttgccccagagaccgagacgccgccgctgcgaaggaccaatgagagccccgctgctaccgccggcgccggtggtgctgtcgctcttgatactcggctcaggccattatgctgctggattggacctcaatgacacctactctgggaagcgtgaaccattttctggggaccacagtgctgatggatttgaggttacctcaagaagtgagatgtcttcagggagtgagatttcccctgtgagtgaaatgccttctagtagtgaaccgtcctcgggagccgactatgactactcagaagagtatgataacgaaccacaaatacctggctatattgtcgatgattcagtcagagttgaacaggtagttaagcccccccaaaacaagacggaaagtgaaaatacttcagatnnnnnnnnnnnnnnnnnnnnnnnnnnnnnnnnnnnnnnnnnnnnnnnnnnnnnnnnnnnnnnnnntccatgtaatgcagaatttcaaaatttctgcattcacggagaatgcaaatatatagagcacctggaagcagtaacatgcaaatgtcagcaagaatatttcggtgaacggtgtggggaaaagtccatgaaaactcacagcatgaattgacagtagtttatcaaaaattgcattagcagccatagctgcccttatgtctgctgtgatcctcacagctgttgctggtattacagtcccagcttagaaagacaatacgtccgggaaattttgaagggaaaaagcttgaggaaccaaaagaaacttccgacaagaagaaatggaaaaaggtaccatgcctatt

SEQ ID NO: 317974 - DNA, 378 bp, Homo Sapiens
agatggactacattcctcattccagctgaggagagatctcacaaggagaaaggagtgctaaggaagagcaagaccccacagccttccactgttggcagtggagggacaaggtgagaggagccaggggtagtcatgaacaccagtgggttctgccctgggcagctccccaccttctttaagagagtactgtgtctcagctccagcagtctcaactgggaagacccaggactcctgctcttttctctaatccctgggagacgaggtccagctaaggtagagtaagcagtcagtgaccaggcaggctggtttgggaggtcactgcctggaggacgggatcttgtattcttcggaagatggctgggaaattctctcgtgccg

SEQ ID NO: 317975 - DNA, 1836 bp, Homo Sapiens
  misc_feature (1467)..(1510): n is a, c, g, or t
ccccaggtcaagtcttacgcagggagaggacaggaggatggtagaaggcatatgatacatactccaccctttcctgagaaatggcagaataggcatgtgtacacatatacatgttatcccaggatccacaaagcaaacagaagtggtaattgagcctagcaagcagtttagatggactacattcctcattccagctgaggagagatctcacaaggagaaaggagtgctaaggaagagcaagaccccacagccttccaaagatcccctatggtccaaagtcctttgaccatctcagtcagctgctttgttttctgttggcagtggagggacaaggtgagaggagccaggggtagtcatgaacaccagtgggttctgccctgggcagctccccaccttctttaagagagtactgtgtctcagctccagcagtctcaactgggaagacccaggactcctgctcttttctctagtccctgggagacgaggtccagctaaggtagagtaagcagtcagtgaccaggcaggctggtttgggaggtcactgcctggagggacgggatcttgtattcttcggaagatggctgggaaattcttccctcccattacgtagaactttcttcccctcctcagttgaggtgcctagatgtcccacaacggggtcttcactccggtcctcccagaggcacacgctcaaacagtgggtgctcttcgaaatgagtgcacatccagtcgtgtagctccagcacatcggttatggtatacaccagccccccaactcttagcacgtaggcatattctgctagcagggtgggactgatgattcgccacttgtgctttgtccgcttgaaatgtgggtcggggaagaggaagaacatctttgtcagctggcccttgtagaagaagttaggaaggtgcttcatggcattgctacggagacaggcgatgttctggaagccacctgcaggagctgcgcgtagggcccgaatccggtcttgtacatagtctgagaccttcacccggatctccagacccagaataagtgtgtctgggaacagcggtgacagttccactaacaggccaccatagccacagcctatgtctgcaaactccacttgggcctgagctctcttttctttcttatcctttgggtcatcgtggctctgattttgagtgagtggagcgaagaactctgggtatagctcagaccagtccatctcctctggcttcacagggtagcgcagcgtgtggtccgccatggggttggagtgagcacgttgccggtagtagcgcttctggggcggtggggcctctgctccggccacgttccgagtctcggctgccatgatcccagtccggggtttctctaccaaatccacgtggaggcgcaggccagaggcgcaagttaatgacgcagccatgcgcgttggtggcagttcccgccccttaaagacccaagagcaaattcannnnnnnnnnnnnnnnnnnnnnnnnnnnnnnnnnnnnnnnnnnnaaggagcgagtgctggagggaacctccgcaccgttagcctccaactgggagggcgaggccaggcccagggacccaacgttttctcttagcttgcttctgcctggtctgggttaccatcctggttgcaggcacctgtgcaccccacaggtgagaggggtctagagacctcgccttctacagtggcatcagtcctcgctcctgtccccttactcctggtctcggaccagtccgcccggtctgactcttgtggtcccgtgtgggtttcgtcgagtgtgcgctcggggccggggcgggaggggcagccctcgtgccgaattcgccaccca

SEQ ID NO: 317976 - DNA, 547 bp, Homo Sapiens
tgcattgtttttcagctttatttcaaatgctgtgtagcataagaacctagccgtcagacatcattttttagctatgaaaaatatgaaacaaggcatattctaaagtgctgaaggaattaattgccctattagataacgaatacctggaggaatgaacagagtgatttatggcttaaagtgcttgggtctgatcatcatcttagcctctttgaaggaggacttgtagccaccagggtgtgcctcacttacaccaggccaggtaccccagaaaatcccattacggacacctctgtatttttggtgataatatttgccatttaagtttgcagaaagacatgcatcaaaccaccagcctgaactgtagtacagcccacagttcccagaaggatatcgatcattgtctttatctggagtggtggaaaacttcagatcgtggttgtaatgtttggttggaacgtaatgcatctccagctgtgccattaataggttaccaacgtgtaacggatatttgagaaactcattagccaccataaactggttcatacaa

SEQ ID NO: 317977 - DNA, 603 bp, Homo Sapiens
  misc_feature (22)..(22): n is a, c, g, or t
  misc_feature (40)..(40): n is a, c, g, or t
  misc_feature (59)..(59): n is a, c, g, or t
  misc_feature (71)..(71): n is a, c, g, or t
  misc_feature (107)..(107): n is a, c, g, or t
  misc_feature (118)..(118): n is a, c, g, or t
  misc_feature (175)..(175): n is a, c, g, or t
tccaagaagaaccttgggtccntccttttttggcctttangggtaccaaaccagggagncaagggaaaggnatccaaacaatttctttgaaaagcatacctttctanttcattttggnctttttttgacttgggggcgccagtgtagagctgagcactccacttgccctttctcnactcacaaatgtctgcataggtacacgtccggcacttccaagcctcctccacgtcaactccctggggctctcggtggcccatccagtaggccatataatgctgcaccttggctctcacctccttctctttgaaggctacaatctcagtacccagcacagtggcagtctcttggtggatatactcaatcttcaagatatcaataactgggaggtctgacagtgttagagacaagaagacaagttccatgaggtcacccaaagacttcactagacacaactttgtgtggtggattaggctagcaggggtcacttttccttgtaccatggcatcaaagatatatttgtataggctgacttgaaaacagtctttcttcttctgagcttccagagggagcatagggcgcctgcgtgtcttgagatccgccagc

SEQ ID NO: 317978 - DNA, 1823 bp, Homo Sapiens
  misc_feature (66)..(66): n is a, c, g, or t
gcactgcttgcttggtggcggagctctctacctccgtcccgaggcaacccatgggctttggcttcntcacgttccaggcggaagatgatgctgatgacgacttctcaccgtggcaagaagggaccaaccccaccctggtctctgtccccaaccctgtctttggcagcgacaccttttgtgaacccttcgatgactcactgctggaggaggacttccctgacacccagaggatcctcacagtcaagtgacgaggctggggctgaaagcagaagcatgcacagggaggagaccacttttattgcttgtctgggtggatggggcaggaggggctgagggcctgtcccagacaataaaggtgccctcagcggatgtgggccatgtcaccaaggaagggggtcttcatgcagccggtgcagagctggtccatccagaggggtgcctcgtgctgcagcggcgtacggcgtgggtagaaggtgaagtccacgcggtagttgagcaggcagctgagggaggccatgtagaggtcagagaagcgcacgaggcgccttgagaagtaggtggggttgtggaaggtgcggaagatgctgccgaactgcgcattgaacagggccttggtgatgcacctcagctcctgccgctctttcatccaggcagccagcacctgcctcgactccgcgtcctgataggtctgcatgcgctccagcagccccgtgagcgcctgctgccacgtcagcgagtgcatgtactgctccgtgttgatgatgcggatctcacgctccagctcggggatgatggcgcctgtgcgccagccgtgccgcagcatgagatccgccagatcactatagaggtggtccccgaagtagagcacgcgggggccacgccattccgtcaagcgtaagaagtcaaacaggtttccctgccgatagatcttgcccttttccaagcgggtgatccggtcccactgaagtgagcccttctcatcgagttttctgaaaggcttgcgccggtcagtgaagaagctgggcttgtctgcctggacaatgaccacatcgaagagctggcgccaatcgggacccaccatgtgccgcatccccttgtctacgaagctgaaaggactgttggtgatgaggaacagctgtttcccatgggccaccaggcggctcaggacagcaaacgtctcatcccctctcaggatgtacttctccatgtcctgctcgatccactggtacatgaggcccttcacatgcacgtctcggatggcgtccgtcacgtccttgtagagatgtgcttggtcaaactccaggctgtggcccagaaagtagtccaccacacaggacagcagagccatctccggtagcgagaagatgtccatgaactgcttaatggagggacccttgccatagaagccactcatctggtatagtgggatgtgctgggtacccccatacagctcaatcacctcctcgtctggcacaggctggaggcccctgtaggctgtccccagctgcacgtagtggaaggcgtcaatcttcatcagaaggctcttctgaatgtcatagtggaggccacggatggcaaagctggggttgtagtcatacttccgaatcccttctgggtacttgtagtgctcgatcaggatgtcacgggcggtactgaagatctcggggtgcagtgcgtctgcatactgggccagggtgtagtcgtagtcaaagccgtagacctcaacgtcacgcaggctgatctcgttgttggcgtagatggctgctgggttcaggagactgcagacctcggggggcaggaggtcgtgcaccagtctccgcatg

SEQ ID NO: 317979 - DNA, 1386 bp, Homo Sapiens
  misc_feature (49)..(49): n is a, c, g, or t
  misc_feature (176)..(184): n is a, c, g, or t
  misc_feature (309)..(322): n is a, c, g, or t
  misc_feature (563)..(563): n is a, c, g, or t
  misc_feature (1344)..(1344): n is a, c, g, or t
  misc_feature (1348)..(1348): n is a, c, g, or t
  misc_feature (1375)..(1375): n is a, c, g, or t
cgtgaaacgtgatttgatgggagtggcgtctccccatccactagagcanggaataatgttgtgtggccctctagggttcccagccccgatagagatacgagaggggagggtgtgttttttgtgacgatgcgcacaacgaggggaggggagggccaagtcaagagacacgtcgtgtnnnnnnnnntcccgccgaatacgggggaggggagccgccgcgttatgtggtgcggcgacgaaaggcgcggggaggtattataacgtgggttggcgtaggtgttcagcagataagggggtgtggggaagagtctnnnnnnnnnnnnnnggggtgtgagtgtttgggaagccctagtggcccacaatgatttttaaggggatgagaagcgcaccctccactgttgtgggagggggtctccacaggggggagaagaggcgccccaacctgtggagggggggccgcgcccccctgtggggggagcaaaaagctttaaaggctttgggagtggtttttttcgtcgggaaacagcggtgtgcgccggggaacaaggaaaatctccttctgtcanccggaacatctggcgcccccacgtgtgaacacacaaggaggccccccggggggttgaagggcccccctgcgaaggctccctgtgccacgtcttcttttcatttccgagggcaagccccagccaccctgggccctgggacctcgcgcgttcctggatagggttctggcaaggcgcttccagcaagcccccgtggagcgcctgctgcccacggtcagcggagtgcatgtactgcttccgggttgatgaggcggttctcacgctccagctcggggatgatgggccctgtgcgccagccgtgccgcagcatgagatccgccagatcactatagaggtggtccccgaagtagagcacggcgggggccacgccattccgtcaagcgtaagaagtcaaacaggtttccctgccgatagatcttgcccttttccaagcgggtgatccggtcccactgaagtgagcccttctcatcgagttttctgaaaggcttgcgccggtcagtgaagaagctgggcttgtctgcctggacaatgaccacatcgaagagctggcgccaatcgggacccaccatgtgccgcatccccttgtctacgaagctgaaaggactgttggtgatgaggaacagctgtttcccatgggccaccaggcggctcaggacagcaaacgtctcatcccctctcaggatgtacttctccatgtcctgctcgatccactggtacatgaggcccttcacatgcacgtctcggatggcgtccgcctcgtgccgaattcgccacccaggcttcntacnttggggggtggagtttattacaacaanaggcgcgagcg

SEQ ID NO: 317980 - DNA, 420 bp, Homo Sapiens
  misc_feature (21)..(21): n is a, c, g, or t
  misc_feature (302)..(302): n is a, c, g, or t
tctcaagctccaagctcgggnggatggaaatgcctgtgcgccaagccgtgccgccagcaatgagatccggccagatcactatagaggtggtccccgaagtagaagcacgcgggggccacgccattccgtcaagcgtaagaagtcaaacaggtttccctgccgatagatcttgcccttttccaagcgggtgatccggtcccactgaagtgagcccttctcatcgagttttctgaaaagttgcgccggtcagtgaagaagctgggcttgtctgcctggacaatgaccacatcgaagatggcgcnaatcgggacccaccatgtgccgcatccccttgtctacgaagctgaaaggactgttggtgatgaggaacagctgtttcccatggccaccaggcggctcaggacagcaaacgtctcatcc

SEQ ID NO: 317981 - DNA, 509 bp, Homo Sapiens
attcggcacagagcagaaatggaacttccggatctgaaattagccaatataatgttcttttgtatttgggtatttttcatcttaatttttacagcatatactcttcttaccagtatccttagaatccaaatgtctagataagttgaggacacatacctgcattgttgagcttctctactggggacgccccggcattattttattcccaagccagcagaccggcccagacagccaggctgtggctgggtccagaccaactgctatggtggaaaatgcagcttccaggtcccactaccctgacatttccgtggaagggaagaacctgggtggctcgtggaggaaaccagctttctatgagaaaggactgaaggattgcgcaccctgcacaagtacagattgaccaggcaggccagcaagcctgcagcagcaggtgcccccacgtcaggtgctgactgtccgctgtccgctcctgtagaaggtagggagcacaatacctagggactaaggga

SEQ ID NO: 317982 - DNA, 449 bp, Homo Sapiens
  misc_feature (73)..(73): n is a, c, g, or t
  misc_feature (160)..(174): n is a, c, g, or t
tcttcagttatcaccttacttttggtcaaaaaaatcccatggggacatttggcgagcatttcaaagttttttnaagattccttgaggagggatggagttttcaaaagcataatacaacttgtagattaaattctgcaaaatttgatttcttaaccaaggnnnnnnnnnnnnnnncaaaccacaaccggcgaacatcccttagtccctaggtattgtgctccctaccttctacaggagcggacagcggacagtcagcacctgacgtgggggcacctgctggctgcaggcttgctggcctgcagagaaggccactcctggctttccctgtgacacacagaagacacttgtcttttcctggtcaatctgtacttgtgcagggtgcgcaatccttcagtcctttctcatagaaagctggtttcctccacgagccaccaggttcttccttccac

SEQ ID NO: 317983 - DNA, 447 bp, Homo Sapiens
  misc_feature (70)..(70): n is a, c, g, or t
acttccttccccccgtggtggaagtggtgtgcaaagagaaaagcaccaccccagcaggaagagggacccnagcctgcccagggaaggttttgaggaactggattctttatcaccccatttctccccttgtgggttcccacagaggggttccatgacctccctgttgttgagaacagggctgcattcagagaacagacgatgggcctgggctgtgagagcaatcagaacactgtgaaaataggagggctcgttggatcccaggaatcatacacagactgcgttggggctgtgggaagccaaggacagaaatgtctccttcaccccaaatgataagggcaaggattttcaaggcccagagggagaaatgttgcatttgcatttatttaagtgctgatgttggtcagcagcgcatccagccatgtctttagaatcctctgaatggccaga

SEQ ID NO: 317984 - DNA, 592 bp, Homo Sapiens
tacagaggtagtgctgaaatgctattgctattagttataatgaaatttcgtactaaagagtttccttaggtctgttctctgaccagcttttctagggcgagttaagcagcgacatggactgttcgtacatcctttctcattttcattctctcagaagaaatattcaaattattttagtcatctgaatagtagaagaaacactattctaaaaagttttctgaagtaaaagaaaaatgtcacaaaaacatttgagttacttaacttgctttgtcctaaagctattgaattaagaaagtttctcatcttttagaagtaaattatttcagaattataaaggtactgatcaggaaattatgctactcccaacacatgacaccaggtaaactcattctcaatgagaagggttaaaccatcagtcacagaagattcatacgcagtaaaatcaatctgcacattaatcccaactcttctaaaaccctccaatttaaaccagttttcccttgtgaaatagcaaagagagtctctttcagacacataagttgggcccacaaagtgttcacttgttgaaagtgctggggcttttttattattt

SEQ ID NO: 317985 - DNA, 643 bp, Homo Sapiens
  misc_feature (273)..(273): n is a, c, g, or t
attcattttctcgtcttttttgtctgacatctgtctactctcattacatacatcagctacacaaagaaattttatgtcttgttcctccagcatctccacagtacctagcacagtgcaacatacagttggggttcaattaatacttgtcaatgcaggtgaaattgagaggacagacttgggaatcaggccttgattaaatcgtgctttgaccctcctctctgtagctatctgcactcccttggcctcactttcctcctctgcgaaatggacatnattcggatagttgagtagatgtgcaactattgtagatgaaaataaatattgcaataaagccagtagcagggataaaactaagtacatggtggctggggttactattattagtctcctgggtgtgactgtatttatagactggggctcttgagccctttgctgacttctgaagaaccacacctccaccaggctctaagtcaggggtagctggaagccaccctggcacacttccccacaatgtctatctacagctctaaccactcaagtgttcacctcttcaccctccagctcccagctctcgcagcttgtcttcaccgttcctctttcctctccaaggccacctggactctcgcattccggtcctttaaat

SEQ ID NO: 317986 - DNA, 577 bp, Homo Sapiens
ttctcactttctggtttcttcggaccttccacattaggatgatattgacatatattcttgaatagacgtttggtcagtttatctaactgaaaaaaatattagactcctgtgacctgcgctttgtgaacaagtatacaatcatttttcaaatgaatctcccaaatcattttagtttctattgatatgaagaatcaaatgcaggcctattcaaatcaattgtctcaatggaaattctacttttcaaatctaaaacccaaataataataattatcctcaaatccaattaatcacatgaatctttaaagttttcttcttagtgttaaaacactttcaacatactgtacctgcataggaacatcaggaaaacacacttgacctgtataacaattctctgtagggcaaaaatatatagattctttatgaaaatcatgtgctaaacatacgaaccaaacactgcactttttgtctcataagtgtaaaaaaaggaagcttagcctcttctgtttcacgtacacacagtccagtgatttatatcgggggtaggtgggagtggggaggtgggagagtttcagaatct

SEQ ID NO: 317987 - DNA, 840 bp, Homo Sapiens
acaaaaagcattccacctagcaactcctcctcccagtcctgtaaagaataacattgtcccacttgaagactcgagctggtcccactgtggtccatggatggagcaagctggagcctcactggaaacaatagtgagggcccagggtgaggcacttaagaggtccgtcatcaacagaaaggggatgtcagcataaaccctttcccaggtgctcaaacttggtagaaacaaatttaaccgcaacatcaaatggaaagactgtttcaattgttacagtttcatccttgtgacacttgcaaacaatttctttttcttcaacggttgtatttatcaggtaagaaacatatacaagaaacattctggaacccactgttccacagcgaacatacaacattttttccagctgttcccctggatgtaagtctccaacaggaatgtcagtgagtaaagccgggtaggattcatcacacagttctgttccatgaagagtcacgtgagtcttctgagttaaattggcatcctgtcctggttttaagccagcggtgagcttcacatctctgatttgggtcttttcatgggactgaacagtcacaaccaaacaatacatttcattagtcagtgcagggggttcatgtagcagatgtacagaaatgtttgggactctggatatgatcattgtgcttgcctgaattataatgctgtcccagtgaacttcattgtcaggtagcttaggtcgccttttgaaagaccgagctgcctgtaaggcttcttgggaggaagcagcatctcctcctcctccctgccaatttaaaaccacacatcttcccgtctcattgcccagag

SEQ ID NO: 317988 - DNA, 1506 bp, Homo Sapiens
tccttgtgttagtacttcagagacagccctgtccatagactttattatttggaagggggaagaggaggtccttggcactggttgggatggaagccccaggggaaaaggtttaggagttccagggctcagctgtcactgggcagggcaggcacactggcaagggcaggcagcaggcgtgtatatatgtccaccccacggaggaacacagcctcatgcagccgttcatcgtggtcgtgcagcagcacaggtgtcgggttcatgggtgagaagcctagagctgggacccccaccgcgcggatatagcggttgtcagtggcagcaggcatgatctcaggctccagagtgaggttcatatccttgcagacccggctaaaagctgcccaccaagggtttgagtcatcagtaggtgtcacttgggggtgcatccacttctgagcaaactctagggtgaccccctcgccagctgcctggcaccagctctgcagctgctcctcaaaagccttgaagtccacatccggtgccacacggaagtcaaagctggcgctcatggtggcaggtatcacgttataggccacgccaccctctagcttagtcaggttcacggaggtcacggacccctctttcaggtgggggtttgactgcagcctctgccattccttctcccggaatgccaggatggagtttacaaccttgtgcagcttctctgctgctgtgtcctccatgaagcgtgaggcatggcctggcctcccagtgctggtaacccgcacccaccagggactccgctcactataaaagacagtgaaggcatcagtgggattggctatgccctcatccagggcaaagcctgccctcagggcgtggaactcaggccgctgcacgaacagctccatgccttggtgacccccaacctcctcatcaggcacaaaggtcatgtggatggttctggggaaccggtggccctccaccttcagcctcctcacagcttccaggtactggatgctgacgcacttcatgtcctgggcacccctggcatagatgtagccctcagaatccttgaaggcctcaaaggggtcgtgactccaatgttccttgaagacaggcaccacatccgtgtgggagttgagcaagatggaggagagtgtagggttggtgcctggccaggtcaacacggtcaccacatagccaggtgccacctctactttctgacagcccaggcccagctggcgggctgtctcctcaaagaaagccacagcagctccatagtcaggcttgggctggacagtgcggatacgcaggtactggcggaagagcgtcaccgatgggtgctcctcctcgggacccttgctggtcatggcgctgcgcgtggtgagctcactctcctgtcgctgggctcacgctcgcctctcagcgcccttccctgactgtggcctggacttagggtccagcgaggtcgcctgcgaggtcgcaggctcaggaccgccccggtccgcccaccacgtggccgag

SEQ ID NO: 317989 - DNA, 418 bp, Homo Sapiens
  misc_feature (16)..(16): n is a, c, g, or t
  misc_feature (32)..(32): n is a, c, g, or t
  misc_feature (95)..(95): n is a, c, g, or t
  misc_feature (360)..(360): n is a, c, g, or t
aacccctggcaataanatttaacccctcaaanaatccttgaaaagcctcaaaaagggtccttgaactcccaaatgttccctttgaaagacaggcnaccaacatccgtgtgggaagttgaagcaaagatggaaggaagagtgtaagggttggtgccctggcccaggtcaacacggtcaccacatagcccaggtgccacctctactttctgacagccccaggcccagctggcgggctgtctcctcaaagaaagccacagcagctccatagtcaggcttgggctggacagtgcggatacgcaggtactggcggaagagcgtcaccgatgggtgctcctcctcgggacccttgctggtcaatgntgcgcgtggtgagctcactctcctgtcgctggctcacgctcgcctctcagcgcccttc

SEQ ID NO: 317990 - DNA, 766 bp, Homo Sapiens
tttctgtttttaccattttatttttgtttacatatttgtttaaaatcagtgaatttctttgccaggttcagataactgaagggcctttataagtagtttatattgttcagacccaaggtatgctgaaaacatagtctggagcaaaataggaaataacatctttctaaagacaggcttagaagttctaatccagtaacttaagatgttccctttgtgtggtaacagagctgattgatacctggctgctagaccaccatttacaggtatagccaagaaaacagggtatagaccaccaataacaagaccagtcagtccactccgtgttatggtacaggtttcacaatccaaatcacctgtattcaaaggaaaacttacaaaacatctgtaagttaagtctgttgtaagaaaaggtatccctgccattggtaagccagcagctatgcgagcctttgtcacattcaagatgcgtcgaaaaagactgtttgctatgaggccacaaagagcagcatttaatccaacataaaccgatccattttcaagtagattcctttctgcttctggaagctggttaatttttctggatatatcaacaattgttatgttttccttattattggatttatgattttccattttgagccttatgctctcctcccagcagcctgtgggtgcctcctccttcctcagccacgccggagttcactgtggcctttgctcaaattacctgggcgcagccatctttggctgactcgtgacgcggcgtccc

SEQ ID NO: 317991 - DNA, 847 bp, Homo Sapiens
tgtaattgtatatttttatgattatgggagaaaacctgtcatgcatgtcgtacatccttcttgtttatcatatgaggaactgaggcacagaaagttttctgactcccactcagttttccatgtccacggaatcagcactggcctcttcaccgtggtggcagaggatgatggagcatgcatgccacatggcagcagagtgggacacacccagtggctgcaggggcgctgcctccgtgttgacccggcctggcctcacctgcccttcaccattctgcatgtgccacctgacccgtcaccaccacacccgtgcctggcatgcccacctcagatggggagctccttgattgaccaaactttatctggaaactggcagccactccaaagaaagagttgactcatttttccctctttcaagttgggtttgaacaaatagaattacttcattggcttcctcctccactgccctctggagaattaattccatctctggaactgctggtcccaaggaaggctcatggctgtccacgagggccccctgtgcaggcactgccttgaggggagcggcccggagcccttactgcgctgtcagcatgtctccagccagagtgcctgccagtttccatgtcctgggaagctgctcatgttctcctggaaaaagaagcacataaatcaaaagcagaacgctttctcttgcttcatgtgttcctggattttgttttttgaatcataaacatcatcttgggtggctactgtaacacacaggttttgttcttgaatacttcagttcaagtttctcacaaaaagtatgggacccccaccacctgtgtgctagaattccatccacccc

SEQ ID NO: 317992 - DNA, 1093 bp, Homo Sapiens
gggggtgtgggtggggagccccccttttcggcgtattcagctcgtagggctacgcgcggtgaggcggtgggtgggatgcgcagtggcaaggtgaggcttgggcccgttgcccccgtgccatgtttgtcgcggcttttgttcgtattcatagcggcgctcaagattcggtgtggattggaatctgtgtgcagggcagaaatcgaggaatcgttgcgggggtgtggttgatggcagtcaaggcattcccatggtttgtgccttcggtaagtcaaagtagcaagttagccgttgcggcatttgcctcaagcacagcagtggctgtgccgcagataacatggtccaaaatattcaattgtatagataggccatggtattgaatgcatggttaagttttaggaaaggcatatatttcctgaagtatgtatgttaaatacacaaatatctataaataacaaaaagttaccagcacaaacgtttaggttataacattcccaaacttcctaacattttaagtgttttagatatatgttgtctgaccagttcgtttggttacagttttaaactagcaaaccattaccctgtaagaggagctaaactaatctataacactgcacaaccttcccaaggaaggtaccttgaaaagtctaaaaagtgattccaattattctaattaacatttgagatgctaaaagaatcaatgactcaagaaacactttgaagtaattccatttttctttatcattttctaaaaaagtattcacataaatttaagatccagattgcttaagagtatgtcttcaaagtaggtttatcactaaagcattctgatccaaagacatagtcttaatgcttctaatatgtaattctaacctaaaatcacaatccttggtttgaaaacatcaaagctaagaaccaaaaaaataaatcagggtgaaagtgtgcagcagctatagctacaagagtggaaaataaattctattttttccataaagactctatgaaaatataaagcccagagtcagtgacaacagaagtaaacatataaatggtgtttaaaaatagaaagtctctcgtgcaaaattcgtgcagaaag

SEQ ID NO: 317993 - DNA, 604 bp, Homo Sapiens
ctaaagaagaaaagcaccaacaactttatgattgtgtctgccactggccaaacgtggcactttgaagccacgacgtatgaggagcgggatgcctgggtccaagccatccagagccagatcctggccagcctgcagtcatgcgagagcagttaaaagcaagtcccagctgaccagccagagcgaggccatggccctgcagtcgatccaaaacatgcgtggggaacgcccactgtgtggactgttgaggacccagaatcctaagtgggccagtttgaacttgggagtcctcatgtgtattgaatgctcaggtatccaccgcagtcttggcacccgcctttcccgtgtgcgatctctggagctggatgactggccagttgagctcaggaaggttatgtcatctattggcaatgacctagccaacagcatctgggaagggagcagccaggggcagacaaaaccctcagagctctttctggccccactaccctgcactgagctgtcccttggccagcagctgctgcgggccaccgctgatgaggacctgcagacagacattctgctgctgggacatgggttccgtgaggaggtgaacgaagaactgggg

SEQ ID NO: 317994 - DNA, 691 bp, Homo Sapiens
  misc_feature (104)..(104): n is a, c, g, or t
ggcaccaaggagactgcagtcaaataaaacagatactacacacacttgtcggggcagccgtactgcagaagcacgttgatgcactcctggctggaggctgccgngcgtaggtcagcgctgtgttcccgtgggcaatctcggggccatgacgtccaaccccggtaccagatcagggagctgcgccaggaccacattccccttgcggcaggccagatggagcgccgtgcagccgtctccctccccacaggtctcgttcacctcgtcacgggagccatgtgccagcagcaggatggctgtctgcaggtcctcatcggcggtggcccgcagcagctgctggcccagggacagctcagtgcagggtagtggggccagaaagagcttctgctcgtatttggcacggatccaccgttccttctcttcccttgtggagttttctgatggttttgtcctcccctggctgctctcttcccagatgctgttggctagctcgttcccgatggatgacatcaccttgatgagctcgactggccagtcatccaggtccagagatcggactcgggaaaggtgggtgccaagattccggtggatccctgagcattcgatgcacatgagggctcccaagttcaaactggcccagttgggattctgggtctcgcagtccacacagtgggagttcccgcgcatgttccgg

SEQ ID NO: 317995 - DNA, 793 bp, Homo Sapiens
  misc_feature (153)..(197): n is a, c, g, or t
tctttagggaaggcaggcccggtaccaatggccattggtagatccgggggctaaaaatcccacttggaatgaatcccaggaagcaaagggatgtccaacatcccatcacccatctgtttcaaaaccagcatgtttttaaaatgataatctctnnnnnnnnnnnnnnnnnnnnnnnnnnnnnnnnnnnnnnnnnnnnnggatgagctccagatgccctgctgacttccacccaagcacccctgggccatcgcttaaggcatccatcttaatcctggggctttaagaacatcttctttgctttaattggtgttatgtctccattttcatcttcttcataattggcatggtctctctttctggcaaactttttcccaattgtccccaccaaggtctcatatcttctagccatctcttcatctgacacatcaagctctactgtttcatcttcaacttcttctgctttgtgcttagcattcatctgaagcatcaatttctcaacctcaggattaaatcctctgaatgacattcttccatagagaagatcttcacatagtaagaaactctgctcttctattatgaaactctctttctctttaagctctggcaaatccaagtaccagtgctcttcactaatgattttcttttcttcttcttctagttgtttcttggtttctgagtccagtcccctttgcataaacttcatgcgcagtagattcttggacaaccttgtctttcgctcggccgccatggtagcttccgcccagcgccgcactccggccgcgagcctctcccc

SEQ ID NO: 317996 - DNA, 1175 bp, Homo Sapiens
ggaacgttggcggggctaggctcgttaactgccgagagcctccgggtttgcggtggaggacgctgaggcccgtggggggcaggcacccgggcgccgggcctcccagccgacatgtctctagtggcggaagccttcgtctcccagattgcagctgcagaaccttggcctgaaaatgctacattatatcagcaattgaaaggggagcaaattttactttctgacaatgcagcttctcttgcagtgcaggccttttttgcaaatgtgtaacttgcctatcaaagtagtttgtagggcaaatgcagaatatatgtctccatctggtaaagtaccttttattcatgtgggaaatcaagtagtatcagaacttggtccaatagtccaatttgttaaagccaagggccattctcttagtgatgggctggaggaagtccaaaaagcagaaatgaaagcttacatggaattagtcaacaatatgctgttgactgcagagctgtatcttcagtggtgtgatgaagctacagtaggggagatcactcatgctaggtatggatctccttacccttggcctctgaatcatattttggcctatcaaaaacagtgggaagtcaaacgtaagatgaaagctattggatggggaaagaagactctggaccaggtcttagaggatgtagaccagtgctgtcaagctctctctcaaagactgggaacacaaccgtatttcttcaataagcagcctactgaacttgacgcactggtatttggccatctatacaccattcttaccacacaattgacaaatgatgaactttctgagaaggtgaaaaactatagcaacctccttgctttctgtaggagaattgaacagcactattttgaagatcgtggtaaaggcaggctgtcatagagttatgtgttagtctcaggagtcttaacttttgaaatatgttttacttgaatgttacattagatattggtgtcagaattttaaaaccaaattactgctttttgaaacctcaaattatataatgtatcttatgtatgtgctttatattgttatttgtgtatacattaaaataattctgaattatttaatctgatatgttgtattctgtatcttgaaatttttgtttccttgaaacatgcatgcatttaaaaaataaagcttaaacaactgt

SEQ ID NO: 317997 - DNA, 1539 bp, Homo Sapiens
gaatgcggcatcccacaaatgggccctttatttctgaactgccaccactgcacggataaggccacttgggttgcaggcacactgtggagtgtcaggggacagagaggagaggggctgcacaccaagactgccctgtcctcacggagaggaaaagcggccgcagaagagaatcccgttggtcttgctgtgctggatgaagaaaaggaaggggtggtcggcgcagaagcgggggacgaatctggcacaccgcatcatcatgatggcagctgtggcggctgcagcctccgtgccttcctcattgacctccacaaaagacttgtgcacgaccttggacagagacaggtctgtctgggacattccagagaagtctgccttgcccagctcgaaggcatcagtcatgcccaggttgcgcaggacactctccatgtcgtagctttcctctagtttaaaccgcgggagggacacttccacctcctcttcatccatcatgtccagcctcgtccattctacgaacttctcgtaagtgagttctttctccaccgttctcaagtcagtggtctcgtccggaagcatgatgatcatattcagttccttgccaacatatggaagcaccaagatttgggtaaatatttctcctatataggtcttcttaaaagtagattgcttaaacatcatttgcacaggtttctcctcattcttgctgactttaaacagtctctcctcggtgttctccttgtcaaactgttcatcccagtttcctctgaaatagacagcattcaccagaaccagccttgtcaatggatccactgagcccggagagagcaactccgcaattttaccttctgtcttttcagctacccaggtgtttatgtgttttctggacttctctacggcgctgataaagtcaagctcctccatctctgcttggtagaatttttggcaggaatctctaaaagatgagaggaaatcacaagacttttccccaaagagcctgttggccatcctaagcaagtactgcgtgccagtcttgttcacttcggtgagaagagactggaagccctggtggatgtctccaccaccgccacttttattgaaagaaagtatctgggccatctgtgcagcggtgtttccctttgcccccatgtagaccatggccagggcacaggacatgctcatgggtgagaaaaacacattcttcgagttgtctttacccagtgttttcaaaaggtttaaggcaaaggtgccatttgcttctgcgagaacatccatgatggcagactccagagcggggagcgagcgagcagaacggcgggcagaggcgccggagccgccccggacctcaaatactcgcggggaggcgggcggagtcccgggtctcgagctaccgtcgcccgtccggagcgcggagggagaggcggggcgggacgtgcgggtcaaccccacccgccagccggaggggccgcgagtcctgcccggaggccttgactttgaccacagtacagggccccaccagcgtgtttatggtgcctctgtggagac

SEQ ID NO: 317998 - DNA, 399 bp, Homo Sapiens
  misc_feature (303)..(303): n is a, c, g, or t
  misc_feature (314)..(343): n is a, c, g, or t
  misc_feature (351)..(351): n is a, c, g, or t
gttcttatgtccttggtgatagaaatgggtttggaccgcatcaaggagctgcccgaactctggctggggcaaaacgagtttgattttatgacggacttcgtgtgcaaacagcagcccagcagagtgagctgttgactcgatcgaaaccccggcgaaagaaatcaaacccccaacttcttcggcgtgaattaaaagaaacattcccttagacacagtatctcacttttcagatcttgaaaggtttgagaacttgggaaacaaagtaaactattaaacttgtacaaattgggtttttaaaaaaanttgctgccacnnnnnnnnnnnnnnnnnnnnnnnnnnnnnngtagggcnttgacattcacccaccttcccttatgtaggttggaaatatctagggct

SEQ ID NO: 317999 - DNA, 1057 bp, Homo Sapiens
ttttggaaaccaaatcgaagcagctttattgcaccattaagtacatcactgcatcaaagacagtgccacaaatgcaaatccaatcggagaaggtagccctgagacatgtggtggctgtgagggagaaggacccccaacccttgaggagcagcgctggaagagaatcattccttaatatggctccaattccagaactgggctttatcatcacagaaggaatggccttggctaaggctccaacataggtggagtcaagggcagttccccataggctgtggttcccctgctcctgtctcacagcctaagacagcttccagcaaaaggcagttcatccctttcaccttccatccaacctagcccacccttaataatgccggcagatgagaaattccattttaacagcgccaaagtttcctctcttggttctgctcagcacccatccctcacgtccatgagttgttcaaagggtgaacagcagtcagctctaccccagaccctgggctacagagaaatacggacctggaaataccaagtcagaggcagggaaaaggtaagggcaggctcataaaccacagaagggagaaacaaaagacccacatgatgggtcacagcagaggtaggcttaaaagtaacaatcctgttcaccctctcagaagccacttaaatagaagatccctgggggagaagatatcctgccccaggtccttacagagtgtagtattagggagagtgaagacctgattctatgccctgcctccaggcctgagagtgtcttggacagatcctagaaggccagacataaaggagtaaaaagcaggcactcagctggtttggagccaagcctacagcatcacatacctggcagcaaggaaaagagtcgggaaaaagaaacagaatctgttgcagaagtcccctcttctgcagggaggagttatgtaacagcagaagtggcctcctagcaagagaggctgcctggtttagaccagcagcttatgagcgatgatgaggacagccttcaggataggcatgaagctggacacctcgctggagctcgtgc

SEQ ID NO: 318000 - DNA, 431 bp, Homo Sapiens
gtgaggttgcgaaacacagatatcccctctgtctacgaaccacagccaatggtcagcctcctgcagctgtgctttcgccagctttgctggccttttgacttctgcattaacctgtgaaatgtcaaagagtgtttacgctattgtagatcctcattttgccttctggcgtgggtagagctgggattatgatccatccccttccttagcaatgaggcattctagggtttcatggtggacctgagatcctacacctagttaaagaaggacattaaactggaaacaaagttttatcactactgggttgagtgtcccccaccccagtcactttgggtttcagaaactttaggacaggcttacacaagattgtgcaagtgtgtctttcagccatttagaataatagatggaactaggagactctgtatttagtggcc

SEQ ID NO: 318001 - DNA, 575 bp, Homo Sapiens
ctctgtcactaggtattgccaatgaaaatggagggataacattcttccctgtccaagtcaatgttggggggcaggcacaagctgtgacaggctccattcagcccctcagtgctcaggccctggctggaagtctgagctctcaacaggtgacaggaacaactttgcaagtccctggtcaagtggccattcaacagatttccccaggtggccaacagcagaagcaaggccagtctgtaaccagcagtagtaatagacccaggaagaccagctctttatcgcttttctttagaaaggtataccatttagcagctgtccgccttcgggatctctgtgccaaactagatatttcagatgaattgaggaaaaaaatctggacctgctttgaattctccataattcagtgtcctgaacttatgatggacagacatctggaccagttattaatgtgtgccatttatgtgatggcaaaggtcacaaaagaagataagtccttccagaacattatgcgttgttataggactcagccgcaggcccggagccaggtgtatagaagtgttttgataaaagggaaaaga

SEQ ID NO: 318002 - DNA, 508 bp, Homo Sapiens
ccaagtactgtgcttccccatttccccaagtactgtgctcccaatttccttagtactgtgctcccatttcccagtactgtgctcacaaggtgtgagccaaacatgcccggcccatcagctcttaagcagcaagaggccctgcatctgtcttggctgtctggacagcacagttaagcaggtggctgcatcctcatgcagttgctggcagcctatcttcctggagatgtaaaccttcctgcaaggctggctcttctttgggtgtgatgaagatgatgacagagatggatgttgggctctgagggtcctggttcctttgaaggacatccaggggcctctgagatgatgggctctggttcctggcctgtagcatggtgtaggagcaggagcgctttgcaaggtagactctacaggcaggaccttgatggagtatggggtttcagggtggaagacgtggatcacaggggcacctcagctcgtgaatctcagtcttcactttcagcactgtcag

SEQ ID NO: 318003 - DNA, 350 bp, Homo Sapiens
tctggaggaacaggagtatctcatgacctgaatctggcacaggagtctgaccacagtgattctgctttttcacctattcctcacagcaagcccgtggcatttcaaatagacctaactcctcctcttcatctttctctggttttctcctctatgagtaatttggaacccacagtccagcttgagggtatccttgatatgcacaatgaatccaaaccgcggcggatgcagatttcaggatcatgctggggcgtggcccatttgggtgggaggagctttctgtcaggagttgctgggtgcggggtacgtgtgtgccctacagtgtggtgagtgagagcatgtgagtgtgtgcg

SEQ ID NO: 318004 - DNA, 515 bp, Homo Sapiens
ggattctaacactttattaagaggtcacaagccacaggactttaaagtgcatgaaatttattggcaatgaagccgcatgtataccaggctcccctagtccccaccaccttgccccatccatcatgacgtggtggggaggggttgagacccatctttaaaagtgggggacagcagggacaaaggatgggaaactggaggaacaggagtattcatgaactgaagctgggacaggagactgaccacagtgattctgctcactgaaggaagggtggggtcagtctagtctctcaaaggctggtgaaaagttttttttcacctattcctcacagcgagcccctggcatttcaaatagacctaactcctcctcttcatctttctctggttttctcctctatgagtaatttggaacccacagtccagcttgagggtatccctgatatgcacaatgaatacaaaccacggcggatgcagatttcaggatcatgctggggcctggcccatttgggtgggaggag

SEQ ID NO: 318005 - DNA, 815 bp, Homo Sapiens
  misc_feature (402)..(402): n is a, c, g, or t
gtgtcagggaagtccacgtttctggtgattgcgggtatggattggaaaggagattactcacaactgcccgtcccaactttgcttaagcaattccagggtgaggcattcgcaactttataaagagcaaattccattttaggattgctctagcttttaaaaaattcttcttaaagttgatccaaaattggcctccctgtaagcttctgaccgtttgtctgagttccgtactctggagccaggagggtcaatctacttccctccctccatgatagcaccttcagtaccagaggatggcagtcgcaccacctataagtctgtcttccttgctgcgcatcctttgtgccttcaaccgctctgggggggattccgactctctgcttctgtttgggctgcactccaccntttacaagctgcagctccctgtgggcccccctgaaatgtgccctgggttacatactgcactgcacacaccgtctgagctgcacagggcatgggcagagcattacctcctgaatttaggacactgttcttattaatgtgctccagcctccacaccatcacacttacgcaactggcgtttttcattccgtcagtcactcaacaaatattgccttcaagaaaattatttccataccaaaagctgagaattttccatgagatgactgagagacaaatagactaacaaaatacgtgtacttctgacctatggttgaacctgaaattatatttttccaacatttaaaagctaactacatcatttatcagttagtggttaaagggcaaagccaccatgcagaattcctcgtgccgaatcc

SEQ ID NO: 318006 - DNA, 1527 bp, Homo Sapiens
  misc_feature (373)..(386): n is a, c, g, or t
  misc_feature (470)..(478): n is a, c, g, or t
  misc_feature (1358)..(1358): n is a, c, g, or t
aagacatccctttccacttttgtcatgggcagtgaatactatagtttacaatgcctaccaatagcaaaggatcattcattcagctactcagttcctctgtaaaacaggtctatgtatgtgcaattcagctaagatctagcagtaacttaagggcagaagctggctctctacttacaacctgctttctctgctgaagccttacctcctcttcagtttccctcctagacacaaatcgaaaataatatactgatagctggttagtaacctcagtaagaattaaaactgaggttgtttactcattttgcctttaaatcttttatccccttttggtgaaggtttccctttaggaaaaaaggtgtcaaacaaccctgannnnnnnnnnnnnngcatcatttttattacaccaaattaaagttgggagttccaagatcccattccagttaatatttaaccaaggtctaaaatttgannnnnnnnnaaatctttgaatcctcccttctgcccctcatggatccttggttttaatgatatggaaacatctaattcttagaattattccgtagcttttgctgattactctgagatttcagttaagacttgtttcaaaagacagatagctgactggttcataatacattggaatagttggatccaaactaataagaataagctgtacaggaactagtgctcaatatacattgtataaatttgtggaaatctcttggatgtgaattgttacttcaagtggcttttattaagattttctcagacttacttggaggttaaagcaaacccaaatgtgtattattttgttacagagctctgctttataattttgtaataaagtttcaatactgacccacagaactggtgaggagaaagttgtggtgtttcacaaagatcttagaaggcatggggatttgcgggaaccttcgaaaagacagcactcactgggctttcgcaacaatcaaatggaacccacccgaacgctgctgtgtgcgtggggtataactgggatccatgggcgaccgcgccaataggattcttcccaatgtatatgccttattgcgccggccggaagccacaaaaaagaaacaagggagtggtgtggggtattcgctgtgaacccctttctaggcccagaccctggtttattcccattttggtgcagggccgcacctcctcgcaccccctcaaaaaaacaccccgcgcgtgagaatcatcattcccctgttgggtcgccccctgggccgccactataaaatgtttagcccgacttggtgggatcaatctgggcgtggctcaccacacaagcggatcaccctgccgtctctcgacactccagaagacaattagantaaatgcccggcgtgatgtctatcaagatcccgtgcctgggtggtgcgctaccgtatataacgaagaaccggtgtgcctaaacgccgctatggaaagcgcgcatatttatggaagagaaataatcgtaccccgcggtacgtctctatccgcaacagcgggtagatcccc

SEQ ID NO: 318007 - DNA, 678 bp, Homo Sapiens
tttagatgtggcttccatcgctttctcactttgtaatctagctgggtttgtttactcgtctgtaaaatggtttatagataatatctccggtacagaattgttaagtgctaaatgagattatgcaggtgaaatgcttgtctttgtaccgggaacatagcctttgtatctgccattattgttggactacaactgtacaattttagctcaagattatgttcatttctgccaggatgaaaccagcaagcttagttcattgcttggaattctgatagttaattgggttatagaaccagcactggtcaaccaggaaagccaagtcagaagatcagccctcaaccgttggctaggtgcctgatgagaagtgcaaaatatagaagattcagaccaattgggtgaaatttcttacatcatatatacttggaatgtaggaatttaagtatatttgggtattcatggcccttaaagcccaaatcaagacccagaaaagttgcctagataagatgtgaggtaaaccctaagttttacttcttctttcttcgacccagtcttttcaggccagcccttttattattaacttttctcaacctaggccatttgcgtaatttatccatttgccctagaccctgccaaaccctgaagagtaggttaaggtcatctcacattgttaacaggatcaaa

SEQ ID NO: 318008 - DNA, 662 bp, Homo Sapiens
  misc_feature (133)..(133): n is a, c, g, or t
aaaacgaaatagagtgaggtgagagggtaaaattcaacggaaagaatcattttattctcccaaggtggattcgttggctcatttttcgctgaaatgcctgagaaaaaatatgtcatccaagtagtaatgaacnccctgtaccaaccatacaggcttcttggaaacgggctttattcaaggttcaagggcaggagtttgagcatgggacatcttattgtattaaaaacaaagaaagctttcaaagatgaatgtgtgtctttttaaaaggacacagcagctagcagtaaggggttataacttgtcaaagttgtggtaagttgagcaccaagaaacataataattgtgtttatgaaaacacattaaatccatagaaatccataattccaaaatgacactaaaaaatgagagagccagagaacaattagcttgtcatctttagaggtagctgttaaaaccatttcttactttgaaaattagaaattacagggaaggaatgtagcatttatcctgtctttacagtaagaactgtatttcatgataacctagttgcccagcttgggagagaaagccctcttacggaagaatgccagctaataagagaagagaattcaaaagaattagaaaaacatcatttctcagctctaatgaaattattgattcag

SEQ ID NO: 318009 - DNA, 534 bp, Homo Sapiens
  misc_feature (27)..(27): n is a, c, g, or t
  misc_feature (89)..(89): n is a, c, g, or t
  misc_feature (140)..(140): n is a, c, g, or t
tgcatttcttctcagccttaggtagtntgtgtctttgtaaatgtttgttgatttcacccatgttatcaaattgttggcatacacttgtntgtatatttccttgatatcaagtattccttgataatatttctgtatagtcnatagtaatatttcttcttcagagttatgtaatctttatatccttcctttccaccctcagtctttttagtggatagatcactattaattacaccctcctgctgatgtttcatttcttgttactctaattacaaaatacatacttgaaaatatggaaatgtgtaaaatagaaaatccacagccccaaaacctcatcattactgtttgtctagcatttgcctggctagtctcatgtgcttatttttcccattaacatttagaatcattttgagcaagtttttaaaaaatgacttcataagtaaatgaggaaaatttttacctatttacaatagagtatcttgaatgtagcatatttatccctttattaagttttttgatgcctttaagtgagttggg

SEQ ID NO: 318010 - DNA, 492 bp, Homo Sapiens
cgtcaatcaaaatttgccattcttcctcagcttagtagtttgtgtctttgaagatgtttgttgatttcaccccatgttatccaaattgttggcatacacttgttggtaatattctttaatatccagtattccttgataaatttctgtatagccaatagtaatattagtggatagatcactattaattacacctcctgctgatgtttcatttcttgttactctaattacaaaatacatacttggtaatatggtaatgtgtaaaatagaagatcctcagccccgaaacctcatcattactgtttgtctagcatttgcctggctagtctcatgtgcttatttttcccattaacatttagaatcattttgagcaagtttttaaagaatgacttcataagtaaatgaggaaaatttttacctatttacaatagagtatcttgaatgtagcatatttatccctttattaagttttttgatgcctttgagtgagttggg

SEQ ID NO: 318011 - DNA, 1947 bp, Homo Sapiens
gcgaataacagataaaatagccttattcctgtagttcattttctctcgttctgcgcttcttcctaatcatactctattctctgtgccgctctctcatgtttgccccctgtggtccattattcaacaccccacgtggtcgtcaaaatggcctttcgaaccaggtgtttcgcacaccgtttcgttcatgaaccagcacccccggatcagtggtttttcagctttgtgcaatattaccctcaatctggggaccttgacacgaaatgccattctaacttggtcccgccccagagataatgtaatcgttctggtggagactcagtcattatgttttagagctccccccaaattctgttatacaatcagtgttgagaatcattgccaagggcacatgagaaaacagtcattctgaactctacatatatcaactgactgtctgcaggtatcattcactcagtgacatattctcaatcttaaggaattccatgtataaaagatagtcatggaagccaaatgaagacatagtaagctttatacacatatagacatacacatcccatgtatttatatatgtataatatatacacagagtattttggttaagcagaaactagcattgccataatttgttcttgataattaaacaaataaagcatcaccaagcaccaacgttttctaagacattttccaagttttaacagacactggttttgtaaactccacaaatgcattacacatgaatataattcatctgttacttggatgtggaactcaaatgaatcctggagctttctggaagatcacaaaagaggacatggcactgagcgggatggaaaggagtcaacaggcatccacagcatgcacttcttgttttctgcttattgcttatgtgcttccgtcacatacgtatctttggcttgctacaatcttatgattttgaccactccatcagtgttcactttgggacagcctcagggaggaagcaatgggtatacagagcaatcatctctctgttaaaagaagagagaatcttccctctttcctctcccaaactatgagcattttatgtgggagtggtaaaaaatttataagcaaacaaatctaacatctttcacgtgataaaaaaaatgtgatgttacatgtaactgaactaaaaagcatcagatgagcaaacacaccacactccaatattctgaaggctttgcaatcagtaaagcgcatttccttctgaaggatcagtgaacttccgggcacttgtcttgctgtacattttctgtagttcttttacttctgtgtaatacttaaagtgcaattgttccaaggcttttgtttccatcatcacaaatattataaagaaagagctatgtttagggtgaagaagatatggcacaagtaatatgtaaagaactttgatgactttcgcatcctctagcaaccagtaagctgcctgtacagctgcacacagacggactttacacaacaaagactggaaaagcatcttggatgttgatgcactgctgggccaagcaactgttgcaatagaggccttcctcatccagttcatggccacatccaaaggtgtaactctgagcagtgtcctgacacagacctgcaatgcgcaggaagtctttctggtaaagtctgatgtcatcgaggctcaagctgtgtcgatcagtggaggtctttggtttccgacatatagtctgtggaagagaatcagtactctggccacgaagcttaacaactgtttctgaagagctcgaggtggaagacccaatttctttcacaatcaacccagagtgtccattcagcttccgcgacatgagcatgtcctctgtgatgtagatgcacatgtctgggctgacttccagagactcttcattcatctgtccagatcccgggggtcatcaaccaacatctctatttcatcgtcctgtaagtcctcttcca

SEQ ID NO: 318012 - DNA, 544 bp, Homo Sapiens
  misc_feature (342)..(373): n is a, c, g, or t
aatggtccagtcgggttggagtttatttctgccagagcctggggctgggagggtaaaggacactcctttagtcccagagggaagctccgaaccctcagagcaaccagaagggagggcagagcatgggcagcagcaggagtgagaggggtccccttgtcctgcccctttgcaagggttcaaggctggtggaggcctggggcttctgtcgctcaggagttcaggggtggacgcagaaatgggggaaggagagtggctacgtagagagtgagagcgagattcctaaaaagatgcacagagagaccctcagagaggccaagaaagatggtgagagggtagggaagnnnnnnnnnnnnnnnnnnnnnnnnnnnnnnnnagcagagggaatgggttgcactggctgaggatggtggaggagccgtctcactcccttcctaatgtctatagatcaataacgagggaagaaaggaggacagggagctgatgaaacacagcttgccaactgtacccagtcccccaacaagcctcgtgccgaattcagcacgag

SEQ ID NO: 318013 - DNA, 1325 bp, Homo Sapiens
  misc_feature (25)..(25): n is a, c, g, or t
  misc_feature (46)..(46): n is a, c, g, or t
  misc_feature (135)..(165): n is a, c, g, or t
  misc_feature (167)..(167): n is a, c, g, or t
tcgggagttcaggggtggacgcagnaaatgggggaaggagagtggntacgtagagagtgagagcgagattcctaaaaagatgcacagagagaccctcagagaggccaagaaaagatggtgagagggtagggaagnnnnnnnnnnnnnnnnnnnnnnnnnnnnnnnanccagagggaatgggttgcactggctgaggatgtgggaggagccgtctcactcccttcctaaatgtctatagatcaaataacgagggaaagaaaggaggaacagggagctgatggaaacacagcttgccaactgtacccagtcccccaacaagcaaggtagctccagtccttgcctccctgcctgccccgctcctctgtgtttaggggtcatcctttgatgggaggttgcaggggacccaggtgggggtgataaatgccagagtgctgcaccatttccaaagggcaagaagtcagagggcggggttcctgggacaggggcccgtggggtccagggaggtagagggctgggccccatctgttagtgcatctggggacagggtagggtcactgggggtgggctggtggggacccctcaggctccggggatggcccagacccaggctgtgcttcctctgcctcctcgtcggatgccacgccctcctctagtcggaagacctggcgcaccgtgcgggtggtgaaggtgagggggccgcgtcgaagccggttcctcagtgtggtcacttcacggttcatggactcggccgactctgtgacatcttccagctcacgctgcagcctccggcggccggcctgagcccgggatgcctcctcctcggcctcctccagctgccgcttcagctgcttgactcgaaggtttcccttctccagctggtcccggagctggtcagccaccctccgctcctcctccacctggagcaccacctctttaagccgcttctcagctctgcgcaccagctttccagagaggatgcgctctctggtctcttgctctagctgctcctcagcctgggccaacttagactcaagggcagcaatggtcatcttgtggcgggcacgggccccagcatcctcctcacccaggcgtccccgtagctcctggatctgccgttccagctggtgccgcccgctctctgccttggctgagaaactgcgctcagctgacagctctgtggtcagtgactctacctgcaggagcagcttgcggtagcggtcattgagcagctctgagttgctctgctcctcctccagctcttcctccaactgccccaggcgcccctccagctgacgcttctcctccagaatggctgccttctaatc

SEQ ID NO: 318014 - DNA, 1296 bp, Homo Sapiens
  misc_feature (438)..(438): n is a, c, g, or t
  misc_feature (819)..(819): n is a, c, g, or t
  misc_feature (891)..(891): n is a, c, g, or t
tggtgagtgtttcctttattataaagcactgaaataagttaaataaacaggtgggaggctgggcagtcccccagccggtttgtccacagcccctgggggcagtggaggtgaatacagggcccttctcactgagctcgtgaagtgcctcagtcaaggcaaggtcccctggtccatatgggcccccccgcccatggggttgggctggtccttatagtgcctacgttagtctgtgtggagcccctggccagcgggggagaaaaaggtggcttctggtccgtctgtataaaacatggggaagaaggacctagttcaggatgagtctgtgtggacagcccggctgccagcagtccccagggctggtgggccccgagagctcaaaacagagggtggggtatgaggtgggcccagccctcagaggcagagagaccaggccctccntccccaccgtggccactgcaccttctggtggcgcttgtagttgtcccagtggcccgtggtataggcgcaggtggcacagcggaaaggcttctcgcctgtgtgccgcagcatgtgacgtttgaggttcatgctctggttgcagctgtagttgcaaaggctacaccgaaaaggtttgtcaccagagtggatgcgaccatgacgcttgaggttggccagattccacaggcataagggcagagggggcacttgtagggcttctctcctgtatggacgcgctggtgccgtttcaggttatccagatgagcagaggcataaggacagcgggcgcagcggaagggcttctcaccactgtgtgtcctcctccagctcttgtccacagcnccggcaggtccaagggaatagcagctctggcagtggttctgatccagtcccgcagaggccctccccttcacnccgcagctgcccacagtctggcaggaaactggcaccacctggtggcacatggaggctcaaatctggaaggagcagagcatcttcaggtcgccggggcaccgccccctcctgctctgtgggactgggaggccgggctggtcgtggagtacagcagcggaagccacaggtcgggcagggaggagtggggggccctgcgtgggtacgctgatgccgcctcaggttgcccaggctgctgcaggcaaaggggcagtggggacagcggtagggcttctcgccagtgtgggtgcgggtatgtcgtgtcaggttgacgagctgggctgaggcgtaggggcacggccacagcggaacggcttctctccgctgtgtgtctgcatgtgccgcttcaggtggctcgagtagtgggac

SEQ ID NO: 318015 - DNA, 2226 bp, Homo Sapiens
ttttttttagatgttttaggactttaatgttctttacatattcaacataaaatactgacaatagataaacaataggggaaagacttttcagcaaagtatcactctcgtagtcatacattacaaagaaaacagtagagaacaaaggatagggtaatttaacagaaatgtttagtttaatggcataattgaaaaacaaccaaccaatcaactttctcttctacctatggaaagaatggtaaaaatgaatcaagaacttctaggtctttttcataaaacagcttaaaaagaggaaggcgaagactggggagggggtacaactcttgctaatggaatgctataatgcacaaggtcaaggatttaataaattctaaaagtgtctacatatatcagtgataactgtattattagaaatataaatgtatagaaatataaagtatatggtattaaaaacagaccttgctaatataaacatatataaagtatgtcacttctcctgtaataacagcataaagatcgatctacagtttgcccttcgcctggcactcttaaaccactcctccaatggtcaatgttgaccttgaatcaacagccgctgaacccaggagaccccacagatgtgtagattcagcacctagagggcccccctaccctctgtgctgtgtgttcccatgactccagaaataattaatcgcaacttgcattattaagtccacaggcaagtttgaaatctaactagaaaaagtagcagcaaaggcaaaatacgcgggaatttgttagaaaagcaacaagatttcttaaaatgcttccagttcaagtcagaattaaggtgacattaggtcccaccagctttacagagttgtggatgttttgctgttgttctttcaaaaaagaagaatctgcaataaacatgttcatttgagaaaaatactgtgttaactttttgtagccatccccaagttactttaaactttgtatgttgttcaagaacagagtatatcctggttaggatgtgttcatagctgatgcatctccaaaaattttttcatgaaggcggccagcttctgaacgtcttcaattgtgacagcattatacagagaggcccggatgcctcccacagacctatgccctttcaaggacaacatattgagttcaagagctttatcaagaaatcttttttctaaagcatcatctcctttggcattgccaatgcggaatggaatattcatcttgcttctattttggggctccactggacaaacgtagaatccttgagaattatcaataatctcataaattgtttgagatttgatggagctaagcttctccatggccgcggcacctccattgtttttaatccactccagaaccaagcccatgacgtagatgctgaaccatggaggcgtgttttacaaggagctgtttccagcctgcaccttgtattccaggaccgaggggcactctcggagggcaaaccccagcaggtcatcacggacaatcaccacggtggaccccagcagagccaacattcttctgggccaccagcaaaaattcacaccaaacttgggaaacatccactgggttggacaggaagtttgaggacatgtcacaaaccagtactgctcccttgacatcgggtataaagtcaaactccacaccatgcaccgtctcatttgcgcaataatacacgtaggaggcatctgggttgaggttccaggtgcttggatctggaatttttgtataactcccaagtttagggtgaacgatatttatagtcccaaacttcttggcttcttctgcggccttagctgaccaagctcctgtcaccacatagtccgcacaccttcctgctttcaagccaatgaggtttaaggggacagcactgaactggccgcacccacctccttgcagaaaaatcaccttatagttgtctggaacagctagcaattcccgcacaagattctctgtattgttaataatcttggcaaaatctgatgacctgtgactcatttcaagaacactaatgccaactcctttgtagtctaataattccttttgtatctctaacaacactgagtgcggcagcttggcgggaccaggcccaaagttgaccacctgcctgggggcgtccatggtgcggcggcgagggcggtgagtcagccaaggaggaccgaacgcgtgaacggctggcgttcctggccgctgcggtgagagtctgcagccggcccc

SEQ ID NO: 318016 - DNA, 514 bp, Homo Sapiens
  misc_feature (26)..(26): n is a, c, g, or t
  misc_feature (34)..(34): n is a, c, g, or t
  misc_feature (74)..(74): n is a, c, g, or t
  misc_feature (90)..(90): n is a, c, g, or t
  misc_feature (99)..(99): n is a, c, g, or t
  misc_feature (115)..(115): n is a, c, g, or t
  misc_feature (141)..(141): n is a, c, g, or t
aacctgtaaataaaccggccataaangaacggancctaacagtttggcccccttggccccgggcactcttaaancccattccctcccaangggtccaanggttggacccttgaantccaaacagccggctgaaaccccccnggagaccccccacagatgtgtagattccagcaccctagagggcccccccctacccctctgtgcctgtgtgttcccccatgactcccagaaataattaaatcgcaacttgcattattaagtcccacaggcaagtttgaaatcctaactagaaaaagtagcagcaaaggcaaaatacgcgggaatttgttagaaaagcaacaagatttcttaaaatgcttccagttcaagtcagaattaaggtgacattaggtcccaccagctttacagagttgtggatgttttgctgttgttctttcaaaaaagaagaatctgcaataaacatgttcatttgagaaaaatactgtgttaactttttgtagccatccccaagtta

SEQ ID NO: 318017 - DNA, 1318 bp, Homo Sapiens
  misc_feature (868)..(876): n is a, c, g, or t
  misc_feature (989)..(1006): n is a, c, g, or t
ggcctgggtggcgaattcggcacgaggggcaatttgaagacagaggacttgtttgaaaacaggctatctagcttgataataggaccatccaaagaaaggaccctcagtgcagacgcaagcgtgaacacccttcctgtagtggtctccagagagccctcggtgccggcttcttgtgctgtatcagcaacgtacgagcgatccccctccccagctcatttacccgatgatcccaaggtggcggagaaacagagggaaacccacagtgtggacagacttccttccgccctcactgcgaccgcgtgtaaatcggtgcaggtgaacggagccgccacggaattgcgaaagcccagctacgcagagatttgtcagagaacgagtaaagagcctccttcttccccattgcaaccccaaaaagaacaaaagccaaacactgttggttgtgggaaggaggaaaagaagctggcagagcccgcagagagataccgggagcccccagccctcaagtccacacctggagcccccagagaccagaggcggccggcggggggccggccctcgccctcggccatggggaagcgtctcagccgagagcagagcactccccccaagtctcctcagtgaaaaccgtacgtctgggaggggtcgcagagcgctgtgttaaccacaaacgagacactctcccactcagtgcgagggcgagccgctggttaggagcttgcagtgtctgaggcctgtgggatcctcaagttggttttcttctgtgagttggattctccccctcttgaaaaaaaatcgatttttcaggatttaattaatacaaaccttattttaggttggtgcttaactggaggtgatgcataagtctgannnnnnnnnccaagatagaaaaagcatttatcctaacaaattggtattttttattaagcctccatgtggctctgaatgcaagctatatatagtgagtttttctaaattaagggaactctgcnnnnnnnnnnnnnnnnnnaagtaactggtctgtaagtgcatatctctagaacgtccccgcagatgaatgagggccagtggccttggcagaggcaggtgtggcctcgtagaggcagtgctggccgcgccagggcatcagtgctgatgtgggagctgtgcttccacctaagccgttggtaggggactgtggcatttaagaatgtagagagcgcatcctttttgatctcctgggcggagtgaacctgcaggggccaccccagaaaccttggttcttatgcactgcaagcaagtaaccagcttcttactcaatttaaagggctattatgtattt

SEQ ID NO: 318018 - DNA, 1091 bp, Homo Sapiens
gaagtctattaccagttccttaaagctctcagacaatatattctttgttttcaaaggaagttgcattaagatgaaaggacttgcaggcccaggcctttgattaggaagtctgacttctaaaaaagactttggttacaaaataaacctgatgggacttcttaattagacctcatattctgggaggcatgagggcaagtgtgtttacgttatacagggaaacctgcaatattggagacttagggggtaacattcatatccaggggttgcccccactttatttaccctcttactggtcaatattctgctcagaggctgcatcatactgaccagaaattcactgaaatttagacagatttacatactgtgaacaaattaaaatgtggttgtctttgctttaaggtttattcttaactgcaaatcaatgtttaaacagttattttattaagaaaattaataatttagactatgaagcaatttaaatacttaaattccctcaaaacgacatcattttgtacacaaatagatgaagtacacaggaaaatggtagtcaaaagaattttttggcagctgcttcttgctgagacctatacatgatataaccaatgaataatacagtttgcaccacaacaaatataatgaagtggaccgtagacaaacatgatggaaatggtggtagttctgggcatttcggcttttcattggagggcatatttcgctgcactaagtaatctatgtccctctttactatgtgcaggtgctcttggatgtcaatgaagtgctgtgttgtctcatagacgcctccagcagagccagggtgctgcattccacgaaccattcggacggttacactcaaggaatttttcatttcatttacttgtctcagaatctcatgctgagttttcacaacagtatccagttcttgttgagtaatctgcccatgctgcacaggcattcctgctcctcttttagagatttcctctgttaaggaagagacatatcttctctgttcatcaagaatcatatctaactgccggttcagctgcttgatttcaagatgaatacgattctgtccttcaaagacttgtcttagc

SEQ ID NO: 318019 - DNA, 660 bp, Homo Sapiens
  misc_feature (51)..(51): n is a, c, g, or t
gttttattccatcccctcacgagactcgacctcacgcgcaagactccctanaggttccctctatgaaaatgaaggacagagggtcattttcaccatccctctacttgatctctgcttttcgagcatctctctgctgggaaagcccccccatagctccatcatgtctatggcaacggggaataaacctccagtccattcccaagcaggtaagcaaaccagaccctgtgagccttgcaagtgagcatggaagggtctgaggattgggggaggagagagtggctaatctggaaggctctgtatgggggattccagcagaactccggcacttggttcttagtcttcccccagatcaaagaggaggtagtggcacagagctgggaaagacccttgctggggcttgagctccctatccccccaggcctgaccatttactaagagcccgttgaatacgtggaagagctaggagcagccgtcagaggggctgtgcgccccaggagtgactggccttgttcccgcagacccagcactacttcctgctctgcttcctgctcaagttcagcctcaccatcagctcctgcctcatctgctttggcttcacactgcagagcttctgtgacagctccccggaccgcaacctcaccaactgctcctccgtcatgc

SEQ ID NO: 318020 - DNA, 912 bp, Homo Sapiens
  misc_feature (160)..(161): n is a, c, g, or t
  misc_feature (163)..(164): n is a, c, g, or t
tttaggaaaaacccgggtttttgaccccctggtttcccctttctcccttaccgggggcccccgcggccccacaaaaagaaatggttttaggaaaagtttttttgaagggcccgaaggcggcccccccaattttcttcttctcgggtgcccgctccgtggnngnnaggcccccattaggaagtattttattttaaagtacacttgaaattttaaatgtgtacaaattcagaggtttaaaaaacttcgaaagtcacagacacagaatttaggaagctgaaggctgagagtctcccttctcacttaatccatgctttattttgcattcctcacaggtaaggaggcagtgcctgttatgctgtggaccaaaaccagccccacggagctgatcttcaaaaaaatggaatttactctggcatactcctatgtatgatacctttccaaggccaaatcccaagagaccagcaagtgcaactttgggcaatgatccaaatctagaattagctgccaaataaccttggtagactagtccctgggtgacaagcatgcttacaagagaaaaaggcagagctctcttccagaaactttcttcctgacattctcgcataatctttgagatctctgctctgtggatgtgcagttttgattttggacaaaacaacaggctctgcttgcttggtggtggaaaatgggcatctttatcttggtttccacgagcagacgctgaagccatgatgactttgtgcttgctctccttccagttgtttatcctctgcttactccttgacccagtgtctgtgtggtctgggtcgcctccgaggccgagtccctcgttgccaagcccagcaggcctcgctcccccgtgactgcaccgccggcccgctccagcttcccgagtaccccacctgtctcccc

SEQ ID NO: 318021 - DNA, 1149 bp, Homo Sapiens
  misc_feature (21)..(21): n is a, c, g, or t
  misc_feature (26)..(26): n is a, c, g, or t
  misc_feature (28)..(28): n is a, c, g, or t
  misc_feature (34)..(34): n is a, c, g, or t
  misc_feature (36)..(36): n is a, c, g, or t
  misc_feature (40)..(40): n is a, c, g, or t
  misc_feature (44)..(44): n is a, c, g, or t
  misc_feature (51)..(51): n is a, c, g, or t
  misc_feature (55)..(56): n is a, c, g, or t
  misc_feature (71)..(71): n is a, c, g, or t
  misc_feature (75)..(76): n is a, c, g, or t
  misc_feature (1119)..(1119): n is a, c, g, or t
tttaaatgcggggtttggcgngacancncccttncntgtnttangcacatnttcnntacgcagcatctttncttnngcttccctactagctcagccccataaagtcactggtttcctccatctggaccagcagccgcaccagccaaggcgcccactgggtcttcggaggtgggcgatgtcaaatccccgtggcctttcgtcgggagggtggagctggcccaaaagagagagcggtacagttctgtcctggcatcatcattcattgtagtatggtcaataggtgccatgaaactcagtagcttgctaaggacatgaaaccgaagtttcctgcctttgctggctttcctatctacttttttgtggattttgcttcgtaacttctggattgcaagccactgccttcccatggccacctgatcgttgggatccaaggagctggtcttccgttctatgagttctcgaaggagctggtggtaaaagtcatcatcatcaaagatttcttcatccaagtccttcagatgagcattagcaggggcttgaggaaggatctccggttcccctggcaaactctctgggacaggctgagctgctggctcaggtttgccaagaactcgatagacagagcgcttggtctgtgtccttcgaagtaatctctctttgtccatcagaatatggtcgatctgagtcaagattgagcgttcaaaggcaccaaaacccttccccagttttccagaagccagtttggtcttatcgtgccatttctgaagtgtgcggttcctgtagactgtaaagtcggcaaagcgctttgccatgaagctgggatagtcctccatctccagcttcctctttgcagggacccttcttcgttgctgcttcttctcttctaccagctcatcatcttcactagaaatctcctcacttcccgcattgggctttgtcccatctactagatatctagtgtctgggtactggaaaagcaactcttcctgaagacctaccaatgacctcaacaatgctttaagtgccttgtgactatttttcagggcactggaaaattctgggccacctttgtccttgaacaatgggaaaacatctggttgaggaagctggttggtggtncaaccctcgtgccgaattcgccacccaggc

SEQ ID NO: 318022 - DNA, 488 bp, Homo Sapiens
  misc_feature (447)..(447): n is a, c, g, or t
  misc_feature (464)..(464): n is a, c, g, or t
gcggtaacaatgctctttatttgtggcgtttaaaggcggggttgggcgggacagcgccttgcgtgtattaggcacaggttcggaacgcagcatctttccaggggcttccctactagctcagccccataaagtcactggtttcctccatctggaccagcagccgcaccagccaaggcgcccactgggtgtcggaggtgggcgatgtcaatccccgtggccttcgtcgggagggtggagctggccaaaaagagagcggtacagttctgtcctggcatcatcattcattgtagtatggtcaataggtgccatgaaactcagtagcttgctaaggacatgaaacctaaataaagcaggaagcaacaggcagcaacattagtaactttttaacctagggagagggaacacattcagtgagtttaacaaactcccagaactgatcattgggancttttgggtacaaagtnggggtaggggaaaatttcataggg

SEQ ID NO: 318023 - DNA, 479 bp, Homo Sapiens
  misc_feature (403)..(403): n is a, c, g, or t
  misc_feature (465)..(465): n is a, c, g, or t
ggaatcgtgttgctggctcattttcattgtttttcaagtactgccaagtccaagaaaatgtatgaaaactaaattatatccccctacatcccatgtctgattgaatcctcctcatcggatggcggtctcctacatcctattaaaatattcaatcttgttttcttacttgaagagcctgtctgcaaagggcaaacttacagaacactcattccctgggagacgggtgtccagccgcactggaccatttacatattttactgtttgattgggtttcttccttctgttgtatttgtgagtaagagctgtgggggtgcatttttaattacatgggctgtgttttcaacagaaggaaacaggatgggggtattttccagctttctgcgtttcccttttaaccttggantggtgaaccagtgtgtttaacccgttttgctgtgtttgtcttttagggacagaactgtaccngtctcttttgggct

SEQ ID NO: 318024 - DNA, 447 bp, Homo Sapiens
  misc_feature (430)..(430): n is a, c, g, or t
gctcgcggtaacaatgctctttatttgtggcgtttaaaggcggggttgggcgggacagcgccttgcgtgtattaggcacaggttcggaacgcagcatctttccaggggcttccctactagctcagccccataaagtcactggtttcctccatctggaccagcagccgcaccagccaaggcgcccactgggtgtcggaggtgggcgatgtcaatccccgtggccttcgtcgggagggtggagctagccaaaaagagagcggtacagttctgtcctaaaagacaaacacagcaaactgggttaacacactgggttcactattcaaggttaaaaagggaacgcagaagctgggaaaataccccatttctgttttcttctgtttggaaaacacaggccatgtaatttaaaaatggcaccccacagtttttactnacaattacaacagaagg

SEQ ID NO: 318025 - DNA, 340 bp, Homo Sapiens
  misc_feature (319)..(319): n is a, c, g, or t
  misc_feature (326)..(326): n is a, c, g, or t
tagttggtcatcccaatgacagtggtaagtgcctatgaatttttccctatcccactttgtacccagatgttccagtgatcagttctggagtttgttaactcactgaatgtgtttcctctcctaggttaatagttactaatgttgctgcctgttgcttcctgctttatttaggtttcatgtccttagcaagctactgagtttcatgggcacctattgaccatactacaatgaatgatgatgccagggcagaactgtaccgctctctttttgggccagctccaccctcccgacgaagggccacgggggatttgacatcggnccacctnccgacaaccagtgg

SEQ ID NO: 318026 - DNA, 1202 bp, Homo Sapiens
  misc_feature (189)..(189): n is a, c, g, or t
  misc_feature (265)..(265): n is a, c, g, or t
  misc_feature (346)..(346): n is a, c, g, or t
  misc_feature (418)..(418): n is a, c, g, or t
gttttcctggaagtaaagggtttgcgtgtttggctccgaaaggcccttcatcatgggatggtggttttgcaagctcccggaatcatatgagggtaacccaggggacacagcacggagtaagacggtacatatttgccatgtcatttttttctccttgtcgaattatattatgacattctgcaggtaaanactgtaagtggtctgctaccattcgttgttgacattcatgaatcaccttagtatatgaacttggatgtaggtattntcgacatcgaatttcttcatcttttaatctacctagaaccttttccatatactgtgagcagtttgattcttgtaataaatntgaagcttcttgtttgtaatactctcctgtttcagtcagaaagggagactcaaaaatttcctgataaaactntaaggggaattttttcttatactgttcaacatgaacaaaggagttaataaccccatggattactttctggtttgggtcttctccaccacgatcatttttgatttctcggagcagcattcggataaggatggcttgaagtggttcaaccatcattttcctccacatatccaatgctagctctcttatttccataagtggttcattcatatctacaccaccatagccatactgaaggtccgcttctgttaatttattctttttaataaactgggtgttgagatacctatataagcagtccatatagtctgcacccttgctgtattcttcccagtacctatgatacataacaagtacttgttcttctgactccaaaactctcttatgcaaatgccgaacatgattttccaaaaaaatcttagtttctgtataaagtctttctccaaggggttcaggataggccacacataaagcatagatatctgagaaacggtcattccatgttgctctttcgacgtattccaacatgaccacggcttttattgtcgtcaaaagtttgttccatgtttcatcaaaatctactactcttggtttcaaagacattgtgcaagtgtagtgttgaaatctgtctccgcgaggaaagacagcaaagtccaaggccgccgccgctccccggcgggacaggggcggtagggagggggggaaaggggagaaggcgggccgatcacgggatccgtaaaacaatcgtcctcctctgcctccggctttgcccaacacacaccctccg

SEQ ID NO: 318027 - DNA, 833 bp, Homo Sapiens
gtgggaaagcctgccggggcgccaagggcccctggaaatggtggtattctgaacattgggtttgataggtttttcagttaattggcgtgtctggatactccattttcgtgcatttttctatggattttaataaaactcccttggcagtttgggcttcattcgaaacagttagtgaatcctgtacatctttatgactaaccaactgaacattgccatcttcataatagtgaacctgaatcttaagcacgccaaccacctgggctgtaggtggtgtgatggtgaacttccactctgatctccaacgaccattccagaagtttttaggctgaaactggtggctttcaatacatgcaataatagtctgttgcccatcgatagttttagcataaacagtacagaagccgttggaataatggtctttcacataggctcttaaagcactgtcacaggattctctccaagacttcagacctccatctgcttcttctggctgggggtcacttgcttctttccgtaagtggtcaaatttaaaggaaattttgtttcttggatctaaaaatctgctattacccaggtcaccgtgctctgtaattaagacctgatcttcatatccttctatcttcacaggcgtgaactgatccatgttatactgggcaaatgcatgtgctgccccttccctgaggagattgtcattattaagtagtagccgaacgtcattgaatacttcattaaattcccctgggggtgcatgagtgatgaatttagcagctatgcgtaccttctcctcatccgacacacgatcatcgaagtcggccatcttgggctgttctccc

SEQ ID NO: 318028 - DNA, 867 bp, Homo Sapiens
aaatgtttgttgaatgaatactgcaagaatgaagagcagacaaggaagctaagatctaatgaaagagaacaacatgtgggcagtatgtcagtgaacctttttatatggttcccatcaggctgagacccagctcttgggcaaacaacagtctcaggtaggcagatctattactcgagggtaggggctgagactctaggggcaatgtcttgtgctgggcgccgcgaaaccctgctcctgccctgactggggtccatgtcttgctgctggctgaggggtagtcagggacatgctccttggtagatggggctctcttgttgacttgtgggccccagaagtcaaacaaacccctgttgtttccctgggtaacattgtctaataaagggaaccactttataggcaattgaaagtcttcatccatggacttaagccagaggaatagttcccttttcatgccgagctatttttgatgggattagttgatcttttaactctgaccaacatgtctggattctatttccatgacagccatctgtttcaaatgacttaagaaattaaggagaaggcagggggactgggtccatgtataactgtttgaagatcctcaccataggcaggggaacagagcacgttacaaatgtggcttttctttttttaagcttggctttcacaagggaaaaagtttcctggggcataatgcgaggcatagcagaactgagggcaaacccagcctgggccttaattgtaaacatttctacttgtgtatttcctagtcttgtgacctttgacaagttatttgacttcctggtgcctcattttcttcatctataagatggggataataataggactgacctcagtggcttattc

SEQ ID NO: 318029 - DNA, 666 bp, Homo Sapiens
tatttttcccaggtatttatttacctgggttgacaagttcatcttcaggcaagtagggaaggtgttccttggtagaaacaagtgttggctaaagcaaggtgaataacgccaatacacaatggtgggcagagatcccagcctcacagaaggggccagggaagctctcagttaaattcactgagatcttattgatggggaggatggaagccacctcagcttccctgccaggccagcaggaaagcaatctacttcccaggcacactcttgacccagagttctggctattcagaccagacaggcacctattttcatctgcagaaatgttgatgttccaagtagagaggaattgtgaccctatctcccatgcaagcctgaacctgaagagtgctcctcctgtgtgaatgcagtcaccttaaagtgttccagaaaggctgtctatatgtgcacccatcctgagtgcccatgggagaaccctcagctatgtctgcagtggtggatgggggaaaaataagtccccttctccaagattcttcaggagtaccaggactgcttgactgttggagtagagctgcagactttccccactgagcccagcactacaactgtgcctctgctgaaaggaacttcccaccaatggaaagatttaggactcaaggccttccatcc

SEQ ID NO: 318030 - DNA, 854 bp, Homo Sapiens
  misc_feature (60)..(60): n is a, c, g, or t
  misc_feature (133)..(133): n is a, c, g, or t
cacctttacatcccgtccagttaattgaaatacagtgaaaaacatatcccatccatctgnagaaaaacttgaaagctttctttcaggaatctgtttgggtgtaagtaaaatctccattacaaaaacgaggaantgtgtacaggtatgaaataggacacactaaaaaaggcatggttctcacatgaggtgtgtgtgaagtcactggcgacctgtgtgtgtctgacagacaccaccacccgtcccctgattttggcatctggcaaatcccaccctccctggcactggttgctcatgtcctcagttacctctccggggctacactttcccccagagcccacaagcggcaacttcagatgctaagttccagcctggggtccaatttgcaaaacaggatgtttctccgtttgaaaaaaaacaagcaaggaaaacagagtcatatcacgtaagcgcttgttcagggaaaatatgaccttaagtatgctgtaaatggatttgaaaaggctcctttgagttaggcgggcttttgtgaaaagcccgaacattcattgcatagttgaagggtttagctgtctataacaatatatgggaacacagctttagccgactgtgttcactgatattaagtaagtttgcaaatagcacattttaagaagtattaatgtattatgttactttatctatttacatttgtacaaagtatagctttcatcttacccttttgcatatagtgaaccattagctcatgaagcaatctctttttacataactatgtacacggccttgcacctcatctgaaagaattttgcctgatccatggcgtggacttctcccccccaccgcccccgctacaatta

SEQ ID NO: 318031 - DNA, 722 bp, Homo Sapiens
  misc_feature (143)..(153): n is a, c, g, or t
  misc_feature (637)..(637): n is a, c, g, or t
gccttattaattttatagatctattttattgactctattaatttttattgatctatttaaagaaccagcttttggtttcactggtttttctctatcattttcttactttcaatttcattgatctctgctctaattttaagtannnnnnnnnnngcttattttggatttaatttgttcttttctagtttcctaaagtggaagcttagattattgattttagatcttaatcaatatatgcattttaatgctataaatttctctgtaaacactgcttttgtcacatcccataaattttgataaattgtattttcatttccctttagttcattttcacttagttctttaagtagtcacctctatgtcttctatttgcattatgtgtaaccttttagaaacctttgtgatgtaagatatgttatattcctatatttctctaaatcaaagttaatctcttctaagctcacaactcttccggctgatgtgaaattcatctggtctatgtttgagaatactcctttcttcaggatcgtgcgcaaacctcaggatcatgttcaacttttgaattgtccctttcaaagtgacaactcagccacagtccagcatggacatcttaccccagggttttcagggccatggntcttagtatcttcctgtccttgtctcagagctacatcattagagatcttgcactcctctaggggcttttattagtgcctggtcaa

SEQ ID NO: 318032 - DNA, 739 bp, Homo Sapiens
  misc_feature (481)..(490): n is a, c, g, or t
ttagctatttattatatttttaattggtatttcctaatctgagaaagtccatatattcaacatttatttcgctctaaataatgggataacaattacattaacttttgatttatgttttactggtcatgatggaccgactactataacaagcaaccccaacatttcagtgaattaatacagagtttattgctcatttcaggtcacagttcagtctaataatgtattgggtggaggagatgggatctgtcctatgcagtcatttaggaatctaggttccttccattgtgtgatattatgatctttaggcgttggccccccaggttcttgtagagaggaacagcagagaggagaagcggaaaggaggccaagaaatattattcgatgttgtacccaggacacggagaagaacaatgtttgttgatgacattagtgctgtctgctatagtatttttttccccaactgattagtaatttcgatagnnnnnnnnnnttcttcacctaattaaagagacattagcaagtacaccaggctgtaaactctgccaggaagagccttatctgtttttgatgcttatagtaaaaagtctctaattatagcacagtggctgtcacctagtagatgcccactgaatatttgtggactgacttaatgttcaaaatctcttaatagttgtacctgccctcatagaaagtgtgtgcagattaagctggaggattacaaggtattaaatggtcctac

SEQ ID NO: 318033 - DNA, 499 bp, Homo Sapiens
aattggaattggattccaaggtaagggccctccgccgggttaattttgtattccagtaaagacgaagttcaccatttggtcaggctgtttccagcttcttaccttggtatcggcttgactcagcctcccaaagtgaaggcaagattatttaaacgacatacctgctaagtggtagaaccaggtttgtaacccagactgtctggcccaaaaccagagttcctcaacactgcagtgacaaatctcagctgagaagctgtattccagcacagcttcacgtagtcctcttgaaatacacatgtccattgcatggtttacacacaagtctatttgcttgtctgcccacacactggactataatctccttgaatgtaggagactcatttctcaatgtctgggatatagatggcattcatgcagatggtaatgagggcagttgtagctatgcgtatttcttccttgcttgttatgtctcgtgccgctcgtgccgaattcctgcagc

SEQ ID NO: 318034 - DNA, 612 bp, Homo Sapiens
ggaggatgcattagcacaacaggcctttgaagaggctcggagaaggacacgcgaatttgaagatagagacaggtctcatcgggaggaaatggaggtgagagtttcacagctgctggcagtaactggcaagaagacaacaagaccctagtcctggttccaatttaggtggtggtgatgacctcaaacttcgttaattaatagcacagcagatgtgtgctgcccatctttacatacacattgcttctagttggcagaaataattgattaaaagaccagaaactgtgataactggaggtactacggtctatttctcaaccttaggcagtaatagacatcacaaactgccatggttttgcactatgattataatacctgcatttctaattttttaaagcatgtagccagtaataatttgaagttttttttctatgcaagcttaccttgttggcattattttagggagtttgaactatcaactgtaaagcttcttttcttccactttaatttaaaagtcatgcatttaaaacaagtcagttctagaggtttgggtttacacgctcattttagaagagcatccctatttttggtttggttgccccaattccttttggg

SEQ ID NO: 318035 - DNA, 1139 bp, Homo Sapiens
  misc_feature (264)..(274): n is a, c, g, or t
  misc_feature (281)..(282): n is a, c, g, or t
tagggggccggggtttaaaattttccccggggggttttttggcccaccccggattcccatttaaaatggcagggtttaacccctggccttttttcggaaaattttaattccggactccccttttaagggggggaccccggccagtatttttccccatttttgttccaaggaaaagttggggtcagggaaaaccagcctatggcccatgtgcccttttcattcactttttttctccgccccccgacattagatgccttcgagttnnnnnnnnnnnttttttnnttttccagcaggctaatttgtctgtttattcccacaaggtagccaggggtgggggcgccgagccaagcccagcaggccatgggaccttcctccggcggggtgcacgctggattttcgggtctgccccaccagcaggtttgcaggcaggccgtcatgagtgccggtggaaggctccgagggcgtgggcaggggctcgggcggggccacacacttgtggagctagaaatagtggggcaggtccttctctatcaccaggggctcctccatgggtccgtagcgcttcaccacgcagccgttcttgtcgatgaggaacttggtgaagttccacttgatggcatttcccaggatgcccttgcccttgggttggatcttcatccacttccacagcgggtgggcgtcgtccccgttcacgcagatcttgctgaacatatcgaatttgacgttgtagcccgcggcgaactctttgatctcttcgttactccctggctcctgcttcccgaactggttacacgggaaggccaggatccgcaaaccacactcagcgtatcgggcgtgcaggtcgacgagctgagtgtagtttacttcggtcttgcctcactgggaggccacgttggtgacgatgcacacgaagccccggtacttgtccaggttaaccatgtgcccgtcgatgtccttggcggaaaactcgtgcatggagcgcgcacagcgccagtcgtcccgggacgcgcacatggtcccggccaggccaggcgcggccagagccccacagagcagcgccgcctcgtgccgaattcgccacccagtccgcgcttctggatgggtagaatatgatgtgttgaagaagaggtggggagggg

SEQ ID NO: 318036 - DNA, 823 bp, Homo Sapiens; identical to SEQ ID NO: 150744
  misc_feature (60)..(110): n is a, c, g, or t
  misc_feature (202)..(202): n is a, c, g, or t

SEQ ID NO: 318037 - DNA, 815 bp, Homo Sapiens
tagttttgcaaatatttatttatttattttgcaggaatttgctataagcaaaaacatccaattgggtgatgagaagggcttaaaattcccctctgtttgggactggtctctccagtttacagcaaaggatcgcacccttttccataaccccttctacattggaaagagcacaccttgtatacagaatggctccgtgaagtcttttaaacggacaaaggtaaatcacagctaacaaaacgtgatgttggctcacacgtaaccaaacacctctttttcagaacagagagcgttaaaagtaaaggcacttccaagagtaacactgctaatgcgggtttctgaggggtcattccctttttaactcaaatgactgtatcccagctttcttcctggtgtctgaggcccacaaagtctcagtacctgagagtgggcagattgcagctttgagcctgcaagcctgatttactaaagccccatttatccatttcttgatgattcaagccgccactgtggcagggaatgccgcctggctgtgatgtagtcatggcctcctgactgctatattcttgtcctaataacattcattgtttgcctttttaataattcccaaataaattcttgggattttttttggtagaaaatttgcagactactgaaaggtacagaacaaagaatcagacatttggcctcctgactgcctctgttcagtttgccattgttcttgatagaatcggccaggtctagtgttttttctagcccgttcttagaactttatccttaagcaaattagtggataggaggtactctcatcccggccc

SEQ ID NO: 318038 - DNA, 635 bp, Homo Sapiens
  misc_feature (607)..(607): n is a, c, g, or t
cctggatgcaggttcactcattccctcaatttgagggtagccatgatctgttagttcttgtaccaatggattcatatctaatatgtgcccagcagtaccgggaaatgctacttgcgattgtgcatgcgcaatgcgtattctttgaccaggtacatacactttagtgttttcctgtgttgtgaactctctgcagacactgtgactctatagaggcgtatattgctgcccttatgaaatccgctggtgtagtacatcgctggttatcagagaagactaatgttggtccagatgcagctctgtgtgactggcgttcgccattacagctgatcagccttccaccccctgctttgcgtgtcatgaggtttgcatgatgctcgaggagtcagtccggttctttgctgtctcatacgacatgtcttttggagttgtatgcgacccagtctatccacgtattgatgtcgtttacaagtcccagcatgatcagatattgtgtctctacattgacagacgaatcggtatgtcttgcagtgccctctagacctagagtgcagtcatgggcagaaatgggtgacgtttcctgtgcattagttgaaggagatccgactcntgttgttactaacatgcagggggccagc

SEQ ID NO: 318039 - DNA, 718 bp, Homo Sapiens
gagacaagagctctgaaatgttttggatttgagacagcagtataagaatgtcatataaaagtaaagaatgttttccttttaaaatactccaaggctgcttgaaatgtaggcacctctggatttggggtacccctttgcctttccattaagtgggagataaccagattacagaaaagtcgttcaagaaggtcctattaaaacctttaaagctatactttaaaaatttaacaaaaagttcaaaattaattttttataaatagtgaaaaccactaactgtttttttaaagggggaagaatttaatcactataatgtcactttatcaaaacaacctaagagcagtacataaactatttgttaagtcaaaattaaggtctccatgtaggtttgttaattgagcagtgcaccaaatatttttaggtttccagaataccagagaattgattccctttcttatatagccttccagttcttctatgaagattttctgtagcaaaacattattcctaaatccagttttctgaacatgccaatgccagtggtcatcatccagcattaaaatagcttttatcgccctcaatgtccacttcctgatcagaatcctctgaaatctctgattcaaggtcttcctgggaggcaggggagggcgaacattgagagctatccaaagaagcacctttattctgttcctgggcaaatcttgcctctgatcacaggaac

SEQ ID NO: 318040 - DNA, 672 bp, Homo Sapiens
aatttttattaagtacagtttcaaatttagagcttgcacgcttacaaatgtgattggatatttaggatacataatttattcttaaaatacacaacttatatacagatattaaaaactcagtctccaaaatgctcaataaagatgtctgggtgacacttatagaattgacctagcaattttttcttctctttggcagaaagttttgaatcctcatcaagagtttttagtaaattcaacagctcatctttggttgtcttctctgtattgttggaatagtcacgttgatcaattctctggcaataaatatatcctgcatctctatttggatctcttccgttctgtatggccataagcttaacacttacaattttatgtagagttccaggaatcttaaaaacatctttctgatgatccattaaaaagagtaccagaagatctgttttgcctttggataaatttttattgtcaacaatagcttttgagaatatccttttcacaaccattcggttgtcactttctttctgtaatttaaactcagaaggatttgctgcaacagccatgaaatacagtagtcttctaaattcttctctattttggacatctacttagagttctgcaatttccatatgaaacgtcagatagctatttacagaaggttcctactactgtaat

SEQ ID NO: 318041 - DNA, 537 bp, Homo Sapiens
  misc_feature (122)..(130): n is a, c, g, or t
caggtgtgagccactgtgcccagcagggatgcttcatctttctaagaattatcttggctttggactttattcataaatgttttatttctgttagtatgaacaatagactgccttaacaaagnnnnnnnnnaaacaaaatcgatcttgttggattttattcagcagcatctatcatgtagataaattcccaggtgtagcattacagcttctgactaatatagctgccattcagacaatttatgttcaaagagttttctaaagtgataaaaccaaagaaaagcatgtggaaaagcagaagcttagaaagttgtggtcactgaatgcactccctggtttttatttgtcagtgaaatctttatgcattcattgttaatattttaattccatgggtttgtaggctgtgcttgtgtctgaagggttaacaccttgggaaacatggggccctttatgggaccccccaaatggaacaacttcactttctcttttatgtattgagccctgtgttaacatttcacttaagaagagcaccagtgcttt

SEQ ID NO: 318042 - DNA, 1533 bp, Homo Sapiens
gcttttgtccaaacatccgggcttctcctttttgtgttccggccgatcccacctctcctcgaccctggacgtctaccttccggaggcccacatcttgcccactccgcgcgcggggctagcgcgggtttcagcgacgggagccctcaagggacatggcaactacagcggcgccggcgggcggcgcccgaaatggagctggcccggaatggggagggttcgaagaaaacatccagggcggaggctcagctgtgattgacatggagaacatggatgatacctcaggctctagcttcgaggatatgggtgagctgcatcagcgcctgcgcgaggaagaagtagacgctgatgcagctgatgcagctgctgctgaagaggaggatggagagttcctgggcatgaagggctttaagggacagctgagccggcaggtggcagatcagatgtggcaggctgggaaaagacaagcctccagggccttcagcttgtacgccaacatcgacatcctcagaccctactttgatgtggagcctgctcaggtgcgaagcaggctcctggagtccatgatccctatcaagatggtcaacttcccccagaaaattgcaggtgaactctatggacctctcatgctggtcttcactctggttgctatcctactccatgggatgaagacgtctgacactattatccgggagggcaccctgatgggcacagccattggcacctgcttcggctactggctgggagtctcatccttcatttacttccttgcctacctgtgcaacgcccagatcaccatggctgcagatgttggcactgctgggctatggcctctttgggcattgcattgtcctgttcatcacctataatatccacctccacgccctcttctacctcttctggctgttggtgggtggactgtccacactgcgcatggtagcagtgttggtgtctcggaccgtgggccccacacagcggctgctcctctgtggcaccctggctgccctacacatgctcttcctgctctatctgcattttgcctaccacaaagtggtagaggggatcctggacacactggagggccccaacatcccgcccatccagagggtccccagagacatccctgccatgctccctgctgctcggcttcccaccaccgtcctcaacgccacagccaaagctgttgcggtgaccctgcagtcacactgaccccacctgaaattcttggccagtcctctttcccgcagctgcagagaggaggaagactattaaaggacagtcctgatgacatgtttcgtagatggggtttgcagctgccactgagctgtagctgcgtaagtacctccttgatgcctgtcggcacttctgaaaggcacaaggccaagaactcctggccaggactgcaaggctctgcagccaatgcagaaaatgggtcagctcctttgagaacccctccccacctaccccttccttcctctttatctctcccacattgtcttgctaaatatagacttggtaattaaaatgttgattcca

SEQ ID NO: 318043 - DNA, 1062 bp, Homo Sapiens
tgggggtgggccaaaaattgcccgatatgaccccagggaaggagccattttttaggggccagccaggggttccccacagagggagccagccccctgtttggggggcccccggttccggagaccaccaaccattgtttaccatgcgcagtgtgggacagtcccacccaccaaccaacccagaagaggtagaagagggcgtggaggtggatattataggtgatgaacagggacaatgcaatgcccaaagagcccatagcccaggcagtgccaacatctgcaggcattgtgatctgggcgttgcacaggtaggcaaggaagtaaatgaaggatgagactcccagcccagtagccgaagcaggtgccaatggctgtgcccatcagggtgccctcccggataatagtgtcagacgtcttcatcccatggagtaggatagcaaccagagtgaagaccagcatgagaggtccatagagttcacctgcaattttctgggggaagttgaccatcttgatagggatcatggactccaggagcctgcttcgcacctgagcaggctccacatccaaagtagggtctgaggatgtcgatgttggcgtacaagctgaaggccctggaggcttgtcttttcccagcctgccacatctgatctgccacctgccggctcagctgtcccttaaagcccttcatgcccaggaactctccatcctcctcttcagcagcagctgcatcagctgcatcagcgtctacttcttcctcgcgcaggcgctgatgcagctcacccatatcctcgaagctagagcctgaggtatcatccatgttctccatgtcaatcacagctgagcctccgccctggatgttttcttcgaaccctccccattccgggccagctccatttcgggcgccgcccgccggcgccgctgtagttgccatgtcccttgagggctcccgtcgctgaaacccgcgctagccccgcgcgcggagtgggcaagatgtgggcctccggaaggtagacgtccagggtcgaggagagcctcgtgccgaattcgccacccaggcctcgctac

SEQ ID NO: 318044 - DNA, 872 bp, Homo Sapiens
gggtggattttaatagggtgaggaacagggaccaatgcaatgcccccaaagaggcccataggcccagcagtgccaacatttgcaggcatggggatctgggcgttgcccaggtagggcaaggaagtaaatgaaggatgagactcccagcccagtagccgaagcaggtgccaatggctgtgcccatcagggtgccctcccggataatagtgtcaggcgtcttcatcccatggagtaggatagcaaccagagtgaagaccagcatgagaggtccatagagttcacctgcaattttctgggggaagttgaccatcttgatagggatcatggactccaggagcctgcttcgcacctgagcaggctccacatcaaagtagggtctgaggatgtcgatgttggcgtacaagctgaaggccctggaggcttgtcttttcccagcctgccacatctgatctgccacctgccggctcagctgtcccttaaagcccttcatgcccaggaactctccatcctcctcttcagcagcagctgcatcagctgcatcagcgtctacttcttcctcgcgcaggcgctgatgcagctcacccatatcctcgaagctagagcctgaggtatcatccatgttctccatgtcaatcacagctgagcctccgccctggatgttttcttcgaaccctccccattccgggccagctccatttcgggcgccgcccgccggcgccgctgtagttgccatgtcccttgagggctcccgtcgctgaaacccgcgctagccccgcgcgcggagtgggcaagatgtgggcctccggaaggtagacgtccagggtcgaggagaggtgggcctcgtgccgaattcgccacccaggcctcgctac

SEQ ID NO: 318045 - DNA, 948 bp, Homo Sapiens
gcaccgaggcctgggtggcgaattcggcacgaggctctcctcgaccctggacgtctaccttccggaggcccacatcttgcccactccgcgcgcggggctagcgcgggtttcagcgacgggagccctcaagggacatggcaactacagcggcgccggcgggcggcgcccgaaatggagctggcccggaatggggagggttcgaagaaaacatccagggcggaggctcagctgtgattgacatggagaacatggatgatacctcaggctctagcttcgaggatatgggtgagctgcatcagcgcctgcgcgaggaagaagtagacgctgatgcagctgatgcagctgctgctgaagaggaggatggagagttcctgggcatgaagggctttaagggacagctgagccggcaggtggcagatcagatgtggcaggctgggaaaagacaagcctccagggccttcagcttgtacgccaacatcgacatcctcagaccctactttgatgtggagcctgctcaggtgcgaagcaggctcctggagtccatgatccctatcaagatggtcaacttcccccagaaaattgcagggtgaactctatggacctctcatgctggtcttcactctgggttgctatcctactcccatgggatgaaagacgtctgacactaattatccggggagggccacccctgatggggacagccattggcacctgcttcgggtacctggctgggagtctcatccttcctttacttcccttgcctacctgggcaaacgcccaaatcaccatgctggaaaatgttggcactgctggggctatgggcctctttggggcttgccattggccctggtcctcaccctataataatccccctcccaggccctttttctacctctttttggcttgattggcgggcgggaactgtccccccctgcgccatgggaaccc

SEQ ID NO: 318046 - DNA, 423 bp, Homo Sapiens
  misc_feature (370)..(370): n is a, c, g, or t
  misc_feature (382)..(382): n is a, c, g, or t
  misc_feature (389)..(389): n is a, c, g, or t
ctccacgccctcttctaccttttctggctgttggtgggtggactgtccacactgcgcatggtagcagtgttggtgtctcggaccgtgggccccacacagcggctgctcctctgtggcaccctggctgccctacacatgctcttcctgctctatctgcattttgcctaccacaaagtgtaggaggggatcctggacacactggagggccccaacatcccgcccatccagagggtccccagagacatccctggccatgctccctgcttgctcggctttcccaccaccgtcctcaacgccacagccaaaggtgtttgcggttgaccctggcagttcacattggaccccacctgaaattttttgggccagttcntttttttcccgnaggttgnagagagggagggaaggattattttaaagggacat

SEQ ID NO: 318047 - DNA, 1165 bp, Homo Sapiens
  misc_feature (50)..(50): n is a, c, g, or t
  misc_feature (1024)..(1024): n is a, c, g, or t
  misc_feature (1072)..(1072): n is a, c, g, or t
  misc_feature (1087)..(1087): n is a, c, g, or t
  misc_feature (1095)..(1095): n is a, c, g, or t
  misc_feature (1107)..(1107): n is a, c, g, or t
  misc_feature (1109)..(1109): n is a, c, g, or t
  misc_feature (1112)..(1112): n is a, c, g, or t
ttatgctggctgggcccaagcgactccaccctccttacaggtgctgttcnagtgccggacctgcgcccaatcgccgccatgctcaggagcccaccaagcaaagcgcagaaagggttccaaagggccggaaggctagatggggcacccaggacaaagaaattcccttaagcaccttcccctccattccccacttctctctccccatccccacccagtctcatgttggggaggggcctccctgtgactacctcaaaggccaggcacccccaaatcaagcagtcagtttgcacaacaagatggggtgggggatattgagggagacagcgctaaggatggttttatcttccctttattacaagaaggaacaataaaatagaaacatttgtatggaaaatgcagtgaggagtggtagggaagcaggtgaggaggggacagggcagagaaactcccggttcagggagggaaggggagcaggctgcccccaagccctcccacgcagaggatcatgacccgaggtccagggccctagagctggtggggcagtgtgggggacagttctgtgcccggctccacgcagcagtctcgacagcaacagccagctgccggccccccagccactggtgtcagcagctccccatggctcgccgtctgcccctgcccctcctggctggtggccagctgcagtttcctcatgtgcggcaccacagccgtggcattgaaggcttgcttccacttgctcttggcaaagttcttcttgatctgctcactcaccgactggtggatattcttatctagagctgtatctcctgcaatccatgggtgctgcaaggcctgctcacaggtgaatcttttctctgggtccttcctcatcacgtggcggatgaaatctttggcagagtcagagatgtcgtcccagtaaggagagttaaactcgtactcgggcttcagaatctgttcaaagagtttggcatcattctcgtcatagaagggatggttaccgcagagccagatgtaggcgatgacncctatggaccagcaatccacagccttgctgtagggcttctggcccagnacttcaggggccacntatcccgnagttccacaggngntgnagagcacactgcccgggtcctccatcttggagaggccaaagtcggagatcatg

SEQ ID NO: 318048 - DNA, 659 bp, Homo Sapiens
atcttccctttattacaagaaggaacaataaaatagaaacatttgtatggaaaatgcagtgaggagtggtagggaagcaggtgaggaggggacagggcagagaaactcccggttcagggagggaaggggagcaggctgcccccaagccctcccacgcagaggatcatgacccgaggtccagggccctagagctggtggggcagtgtgggggacagttctgtgcccggctccacgcagcagtctcgacagcaacagccagctgccggccccccagccactggtgtcagcagctccccatggctcgccgtctgcccctgcccctcctggctggtgcccagctgcagtttcctcatgtgccgcaccacagccgtggcattgaaggcttgctggcattgaaggcattgaagggagaggggagaaaggacttttgagagagtcaagtcatggggcaggggcgcagtgggattcttgcaattgttctgttattttcattcaggagttattttattaattcccctaaagccccccgaaaacctctacaaggctttattatatatttacacacacacacgcacatatgttagatgtatgtgtatctatatatataaatagaaacataactataattcatattaatatgtaatagcaaacactatagc

SEQ ID NO: 318049 - DNA, 640 bp, Homo Sapiens
  misc_feature (164)..(164): n is a, c, g, or t
atccttttagcccccaaaaccgggaaaggtttaatttaacctccttaaaaataaaaacccgtctaaaattgtcctctcaatataaggaacttcaaaaggggaaccttaaattgctgaggtccctgaacggccatctaagaaagcttcatgcagttttctaggantgccaaagttgaagcacgaaactccctttcttcacggttccgggccattactaattagttggcagattacattaaccatttcttgaagtagggcaggacacttttttagcatgaattgctgatcttcttcaagggtctcaggaattttcattctagcaagatgagacagttaaagaactctggccttcaggctatatgggcaggtaagtggaggctcattcttctttaaattaatgctgccaatttctctgattagctgtggtattagaatattatccgttggtctgcttgtggcatctttattatactgaggatcaaattcagaagctccagccaaaaccatgataagacgtttcatatccatatttcgggttttataaacaaagtatgtataaatctgtgttgtgcgtattagaatctggtctccactatagcgcactcaggataccaccaagagcccacaacaactggaagga

SEQ ID NO: 318050 - DNA, 237 bp, Homo Sapiens
attcagatttcactagtttttacatatacaatttttgagagtgtgtatgtagctctttgacattttattgcatgtatagattcctgtaattgccatcacaatcagaatacagagctgatccattaacactaagaaacaatttccttcctcttgagagtcctaccctcctcccagccctaagccctggcaaccacttattggcttttatcacaataattttgttaccctacatatata

SEQ ID NO: 318051 - DNA, 1741 bp, Homo Sapiens
  misc_feature (24)..(24): n is a, c, g, or t
ttgggggtggtttggccccagganttcccccaatcccttgaataatcctggcagtttccttccacccattgtaccggccatcctgcggaggccttaaatatacaggccgtaaggtcagcagcaatttgtctaataagtgatgagatcagtagctgaagtctctaagctgggccattactaaataccatagccatgttgatctggaaatttatccctctagtgtcttacctcacataagccatttgcccactgtgcaatatagaaaggtgttttcaaaagtatttggccgtagattttcacatccatcataaggttggcattcaataaggaaaaagttctaactccagtattaaattgtacataaatcccaaatgttcttaaagaacactcagggacatgtttgttgcctgggattggtaatgaaaggttggtttttgaaacttgaaatttcaccattggtttttttcctatcatttctgcatatccagcaaaaggaatctcatgttgactcctggcagagttcagtggcttcagtctgtctatctgttctgaggggaaaattgtgttctggatccagtaatcaatttggcaactttaatcgaggttttcaaaattccaaggagggttaataaagaatgataatcagttttatttgctaatagctaagacaaatttgtaataaagtgttttataatacttcaaaagcatgtggaagagtgtgccgtttctgtgtcacacattttaaatgcacttgaaacaccacacagcaaggccattgaaactgggctcctggggctaagtcgctgctgctggaacatcatcttcagtaagatctgctggtttgggggcttctagtttttaaataataaccagattcaacttctgtgactaaagaaaaacttcacattaacggtattttataaaattttcaactacaaccactagtcaacctaaaaccttagtgcataaagaactgaaccacaaaagggtttcatgctgccagcattttgccttctggtttcccctgcagagcacaggtcatcaatagaacacatccagttcaaaggcatggactccaccgccacacactagacaccactccggcacttgggaatgatgggcccagtcaggtccgcaagcctcctcttcctcacaaggtcattgttgttcatcattgcgttggatgcccgaagccggggtccttgctgggtaaagtggtagccgaatttgagaagtgttgcgtttttttccaacatgctcacaatctccatttccactttgttgcccaggggctggctctggttgtcaattttcatttcctccagagaagtgttgtatgggagggcttctaccaggcgcagaatcccagctccagaaatgaagttggattccacattcagtgtcttcaacaccttgttctccttgagcatctcagcaagggcatacgccacggggtcattactccgtgtccccacgatgctgaacttcttcacatatgagttttctttcagggcttctgcatatgccttgagggtggggatggggatattccggatattattgaggttaacttcttcaagttttgggtcgttgttctttatccgttccagcgtttcctatacgtctgttcaatttggttcttcgtcgggcacaggcttgtattgtgtggctttaatcacgctgttgagcccctccttgttcatgatggagctgctgctcagggcctggtagtactgctgcc

SEQ ID NO: 318052 - DNA, 487 bp, Homo Sapiens
tcagttaaaaagactgggctgagagaaggtaaacaactctctcaagttcagagccaagctgaggaggagggcccaagctgaaatgggtggccctctatgtccactgcaagaaccagtccctctggtcacagacatccagatactggagaagtcacggtccatgtctgggttcctctagctcagaaacaagagacttccagagcccacttagttggaagtagaggagtctgtgtatctataaattctcaggtggccttttacttagaaaagcaagttattttcaagtaccctctagtgaaatagttacacacaactaactggccagactaattgggaagtcattgtaatctattaatcaaattaggatcctttaagaatccccccactgggaaacacattaacttaagatgctatggatattgatatttaccatttgaaaacttgaatttaaaaactgtttaccagattttatcttgaactcagaccc

SEQ ID NO: 318053 - DNA, 660 bp, Homo Sapiens
  misc_feature (101)..(101): n is a, c, g, or t
cccccggggctctcttaaaatggcacctttttaagggccaaaaatggcccagcgctagcacatttaagggggtttacccaagggagattcggtggggcagnttggcaatttaccggaaggcccagcacttaatgaagctttggggtccagttcttccactggctcaatcccatttccaagccctgaagcaaatggaagattccagttgtgtagaattcttcaatggggaccccccaaaattgtatacggtttagaacccacagaaacggtttttctttgggtcagggaccctcacactctgagccttctgccttgtatggttgcatagggtgttaaaactcacatttgcttctcccttgggaataggcattgcctgtgtatgcccgttctgtagctagtcctgcattccgtaagaggccccctaaccctttctgtgagggggaagcgaggcccagtgaggatttgctgtccaggcatcttcctgaccaccagatgccatcctcagggtagaaagggccccgtttgtgcaggaagggagggcaggcactcagacctccagcagcttgttttgtggtttctcagagggaggccctacagaggagcccgggtgggagggagccccgtgtgtggcttcacctggcttcagaatttccccagtgg

SEQ ID NO: 318054 - DNA, 801 bp, Homo Sapiens
gctaacacaatttctggtgttcaaccttggtctcaaatagctgcttttgtatatgattcacgagcttttttagagtttatatttttttaaactaccgaagacattcattatctgcaaattaagactcaccttcactttccaaaatagctgagggttgttggcttgttgtagctgaccaccaaaagcagtcactgcaaatcttttaattcttccctatcaccttttgtattttaatgcaattattttggtccagaactgacctgtattttctgtattgtacacaaaagctaataattttgtgtactttttatttattttggaggttttatatgatcttcaattgagtattaaataatttgcctagattaagcctaaaatgatgaccagctaattaaagaagatattttgaatctggttctgagctaaagttgagtaaattcttagctaagaaaaaattggaaatccatcatctatattagcaacagattctcagagtaaattgttaacttctatgatttatgataatcaagctggacttgatcatacaagttagtctcataatgtattggaccaaaatgtaaactttcattggtcagatttagaagcattcatgctcacaagttttggggaaagtgaaaaataataaaatcatcttggattttattctgtatattaaaatttatcttttaaggaaacaatctgtatactacttgcttgtatagccttttgacccttcttgagtttttcagaagcctttaatttttatactttcaataccatatttacattatatactttaat

SEQ ID NO: 318055 - DNA, 647 bp, Homo Sapiens
  misc_feature (435)..(449): n is a, c, g, or t
ataatttgcatttcatttaaaatttttggagatgatttgaggggtattgtagcagactgtgtataaacaactccacacttcatcccagagtgtctctaactgtaactgggattagggcaagagcacagtcccaagataaaaattgaaactctgtagttcagttgggactcaggctagtcttattttctttgcttttaggatagtgcagtaaatttctatccaaataggttcctttccttgggtaaagacaagttactttgtatttctttgtttgatatatacttttgaatgatttggggtacattcttactttagttcattttggaggaatatttcttagtttaatttgtctcattattaattcctccttctctgaaactttttggggatataggtatgtatggcatagtctacaaatttaatgcctttacttgnnnnnnnnnnnnnnngcagatgtagggcgtgtgagtatggggcgatggtgcagggaaccttgctttaacatgctattttgaaagatatccccttttattttgtagaaatgggttaccacgttgagccccaggagtttcttgtacatttggatcctagcagaggaaatgggactttagaaagattactctgaactctgaagggctaattgaaaa

SEQ ID NO: 318056 - DNA, 576 bp, Homo Sapiens
  misc_feature (470)..(470): n is a, c, g, or t
  misc_feature (502)..(502): n is a, c, g, or t
  misc_feature (554)..(554): n is a, c, g, or t
tagactaagtatatattttaatttctacaaggtcccctttcaagttttagggaaatttaactgaagtgtatacaaattagacattgctaatatgtacaaaagtattttatacagtttttgaacgatactagctatttgcaataaacaggatgttacaaaaacagtccaataatgcatttcctattaagaagcacaatacacaacataattcaattttattaaaaaataacttcaaaatgtagaacaatcccctttaggaagaaaagctatttctgtagttcactctgtcagtaaacacacaagttgaacgctgcagcagagggctgtccttttccatggagaaaagaaatgaggcttctagggcctatcttttctggggtaaaaattccacctacagctgagatgggcagttattgcctgtgggtagggcaggattttgaaaaatgccccctccccactttccatggagnctaatctccagaacccggtggaatatggatgngatgagacagtctcctggcaattatgggtccatcggcaccaatccacccttnaaagataccgtggggcttgagc

SEQ ID NO: 318057 - DNA, 462 bp, Homo Sapiens
  misc_feature (264)..(264): n is a, c, g, or t
  misc_feature (326)..(326): n is a, c, g, or t
  misc_feature (367)..(367): n is a, c, g, or t
  misc_feature (388)..(388): n is a, c, g, or t
  misc_feature (396)..(396): n is a, c, g, or t
  misc_feature (430)..(430): n is a, c, g, or t
ttttagactaagtatatattttaatttctacaaggtcccctttcaagttttagggaaatttaactgaagtgtatacaaattagacattgctaatatgtacaaaagtattttatacagtttttgaacgatactagctatttgcaataaacaggatgttacaaaaacagtccaataatgcatttcctattaagaagcacaatacacaacataattcaattttattaaaaaataacttcaaaatgtaggaacaatcccctttagggnaggaaaagctatttctgtaggttcactctgtcagtaaacacacaagttgaacgctgcagcanagggctgtccttttccatggaggaaaggaaatgaggcttcnaggggctatccttttccgggnaaaaattnccacctacagctgagatggggcagttaatggccngtggtagggcagaatttggaaatggccccccc

SEQ ID NO: 318058 - DNA, 2057 bp, Homo Sapiens
tttgggggagacaattttattcactatggatatatatacatgatcaacattttatcttcattcttcagaagacttaattagagtagctttcttctcatacttatctctaatctctttaatattttccgagagatcttctgacatgcattcttcatattctctatcaactttaggaatctgctcctcaagatgtttctctacagacccaacatgtgtagcaaccatctctaacagacgttgcaagttatttcccacttttcgtctttcttcagtcgtggtttgcacaactagttggtattcccgctgaacagcatctaattcattcatagcttcactgagcccctggttaacagtactttctagcaggtgcttgtgtttctccaaggactcaagctcactggcacatttttcatcctcttcctctgcttccttaattttttgttggtaaagatcatccagcttttgaacttcttctttcagagttctcacacttctcttgctttctgttatcattgcattcaattgttctaaagtatcctccaaacccatttttttatttagggctttattaatttcttcttcagtttcattcaggagttccttaagaggtacataaacttgagccctgtatttgacaaggcagttggcaccagcctcgggattaaacttaatttcaaagtcataacctttggaattctcagcacctttaggaataagttttaattttctagccaatttgtgatactctgctaattgtgtttcaatcgcttctttgcctctggcatattttaactcctcattccacaacttctgttgttcagcttccaggtccttggttaatttattaatagtctgctgcaattcatttctttcatgatttattcgctcaatgtctgcaactgagtacttctggttgtcaatgatattctgtagtcgagtgttctcctgttttattgtttcacattctagttctactctagcaatttcctcattgagaccatttaatttctggtcaagaatggctgaatgagactccaaattgctcatgtatgcctgatacttttgaacatctccttgtaaggaagccttcagttttctcaacgactctagacgattcggttctttttctctttcttgttccaatcttgcaatctgttcattcaatgctctgttttttgcttctaatgattccagcttaaaagcatccacattaaataaatccttcagttttgactgcagctctgcattcatctcatcaaagctgtcggcaccactcataaaactctcatagcattttatggtgtagtccaaaaacaacttattatgcataattccatcttcagtttcttctccccaaggctgcccatcatcaaataaaggtgagctttctttcatggcagtatgtatcttgatgcagtctattagccaaactaaggctgccacaatgtgaggccatgtatgaggagcccccactgtgtacatggagcttttggatagtgcaaaaggatacccaaggtctttaaagattcttggaacctcttcttcaaactttgtgtcaggaagttcgtatgaggggcacaggaagccataaagaaatgtgaagatcttcaggaaagtctttaacagagggagcttgtagagatttcatggacacattatgtgcattaccattttctgtaagaaactcacagagttgtcgaatacactgctgaatgaatgctttgtcattaagtggtctcgggtccttgattttctcagaactggaaaatataccaagttgactattccgggatccatgtccactagttcttttgccaaatagcgagacttttctttcagatgtcggtttgtttatactcaactttccaaaggttggtttctctttggtttgaggggtatagaggccttgtttatttacatcctgggatcttaactcctgcatggagaggcggccagcaccaccgctggaaactgaactgcgcttcatgcttatgaccttttttccagtttcctgacacgacccagggaccgaatttctgtaaaccgtgcaagtatct

SEQ ID NO: 318059 - DNA, 1625 bp, Homo Sapiens
gaggagataagctggggctgagcaaaccgcacccaaggggttagagggattctgggtgagagggatgagctcccaaggcctctgaggcttccacccacacccaccctcactcccagggtccaagagaggcccagaagttgtacagcagcatccagcaaggccccctcgcacagcttggacttacaggccactcacctccaacaggggagatagtcacccatgtactgcaaaaacagggactaccggaagcagcctagggcccagaagtgtggaagcctggagtagagctgggtcgggggccaggcttgctgcactgtgccgactgctcccagggtgacggcctgtgcccagtgcggaatatggcccatagagaggatgctgtcaggcagaggctctagcatctggcttttattggttgcttttcttaaacccagcattttatttaaaaaagtcacctgaggtggtagtttagtcagggctggagaaaggggtaggccagtggtcagtcgggaggagggtaccggtgtggcatgatgggtgcttcacatgtagtaccaggccaagagtccagcagctagggccacaccagcggccaggatgaactggaggctgggcttcctcagcacagccatagctgttcggaagggacagctgctgccctccagggcacctttgtcttgttcagcagcgtagaaagggcatttacgcatgtctcctttcccatcgtgtacagggaacccatcctccaaggtctctctggccagtgtggagccggcctggtccagttcattgaatatctgcatgttatactcaaaagccttgttggcctcctccacgatcctctctttggtcttcatgttcaggtccagggcgttcatcctggcccggtagagctgcttgaactgctgggcattgtccacattctcaaacaggtagaactgggtcccttcccctgtgctggggagtttcagtgctcgctgggccaccttcttcagcacctggccccccgagagatcccccatgtagcgggtgtatgcatgggccaccagtagctccggctcgttctgccctatgtagtggatccgctccacgtacttctgggcagccttggggcactgcacctgctcctcccagttttcaccaaagaaatactccatgtccttggtcagcgcctccttccggtgcagctccatggggaagtacaaaggggcaaaggctggatggtccttgttgcgctccatttcctcctcgagggctgagtatgtgaagtaaagtgccgtggtggccagcttaaacagctccttcttaatgttgcctttcaagaagtccttgacaaactgggtgttttctgcccggtcgtgtgcttccttggtcccttccttcaggagctccgagaggtcagccattctcatttggttctccttttctagggccccagagttctttttttctgactcgtctaccccctctgaggtttccacttccgctgacattgctgctgggtgtggttcttgctgctctcgctcctctggtcctgccgcaggtcgctgtcgcctgtccgccagcctccagtcagcgtgcccgtcagcgactccctcaggcgccgcagtccctgcagcccagcg

SEQ ID NO: 318060 - DNA, 585 bp, Homo Sapiens
  misc_feature (544)..(544): n is a, c, g, or t
attagcagtaacttttattgctaaatacaggaagattcaaaatttagtaacaatttagagttaaccagttttcttcagaaggggcctggttagaaatcaagaaaaataatacatatattttagtagaaataaattcaaatgaaaagatgaggtgaattctcattttgtgttcagtggtgaggttcagccacatcatacttctggctaatgtccacatcgttattagatttatgacagagttcagctatattatgaattaagtagagttgatgggaacagcatctggcagtctaagaccttttgttatttctaacagtaaatgtattgaaattcatacaaccaacataaaacagtagtttgtaaatctatcttgtacatggattgagaaagtagaaataaaacaacatgaaacaatgtgagactcattcattgagctacagcatgatggacatcgtgactttgaccttgaacaactttaagcctcaagtttcttatctgcaaaaataggttaagaattccttgcttacggatttattttgcacantaaatatcataccatatgttggaatgtgtttggaacacagc

SEQ ID NO: 318061 - DNA, 380 bp, Homo Sapiens
ctgtggcccttttgttttattggttattttattcaaggaatacccctgaccacctctattttatctatgtgtttttgcttttattagagccctctgttttttattattaccaaagaaccaagcccatttttgaataacctctgttacaggtattagtttaaatgtttcatacctttatattagttaagataagatggtctatgaagtgataccacattaatcctcaaatctccaaattgattttcaaatttctaaatcttgatggcttggcaaaataagagatgtttttcttaaccatataaagttcagtgtggtttgcataaatctctttcatctttagttataccttctggaacacatagcatccaaagttcctccaa

SEQ ID NO: 318062 - DNA, 487 bp, Homo Sapiens
  misc_feature (50)..(50): n is a, c, g, or t
  misc_feature (101)..(101): n is a, c, g, or t
  misc_feature (110)..(110): n is a, c, g, or t
  misc_feature (117)..(166): n is a, c, g, or t
  misc_feature (272)..(335): n is a, c, g, or t
  misc_feature (343)..(343): n is a, c, g, or t
  misc_feature (349)..(349): n is a, c, g, or t
  misc_feature (370)..(370): n is a, c, g, or t
  misc_feature (392)..(392): n is a, c, g, or t
  misc_feature (396)..(397): n is a, c, g, or t
  misc_feature (402)..(402): n is a, c, g, or t
  misc_feature (406)..(406): n is a, c, g, or t
  misc_feature (417)..(417): n is a, c, g, or t
  misc_feature (419)..(419): n is a, c, g, or t
  misc_feature (423)..(424): n is a, c, g, or t
  misc_feature (428)..(428): n is a, c, g, or t
  misc_feature (453)..(453): n is a, c, g, or t
  misc_feature (455)..(455): n is a, c, g, or t
tatgatgagggactcccctagagttccatagcaattagtaataaaattgnctagattttaataatgccaacggttctttctttaataatttcttcagtttnccaaaatancagcagnnnnnnnnnnnnnnnnnnnnnnnnnnnnnnnnnnnnnnnnnnnnnnnnnntcttatacatgctaataccttttgggattggtttaagtaataggacatcttattttttaaaacaaaaaacttatgctaacctcagtaatatttcttctgagagtgnnnnnnnnnnnnnnnnnnnnnnnnnnnnnnnnnnnnnnnnnnnnnnnnnnnnnnnnnnnnnnnnagatcatnaaatcnactccatccttcctaacaagncccctgtattcccacctactcntaannctcancatnagaattgcttnancccnnttancaaatcttccaattacccccctttncncctctccagtcctcaaaccaccctaataaaca

SEQ ID NO: 318063 - DNA, 603 bp, Homo Sapiens
  misc_feature (551)..(551): n is a, c, g, or t
tgcaatgtactgaatctgggatgtacaaaatcaaatgtgtatttatttattcaatcattcaaatatgtttgtaaagctttcaaaataggcattcgtccttttttaatgaggatcacaatctagtgggtaatacccatttatttcttgctgttaatcagattgattaaatgttaccctgtgtccttgtctcaaaatgcaaactctgtctacatctttagtggaaaatctgttaaaatgctgagaactagttttcagtcaagtcagtcagccaatggcttacatctttagaggaaaatctgttagaatgctgagaactagttttcagtcaaatcaattgaataaataaatacacatttgaaatgactttgtgggcattaataattcacttaatctttctgcttggtacattctcatctagatcagcgtttctcagccttagctgcaaatttgtatcatctggaagtaggacatgataaagagagagagagctagagatacacttaaagaaagtgaactatctctgggcatgaacaatctctgggcatcaggtngagatagagacagattgaaaatgagaaccatctctgggcatgaacctgagta

SEQ ID NO: 318064 - DNA, 1639 bp, Homo Sapiens
  misc_feature (914)..(947): n is a, c, g, or t
ttaaaataaatcacatgactaagctgagcaagtcacatccttgtttgcactgtatgaggctgtatgcaaaatccagaggggggcagagatggagggggcaacccaaagcctggctggaacctggaaccaggacacctggcctgccaattacatgccacctcatatgaattcccttaaatctgcaccttcttctgataagcaaaatgcagcccttctgctctgaggaagaaaataccattaaaaagaaggcagaccaccaaacagcactggccataagccacaagttcactctaggacaaaacagcgatgttccccaaggaaaattcactgcgatctgcaagccctggcaaccaaccgagagaaagaaccaggaaggcaaggacagtgatcatgttgctagagcctgctttgcacacacgtcatcaacagacagcagtcaacaagctgcctagggcctctgcagagccagatcaaccccacagcctgtgagccaggccttaagctgcctatttgtgctgaagcgggctgcagaacgacccgtgttatccaccctgagcaccaccaacactaagcacaaatgacaacaccatctcacctgaaccctgtccaactccacagctgcctcactggcctttgccactgccctctctgatggagcaagggtctggccttccaagcaaatgtcagcctcagattcaaaagacacataggaaggagcaacacccaacacactgaaaactcctgcccgatccacaaagaccccagtgcaagcgatgggcagcatcagattgatggaaaccacaccctttcatttagaatttttatgcacacgagtaaccttagtttccaagttcacatgacaacaagcaaaagtgacatacagtgcagccaaacagttcacttataacttagcnnnnnnnnnnnnnnnnnnnnnnnnnnnnnnnnnnccaaagaatagttccttaaaatggatgctcctgggatgtgaataaagaaaatacgtctgaaaggtgaggatttcaaacagtagatttcttcatccttcaaatttctgacccatgatggcaggcattgtacctcatgcctcctgctcacccgcttttcccagaggtgagcacacatgggcccttcacttggagaagctgctggtgaggcccatctcctcctccccctgcagtagtgcttcaatgggaatcagattggacggggtgtccaggctctggagggatagaaactctgacacatccatggcacttaatgtttctgtctgagggtctgaaggagtctctgcttgtcggctttgctcacaggaggagggcaaggtagaggatgatgacccgggaacaggggctgaagagaaagtctgcgctgggagctgcaggctgggcccatcaggagcctgggggctctgctctggagggggtggggaggagcagccctttctcctgctggatgcccgctcctttgcagagtcccggcatgcacactgacactgacatgcctcttcttgtttgatgatgatcacaggaacactgaggccaatctgctggacagagctccctgggctactggctactggtactgcagtggtaaaaaacaccttctcaactttagatgcttgctgaatttgtctcgtgcc

SEQ ID NO: 318065 - DNA, 414 bp, Homo Sapiens
  misc_feature (26)..(26): n is a, c, g, or t
  misc_feature (49)..(168): n is a, c, g, or t
  misc_feature (236)..(349): n is a, c, g, or t
ttgggaggctgagatgggcagatcancgaggtcagcagttcaaagaccnnnnnnnnnnnnnnnnnnnnnnnnnnnnnnnnnnnnnnnnnnnnnnnnnnnnnnnnnnnnnnnnnnnnnnnnnnnnnnnnnnnnnnnnnnnnnnnnnnnnnnnnnnnnnnnnnnnnnnnnacaaattatgtttttataaatacagctttatgttgaatgttgggattcctagcctgggcaacataatnnnnnnnnnnnnnnnnnnnnnnnnnnnnnnnnnnnnnnnnnnnnnnnnnnnnnnnnnnnnnnnnnnnnnnnnnnnnnnnnnnnnnnnnnnnnnnnnnnnnnnnnnnnnnnnnnntgctgcagtgaactgtgactgtgccacagcctgggcagcctgggtgacagagtgaaaccctgtct

SEQ ID NO: 318066 - DNA, 625 bp, Homo Sapiens
agaacttgtggtctttattgtagggtactgagcaagaagattcaggcagctcatgtttaagacctgaactctgagatggtttaaaggtaggagtttataaagatggggaggcagaggttacagaaaaagtcataaatcaatacattgaggctatacattggtttgactaaaaatgtgggacatcttgaagcagggcctctaggtcataggtagattcaaagactttctgaattgtgattggttaagaagcaaagctttgtctaaaatttgggatcagcagaaaagaatgttagctttagctcatgggtttaactgcctccctcgggaagaaatttagaacgaagaatggtgatcggagttcagtcctcaattgccccttatctgagttctatgtgccaatgggatccgtttggtgggagtttggatttctgtaaaccaactcaggaagagaggttaaaatgttatctttaatttctatagggaacaaaacatcttgtgatgctaactgctttagctatttgtttaaagctactttttgtcttttttgcttatcaaaatcgctcatttactttccagggctaactaggggtatggaatttttcctttaaggagtcaaagatatttc

SEQ ID NO: 318067 - DNA, 618 bp, Homo Sapiens
  misc_feature (79)..(268): n is a, c, g, or t
aatgaggtattcattgtagggtactgaccacgaatatttaggcagctcacttgaactagcttaactgtatcctgcactnnnnnnnnnnnnnnnnnnnnnnnnnnnnnnnnnnnnnnnnnnnnnnnnnnnnnnnnnnnnnnnnnnnnnnnnnnnnnnnnnnnnnnnnnnnnnnnnnnnnnnnnnnnnnnnnnnnnnnnnnnnnnnnnnnnnnnnnnnnnnnnnnnnnnnnnnnnnnnnnnnnnnnnnnnnnnnnnnnnnnnnnnnnnnnatgaggcactggtggcccccagccttaatcttctgagttccatttcccttggaacctgacttgcaacagatacaatgtatatcgtgttttaaaacatgtaccataatacaatttatgttgtgaaacagtattatttatgtttgggaatgcgtgtgtattttgtaaaactgtaaaagcatgcaccagaatgacgaacaccaaattcaagagagaagttacttctggaaggtagaaaggaggacaggcttgtggaagcacacacataatgttttaataactacattacattttcattcttatactggatactgtatacatatatactggttagaggattccctatgcttttt

SEQ ID NO: 318068 - DNA, 482 bp, Homo Sapiens
attatcaactttaattcctaaatgaacattttaattataaatatataatctgataccagcccctgttcaaatttccctgattgtctcagaggtgcctttctgcagttggtttcttagcagcgcccaaagcccaccaactgcatttgaccatctacctcttcaatctctctccctctgagacggtccctgactcctctctgtttttttctttgttgctgctttattggagaaatgcatcattttccatgtagaaggtctcacactctggatttggtggtttgctttgctgtgtagtgtaccaactcgtgttttcagccctgcagttattataatcggatcattggagctagaccggctctactcagtctccattttcgagggcagggatgccatcgtggtggtgctgggaccttcctctctcatcacacagtaagccagctgctgtctgcttgtatcactttcagtgactcaaagactgactc

SEQ ID NO: 318069 - DNA, 591 bp, Homo Sapiens
catagaaaaggcgtagcaaaaatacagtattgtggaaccactgccatatacgtggtccatccttgactgaacatcatgcggcatgtggctgtatgtatacacatagtttttgctgtgagtttgcatccatctcataggaagacatatatcaaaataaggaccagactggagagtgtgtaaattacttttcaatactaatggcttattaatttgatattgtcagcaagtatgttgcaaaaacaaattccaccagaatgtgagttccatgagagcaggaactgggttgttcaccttgttggcacttggagtagagccactgagcttcgtgctgcataaaattgcttggaagaaagaagggagggcattccaggtaactgaagcattgctatgcaaagtaagcatttgccctctgaaatattttaacaatgtttatagaaacctttctcaattgtattaaactttgtaaattgtaaaaattattctgttataccttttctatttactaggcacaggcagccataggtgctaggtatgttttgaaaacatattgaacctacagtgtacatatcattccatgccattaaatattct

SEQ ID NO: 318070 - DNA, 469 bp, Homo Sapiens
  misc_feature (294)..(309): n is a, c, g, or t
ggaaattacatgcagcttcattttcaaatgaatccttaaaataaggaaatctttttaggaaaacatttaatttttgtatttttgattttaaaggcatgagttatgtcaattttcagtgtattaatgaagattttaacttttcatcaggttgagtgttttcttactatattatctgttgtgtatgtagttagcatattgtgtcactgaactgtttaaaaatctagcatgtagagcaagcctgttttgtggaaaatccttattcattaaaaaaataatcatggcagattttctgcnnnnnnnnnnnnnnnngcatttgcaattcagaatactgatttttttaattttatttaaagaaaggtattttgcttgcaggaaaaaaatactacagattcattttaatgagaatctttgaaatgtatttatctttagggcatctgggcatctttatgctgtttgtcttctgtctttc

SEQ ID NO: 318071 - DNA, 593 bp, Homo Sapiens
  misc_feature (530)..(530): n is a, c, g, or t
ggactttactaaaacaaagctgtggtgaatatttctttgttttatctcttgtcaatttttttcttgttattctaaaaagaataacttaagactttatagtcttaagactatatacataagtcttaagactatatacatttttaaagattttatgcttactacttaattgccattgaaatatttatactttcatcatcagtgaatgaaagatctctaccaatgttacctatcataataaagaacactttgacaatttgataattggaaaacggcaactaatttgtatttcaaaatttatttttaattcagcaaatactaatatgcatctcctctgttccagtcactgaatgttgggaaggggaagtgattgagaggtgagcaaggcagatcaagtttctactttgatggaacttaaagtctaacaactttaaacaagtagcaattaaaggggtgatgataaggagcatttaaggttatgttccaggttcagggtgttagattaagccttctaagtggcacttacagatganattgagtagccaaggtgggaaaggagggcatgcagggaggcacagaagtaaaatctttctgga

SEQ ID NO: 318072 - DNA, 430 bp, Homo Sapiens
  misc_feature (174)..(186): n is a, c, g, or t
tacattttcatcaataattttcagtctaaccctatgattacatgcttgccacctgccccccaaaataagtggtctatagccttgttagcaattcttcacaatgatacttatcatcaactggacatacttctacatttcaatttcaagatctataagtggaattttaaacatagnnnnnnnnnnnnncattttcagtaatgatacagaacagatgttcaccatccaaagtatggcaggctttcatatttttaatactaacttattttagccatgtgtatatatatgcataggtaagagtcattaattaaactttattgacatataaaaataggaaaaatgcacaaaagtaaaggtacagctcctttacttttttttactgaaaagtagttttactactaaaaagcaaacacttttgaaatgaaatctaatt

SEQ ID NO: 318073 - DNA, 481 bp, Homo Sapiens
  misc_feature (151)..(151): n is a, c, g, or t
  misc_feature (188)..(188): n is a, c, g, or t
  misc_feature (197)..(197): n is a, c, g, or t
gccccacaaccttggggtgctaacccacccttggattcagatccttgggggcaagagattgtaatcccgaaccccaaacagggtaatccttccatacccaggacaaggagggtgttggtcctatggggttcaggatgggagtgaagccctnttggatttcacccaaagctcccccctccctactctcngcatgcagnaagccaatagtcagcgcaggcgacgttagttgtcctctggagtcttctgtaagatctggcggcatcgagtgacacgcaggctgctctccacacgtggaagggcatggggctccctgctgagctgcagaggggccaggggcagcgctgcatcccggcccggtaggagaacgggtggaggaaggccagctctgaggatggactatcccccatttgggcttgggacccccgcttatcttctggccgtatggctctgctcagcaaacctgtgtgtttggctattcttg

SEQ ID NO: 318074 - DNA, 532 bp, Homo Sapiens
  misc_feature (50)..(50): n is a, c, g, or t
  misc_feature (58)..(58): n is a, c, g, or t
  misc_feature (104)..(104): n is a, c, g, or t
  misc_feature (354)..(461): n is a, c, g, or t
agctcaaaaaagtctccctctaggggaaggcccctgtggaacccctgganccccctgnagaaagccccaccctgctgcccccagcctgcacggttttccttcanagcctctgcccacaatctggaaattattgggttcatttacttgtttccttgttaatgtctcccactccccacctacacgcatgagaacgtgaacccctgagagtcgtaaccttatctgtcttctttgggttatgttcccggaacctagaaaggtgccaggcacacagcggatgttcagtaggatggtaaacaaataaagcttctttaggctgatgaaaaaactgagggtccaggcgcgggttgtcacgcnnnnnnnnnnnnnnnnnnnnnnnnnnnnnnnnnnnnnnnnnnnnnnnnnnnnnnnnnnnnnnnnnnnnnnnnnnnnnnnnnnnnnnnnnnnnnnnnnnnnnnnnnnnncaaaaattagccatgtgtggtggtgtgcgcctataatcccagctactcgggaggctcagaattacctgagc

SEQ ID NO: 318075 - DNA, 519 bp, Homo Sapiens
tgctggaacaattgagaaagaaaaaaatgagtagttttgagctacagaaaagcaagacgatttatattatatttgacattcatatacacaaaaacagaatactgtcacttccacaaatgataaactattttgctgaattaagatatgacagaaggtgacaaaatgaccatatcattaaggaattgaaaaactactctctgatcctcatgaagttagctgtaaaacagtatacttacttctctgattcaaaatctccctgttcttcaaattttacagtgtgccttattaatctccattgcttaatgtcaggtgttggattccagaaaacctctgaattatcagtctttttatcagtaataaaaacttcactatcccaatgaccttccaaagtagctaggacttcttttcccagtttaagtttccctgatatttgattaacacagtcactactccctaggaatggcttttaaacgagaaaatgttaaacattttacttttcacttatatttacatataatg

SEQ ID NO: 318076 - DNA, 1467 bp, Homo Sapiens
tttttttgaaagctataattatttatttccaaagagtttaaagattaaacttccctcaaaacaaacaaaaggcaaggtaacatcccaagctgtgaggggctgagtctctcctaggtgcagggcagcacaggaactggctgcacaaggccagagaggttacgtggcggctctcttcaaattagaccacacagagcgcttcattccctgtgcagtcttcacatcttcccagtccagtttgacgtctggaacctcatcttctggctctggatccttcctcaagggcccccggggggacgcaaccacaatgggcagagggccacattcctcccggatttccacaacatggaggcccttcttatcagccagctgttgatgggtttcctgtctggagagcccacggaagaggccctgggtgaggctgagcatattaatggacccagagaccttggcatacatgtctttgatgccaatgagccggcagatggtgatgatggccctgtggcagcggaggccgtaacctttgggttgtttcttcatcttgatatgcgtccttttaaatcttaatgaaatatcatggaatattgtatggtcttcatatcgttctatataatgcaaatggtgaactgctctgttctttgctttcctgaaagcatccatccgatcagtagctttcccaatagaaaaacctgcagctccttttccgttccccacagccaccaagacacggatcgatttctttcttccctctttcgcagtcatagtgaaaacgtttcttacctcaagtatcctggtatcaaaatcctcatatgtttctccacagggaccagggtcaggggggccaagactgatgcctccccatgagtttccactccatcctcgctcccgtttaaccttcatcttcttctttcggtcccactcttctctctgctggatcatgtctgcctccaccttctcctgctcttccttgcttctttgggcaatggtctgcactgctccatttttcataagagggacattcagtccgggccatagaaaaccataacgcccttcaccaatgatctgacccctgttcagatcctttcttttcttctttttagttcttttgcctcttcctttttttgctccagcaccagtctctgctaaagcgcctttccacagctcatctgcagtcaatttagtgaagaaactatatggtctatactgctggctcatcaggtgactgggagaagaaatacagcattgtgtctgcagtgcacggctcaagctggcgtagggatgggtgtctctggttcccagtgatgacaaatggccattgccgagaacactcttccatgccaaaatggaagctgctggtaaggtgtttagggaacactgcctccccaataaatgacctgccgtcccgctacacagcacggggaggcagcccacagcgcgcaccgcggtcgccatgctggagtccgagccgcg

SEQ ID NO: 318077 - DNA, 711 bp, Homo Sapiens
actgagtttatgaacttaactggtggagcagtctctagtgatgaggggtgactggggcatggccttgagagtgggaccaaaagatctgagattctttctccccgaaaggtctgtgatggtgcctgtgttgaaaatgctttcatgttaattgtgtacacacatttcatctgtatccctgtttcttttctccctacagaaacatatgaggattttgataccaggatacttgaggtttttctattgggaaagctactgatcggatggatgctttcaggaaagcaaagaacagagcagttcaccatttgcattatatagaacgatatgaagaccatacaatattccatgatatttcattaagatttaaaaggacgcatatcaagatgaagaaacaacccaaaggttacggcctccgctgccacagggccatcatcaccatctgccggctcattggcatcaaagacatgtatgccaaggtctctgggtccattaatatgctcagcctcacccagggcctcttccgtgggctctccagacaggaaacccatcaacagctggctgataagaagggcctccatgttgtggaaatccgggaggaatgtggccctctgcccattgtggttgcgtccccccgggggcccttgaggaaggatccagagccagaagatgaggttccagacgtcaaactggactgggaagatgtgaagactgcac

SEQ ID NO: 318078 - DNA, 646 bp, Homo Sapiens
gtctaaggggaatatattctttaagaagaaactatcacatacttctcatccaggctgttctttgggtcgtgggggctcagttgtgataaaaggtgaagttagaactagttaatggagaactagctcccattatgccacttcctggccaaatcagggactgaccatgggactgccccatatgtgaacctatgttgccttcactgagactggggactttgagaagcactggcatatttggaaactttatgcagcagttgactggtctaaaaactacacagatgaaatctctctcagaagaaatatattcttaactatcctactctctttctcctctataataaatgttataaaggtttgcccctgtgtttgttttactttacatgtgaaacaaaaattttcatgggtaaatgagttaaagtatttggcttttagctcaaacaaatgagatgttagtttaagaatagacctccacttataggctgatttataacatttgcattggaggatatggaaaggatataatgaaaacacaaaaatttccgtggcattttaaattttcatttttttatcaagaaaaattgaattcttgttgaaataacctgtacaaaacctgctttaaaaaatagtttttgatgttgcttacatg

SEQ ID NO: 318079 - DNA, 374 bp, Homo Sapiens
tacttctggcacccaagcgggagtcatttacacttatcttaacttactggaacctttattttccgggtttaagggatttttcttgcttagcctcccaaggagctgggattacaggcatgcgccattacacccaggtaattttcggatttttaggagagatggggttttaccattgtggccagaatggtcttggactcctgaccttaagtgatacacccaacttagcctccaaagggctgtgattacaggtgtgagccaccggtgcccggcacaacctttttttgttatgaacactgtgtcttgtgtgagatatgctgcaggggccgccctaatcacaagaaagcaatggatagaagcatctgacttttgcatag

SEQ ID NO: 318080 - DNA, 1198 bp, Homo Sapiens
  misc_feature (502)..(590): n is a, c, g, or t
ggggtgttatagactcattttccctaatatgttggccaaatcttttcgtgcaggcccccgcgtttttttactaacacagggggcacaaaatatgtgggtgcccgcgaagggttggaacaaggagggaggggagatcccggcaagggcgcattcgagggtttggtttcatgaagagcgtggcagggggctctcccggggggcgggtagttaagggggtagtgaaggtaccacacagttgcttgcggatgaggtggcatgggtcgggggggtaaattggagctcggaggctctccttggaattccggggcggacgactcccaggagatgaccttcaagaactctctttttgggtttggttccaggccccccacggttgccccccgggggggttttttatttggtgagggattccaagcccttagtcaatggcccggggtttcctaggaaacaggtatggcccatgttcatttacttagttgggttcggtgttcaaaggaatggnnnnnnnnnnnnnnnnnnnnnnnnnnnnnnnnnnnnnnnnnnnnnnnnnnnnnnnnnnnnnnnnnnnnnnnnnnnnnnnnnnnnnnnnnccagggatcttataagactaatttattagtaacaacatttacaaagatagctttttaatgctgagttgtatctgatttaatgcagtcagaaagaaaaaagaaacatttatctcattttgctgatctgtcagattttgcttaagttaggagagcctgcaatttcaagcccagataactggaattccatgaataaacacagaaagacaggagaaaggcaaggaagttcaaaaatcacagtctggggggaaatcagtagagtaagattaccaataagtgaaatattggtcatatgatttcttagtttccattagttatgcaaatattttactgttaatatttagattagtgttttagaacgttttgtagagactgaaaagcaaataaataattgcattagcattgttaagtatcagtgttttctgtttgacaaataatcgtacagctgtgttctcaggctgcaataacaaaacaccagagactgagaagctgaaacaacagaaatttgtttctcacagtctggaggctggaagtccaagacagagtccaagactctcgccagcagcgagagtttgattgtgaggcttctcctcttggcttgtaggtggctg

SEQ ID NO: 318081 - DNA, 352 bp, Homo Sapiens
  misc_feature (192)..(192): n is a, c, g, or t
  misc_feature (236)..(236): n is a, c, g, or t
  misc_feature (279)..(279): n is a, c, g, or t
  misc_feature (286)..(286): n is a, c, g, or t
  misc_feature (303)..(303): n is a, c, g, or t
agtttaatgagacacaaactctcaactttttatttaaaacagaaatgcagtagtaagctaaaccttttgccattcatagggaaacaaatatcagtaatcctctttgttctaaacaaaaattcataattatttatacattttaaaatattatattgtttcaaatgttgttagtggggcaataaatcataaagngatacaaccagtcgaaattagacttttaaagatttactctcaangacattgcaacaactccaaagtccagggttcttataggactantttattngtaacaacatttacaangttaggctttttaaatgctgagttgtatctgatttaatgcagtcaggaa

SEQ ID NO: 318082 - DNA, 558 bp, Homo Sapiens
  misc_feature (313)..(313): n is a, c, g, or t
catagtaagcctttttcagcttcaaattgggtccgaaattagattggtgtgtagaatccaaagggtctcatcttaagcttccctaacatttaagggactcagaatggagattcatcccaaaccaaatggggtgtaaatatgagaagaccacatgtttataaaaacagaacatccaacaattcattcaaacacctgcagcctttatttttctgatacttaaggtgctgtgttatagagtgccctataatcctctaagttatgaaacaggtagaacaagtattgatccatccttgtagtcaatgatatatctatngttgttgctctgttgattagtgtccatgaaatcactttaaaacgtgatatctgaatgtttcaccaaatatcaatattttaaaggaagggttctttgtactaaaacttatagaagcaattaggtacacctcactacttacttgtcctcttcccctaaatcttccatttgtagaatcatctagatggacactgcaccacagaactgtctgcagggtgggaatgttccatactgtcctaatacttgca

SEQ ID NO: 318083 - DNA, 357 bp, Homo Sapiens
aaaaagaatcatttctttattttgacttgaaatttcaagtttttaaattgatgaaaagttgtcatttattgtggcaggggtgatgtgaaatccagccacttattggtatgtgttacaacttagctaagtccagtaatagtcagtacatactactaaatgattcaaaagcaaatggtcttttagatcaagtaatagatctcttaaattgagatgtatttaccttagatagtaagaatgactctttggtctcttataagaggtgaagagagatgctgtttctgggctagtatttttgctaaaatggttttatgaaaaactttcataagttaaaaatttggggctgggcgcggtggctca

SEQ ID NO: 318084 - DNA, 592 bp, Homo Sapiens
  misc_feature (28)..(28): n is a, c, g, or t
  misc_feature (41)..(41): n is a, c, g, or t
  misc_feature (89)..(89): n is a, c, g, or t
  misc_feature (154)..(204): n is a, c, g, or t
  misc_feature (263)..(263): n is a, c, g, or t
  misc_feature (561)..(561): n is a, c, g, or t
gagaaacgggtcttgctctgttacacanggctgtactacangtggcaccaacacagctcactgcaagcctcaacctcctgggctcaaanactcctcctgcctcagtctcccatatagctgggccaaaggcatgtaccaccatgcccagctaatnnnnnnnnnnnnnnnnnnnnnnnnnnnnnnnnnnnnnnnnnnnnnnnnnnntaggctcaagaagtcttcttgccttgtcctcccaaaagtgctgagattataggcgtacnccttgtgcctgggccagcttttctgtttaactctaaagactgcacagtgctaagtgctatttgaatgattctgcatttactcataaatgactttatttttgaaacactatttaaatgcattagcaaaggggctatgtggaaactttattggcttatttaagggaagagaggaagtctgtggatcttgagttggaaatttgatcgtagtactaacttatccaactgcttctcttttcttctctgcctacccctcccttataatacaaaaattcctttttagacataatagaaccctggntcatcttcattgagaatctgagttatgatga

SEQ ID NO: 318085 - DNA, 306 bp, Homo Sapiens
atgcagtcactttggaaaactgtacatttgttgttacagtatttccattgtttaaagttatttttaaaatttgcattatgaaacagcatgtacacattcctctgaatatacttagtattgataaagcctcatctttcaaaaatgcgttaacgtaaaaggggctcacatcatttagaacttcattggggttaagatgtgttggtctttatgggtataaaaatttttgatgtataactaaaaattaatgaggtcagttttggtaaaagccttagaattgaagttttcaattttgaactatatttactt

SEQ ID NO: 318086 - DNA, 874 bp, Homo Sapiens
  misc_feature (448)..(448): n is a, c, g, or t
cgttgtaattatttattctgttactggctgcttagtgtgacatatttgatgttatttcaattgtaatactcttcaaattggaacactccttttctgatattcttagcaaatccctcttttatttttgccacttgttataatatctctaagaagttactccaggaccgggcagtagggattactgattcagatgggtccagtgactagaatatgagtagaaagtcgtgaggtctaatttgaacctgtcagagttactgttgcctgcgctggcccaaagtgcagatttttagtcagcttgtgataggccaggtgttttgtctggaccaggagttatctttgacttgtagctagaataaggatcctgagaagtcaggtatccacttgatgtccttttatttgacttgttaccattagtactctcctgggatcaaggctgccaactgagccntatacccagatttcccagtgcactcaggagatcgtcggtggccttgatgaagccagtgctttttgggaaaaacggagcaaggcaacgcacgacagaagcggtgcaccaaggagtaaagattcagttccatgggccccacttgctgtttgagaaaatgtcctgcttccttcctagctgacttgactcccagcagtaacaggtgggagtgaggacgcagggtcggcactcgagtcgactgctctggctccaggggtattttctgaaactgggactctgccagcccttagcttgtcaagttagcctgggccagagtctggggccgactgttccactggggccgtcgactatgacactctgctgtccatgggccactatgcacccctccactgtccttaggatggtttggagccttcgatccagggcaag

SEQ ID NO: 318087 - DNA, 580 bp, Homo Sapiens
  misc_feature (22)..(22): n is a, c, g, or t
  misc_feature (60)..(60): n is a, c, g, or t
  misc_feature (65)..(65): n is a, c, g, or t
  misc_feature (116)..(116): n is a, c, g, or t
aaaaaaaattcctgccttcccnccctaactgaacttgaatccccaacaataaacagtggnaaatnaaggaacgccaggtcggcaactcgaattcgaactgcctctgggtccccagncgttattttcctgaaaactggaactctgcccaaccccttaaccttgttcaagttaaccctggcccaaagtctggggcccgaactgttcccactgggcccgtcgaactatgaacactctgctgtccatgggccactatgcacccctccactgtccttaggatggtttggagccttcgatccagggcaaggaggtggggttcagtgaggacagggctgagctggtcttccagcagtgattctcgcatcacatcgctgagtctgtagtcagcttgggccagcagctgcaggtgcaaaagtgttttcttttttatcatgcagcactgggagagaggcgagaggatggagatttcatcatgggagtgtcgtccgaaccctctggcgttgtcaaggtgaataaggaacccatcatccccgaacttggtgaacatctcataatggtgccggtccatatttctgtgccgaaa

SEQ ID NO: 318088 - DNA, 591 bp, Homo Sapiens
  misc_feature (555)..(555): n is a, c, g, or t
  misc_feature (579)..(579): n is a, c, g, or t
cactatttagcccacaacattaaggaatgggaattcctgaccaaggacactgaaggtggtctatcctgtgtttcgtttcttctcctttggtccctggccatcccttcccagttctgtctttttattgctggcttatagcagttgtttctgtatcctatgtatcctttgacagatgcaggccaatatttgcaaatatttttctcctagtcatggtttgcctgttttcctaatgtttaacaaactgagttaatctttaattttgatgaaattcaatttatcattttttacttgaaaagtaattgagttctctaagacaattttgcctaatgctaagttacaaaggatatctgtacattttaaacctagatttttttagttcttctgaaacaaaactttaaaagaagacagcgagcaagcgagagacaatcagaatgtaaagagaaaacaatgtaacacaaaggaatgtagctcttatgatcctttgtacttgtatgttatcagttgtcgtgtctcctctcatttctgattttgagtcttctctgtatttttcttagntattttagctaaagtttggaaatngtatcatttcac

SEQ ID NO: 318089 - DNA, 462 bp, Homo Sapiens
  misc_feature (83)..(93): n is a, c, g, or t
tcttgaacatcaaatacaaattacactttgtagttgtttcttatgtaatttcaaagtagaaccaccactcagaattgagtccnnnnnnnnnnngacatgaaataccttgcatattttatataaggaatcttgtccatctcctcctgtgtccttaaagtagtcatgggctgggaatgttcggttaatatcccgggtgatagcactgtcctggggagactcctgtggaaacataaggaaagagagggtttagttaggttaatcatgtaaactcttattcaggtttaggcaaggtcttctcatttacacactttaaatgttgcagggacatacatacacatatgtatgcccatagttactgcctcttcagggaccaaccactcaagcaaaagcaaatgtaaagggggaaaaaagatggaagaaaagcaacccatttcactctatacacttccatattatactcca

SEQ ID NO: 318090 - DNA, 602 bp, Homo Sapiens
ttttttaaaaattaaaactcttttattcaatcttttttttcccttgtctataaggcagaaaaaaagggtgacaaggaataggcaaagcatgttatttccttaacttacataattacaatccagtaccactctaccctgcacgctacttttctacactatgcttcctccttctcattcttattcagggagaaaaatgtcaaataattttagaacagattttaaggttaaactgtattaacttctaagagaccttcattttacttacagatagtcatgtacacaagcaaccaatacatttatttaaagttatggctagaattaacagctcttatgaatacaatgtgcccacaaaaactcactattgaaggttttaaaaccaaaaaacttcataccaccacatttttacacacattaaataagaaaatataacctggaaagaaaacaagttttaaaatagtattttagggccatttcattcacccaaacatttgctgaatttctattgtgtatccagaattgttctaagggggtgtgtgtgtttatgctagaagaacacagcagtaaacaagacaagagtccttgccctcatagagcttacattt

SEQ ID NO: 318091 - DNA, 713 bp, Homo Sapiens
gccgaaggactgctgctgcctctgttaggtgtgatatcgtggtatctacccaaagtgttcacagcagtgaaataacacaatgtatgggattttaagatacttaagcaaacaaaaaaatgacaaatgaagcaaacatggtaagatagtgataagtgtcagatctggatgttgagtaccaatgcactattctagttttgtgtaatttttaaatttcttcattaaaaattgttttacagactccctcctagacacagcatgccagagtctccaaagggctaagctcaggaatctattcttaagctcccaacaggagtcttatatagtcaggcaggcaatgatcattatttggggaccattagaaatgatctaatgcataccctctgaacttcacatttttagtattctcattttctgctcaagctcaatttcaacacatttcacagtttcttatattcaccatggcattctgccaaggaactacaactcgtgttctctaaacccatctgttctaagaatgctgggctggttatcaatttctaatgtaccctgcttaaactttcctctctcaatttgtccctgactgaactgcagacgacagaacaactgtactagccatctctttctgcatatcccatgtccccacagaggccactgtgtcttcataaagctaacttccacgattttcacaagtgatatttttccttcatgatttt

SEQ ID NO: 318092 - DNA, 400 bp, Homo Sapiens
  misc_feature (136)..(318): n is a, c, g, or t
atggtgtgagagaccaggatataactctccaaaatataaaagatggttgagctaaagacaattaagatgcaggagagttctctgctttctctctgtttgcttaaaagcaggacagaggctgggcgtggcagctcannnnnnnnnnnnnnnnnnnnnnnnnnnnnnnnnnnnnnnnnnnnnnnnnnnnnnnnnnnnnnnnnnnnnnnnnnnnnnnnnnnnnnnnnnnnnnnnnnnnnnnnnnnnnnnnnnnnnnnnnnnnnnnnnnnnnnnnnnnnnnnnnnnnnnnnnnnnnnnnnnnnnnnnnnnnnnnnnnnnnnnaacctgcgagtcgaagggtgcggtgaagtgagcatgtaacaaaggtcgtgagcctgcgctcccgagtgggtgtccgtgtcag

SEQ ID NO: 318093 - DNA, 148 bp, Homo Sapiens
gtgtgagccaccaacgcctagcctcagagacttctagtaacatcatatagttagtaaaggggacagctggttttcaagtaaaggtctgtttgattttttctattatagaaatcctttcccctttcttaatgtctctttggtattcttg

SEQ ID NO: 318094 - DNA, 637 bp, Homo Sapiens
tttttgtttggtagagatagggtcttgctatgttgcccaggctgaactcaaacttctggcctcacgcaatcctcccatagcactgagattacaggtgtaagccactgtgcctggctggaattttctaagtcatggtgtaaagaggccggctatcctttaatgcaaagcaatgccaggagccacaagtcaacacccacgagccactgatgtgccggccaccagtcaacacccatgagcattaagcctgcacaccactgagaacaaagagaattaaatcctctttacccttagcaaagactaagtttcatgaaatttctgcagggaagaattcttgcgtgagacacatgggatgatttatgactcagtgtcccgaatggaagagcctggtgttccagacacgttccagcggctcccggtgttcccaacatgctccggtggctgtggacaagtgggccttgacggcaccgaactccgtaaaggtctcgtgctcctggagcgacaggctccattttaccgggaggccacgcagcaataggaagtgcgccccgctttcaaatgattaatccgatgcttttatccccaaggcagggaattttatgttttaaattagttacattattccccaaacctaataatg

SEQ ID NO: 318095 - DNA, 316 bp, Homo Sapiens
atataattaggactttacattattttataatgcttgctaattgctgtaggtctccatattgtcatttccccaaccagactatatccttaaaggggatagatgttgtctattacaatactattgctattgctgtgttttgttttttgtatttctgttaatgactagcaaggcttggcaaataggagttcaataactacttcttgtgtaagtgattgacaaatgactttttagacaacagctttcttcaaatatgtcagagcttctatatttacttgaagttgtcaggtacagcacatcttactgcttgcaattgcca

SEQ ID NO: 318096 - DNA, 1001 bp, Homo Sapiens
gccaggcaacccccaagtttaaataccggatcttcgccggggcaaattaggattaaatagtttttgcatcgtcctccacatagtttccttttaaaaggaagagtcccattcagggggtctatccctggagtcaccattcccagttattgctttgccctggttctgaactgggagatacagtttgaactctgccggcagctcatcttctgagtagagtctgtctgagaagtaaacccgtcggatgcgacaatttgcatggatctgcactctgagggtctcgatgtaattggtgccgtatgctcgccgtgtgaagtctagcaagttgaactgaatctggttccagccgtcatccagccgcatgggcatggtgcagatgaagggtttgacccgggtggtgctctggtagttacttgcccgaaagcgacgacgcacattcttgtcatctagtacctgcacttcgaaggtaaaatacttcttcaggtttttgataatcatgacaaggaaaggaagtttaattcccagcgtcttcttggggtctgcagggcatgtgatatatgtggtgcttacatttgtcccttcaatctctagcaccagggactggatgtcattatcagtgattcttttgatgtggccattccgtacctttttgtcccagatttgcagaggcttgctgccgatgctgtagaggatggagaggaagccgctctggaacgtgtttttgaacatctcgccggcggccttctcctaagccgcccccggagccgacctaggccccggagtagatacaggcaccgagcgtcgagggcacagcagcaggccggccctgttccgaagaagggtggttgagctcctggcctccggatctgcagccactgatggccggactcggacgcggcaacgctaagtccgcgatcttcagctcctaagctgcgagctcagaacggaaaccacagcaactaccgtccgcgccgcgatcccgggaatccggaccggtccagcct

SEQ ID NO: 318097 - DNA, 579 bp, Homo Sapiens
ttccaaaccaggaatatatcactttattcatttccagattatgagtatgacacagcatatacatatatttagataatatataaaacatagaataaaccgcaggaagaaatattggtctggaattccttatgggccatctttaattctgtaagttcatggtaaaggtatctccccccacactggggcaggcggcggaataagctccagcgttcatgcgccactcacaggactgcttacccccactgcacttacaatgcagtcacagagttacgggcatgttcaccggtgtccatgacaagcaacaccaagtataaataacagaactacagcagagcaaactaagataaatatgtttttgcatcgtcctccacatagtttccttttaaaaagaagagtcacatccaggggtctatccctcgagtcacaattccagttattgctttgccttgttctgaactgggagatacagtttgaactctgccggcagctcatcttctgagtagagtctgtctgagaagtaaacccgtcggatgcgacaatttgcatggatctgcactctgagggtctcgatgtaattcc

SEQ ID NO: 318098 - DNA, 595 bp, Homo Sapiens
ttcctttttttcaattttatgctttaattcaattcccccacattttgactttctcatgtctatttttaaattggctatattttatgatgctgctatagttacttttcatagacttgcatcttactcctcgtattatggatataagaggcttacacaaaacaagcgtattaatttattctgcatttgcctatgtatttgcattggccactgagttttgtaatgtcaaactttttctctttggacgttagcataattttcttcaggataaagaacttagcatttcttgaatgacgagtctagtgatgaattctcaccatgtttccttttctttttgtaaacgatgttatctctcaatctttcaaggaaatcttttgtgggtacagtattgttggttaacttttttcctttagcactttatgtcacttcactccctcctggtatgtacaatttctgatcagaagtctgttaacaaacaaattggaagtatataatgttatttgcttttctcttgctggtttcaggggcctttctctttgtagtatgtttttgagatgactatctatgtacgtctatataggcatatatatgtacacca

SEQ ID NO: 318099 - DNA, 191 bp, Homo Sapiens
aaataatgtggcagattgcagaggtctactacatctttatgcactgtgcattcacattctctgtttctgcaagctttgctggccaatttcaccaacgaacgttgaattgaccaaacatgtactaagtgcattctgcagacataacggagactgaattttggagatctttgcttcccaaagaatcccctgaa

SEQ ID NO: 318100 - DNA, 231 bp, Homo Sapiens
atatttaccacattacttgtcttttcaaatggaggaagatagccatagtatgttatgttttgttggcattttaaacaaacaagctagaaataccaaataaatctattttgagtgttgataaactcattttttatatgaatgttgaaaatcaccccaatcctattgggatgcatatctttagatgtcgctttaactctctcctttaaagtgagactgggcgcggtggctcat

SEQ ID NO: 318101 - DNA, 291 bp, Homo Sapiens
aaatagatttatctttttagatttaaatagatttaacttgtagagatttatcctgtacaatatgatgctttgaagtatatattcactgtggaatgactaaatctagctaattaatgtactacctcacatcatagtaacatactacttcacatagtaacatatcaccacacacaatacctcacatagtaacatattactatacatattacctcacatagtaacatatcaccatatacatcatatagtaacatgtcatcatacatattttcttcaaaatagcatattttcttt

SEQ ID NO: 318102 - DNA, 518 bp, Homo Sapiens
gaggcaggtcttgctctgttgcctaggctgcacttgaacttccgggctcagctgaacctcccaagtagcagggactacaggtgcgtgccactgcacccggctctgtgtattgtgtattgttaattccattgacttgtatgacaccgtttagaccagcccacttttccttttaaaagagaaactggttccctctcttttgaagctctatcaagatctgcttattttggtatgtgaagaaaagttaccttcccttgtccagaagccctgctctggggaagggaggataaagtcatggatgagggtagcactgcagaggctgagaaatttggggaaaattcccactcacgtaagctgacactccgcaggtgtacacttgatgctatgggtatactgtcctatctaaaaataagtattatttagcataggtaagcacagaatttactagaaccaacaaggagtactcaattaactaaaaggcagagggtacgcaggtgtctagcatggccgggtggctgtgg

SEQ ID NO: 318103 - DNA, 329 bp, Homo Sapiens
tgagccaccgtacccggctcatctcagatttcttacatcacttaaaaaatgaatttatctatgctcctttttgtccctgtgtgccagatgcttaacctacagttaaaggcctactttagtaattctgatcctaatcggtccagtccagttaatcttcctgggcaaaggattcatttaagattagcttcactttacaaaagatagccctcaaggctaggaagtccctgtctctagatgtgtaatcttaaaaaacatgctctgatgtcctgcattgacttccctttctaaggatcctttatgccttcatttctcacatgtccaatcagagg

SEQ ID NO: 318104 - DNA, 1163 bp, Homo Sapiens
aaggacagcacagactcaagggataagaaaggagattccatctcttgatgagaagagctgcaaaggccatatttaatcagtcacaggagtctaatgctacaaagtagttttttaaaaagatgactagattggcaagttcaaggttaatctttttatttgttttatttatatatcacttagctggtattcagtaaaagcttgctttgtaaaatttagttaatatctttttggttcagcacagacattgcatcatcttagcagctctttttcaaacagatttgaagctgcttcaaataacaatctggtttataaaatgaaaatagaaaattatgatcttagaatgaagaaatgaatttctaagccatgataattattacggttgctgtgattagacagacttttctgtggagcttcctgacaaccaagaaaaaaggggaaatcaaggaactgttcttatcagaaagtaggaacccagcaattctttcattttctcattgggaacttaatagtcactgaattacaaagtagacagtgaccttgattatacaacatatgcggaaatgtttcctgtaacttacgtgagttttttatcaaatacttatatatttgataaaagctaagtacataaagcataactcagtagatagaattctctagtagtaagctaaagtgcttcaagtattagttgtcatattaatccaagagaaaattagatctgagactacctcgaggagtaaacgaacaacttctttaaaccaatactagtcaaaatgcagtccacggaccaatgctggttcatgccctatttgatccaagtccacattaagtacagaaatgaagagtaagcatttagaaacttggggcaatttgacattgcctcaacatccaagtttcagtgtcctttataaactattgatccatgacagatcatgaaactttctaaaaattgatccttttatcacatagtctttcaaaatattatttgcttctttgaagctttggatagaaacttgataatgtgaagttctctgctatgtggacctggtgtgcttatcttctttgttgctgatttgagagctgagctatgtactatatctggaatgcacacagcaggcatcctgctgtgcagttctgtgtctagttaatagtatggaagttcagga

SEQ ID NO: 318105 - DNA, 232 bp, Homo Sapiens
aaataaaaattgtacacattcatggcatacaacattatgtttcaaaatatattgtggaatgactcaatcaagctaattaacacatccatcacctcccgtacttaccatttgggtgtgtgtggggcagtaatattttaaaacctattctcttagcaattttcaagtatacattgtcattcattataatcaccctgttatacaacagatctcctgaacttattcttccaaggac

SEQ ID NO: 318106 - DNA, 462 bp, Homo Sapiens
  misc_feature (97)..(111): n is a, c, g, or t
tctacagtcagaagtcagcttaattaaaagctagttttcaatatatgtatttaatggactttctgcttcttctctttttggatcctgttttggggannnnnnnnnnnnnnnaggtgcccaaataacatttttaaaattacgtgtttggtccctctgtttgcttccttgttttatgaattgttttcccattaattctatttatctctactctttcttcctctttgccttttaaagtacacatgaaaggatctacagaggacgtctaatgactcaaaccccttaaggaacacacaaaaaaggcaccactcacctctcttctgccttttctgtcttcctgaggagtctaaagtcatggacagattcatctcaggtctaaaactctgctctcttttgtattacattacccgatcgctttggcttttgtgggtaccagagattactttgtactatgagagaacactt

SEQ ID NO: 318107 - DNA, 604 bp, Homo Sapiens
  misc_feature (523)..(523): n is a, c, g, or t
  misc_feature (564)..(564): n is a, c, g, or t
tctattttaaaatgttttatttttaatttttgtggctacatagtagatggatatatttatggggtgtatgagatgttctgatataggtatgcaatgtgtaattatcttgtcatggagaatggggtatccatcttctcagtcatttatcctttgtgttacaaacaatccagttatactcctttagttattttaaaatgtacaattaaattattttgactacagcaccctgttgtgttatcaaatactggatattaataatcacattatgcagcatggggtatctgtccctcaagcgtttattctttgtgattacaaacaatccaattatacttttttagttatttaaaaatgaattaagttattattgactatagtcatcctgttgtgctatcaaatagtagatcttattcattctttccaacttccttttttccccccattaactattcccacttcccctgaagcacccaatacccttctcagcctctgggtaatcatccttctctctctatgtctatgagtncaattgtttttatttttatctcacacaaataaggcaaggancatgtggatgtttggtctttctgtgccggggcttatttca

SEQ ID NO: 318108 - DNA, 606 bp, Homo Sapiens
aaaaagatctttgcttttaaaaaaagtgtttatcactgcggcctctgatctattagtagttcctgacccatcagatccattcagtggctcatgtgcagctttcataaaataaaataaacttgataagagtggaaaataatcttgtcttgtacagaaaaagttgttttttgaaacttttttcatgtatgtgactgtatgttctgagtcacagcataaagtgtaatttttactgtgggcaatacatatcggagaagttttaaaaaggatgctgaacaagatcatttcttcagcctcatgattctcagcatgtattgagtgcttaggggtatggaaaagtggggaaagtggagatgtgggttcaagtgccagctttgccattaacaggcgtaaggaagttgtgctgtctgctggcatctctacttcctcatctatgaaatggggcatgggatacatggttttaggtatgtaagttccgttagcccttgattccagcttttaaattgagaagttaaacacccatgactttccaccttacagattgtaaaactgatgttgaataagtttacataacctgaaacttcttacctccttcatcatgcaaaccaa

SEQ ID NO: 318109 - DNA, 699 bp, Homo Sapiens
ttgcaggaattaccagttacgtccaacaagccagagttctgagggtaagacccccaggaaaggcttaccagttgcagagtgcacacagcgaataggctggttctccatgaggattgtattttttggcttctggtcttctccatgactagtggtctggataggagttttgtgtccagaaaattttatgtaatttatttttttaaagaacctgttgtacatctttctcaaatacaaacttgggctttagctgccccctccactaaaccgatgacttacttttttgactagaatgagaaaatggcaagaatcttagtaaggtggtagccagcttggtaactgcatagtaatcgagaggctgtaagatgggaattcatcgtaggcagcgaggtagagtgggtcccctgaaatgggattcgcttggcactgcctcttaaagataggggtgttgggatcttgattgtggccgccccccccagctttacctgcccactttgtccttcttggcaagcctgttcacatggacgtccagagccagtgtacagagaggaggggacggccagcataggtgctgcttttgcagcagaaactttgttgcagttcagagtataccttctgctctgctccagagcaagagttgcaaaccaggcctttgggctggccatttgtttttgtaaataaagttttattggaacacaaaaa

SEQ ID NO: 318110 - DNA, 497 bp, Homo Sapiens
aggcgatttgtgtgtctcagcctcttgagtagctgggattacaggcatgtaccaccacacctggctaattttgtatacggcatctttttttaaagcctctccagtgatctaacctgcagggctgagaaccacggctggacagcacctagggccatacggactactctagaaatctcctccacctggctttggtgtagaagctggaggaatttgtgccctgctctagctttcaccaggttgagggtgacactgggccactcttctgctacttcttggagctgagttggaggcaaaagaccagccccagccatgctgctggtgatgacagttctagatgcctccagcctctggggctggtgccctggcaccatcctgggctgggctcacatgactcaggagcctggctccaccaagcctggctaaatcccgcactgggggctgggcctggagcacagccccatgtcccacgccatctggctcacctcctttcctctcca

SEQ ID NO: 318111 - DNA, 604 bp, Homo Sapiens
cagatttttatggtttcatagtatcctctcaataaattaatcatgaatgcttgtgacctttattactgtattgatgtttcctaaccaaagatttaaatgttttaatcatccaaataacatttatctatgatttcccatttatataattctgtatgttcataatggtttcattttataattaaagatcttttctgttgaaacgtaatgtacactcctgataaatattttaaagtacataaaatataaagaagagtgaccaaaaaaacaccattgcattatccagaggccatttttgttaccattttttaaaaattttattcaagcatttatcttctgtaattttttgcattgttgaaattataatttataacttgtatcttttttgtagtgcctccttctttgcttaacattgtgttataaaccctttcctgtgttatttttctaaacttcatttgtatttcctggaaaatattctgttttatgtgcatttctctaatattggatatttaacttgtttcttatacttttgttgtgatatgcttttccacattgcaggttatttctgtaataatttataagctggaggaatatacctcattccttt

SEQ ID NO: 318112 - DNA, 600 bp, Homo Sapiens
gctttttttaaaagctctaatttttctcctactgggtttttctcgtttgcgccctccatctttctctctgtctctttttgggtaaacctttttgtctaattctgtctattgtattcctcaaacacaggaagcaagctccaatgctatgagatgctccatgtagagacccacataacaaagggtgaggcggtgctcagacgagtagagagaaggaaagtcaggctctctgtccacactaaaccctgtcaattttcacatgagtcagcttaaaggctcatgctttcccagtccagcttcagttaagaccacagcccccagtctcataaaagacctgaaggcagaggtagccagctgaactgtgtccagattctggtccacacaaattatgagatattatatgttgttgaaaagtgccgacttttagggcaatgttgtcagaaaggagcagatatctaacctcatctcccaggccctaggattctccatccctctgcttatctctttctcaggctgtctgcagccaaactagtccctttttacctctgccaaactcacacctatgagttttttcactaagggtggcttctctcttgcccatgc

SEQ ID NO: 318113 - DNA, 514 bp, Homo Sapiens
aattatgaacggttttatttcagtctgagatacttaattcttgcagtgcatgcccaccgataacaaaatctattaataacactccaaaaccatgggactttaaagttacaatcaacggctgagaggcacaaaagtaattaggttttaaagttaaaaacaaaacctggttactattctctaggaaatatttcaaatatataatcatctccaggttggacaccaaatttcctatacttaagatatggtagattgcaattaattttatctttttaggtaggagattattaagctttcaatctttggaggacctagaagttttgaaatgtaccaaatttaatgtcattaaccaaatgggattttttaatataagttcctgagtgcaattctattcagaatttcccgttctttttccattttgggtgggtgttgggatttgttcccccacttttttgcacccgcatacttcttgttaatttatagatactataagccataatttcttagtattaaattt

SEQ ID NO: 318114 - DNA, 887 bp, Homo Sapiens
  misc_feature (158)..(168): n is a, c, g, or t
ggttgtccaccccactccagagggggggtggagggtgggggaacaacatttaacctcttttgagatgcgccgaaagtttgcaggaggcaaagggatacgcgatgggttggccgttttccccccgtgttgcgaggtattctataaaaataaaaatggtnnnnnnnnnnnaattaataaggaataaagggtaaatgaaaaaggggcatccagagggggagggaaatattttcatggaagtttcgcacttagttcttaaaattcttataaggaaaataaacattttacagcaaaaggactagttacactgttgctgtttagaacatgagagcaaaatgagtaacaatcaaattctctggtttaaacttaattatcttaaaacatgttattctgtaagttgacatctatgccttgaaaattcaaggcagaaagtaaaatcatttagaaagccagaaattccatcaatacatctagacagatgtttgcttgtagtttttggtatccaaaaccttttttccacacatcgcacagatgccttttttgtaggcacagccctggcagtaatgagaacctggttggtgcacagaacttttacaaattctacaagtggagaacttattctttccatatggatcaaatcttgctttttttgaagtcaaagctttattttcattcagctttcttccaccactttctgtggtattcctagcaccatctttccatgtatctggagtgataacagtaccaagtttcttttcacatttttcgcacaccatccttccccacgacggttcccctagccgcaacagcagcagcagcagcaggctgaaaacaacaacactacaacttggaagtattccccttccgggctacgtcaacccacttccccc

SEQ ID NO: 318115 - DNA, 370 bp, Homo Sapiens
atgagccactgcgcccagctgtaaccacaaatcaagataagaaacactgtcctcaattattaatttcttttttctctgaacacctcctcctccacctgagatgctgttctcttctttggctgacctactcaccatgtccatgatcagatgtccacaaagaaaacacctgtcagccgactgctggaaaccagagtactgcagaagaaaaagaaaagaaagttaaacccagactggtaagatgaatcagccacttccccaacagccaagaggattataaggaatttctcagaaagatgtgtcactctgtgcagaattctgtcattcccaagtacaacacagctgtgggctgagtcatagaatatctcttgcc

SEQ ID NO: 318116 - DNA, 587 bp, Homo Sapiens
  misc_feature (572)..(572): n is a, c, g, or t
tgtttttgagtttttattatggaacattctaaatatacacaaaagtagaacagaataaaaaaacccatctacccatcacccatcatcaataccaacactaagacaagcttctttcctgtgtactcccatatatgcttcccatcccccatggattaaagtatgaagcaaagtccgatcatatcattcattagtaaattatttagtatgcatataccaaaagatttttaaaaactataaccacaataccattttcaaaaacaattctttaacttctaatattcagtcagttttaaaatttctccaattgtctcataaatgtgtttgtggttagctttgatcaaattaggatccaaacaaggtctatacattgcaattaaaccgataaatatctttaaattcattttactctacaggttttcctgcccttctttccttaaaaattttttttccttagatcatttgtcttatagaatttcagtgtggatttttgctacttgtgctcctgtggtgaattaacaatgttcccctatatctttaaattctaataaactactcatcagatctagaaactngatgagagtctagag

SEQ ID NO: 318117 - DNA, 1080 bp, Homo Sapiens
aaagaggttaaaacaaacgtttatttaacaaattatattaagaatacagactatcacacagtggacttcccttgccaagtacaagagtcaccttgaataaatatgcagcggggacgtcatccctaagggtcttccttgtccaggcctgacacagtcacacagcagctccacggccttagctgggagaacaaagccgtctctggtggcaacccccggacatgtgctcagagtggcaggaggaggccgggccaccctgagggtgccaggcagcccaagcaggggctgtgggctcaggggtgagcacctggcgtggcctccaggggcaaggcaggctgcgaaccaagttcatgagctcagccgctgcgtggctgccaggcctgggggctgcttcctcaaggccctcctttgctttcatccttaggttcacctgcttctccaagaacctgcaggctgggattccccacagatgcctgcaggctctggagggccctcatctgggtggaggagtacgggcaggccactcctgaccatgctctgcgcccacttgcacagtggcctggtgaccggcagggcccagtggcgggccgggaagtccgtaactggacttggaacagaaagggcagccccagcacgggcttgcgacaggatggctggccctgcctctgccgcttagcagtgggccaagtctcagcctcttcaactctgacaaggagcaaagaacatctacttccaggtcactctgtttttagggggaatgaaaggagaaatgtgcttagagagcctggcctagagcctggccaggaacaggtgccttagaacatgggagtccctcttgtcctctcaccgacctgcaattcctttacgtgaaccccactgggttctcatctctccaagtggcagaggacgtggctggcatttgttcttggacttggggtgggaagaaaggccttaattatacatttgcaagggagactgcagcaaagcacctgctccttatcacctttgtgccatttccaaggcctttggagatacttcaactttccagagagaaaggggaggcggtggggacagtgtgctctg

SEQ ID NO: 318118 - DNA, 590 bp, Homo Sapiens
tattcagttgtttctttattacccctgtgcaccctccctctgtaacagttgagaataacaattgggctttacttgtcttcgggaagccagcccattcattgaaggaaaaatggccccagccccaggttgccatagacactggagaaggctgtcaccgagctgcagcacacctatttcctggtgacatgcagaattagaggtattggggaatcaaagggaaaactaacttgatgaaacaaagggtcccttcagcatctgctgacatacttctttgcaaaagcagtctctctgtaccccttctcccttccccttctccttgaagccaggtgaatgaatttgaatccgaagccctgagaagaatgaaagcagtaacttccatgcatggctcaaagttatgcacagggcaaagacctcctttaaatcacatcggcgacttgccaggattccaaacttcttgacatgtccacagtcctcaaggatctgtcacatgcctatgtctctacattcctcagttactctgttatcattatgctgtcctcctttgagagcataaatgtgcaaagcatttttccaactaggggatcttttgt

SEQ ID NO: 318119 - DNA, 596 bp, Homo Sapiens
caatagtataataggccttcttttaaaaagttcagggtgtcccataaagccattataccatttaggtgctttatattcaagaaagcaattgtacaaattttaaaaaaatcatcctcacaatagcactatggggtcactgggaaaagtacaactatttttattttagagataagggctgacagagggtaagtgacttgctttaggtcttgtttctagtgagaatagagctagccctcctctctcttgtgaaattctagtccctgtctcctgtgccagactgtatattggtgatgattttccagtcttggtgtcaaaagaaaattggcttgctgattaagtattcaatgatggtacaagaataaagttagaattattttatatgcatacactttctcaggggacttattctttaatattatttgttaatgtttctttaaaaacactgaatggtttcatgggttgtgtatccaagaattgattggatgaggctgaatacttcatggaatgctcagaactttggtgaactgaagtttaattcatttccacaaccaagtgctaagttcttagtacatgcttagcactagtctgtgtttagg

SEQ ID NO: 318120 - DNA, 547 bp, Homo Sapiens
taccaataaaactctgaggagtacacacaggtacaagtgttttatgctatttgcttattctataccagagttataaacccttaagatagatggcaacataattgttaaattctacagattaacttcgctgcaattaaagcaacactcctcatagccaatagcatagtcacagtcttgagttgttatctggtgtgaacacagatttaagtccgataaagacatgtataaaaacattaatttatttgattgtcacagttagagctcctattagtataaaatggctgttgaacatcaaaacataaaaattttatttatacgatggcaaatataaatggcagaaaaatccacttttgaaaaaaattagaaagatatacaaatatatgtgcctaaaagtcagtgccacaatatgttacggtgccttaatacatagtgtaacttgacactaacaatttccagactcaaggaacatgtttttgtctaatataactatcctatttgtcaatattatggtggttttaccatttcagtgttctctattttatcccca

SEQ ID NO: 318121 - DNA, 480 bp, Homo Sapiens
gcactttttaatcactattttattgacatcctccctgccccgcttccaatgcacaacactgcattgagccccctgaggtgaaggacatgtattctatttctctgttacttccccctaccaatagaaaatatgcacagtcagtactaagtaattcctggttgattgacttgaaacttaataggggaaacaggacagtaaatacaacatgagagcgcacaaacactgtaaacatcctgagggtttggggaactactgtggtggataaacacaagagtaattagccaaagaatgttcagttaagaaataatttgaaaaataggtaagacatagtttgacagaaacattcccaaagtgagaaatgacagccaggagcaggaacagagctggtgggtggagaggacaaaaagcttgtgtacctaggtgggtatgcaaaaggccaagcccgtcaccaaggatattaggtgaagagagcagtagctg

SEQ ID NO: 318122 - DNA, 337 bp, Homo Sapiens
  misc_feature (25)..(25): n is a, c, g, or t
  misc_feature (57)..(58): n is a, c, g, or t
  misc_feature (63)..(63): n is a, c, g, or t
aaagatttcataagtagcacccaanccagcatagcttataagagaaaaatcaattannttgantttcatcaaaatttaaaatcttggttcttttcaaaaactgttttgaaaataaaagggcaagctatagaataagagaaaatatttgccagacatgtatttgtcagaggacttttatgtagaatatttgaagaactcatatgcctcagttattaagaaggaagcccattcttaaagtgggcaaaatgtttgagcaattgaagttgttatgccatttgaggcattggtaaaagaacggtaaaaatgcctgtaattggtggtcgggcacagtggctca

SEQ ID NO: 318123 - DNA, 422 bp, Homo Sapiens
tatttaagtagtaaagaactaatttcaaaccagtgttctaggtagatgggtttttacacaagttgttttcattttagatttgagagacaacataggtatcaagagaattattttattaagatattagaatgcaatgatgtgcttataaatattagggcttcagatgtctggttaagtctacttaaatttttagtacggtggctttccaaatttttctgtcaggaattcttttctaagactattttcttcttattttagtttatacaataaaataccttggatcttaaatagctacctgcaccttccttttttacactcagtgtatcctctctgctctctactttttggccttcctttttcccaccataagctgcagttctgagtgtgaagagcctcagcagaagccatagccacccccatta

SEQ ID NO: 318124 - DNA, 421 bp, Homo Sapiens
aactttttagcactatgtttatcccatcccataagctttggtttattatatttttattgcctaattccccctgtgatttctttagcccattggctatttgagaacttattattttccatatatttgtggattttgcagctttcatttattgatttatagtttcattccatcctaatcagaaaaaatatttcatatggctttaatatttttaaatttattcagacttgtttgaatattggagactgttccatatgcattgagaagaatgtgtatgctgctaagtggggtgttccatatgtgtttgttaggactaattggtttatagtgttgttcatggcctctattttcttattgatcttctatctggttctatccatgattaaaaatggggtattgaaatgtccaaccattactgtagaac

SEQ ID NO: 318125 - DNA, 603 bp, Homo Sapiens
gacagctatttgagcagacagggaattatgcagtaactttgcaatgactaagggtctgtggctaacagtctgaggggagaggtacagaaatgggcctaaaacaatctcgggaaagagtcctatggacaaatgcatttgtcccaaggaagactatattcagcttcaatctgtgggagaaggacttttgaaaggaacctcaaaggagttgggggagactaagactaggatcctagatttaagtatcctcagagctgcagggagagttccttaccccagtaggcctgccctttgatccatgcagtttccacttttacagcagtaaccttcctttgctatcatggtatatcctcctctgtagcaggcacttgggacagcttttcagagaggcatcccgtgagtaccaaaaatgcagccgtgaatgctgtgactcatccttggccaggccaaggtttgttacctaggaatggaacacgggttggtagctctttagggggtagttatagcaacacgttggatgtaaagactcttgctgatgatacggagttagagaattttcattacagaactgaaggccgtgaaaaatcatttagtctaatcccttca

SEQ ID NO: 318126 - DNA, 458 bp, Homo Sapiens
gttctttctggccctggacaaggtttttattgggaaacattgcatctagaaaaaaggaccaaatgtgacaagttagatgggccccagcccaggattttaatagggtatacatgggaacaggttaacagggttattgggaaatgcattttttgaccaatataatctaaaaaggactggaatatttacaggcttttaatacataaataacttgggtcaaaaggacccttactggtaaatgctaattaatagtggaaaacaggctaaaagcaccatacaccccaccatagttttttcttaccgggtcacatttaaagaatatcagtttattttgtcaaaacactacagagatcccggactgggactgaattactaatttatacaattgcgaaaaaatttaagttattaaataagggtatggaataaagaagggtttttaattaggactaaatactgtgaag

SEQ ID NO: 318127 - DNA, 593 bp, Homo Sapiens
ctcatctcaaaatatctcaagtgctaaattgaattaatcagggatggctagattatctgccactgtgacacaaagagatttagaaaatctcaaataattcctgtaagtgcttatactggggcctcatttaattaaaatatagggcaaacattggataaaccaggtaatttaaagtggctaatttaatcatcagctggtatgctgtgctcagaatgttgtttatatgtatacagtgtgggtctgagtcagtgattatatctttagatgaaaaataagaatatagattggttttcgttggtttaggtttgggtttgttatccttgttttccctactccatttcttacataaatgttttttatttagcaaatgtgagaagttaagtaccatgaattagatacgatccagtgtattaccgtgtatttttatatagctttataaaattggaaaaataaccttagattgctatgttggcaatatgaacaagaacatagaggaaatagccctaatctaagtagagcttaggaaagtttttaacaggggtgagtgacactgaagcaaactagcccttgaaagatgagtaagaattcaccaa

SEQ ID NO: 318128 - DNA, 263 bp, Homo Sapiens
ccaaccataatttaaaattttctagcaaattattattttttaaagctctcttatatgacaggaacctttcaaagaaaaattctgtaggctactgttgtgattactggggacagagtagggaaaaaggatggtcaataactcctcaatggataaaaaacaaaatccagtactcctttttcagacagggtttcactccatcacctagactggagtgcagtggttccatcattgccactgtaaccttaaattcctgggcttaagca

SEQ ID NO: 318129 - DNA, 549 bp, Homo Sapiens
gagtatagcaatggactcagccacttagtattttaactccacacattgctgaagtgactattaaccatttccaaaaaacaagttacttgttaactttctgggaaataatatttgctaaagcattagtttatattcctgatagtgatagtggttgtgggaatgctagaaaatatgtatcttttttcttttgttttctataaaaccagtggatttcaactttttaggaaacattaaagataaaaagaaactaagacatcctgtgcatttcctaatctaaaacagactttttaagagtgttatcatatgtgctgaattttacaaaattaaatcagatgaaacatactcattatttttattttgaatttgtaatctctttaatcaaattaatacaaagctatacagattattaacatcttaatagttcttttttactattattccaatttaggatgaatgccatattgaaaaaataagtaatttatgaaggacttttattgtttgtacttcactaattgaaatagttatgaagtacctggtaagacaaaatta

SEQ ID NO: 318130 - DNA, 676 bp, Homo Sapiens
ctaatcgtgttccattccaaaaagccttaagcaaaagtggttaccttttttgatacccatggaatgccaataaaaaccctggtgcagaagatagtctacccgcagccacaacgacatgtgggccccgtcacagtaatcggcgaaaaaggacaaatgggacataataaagccactaacaatgataccagccctgcatctgtgcaattctagaatcctgtgatgcgcacgtccaacaacttttgttggttatctttctcgatccaaccaatagatcatatctctgtgagaaggaggttcatagcagtcaacatttggcacatcgtgagttatgcacttgtgggttcaagcacccttgtcatcttgggatagctgccatggatattatagtcctgggtctcgtgtaagtcagagtgaagggattgcagcatgtctctgctccttgtttttgtcaatccaaggctcctcaaagagtccctgtcttcgccatctaggccatggtctcagacactttgggtgctgcatatagttagagtgcctcgcctatgcccctgaatgatgggatagcctttctgtccctcgcgggatcaatgcgcatccctgtcagtgatacaaagatcacctaacaggtttggcattcatcagattcgcccatattatgtgttaccgtataagttca

SEQ ID NO: 318131 - DNA, 490 bp, Homo Sapiens
aaattctatatttattttctcttagaatgttcatgatttttggttttctaatttaaacatacatgatttcaaaattatataaaattgtgttctttagaagtatgtggcaaaacagtacacactgtgaaatcactccatttctattaatgactgaattattttacacataaactgaattttagttgaaagaaaaactacacttagaggaaacaattctatcatacatatacatttacagttttttacttttacaatctctttatttaaaatcattctttcccaaaaactatacttcagcatgagacttttagatataagtatccaatgggtaattagtatgtacataggtggctgtgaaaaattacccacaactctaatatattctcctccaaaggtgaaaaaatttccttttagaaagcactttaacatttcttctcatcatctacaaagcagcagcaatatttaaattatcaaaaatgacaaatccagt

SEQ ID NO: 318132 - DNA, 589 bp, Homo Sapiens
gcccaaaatcatgaattttaaggaaagaatatatagagatggctgagttcaaaaggctcagtgttcaaattcagtttgttcctaaaatgaagagttacctatgtgggtgcaatatgcagctggtaaagtgattgctatttgctgtttgttgagattattcacccttgacttaaagcagcagtatctgatcttgtaaaatcctcaatttgcattacatcactttctctttgcgacttccttttctttcttgcatttactgctttgtaaatagctgttttcagtttataactgggactgatctttacatcagggtttctcagcctcagcacttctgacattttgggaggggtaattctttgaggctgctttccttgtgtattataatctatttagcaacatccctggcctctacccaattcatgttactagtatccctccaattgtgacaaccggaaatgtctctaagaattgccaaatgcctagtgaaatcatcctcgctccacttttggccaccacatgtttcacatgataccctgtttttttgaggtgctttagtattctgtgatcctaagaacaagggtttcatctc

SEQ ID NO: 318133 - DNA, 491 bp, Homo Sapiens
gattgttccatttatttctctacttggtgtattccattctattatttaaaaatcatcctaatcctaatcagaaaaccttacaatatgacttcctcatggaggccattcacttttatagtccttccttcagtagatcacactgggtaaagccatctcacctgttattatgcctttcctcaatcccaatgtgacacccatttcctactcaacttggcttctgaactttcttgtccattagagccacaccacctttctcgtttcctccgttcactcatccatcgtgtaagagatgccaaacacaggaggcttcctaaatgaagaaatgttgttcttgatgttaaagattttagtttggtgaaattctctatctttcagaatcttctcctcagctcctaaatgtgtgttgcctccagtgttggcttggattctcagctccttatgtattttcccttggcaaattcctgtatcctactttctttcccattctgctt

SEQ ID NO: 318134 - DNA, 1186 bp, Homo Sapiens
attgctgaacaccaatatgtcactttattatttggattttttttcccatttgtcacatacctgtcaatgtttacacaatgagggaaatcaaccagcattggaagcaactgaccaaatcagttgataattctgtaccctcttaacacacatcaattttcacttggtagggattatctttaattcggtctcacagctattcttaaaattggtgtcaagattgtcacatctttaaatacagatagaattgccaggaaggtacataattatatatatatccccacatacagaaaaatacaagactgtttttccacaatatttaatttatacactactgtaactatatgcaacttttgaagacaggttaaggggtacaagtaactgtttagagcaagtaagtagtttggtccaatattatcttaatgtaatggtttttcgctccctcccttttatgtgacgacatactatgacatacaaaacatgcacaatcattcacttataaacaaaggagtaagacaccactcagactgacatttgtataccccaagggtcaaccacacaactaataaggctataatacagctatgcagcataaatggtcaacactgctgatcctaaagtgagcaccatatatacatctgaatataaaaaaccattgaaaccaaacacatatgggttagttaaaaggtgccattccaaggctatacataatcacaggaaaaagtatttacactgcttggaaaacagctgcaacaaagagtttattgccaatgccctttataaacttctctcctatgtttaatacagatgttacgctcactatctatgtgaaccacacatcttatttctggccctttataagatccctgctcaagaatttcaagcaaatatgttctatggcttcacccacacatctattctcatagctttcaaattataaatatcacaatgaactagagctgtagcttaaaacatctagcctaggtctagaaagtaaaataagtattttaagtatcatttttacttagtttagtaagtatactgtgaaattcagagttctgagtaaaatatatttatcctaaagtagcagagtcagtgtgtacttggaagaaacagtgaccacaggcaatgcagtttctttgggtggatgtgcccactctctggatttacaggaccagatggcgtctca

SEQ ID NO: 318135 - DNA, 1250 bp, Homo Sapiens
  misc_feature (1194)..(1206): n is a, c, g, or t
ccgggatggagaaaggagccagcggtgggcagcgctgctgggatggcgcgggccgggccggcgtggctgctgctggcaatctgggtggtcctgccatcatggctgtcctctgcaaaggtctcctcgctcattgagagaatctctgaccccaaggacttgaaaaaactgctcagaacccggaataatgtactggtgctttactccaaatctgaggtggcagctgaaaatcatctcaggttactgtccacagtggcccaggcggtgaaaggacaagggaccatctgctgggtggactgtggtgatgcagagagtagaaaattgtgcaagaagatgaaagttgacctgagcccgaaggacaaaaaggttgaattattccattaccaggatggtgcatttcatactgaatataaccgagctgtgacatttaagtccatagtggcctttttgaaggatccaaaagggcccccactgtgggaggaagatcctggagccaaagatgttgtccaccttgacagtgaaaaggacttcagacggctcctgaagaaggaagagaagccgctcctgtatcatgttttatgccccctggtgcagcatgtgcaagaggatgatgccgcatttccagaaggctgcgactcagctgcgaggccacgccgtgctggccgggatgaatgtctactcctctgaatttgaaaacatcaaggaggagtccagcgtgcgcggcttccccaccatctgctattttgagaaaggacggttcttgttccagtatgacaactatgggtccacagctgaggacattgtggagtggctgaagaatccgcagccgccacagccccaggtccctgagactccctgggcagatgagggcggctccgtttatcacctgaccgatgaagactttgaccagtttgtgaaggaacactcctctgtcctcgtcatgttccacgccccatggtgtggccactgtaagaaaatgaagccggagtttgagaaggcagcagaagccctccatggagaagcagatagctctggtgtccttgcagctgtcgatgccactgtcaacaaggccctggcagaaagattccacatctcagagtttcctacgttgaagtattttaagaatggagagaaatacgcagtgcctgtgctcaggacaaagaagaagtttctcgagtggatgcaaaaccctgaggnnnnnnnnnnnnnagagcccacgtggaagagcagcagacaagcgtgtgcactggtgg

SEQ ID NO: 318136 - DNA, 1006 bp, Homo Sapiens
  misc_feature (988)..(988): n is a, c, g, or t
ttaaatggtttaattttatttcaaaattgtacaaaatggccataagcggctataaaaaatttgtcttcagaacatgtggaaattcagaaacaacaaaacaggtatcattcacagtgtaatggaaaagctttttctgaggcaggaattataactcttccttctttttccctagtctttcatggtctccctcccggaggctcggaatataattggtaaatcccaattctgtgcggtcgctgtcatacttttctgcgaacttcccatagtgggtagtagtggaaagtggggtagcccttgaccgcctcctgctgggcacaggtcttggttcttgtctttgacacagtcaacagcgggcacaggcaatctttcggtcatctttgaaaggcatcagcagtagcagtaaagtgcggaatgaccttcttacagtgtgggcaccaaggggcgtagaacatgaccaaggtgtgtttcttcttcttcagggtctcccggaagttgtcccccaccaggtgcaacacgcttgtctgctgctcttcccacgtgggctctgggggcgggggggcctcagggttttgcatccactcgagaaacttcttctttgtcctgagcacaggcactgcgtatttctctccattcttaaaatacttcaacgtaggaaactctgagatgtggaatctttctgccagggccttgttgacagtggcatcgacagctgcaaggacaccagagctatccgcttctccatggagggcttctgctgccttctcaaactccggcttcattttcttacagtggccacaccatggggcgtggaacatgacgaggacagaggagtgttccttcacaaactggtcaaagtcttcatcggtcaggtgataaacggagccgccctcatctgcccagggagtctcaggggcctggggctgtggcggctgcggattcttcagccactccacaatgtcctcagctgtggacccatagttgtcatacngaacaagaaccgtccttt

SEQ ID NO: 318137 - DNA, 351 bp, Homo Sapiens
catagtaaatattagtgtggatctattagatactcagttctgagttagggctggagaaaaaaagatgaatggttactactctcaaggatttgagtttagtaggaaaagacagttaagaaatctccaaattattagagagtgctagggatgcatatacaaaggccagtcctggaaggaaaagagagttaggaaaatttgtctgtgaatgcggtcgttgattcttgggtgtgtactggtttgatggggagaaaaacaggaactgtccaagtaaagggcacagaatctgcaagggctcagagtaatgagagaatggaattagtccaatatagggcaatatgtgtgacgcatatg

SEQ ID NO: 318138 - DNA, 243 bp, Homo Sapiens
tttcatttgtagctttaacaaagatgtaaggtacttagaaatttaaccttaatgtgtatcacctttatgttgaaaattgttataattgactgaaaagcataatagaagacttacatatgttgagagatttactgtttatggaaggggagacttagtatcataatgatgtcaatcttctgcatactgatcaataattcaatcaaaaatagaaaccgaggccaggctcactggctctctctcatt

SEQ ID NO: 318139 - DNA, 526 bp, Homo Sapiens
aggcattagcttctttattcatttgaacacttcaatattctggctttttcaatgattcccccttgcccgtattttcaggtggaacagtttctcattttccctatttttgaacactttcaggggcttcctttagggaagcccaacacacaaaacgtcccttttagcaaaattttagggggggtgctaagggactaacacagactttaagggcacaaaaccattggttaaacaattttctctggttcttttctgaaaaagaagacaggtctgtctctattatatttgctgaaacttactaggacccagggatactagctcattctttagagagagggcccaagagcattacaccagatctcctacgaagatgtgggatttcctttaggaaaaggggtgtattcaggtaatttactaagcccgaagctggtgtgattctttggcagccttatttcttatgacccggtcctttactaaaaattggggatctgggagagggacaaagggctggactaaaccctgcccaaaa

SEQ ID NO: 318140 - DNA, 589 bp, Homo Sapiens
  misc_feature (550)..(550): n is a, c, g, or t
cttttacaaaagaagtatctgttttattgtatagaacaagtacagcattttactacatagtatacaagtttttaatgagcatttaaaaaaataagtaaatctaggctatttgaaaaatacagttgagccagtgagcacattttataatttggaagacacaaatcaaatgtgaaggatttgattttctacatttaaaatgaagaaccaaaactttcttcttgattttcagctaaaggcaggagactactttccaactccttttgcttctggagaaggccctgtctcagttctgaaagtcccttaaggattgcttgctgtcgatccctatttttcaccatgttggattaagaagtggatccctgacacagtcagaatcaaatagctgtcgttttttgccacagtcttgtgaatttttgtactgagggtcctgggttgaaggccccagacaatggtgcatcgggatcaaggtaatagatctcattttgtcgaacatacgggataaaatgggatgattcagaaattccagatgatgatactggttgattacttnctgagatcaaattctctctctcatagctactggtttttt

SEQ ID NO: 318141 - DNA, 460 bp, Homo Sapiens
  misc_feature (246)..(246): n is a, c, g, or t
ttccaaatgtcagatttctttattaaaatgtgcacattatagtttacttaaatacaaaatgttcactttccttgcaggtaagaaatttcactgacatttccatgtcaattagcttctttttaataaaaatccttccactgaaaataaataagcatttaaattactgaactattatattcattagtctcaatacctcttaaaatacttaaaactttagaaaatagactctaaacattgcctaaaggntggcatccagctctgaggcaggccacacaaggtgtgtctgaggtatgggccatatgactccggtggggccacctccacggacgggcccagccccaccgacgctctgctgaaaatcctgcccctcagcaggacgcaagcttgttccccaaatagtggtgacctcaaactgcaatatgatgaaacctgcagccaacactgccctccacaagggttt

SEQ ID NO: 318142 - DNA, 650 bp, Homo Sapiens
  misc_feature (284)..(297): n is a, c, g, or t
ctaggggatttgtactgaccaaagtgtcactaagcctgaattaagttcttattatatatctaagtaaatgaatggctattaagaaacaagtcagtagcatatgaagctggcgattcccctattaagaatcccaaaggatttgttcttaagtttccagaagacatattacagaagatggctgaaaccagctagccgagctgatgtgattagtccctagtctgaagcattaaccttcctaaccagttaggggatgatttttagccagtgactccatttatagaacnnnnnnnnnnnnnngagacaaggtctcactctgttcccaggctggagtacagcacgaatgatcatagctcactgcagcctcaacccactgtagtcagtaacaactgcagtattctggccttctgagagtccctactaggtggttccgccatttgcttctagttctaaattttgcaatttttttctttgtattcctgctcattccctgtcatctctctccccaccccagaaagtgttacatggccaaagagtgaatcaacaaatattttttgagcccttaatacgtgctaggtaacatgctagctggcgtggacacagcagaggcacttgattcccttttccaggcatgcctttctttgacaatgtca

SEQ ID NO: 318143 - DNA, 506 bp, Homo Sapiens
atccttaaatattcctttatgtactttgtatttcacctggttccagattgggaagaaagaaaaagaggaaagaagcaagattctacatcataccactaccatattccttcgctttctagtatgttgatgtatttatgtgttatcagaattccgggtttccttgaaaggtcttagctgccaaaaaaattcccagaggacattttgggattgtctgatagtttagatgttgtcagcactgctctctcggcagcattgttatactttagaagccaggttgaagcttacttcatagattcatctgagatgtgcaggaggctgagtgacctgaagggacagtttggggccagcctgggactagaacctgtatctttctgttctgtcacattgcttggtcagtctgaaaggtgcttttaagaggatgtgcttccggcccttttcctgagtcagtacagtcttttcaggaagcaatctgggaggcctgtttaaagatcagtcttgatgttcta

SEQ ID NO: 318144 - DNA, 506 bp, Homo Sapiens
ctaccaagaaagtttatttgttatattatcatacaaatattgttgagtgtttatacaaagcaccatatatcaattcccaagaaaatatatggtaaataaagaattggaaaccatttgtatctgtttcagaaattatgacttataccttatgccacagtgaactctattctgcattcatacaaattaacacaattttttgctaagaaagacctataataaaaacatattaagacattatggtattggatactttccctaatgaaaatcacaatttaattgggggatgatattaggatatatgcaatatttacggaacaatgaagtaagactgtgtggcgtcaactatttcacccaatgaacaaacaggtagctaatatccactttagtttttcttcttatactatcttaatttcttcatagtcagattttcactgttatgaaaaatagcataaataggataaagagcaaacacaatttgtcagttcctgagtagaattcataccttt

SEQ ID NO: 318145 - DNA, 473 bp, Homo Sapiens
aatatgaaagaaatgtaacttaatgaaggttccctcccatttcacccatccaatataattgttttttattacattttaccatttaaatcagtcaagagaccattttccttttccattttaagacaatgtttgttgttatgacctttacggggcaaaaaaaagaggttggtttttacaagtttggtttttttgcagggggacccaagaagcataacaattaaggctaatcatagggatttccatagcatgggcatttcccttaggaaggattttgaaactagaaatatttttcacagggtttgcatacttaaggaactacttttaattttaactatgggttttacatcacaaatgaagctaaaaacctcatcagacttggtttaatgccccaggtaaataatcatttttttaatcactctaaattttatttaaaatgaagaatactgttccacattacaaaggtcaccaaattt

SEQ ID NO: 318146 - DNA, 440 bp, Homo Sapiens
  misc_feature (153)..(365): n is a, c, g, or t
  misc_feature (428)..(428): n is a, c, g, or t
ttttttcataccccagtggcacctggaacgccagagaaacagaaccattcaccaccctggaaaaggggctgaagacagggagccaagtagtctggcttggtgggtcccacccccacggagcccagcaagctaagatccactgacttgaaattnnnnnnnnnnnnnnnnnnnnnnnnnnnnnnnnnnnnnnnnnnnnnnnnnnnnnnnnnnnnnnnnnnnnnnnnnnnnnnnnnnnnnnnnnnnnnnnnnnnnnnnnnnnnnnnnnnnnnnnnnnnnnnnnnnnnnnnnnnnnnnnnnnnnnnnnnnnnnnnnnnnnnnnnnnnnnnnnnnnnnnnnnnnnnnnnnnnnnnnnnnnnnnnnnnnnntctctgaaaaaagccagcagccccagtcagggactttagagataaaacccccatctttccatnggacagagcact

SEQ ID NO: 318147 - DNA, 626 bp, Homo Sapiens
  misc_feature (455)..(559): n is a, c, g, or t
tgttggttaaaatgccttttattccaatgctttggaaatagtgcagacacaaaactagggtaggctcctaggctgacaggtctaatacagccccagacccaaaccaagctgacaaatctcacacagagctgcaaaagcaaggcgatgcctgtggacagcatcaatgtggtgagtgacatcttgctgggtccaaggtgctgtctgtgtggcaggtgagggactgacggacggcttgggtgccatttctttgacgtggggcattcagtgccaccctagccactttctcttttttcagcctgggaatcttccctgagattgcgatgccagtgggccttcctgggtggatgcgtctttcatctccatgctgcgttctcatcccagctcacaacccacagcattccaggaggcttcagtgtgagctcagaggtcagcaggtcctctttaacccccgtacnnnnnnnnnnnnnnnnnnnnnnnnnnnnnnnnnnnnnnnnnnnnnnnnnnnnnnnnnnnnnnnnnnnnnnnnnnnnnnnnnnnnnnnnnnnnnnnnnnnnnnnnnttctgcagtcgaggtggcagcggggctgggttctgctggaggctccgggaagaggccttgcccttta

SEQ ID NO: 318148 - DNA, 339 bp, Homo Sapiens
aaccaacaatgatgtataggggttatcttgtagaattcttatgggtggagtcatgtacttgggtgtggtgttttatatacggtgcattgcatcttgtggaacctgccatgcaatgcagctgtttgagccgtctgattttacctcttggcaaagaggtaaaattgacttcttaactatttttaagttcattttcaggacttttgtagatgttagaattaaagggaacatgatgaggaatgagagattttttatttagaagaatgcgtgtgtgtttgtttatgtgtgagttgcgttagactcctagaagagctgattttgaccgggcgcagtggctaacac

SEQ ID NO: 318149 - DNA, 639 bp, Homo Sapiens
aattagggtggagaaaatttcgcaagggccgtgtgaggtccgttggaacccagggggtttctcgcttagggaaaaacaaggttatggggccccatgtttcccctctaccccttacggggggccccggggcgcgcaaacggaaatggttctaggaaactttttcgaggggccgaggccgggccgacatgttttttgggcgtgctccgtcgtggcgccctatagaatgttgaagttttttatttggaaaaagacattagaataggaaattacgtagattaccttttttttgatgatcctctgcaataatagcatttaaaaatataactactttcctctgtataatatccgtacataattgctaactttcctgaatttccaaaacttttgtatttaatgactttcaaatacatgtccaaggaaatgtttcatttaccattgcaaacattgatttattaaataaagtagaagtccaggctttataaaagtcagcattacatttctcacagagaaatcaagaaaaaaaatttcctatcaatcacagatagttatcagcagtctttgtgaagtcttccaactaatatttcattaaagaaatgaagtgggagctgcatttacagatgaggctcgtgctttagcccc

SEQ ID NO: 318150 - DNA, 666 bp, Homo Sapiens
ttttttcagtggggaaaaaaatctttatttcaaagtaaaatgcccaaagtctcttacagcagataaaatcattgttactgctctcagatgttaagcgttagcaacctttttggcgtatgctaattcatcatgaactcccaatagctgaactgaatggcttttaagtacagctataaggtctcatggtataattccttttgttgatgccagtgacaggattttaaaagctacattccattaaaaattaaaaatacagcagcttttccaggggaactagatcccaaaattgtacccagaactcttgtctaagatattaagttaaatatcttgcatgtatatatcattatagtaaatcagtattcttgacaaccacagtgtaagaaattaaactttggctaattgttttccccatcatgaaatcagtcttttgctgtcttcataaataaattatgaccaaacattacaaatactttatacatgttactgattacagagatatttaataatcagacttaccagtttcatagttttgtcctttaattttaagcatataaccccggtacaaaagtttttaagtaatcaggataaaactgggctaaggttaattccttggaatgaaaaaaattgaatttgaaattggtttcaggtttgaaaattaaagaattt

SEQ ID NO: 318151 - DNA, 574 bp, Homo Sapiens
ggctttccaaaaataacatttttaataacttctagagagttattagagggaataatttctgtcagcattattaattcctcatcataattatattttcagccaatgtcatcaaacatgaaccttattattatggatcatcatcatttattggaatacatcatcaaagactggccaaatcctttatcattacacttccagtaatattgttgggtagtacattcaggaaaacacacaaagttcatgagaaagaatctgaaggaaacatcctgaatacagagacattttcctgtggaagccaggcagtcactgatgtactcaatcaattctaaagtagcatttttcacggtcaaggactttggagtcgatgttctccaaaggggacagatcctgaattactaaagcttttgccttttgggcagaattactgaaacttcactttccttaatttcttcctatcagaatcatttctctttggggatctcatgagggggcttaacagctagaatcttttccttaacagggggaagaacaactcctggaaatttaaggcgactttgactggatttaaaagaaa

SEQ ID NO: 318152 - DNA, 302 bp, Homo Sapiens
acgggataccagtacccaaatttttttatgtaagcttaaatttttttctgttaattaggccaaataaacttaatttcccagccctgtcctgtagcttttgttgtctcccccttaaagatcatttaggttaccctttggaaaggtgttaagtgacataccagtcccttgctttttaccttggtatgagcagccctcctcctgtttcagaccctgaaattaaaagtgaaaccttccttccccatcttttgttctatatgaaatggagatagaaatgatttctggctgggtgcggtggctcaccc

SEQ ID NO: 318153 - DNA, 772 bp, Homo Sapiens
  misc_feature (17)..(17): n is a, c, g, or t
atttttttccaatggtnccattctgtttattcagaacggtaacataaatacaccttaaatattaacattttttatatacagaaatgaccccactccccaaaaagtttgaaaaaatattgtctcctcctcctttataaaaccctagatgacctatgaaggcacagccaagcccttgatgcatcttcctcagcacaatttggccaacgctggagggaaggtcaaagaggtggaaggaaaatgttatgctgaaaatccctttccaacaagggtgccaagcgccggtcttgaacgaagtaccctgcctaagcatcatttcctaaagcgcttgaagagcgggtgtacatgtttgctgggcgccttgctccgcgatgagtggtactccatgtacacagtgtcgtcggccccagacatagaactcatggtgccaaagcgccgagatgcctggctggatctggagccaaattccccagccaccacctcctcctcggcatccaggtcagtggctgccaggactttctgtaagagctgctgttgctcttcttttgtcgaaaacgccaagtcttcctcctccatgccagcgagtttcgtgatcaccttgaagctataaccttgatctaccaagaatctcttgcgcttggttgagtaagccattttctgtgtgtcctgggataccagtgagtagaaaaaggctttgtactctttctgcacccatcctttttttagctcgaagcacccgccctagcctttgggcttcctgacgcctggagccacc

SEQ ID NO: 318154 - DNA, 1205 bp, Homo Sapiens
  misc_feature (397)..(397): n is a, c, g, or t
cataaaaaatttccaacgggagggggcccgaaaattccattaattttaggcttcgcttaagcaccccccttatggcccaggaacccccataggggcatctgggtccccccctgcgtgcaggtttcttatacacttggtttgtcaacacaggggggcttttttttaggggggagcaggcccggcccctttagttgaaccccaggttcctttgtgaaaaggcttagttccttttctgatcactttcgggcacgcgtgtcagaaagatattttggataatatattgcggaatgtgctcgatacgcacattaattctcttggcaagaatttttgcctttaacttgtttgtttacaacaattgccaacagcatgctgggttaacattgtagatttttttcantagtgaaataagtcagtttattttatttctaacaaggcctttttctcctataattaagacaaaccattttacactttataataacataacttagtttttagtattttcaaaagggaaagattttgggtggggggaatttaggaagtcaaatattttagaaggagtaactatagaagttactttttcaatcttaatatattaacaggcttgttaccaggtacattacccagcattttttcttacaaggaatctatcaagtactagccaacaaatagtctacatttagaaactgagggtagaaatgtctgtattttaataggaaacaagcatctaaaatacaaatcacatgtctttaacaaggcaatttacataattaggtgtaagtttttaattaactttatgttccttaggatcctagcaaacactcagttgactgtatctcaagttcaaactgcactcacctggctataaaggtaaacatcacaatggaattgggcctgtctgactagggaaaaagatcacttcaatattgcacatttcctttctttaaaaacaaggattaagtcagggccatcttggttctgaatctctccatttttgttgggagaggactaaccatctctttactaagttctagctcaacttctatttcctgggcggcctcaggatgcttttcacagtaatcaacaataaatttgtaatgttccaatgatgttgccaaattttccagctctttcttgggatctgcagtaatggattttgccggacgcgtgggtcgacgatatcccgtaattccggaccggtaccc

SEQ ID NO: 318155 - DNA, 591 bp, Homo Sapiens
  misc_feature (57)..(269): n is a, c, g, or t
  misc_feature (579)..(579): n is a, c, g, or t
gacctgagacagtgtcactccttcgcccaggctggtagtgtagtgagtggcatgagnnnnnnnnnnnnnnnnnnnnnnnnnnnnnnnnnnnnnnnnnnnnnnnnnnnnnnnnnnnnnnnnnnnnnnnnnnnnnnnnnnnnnnnnnnnnnnnnnnnnnnnnnnnnnnnnnnnnnnnnnnnnnnnnnnnnnnnnnnnnnnnnnnnnnnnnnnnnnnnnnnnnnnnnnnnnnnnnnnnnnnnnnnnnnnnnnnnnnnnnnnnnnnnnnnnnnatgagccactgcgcccggcctgtacaactttttactagagaaaagtccactaacctcttgggcttctctccgcccatctgagaatgtgaaactgatacccaccttacaggacagctagaggtcttacagagatgctggctgtgagtgcacttagcacagaatctgacatgtagcaagcactcaaaacaatgtctgctgagtccacattttagaagcatcctgcactgacaggcaggaaaggggaggagctctggaacccccaacacccacaagcccaggcccaggacccccataagtaggggggatttgngctctcattttt

SEQ ID NO: 318156 - DNA, 511 bp, Homo Sapiens
ttttaaaaaaaaggtttttaaaattatttctatcgaaagagagcctggttctttcagaaagcatttttttggccttcactgagatgtgtgaatttcaggcacagggttgggagcaggcttttaaaatgaccacttgttcagagaatgatttcacttggaattcagttcataaaaaatagcagcagaaagccaacagagaatcaactcatttgaccctattcccaaagacagggcagcttctgattggcagttgccaccacaaaggccgtgggatgaaattgaatgctggcatgtttcgggatttcttgaagtcagctcagagttaatatgaaacattaccaaggaaaactaggtttttccgtctcgcctgcaaaaagcatcatcaggtaaactcttattcctaggagagaaagtgaaggcccaggtactttaataatttcgatttagagatttagagctttggaaaagctttctccccaaattaaagaagactctaataaaatttgtgccc

SEQ ID NO: 318157 - DNA, 609 bp, Homo Sapiens
cttcagagaacaaaatgtaaaggaaaggaacaggatgtttaaatttaggaggccctcctttttgtagatggtatattggtggattgtggtacgtggcccagatctgcctttggctgctaggagagctgccttgcccaaactcctgtcttcttagggctgccaccatccagtgactgatatttgcagagttacaaagtctgctccttggccccagcttggtcagttctgaagggccttcctagctccagagttgcccatggttttggctgaggtcttgttgaaactctttgataagtcagcttctctctctgcccactcctgctcttccacaaaggttttcccaaaatcacttcccaattctttaaatttccatctccatctcagaatttgcttcccaaggaacccaatttatgacacatttttattaatttgcaaagtctgtaactacaaagcaaaaaatgaattaaacttgagcatttttatatgtcagagtttaagaatgtatcattgtttggatagtacatcttttcagaagcaagcatagaaatgggtgaatgagcacgtcctaggctttttttacccttctgaatcaagaacagatgtcttctg

SEQ ID NO: 318158 - DNA, 468 bp, Homo Sapiens
ttctgtttattaatgctgtaccaaatcaccttgctgaaattgctttagatagttctcttgaggttttagttgtatataaccaactacttagaaaaacaaaacctcttaaatacacccaaggagatccagtatagtattgaagtgtacaatttcagtatgttcacacaatggaacataatacatagcagtcaaaatgaactatacttaacatgtgtcaacaggggtagatcagaatattaaatgaaaaaaagcaaagggcctttgtctcctggcacccggatactgagctcagtttccgtcttcactgttccatctcctccatccactactccaggatctcataggtgactctaccacagcccctgttgtcctgtgagctgcaggcactgggaaatccacagggaggatgccagaacatctggagcctgcgaaatggtattttcttatttaaaacaggatcatcatggt

SEQ ID NO: 318159 - DNA, 1449 bp, Homo Sapiens
  misc_feature (28)..(28): n is a, c, g, or t
  misc_feature (41)..(41): n is a, c, g, or t
  misc_feature (43)..(43): n is a, c, g, or t
gaccggaattccggagggcagggaaagnctgcagagttganangggtagaaaatgactgtgatgtccacattttttatttgatcatgcttaaaaagacagagcagaatcacattcattttcttaatagtatcactgtaaacatagcgaattttggcgcttttagattgctctgaaaatttctgaagagttgaccatagcagcctggtaagccttttcctttcccccaaagctctcctgccctttgcagaaagactgttggtgacaactgatgctaactaaatagcatgtggttgagcttgccaaatccttccacctcctcccataggcaacagggtgacttggcttaaaggcattgagtaagcaagtaggttatcagagaacagagggaagattccattgtagataatttccaaatattacaattgatgaactcagagttcaactgctcagttccttcttctgctgacctgatacagatataatcacaatggatctcagatctttggtccatttagacatcagggtaatgtactcagttcctttaattaaaatgtgttggaaaagccatctctgggtggagaagagaagttcgttgattatagtgatggtactataagagaaaaactgaagcaggaaaacagtgagcagcgcctctttcttcttgcactcaaatgattacttcactcctgtcagctttatagtccaagcaaactctgcggggacagcagagggtggcaactggggtagagagatgaagagacctttatctggatctgtggaccacttcagatctccttgaattcccagcattgttatctttgtagttgaggtagttatgggggattcaaggtttaagactccattttctggccagtgcagaaaaatggcataaacagccgatccctttgaggtataccatacagatgttgtgttcttttcccattgcacccgccatggtttggaggcatagatagcctccccattggatgctcagccatttcccaacagcaagaagcctttcttggaagatgggaacaatcagtccatctttagttggtccaatgttcagaagatagttgcctcccaaacttactgtctgaaccagttccgaaatgatttcagattcttctgtaacatcagacaatgccatgtcacgacgatagccccaggaaaacttgtcaatgctggtgcacatctcccacttgtgatctggcaagctccgtggcttgaatttatcttcacagttatagtatcctccatggtgacaggaacagttctgaccccatcggtcatttactaccacctcatccttgacagggctgtcattgtagagccatgaaagaaaatttgtggagttccagtaagtatcaggacattcccactccccatcagaccagatcagatcaggtttatagctgttaacaaggtcgtacagctctggcattgtt

SEQ ID NO: 318160 - DNA, 523 bp, Homo Sapiens
attcggcacaggaaatgattgtgatgtacaaattttttatttgatcatacttaaaaagacagagcagaatcacattcattttcttaatagtatcactgtaaacatagcgaattttggcgcttttagattgctctgaaaatttctgaagagttgaccatagcagcctggtaagccttttcctttcccccaaagctctcctgccctttgcagaaagactgttggtgacaactgatgctaactaaatagcatgtggttgagcttgccaaatccttccacctcctcccataggcaacagggtgacttggcttaaaggcattgagtaagcaagtaggttatcagagaacagagggaagattccattgtagataatttccaaatattaccaattgatggaactcaggagtttcaactgcttcagtttccttcttctggctggacctgtttacaggattttaattcacaatgggatctcaggttctttgggtccattttaggacatcaggggtaatggtactccgttttt

SEQ ID NO: 318161 - DNA, 206 bp, Homo Sapiens
  misc_feature (72)..(72): n is a, c, g, or t
  misc_feature (104)..(104): n is a, c, g, or t
  misc_feature (106)..(107): n is a, c, g, or t
  misc_feature (110)..(111): n is a, c, g, or t
atggttttggaactaccaaataggcatcctttcgagaagtgactgctctacaggttgcttttattgctgttntccttttgtgcacagttaatatttgtttatangnnaanncccttttctctttaaaacttgcgttctctttagtcttcccatcctcccaccactcatgaccctgctctgccgaaaaactaaatagtttgcctttc

SEQ ID NO: 318162 - DNA, 701 bp, Homo Sapiens
caaataagaaagactgaaatggtagatttcaaattttatacttaaaagctataattaatatagaaatattttgtttttattttagacagtcttttcacagaaaaaattagtatttagaagttgggatctcgcataggtatgagtagaactgacttacataaagtaatccttaattttttatgagtttagccattttttatacattgcatcattattgccgtattttctaaattatgaactgcatatatttgctttcaaagaagtaatcattatgtgtttgagtagtatagatagctcttcccaggtatcaatagccaaatttgacatgatactgtaatttactagcctttttagaggaaatataatgtgtagacagagcttttaaattatttcccctgtatttaatttggctttttattcctgttgttttaaagtatatgatgctataattccagattatttgagagtgtataacttaatgggataacttgctcagaaatgtttttggtcacatagttttgtttatctggaaacttgtgagatttaaaaattttcggctggatatggtggttcctacctataatactggtgatttgggaggctgaggtgggggaattgcttgagcccaggagcttgaggctggagtaagctatgactggctactgcactccagcctaggccacagagcgagactccatctc

SEQ ID NO: 318163 - DNA, 304 bp, Homo Sapiens
  misc_feature (213)..(223): n is a, c, g, or t
tgtagttcattcacagttttatcaatctctgttttattatttgtattttcattcattctcatatttctggtacatggatttcacctggatgtagaaaacacatttgcaattttgttctttttacagatttgttgggcgaatcaatatctacagtaatagtcttgaggctgttgccaggtaagtttgctgtttctttaatttgtcctttggttnnnnnnnnnnntctatttttctgttaaatcaactaaaatagccaaatacctttctattatagaaaggaatataggccgggtgcggtagctca

SEQ ID NO: 318164 - DNA, 735 bp, Homo Sapiens
  misc_feature (706)..(706): n is a, c, g, or t
  misc_feature (725)..(725): n is a, c, g, or t
ttggttatggctttttccatattatgtttaggctgaggcatccctaaatgattcaactgtaattcctcttcttaaacatgagatttatctttacaaaataatttattttcttaaaattacaagttaattctatagttcatgcatacataatctcagcagatatcagctgtatgtgtacacacatacatataggtatttgtatatacacacattacataatttttttaaaaacttattagtagggtagaaccacgaagacaaagaggctttgtgtaatgtgatggaaacacatttgcaggacgaacaacaggctgctgtgacggctgcatttaccctttctactgtaagacttggaaaaacatggatagtggatatttaatccgcataacagaaatttcagggtgcagaaaacttcccacaatttttacagacaatgtcaacagacaggcattcaatgcagggaatacacagtgtgacagtatacaaaaataagcaggttgatggtttagatttatgagacaagagaaagaaatagatgatgccataattctccttttatggagttatgaaaattgttcattttatataaggtcaggtgctttcaaatgtcaatgagaaaaatatttaaaggaagaatcaaatctaagacgtggagagatctttataaaaatgaccttcaggccaggcacggtggctcacacctgtnatcccaacactttgggagncaaggcgggt

SEQ ID NO: 318165 - DNA, 539 bp, Homo Sapiens
  misc_feature (38)..(38): n is a, c, g, or t
tctctggagaattaccagtttctacatgtaaaaatgtnttgtcagacgattttgcaaattttatgttctgcacacaaaataggctcatgacaagatatgtgacacaatagagaatagaaacaggcccacggtaactctagatattctagttatcagatttaaaatagctatgttgagaattttgacctgattaagaattttgtagaaagttccgacttatgagaaagaaaattggatattctagaagtgaaaaatacaacccctctaattaggacctttgtagatggatttagcagcaaattagaccccgcagaggaaagaattccctaactgaaaggtaagtcaaaagggaatgttcagagtaaacaggaaagaggaaaatataggagaaggtaagttcaatacaagatacagtgagaagttctaatatgtatgtacatatacatatgaatcctgaaagtcgatgagagatagagtgggctaaggcattatttaaagagagaatgcctgggcagcatggggaaaccctgtctctccta

SEQ ID NO: 318166 - DNA, 840 bp, Homo Sapiens
attacaatgacaggaagactctggatacaaacacatttgctaatataatcactccactggttacctaggcctagacgtacaaaaggacacccatatctcatcaggagaaagacaattttgagtttctgggtgtagtaccaagtggttatgatcaccacgtacgtggtctatccagttaactgtgtggcaatttgctatttcaagtcctctcataacagaaattactgaaatatgtggaacaccagtcaatataaagaattcatttttaaacagactagtgaatttgtgtcataaacacacttgcgtatggatattaggagagcattgcttgaatatctctaaaactatttttaggaattaaaagctttcatagttaatggtatgatattggccttcagaattcatattgataaaagcaaaccttagtcatttaacaggaatgtttaaattttagagattctaacatgcgatgccgaaaaatcctaacatttccacttagtaatgtcagggttgtgccagttctaatttcccatagctagtaacatcagaaaatatttatcagagattcaatattggtttcattagacctgataaatgctaagtatggcaactattaaaacttattgttattcttgtttctaaaagggaataataggatgtagctataaaaataatgaagcttatttttcataaacatatcataacctgagcgtccaaatagattttaacaattaaaaatgcctcatttgagaggacatacacttatttgatattgccatccttcaaaatgcttttgggagtccttataatgtccttgacaactggtatacaacaagcaag

SEQ ID NO: 318167 - DNA, 316 bp, Homo Sapiens
aacccacctcaaaatatcatggcatgagccaccgtgcctggccatttttctttttctctagcagttattgaataagcactggccttgagataagcaatattgaaaacagttgcagctcattcaccaccaaatgctaacctactgattcctgttccacaagccgtaactacagctttgactggacaagagagctatttcagtagctatcaacaagttagtggtctcctgataagagaccactgaccatggactggttctgcttgtttacagaggctgctcacttgacttgccttgtgtcccttgttcacccttttgc

SEQ ID NO: 318168 - DNA, 471 bp, Homo Sapiens
ctgatggagttgattataaaaactggtttttaagctctgagattcttttctctctttggtatgttctgttgctaaaggtctggatgtattatcaaatccatgtagtattttttttaattccagaagtagtgtttttttaatggctattatgtctttcagcttttggatcattctactgggaattattgaattccttaaattgtgtttcagcactttcctgaatctcaatgaggctttcttgccatccagattctgaattgcctgtctgtcattttaggtcattccaatgtggttaagaaccatcgctggagagctcaaatgcacccatttgaaggttcaggtacattcttactttttgaattgccagatttcttgttgattctttttcatcttgaaggaatggtgttcctttaactgtggtataagttgagtatggtcagctgccttaatttctgggataagactctgcac

SEQ ID NO: 318169 - DNA, 596 bp, Homo Sapiens
gctgtttctgagtcggtgctgactacatttactgattgaagcagccaactccaaatataccatcttttagtattgacacttaaaataaaacttctccccagaaaaagagttctataaatgatggctgtagaaataggcactgtccaggcagttgttttgtggaagtagtgttgttattttctggtgttttccaagtcatctcagatggtgcgtgaaaatgagatgccaaagaaggcttaaaaaagataccctgcaccagcttcagaatgtaagcaaatctttcattccagcgcttaaaagttttgagaaagctaatctaaagttaaatgtttactagcatctctccgattatattttagaaactactgcacaaaaataaaacaaatttcttattttctctgggttgaaaagtgcacataaaatggaaaatgctttttataccactatttccagcagggattttattttcatttgtcatttgccagcctggggtatgttgggagaaggaacaattgatttttgaaaaggtgcatttgtgtgaaaaccaaaaattgtgttcaacaaatactactactaacccatatgtggatatatgt

SEQ ID NO: 318170 - DNA, 834 bp, Homo Sapiens
  misc_feature (629)..(629): n is a, c, g, or t
  misc_feature (669)..(669): n is a, c, g, or t
ttctttttgctttttaagggtatcatgacccctctttccaggggaagcacaagaagtttatgtgcccagctagatgtcccaagccaggaatgagagctgtgacatctgaacccgggttctgaaactccctgcctcagagcactgcctgctccatatgacctcaaggaaggccagactggagggtcattcacctttgccaccacgcttacaccaggccctgcccaagacctgttgctcctccctcccaggcagaaggaccggggagtcctatccaggctctcctggcttcttcccatcaacaaggccaaacacaaccactagcactttctgttgtcccaggagatccaaaatataccagcaatggtgtaaatgtcccaagacagaaaacagaaatggagtcaatttagtataagaggaccatgagttttggaaattatggaaatgagctagcttagttctgtctcccaggctctcttcagataccagggatgctgcctgtgctcaccgtctttctattctcgacacgatcaatcaagggataccgtaacacatccgcgagggaactgccctgcactctacagagacctctctgcattctaagaaccacatacgggaggtttcatcagatntaaggcacccaggatgagatgggggacagccttgtccctnactgcgggactgacctttgttccctaagcgtgccaaccagcccgcaatcaactgacctttgctagttgagcaatcgattcagggaaggaagagcagatacaaggagatcacccacccccatcaggtcccaggacgcccaggaaggctgaactcacatctttctgt

SEQ ID NO: 318171 - DNA, 332 bp, Homo Sapiens
  misc_feature (92)..(92): n is a, c, g, or t
cttaaagcattcaccattacaacaagcagaacaatggagtattagccattcatatctggtaagcttcaggaataaaaaagcaaaaaaccccnaaacccacccccaaacaaaaacaacagtcacactggaggatcaaaacattagccaattcttcagttaaacatcgtagaactctggatactcaatgaattgccaaggagaggatcacctgccagtgtgttttcagattgtatagcaagcatttgaataaaatggccgtttaaccctaagccactgacgttactctgaagccgaagcccaagcaccggaattttcaatgctttatgttcccc

SEQ ID NO: 318172 - DNA, 217 bp, Homo Sapiens
caagtgaatatgttttattaaatgcatactaatatctttctatagtatgtgagtacacataataaattaaaatgtatatatttattaaatatagatagatataataccagaacatgattatttcagatgagaaatcaaaataaacccatttttaagtatcttttggtcactccaaattgatattgctcataaaaaaatacactagttttccctgggg

SEQ ID NO: 318173 - DNA, 479 bp, Homo Sapiens
gaaagattttagtgcaaacgtaatcatccatttgaatcttttattatagacattataaaattaatttatcgaaaaagagtgtaaaccctcttttaaaaaatccagtatgtttgtatcttttatactttcatgctttttatacttctaacaaacttttcaaaaacatatgcttgtggacttaatggagagatagaagttttataagtattttctagagctcgtttcgtgaatccttttgttggtgggaaggacttgagagattttctacactagttgttttcaaagtgcattctcagagaacccttaaccaaagatgatatctgctgctggaattaaataataggaatattcttacatctcaaagaatcaataagccatattttccataagtttttagtacgtaagattctgctattagattactagcatgcagtatttagtgaatatatattgcaaagttaaaagtggctgggcacagt

SEQ ID NO: 318174 - DNA, 581 bp, Homo Sapiens
  misc_feature (561)..(561): n is a, c, g, or t
  misc_feature (564)..(564): n is a, c, g, or t
tttatatattttattgaaaatatgcacaaaataaatacattttcttttcttttaatccaagataaacaatgtcacatgattaaaggtaagcattgaaattctttcagataacctggagggaaatgtcctttttctctttgccgagtttctctctgggaaatgaagaaacaagattgtgagagttcagagttccttcctcacctgctgcaagttcacactcagcaggtcgccagatgtattacatttaccttatggatggcagagattgtctgtgatcaacagcatttgtgactctgtctagttcttgtttcttccatttcatagaatatacactctcaaggttctcaaaaaccatttaatccaagatactttcctgggcgagaatttagggattgcttgtttcgtgagtctccaaaagtctataataatacttaaaagccagggatgaggcaaaaggcatctttgaaaattacatttgaagaatgcagtgtaaatggaattagatattccaagtgttaaaaaaacatgggactggctgagtttaggggttacttcattaanatnctcacttttcactcaga

SEQ ID NO: 318175 - DNA, 847 bp, Homo Sapiens
tattattttaatgctaaactgaacagtgaactgaaatcagaggagaaagaaaatcaagctagtggctcactctcaatagtgtcctctaattttattgatgcttcagttttcataaagtgcaataaacaaaataaatagatgaaaaaagctttgaagatttatatacagttttgaggttaagataaattactgactatattcctttcagccttttaactctgtgaaagctgtaacgtacattaaaagcacattgaactaggttaaataatgatctttcccccttagatcaatctagtattaaggagtatataattatgcaagttcattctataacacgaggctagactaaaaggaaaatttttgtgctacagactaaatccagatacggtcaggtgctgagcagtattcctggcttcaaaataggaggtatctgtttcatcatctggctgggggatgaaaggcatagtctgatgctgcagattttcccagtccacatcactgaaagagaggatgacgttttagctctttcaattccagctctctttgtatcatcaatggttaaaagtatttctactgcactttgagcattatcagataacttttcttcaccttctggccaagggatatctcttttcagaatattctggaatacttgttgtggtgtttcatcattgaaagggggaattcctgttagaaattcaaacaagcaaactccaagtgcccaccagtctaccgcaggaccatggccctgcctagtaacagctcaggtgcaaggtagtctggggttcctagaattcgcccatcatcaacgggggccacccctcttctcacactcttcggagttcgg

SEQ ID NO: 318176 - DNA, 935 bp, Homo Sapiens
aacacctagaaagacccaaggcggatgaaaagccccaagggatatgcaagcctggggggccatctgggtggtttgcatcctagcccgctgaccttggaggggctttcctgtctttccctgatttctttcactgctgaagaggctgccctcaaagcctggagcacttggcagggttccagggatctgtaccaatgccatgcctcctgatgacagagcagaggctggtgatgctagctcacagccatgtggccttggccttgtcctgcctctctctgacagatgctagcatcagtggatgcttttgagtttcacatagaagactgctgaactctcaattcttggggtcaggaggtttgaatctaagtctcagcctctgcttagctttgctgctctgagtagctttggactttcagcgagtcacacatcagctttcagaatcccaatttcccaatttattaaatgactgttagactcatttaataggtgggctctgggtccttcccccgctggccggtatgcattttgaagtcacctcaccaggcctccttcaaggcagctccacctttcagggtcagtacctaaggcacagtccctaactaccagcacctttcagactctgatctgattttgaaaaattgtagttttggaagcctgatgtccacaaccatgaccgaggttgctcaaatgactctgatgagtttccagcacaccttacaccctggctgcacccacagtgaccccgtcagcccagccttcctcagcttccatctgtgcgcctgctcctcttcccttgcaccgtctgagaattaaagacgcgttgttaatgaatctttcactttcagtgtgttctttctgaatgagtcgtatcttccatttttttctagtttcgctctctgatctcaagggccacttctaacagaattcacgtgttcgat

SEQ ID NO: 318177 - DNA, 462 bp, Homo Sapiens
aatcagatgttaatccaaatgtcccagctccatttatttaactgatttgaaacatcatctttatcatatttgaaattcttatctatattagaatctgtgttcaagtttttggtttctctgtggatttattttcgtacaaattctgtagatttagttgttgaaccttggcataatatttttataatgatacagcatagcaaatcttttctcattattcttttacacaattttcatttaattttcaaagttaatcttaggctacttttatcacataaaaaaaattccactggtatttggatggaaattacatgaaatgtatcacttattttgtggaacattgacatctttccaatcgtgaaagcttcccatccattatcattgtatgttacttattttcacatcttttgtgtcaattagaaaatataattcaccttcctggcctacgcggtgaaaccccatctg

SEQ ID NO: 318178 - DNA, 848 bp, Homo Sapiens
atatttccaaataaattgtttaaaacaaaacataaattcactggccggttgccgtggctcatgccaaagtgctaacattacaggcgtgacgaccatgcccggccaaatctgggcttaaaaattttttttggagaggaagttaacaggaataccactgtatttaagcccccaaacagctggtgctgtgaacgaaacattcagaacagagagctagctactgctggataaataccaagctggagacctgtacttaacaactgttgagtctctaaaaatggacaggaaaattaaaaacacatttaaaaagtgcttaataaaatgtttttgatttatagttttaattctatattcccctgtgctatagttttttgaatttgcttaatttgggggagatttacattttaaaatatggatatgcataagccatcccaaaggtaaccataaaaatatctactaactctacaaagttttaacaaatttttaaaagtacagtaaaaatacaaatctttctaaaagttgttgagagcatacagaatcgatgaactctcttgtatagaagtgaaaataaaatatgcattacctgaattcacttctagataatttatgtgcagactgcgataaaaactgaatgaagttttctagctgtggaatagatgtcctcatggcagaattttcaaaccatttttctggtagacatgctgctacctgttaatcaaaacacatggctggtttacaatgacagttatctaagaaatcttgctaatataatctcatagtgatactgttagctgaattacattctccccattttatagtttatggttaaataaaaatttctaaaagatttc

SEQ ID NO: 318179 - DNA, 531 bp, Homo Sapiens
ctggccctgcaagatcacaagacagtagcttatcactttcaatttataagtggaatggagaacagcctttccaaacataacctgtgagaggagtttctgtaatcagaagactgacttgttggcttgtatccgagaagcctttcctatcaccttagtatgatagttctctggagagctgtgaggaaatctttcttttaaagtggcggtcatctttgaaaccaagcatgcataaggaagtagagcacagtacaggaaaagaaaggccctctgctctgatcacacaccaccacaacatcctgacagatgacctggccatgcacagctgcctctccaggaaaatcttccactctcatcagggaacactggactggataactcaggtattcctaggtgaagtaagtcagacaatatggaaatgaagaaataaaaagagggctttcagggcacacagctcagtttgccaaattcaacatggctacaactgatccccaaatcctgagtaaacacccttgctatttaataagcacaagc

SEQ ID NO: 318180 - DNA, 471 bp, Homo Sapiens
aaatctggtacaattaggtcatcctatttagtttaccgtttgcttgctacttgtaagaactaataactttaccagataaagtttagatttcatctgtactttaatctcaagaattcgagataaatagtggtaaggaagaaagtacaatgcgtacagctaatgaaacccaggaagatgagtcaatgcatagaaataattccaacccaaataaatactatttaaaatgctacttggagttttgccgtgatactagacacaatatggcaaatcatcctcaagaatacaagaactaaggtgtttccagtcctctttaacacctgtgatgcaggatatttggagagctaaattgttattattaacagtcttaatacctggccaccaacacagtagaggaaacagtttttaaagtgtcatacatctcttcaaatattcatacgcttaatgaaacattcgcacatctaaaaaggcatg

SEQ ID NO: 318181 - DNA, 501 bp, Homo Sapiens
  misc_feature (182)..(196): n is a, c, g, or t
aaagaagtctgtcttcagagtacaaccaatgtgattaattgtgcctttaccaaagtcattcaatgtctaaacaaattcagtatctgaaacatcttcatgaggaaaactgaaggaaaggaatttaaaaacacagaccaggaaacaatcacaaaatataggtttaattactacttttaaacttnnnnnnnnnnnnnnnccaagaaaacaaacataggtactccagtaagacttgctactctgaataatgtaacattttttctaagttctataaatatatactggaagttttagaacacatacagacgcttaggaaaagaaaggctagttccttggaaatgacgatccaggatgatacaatcacttgatgacagaaggtaagcctttcttacaattagattttagcagataattttaccactaatataaatgggtgatgtgtggatcccaagttctagaaggcgaataaaaatactgactccaggtaatttctggatactacaa

SEQ ID NO: 318182 - DNA, 863 bp, Homo Sapiens
  misc_feature (178)..(191): n is a, c, g, or t
tcacaacaaaatttattagaagaatagtggttttgaaaactctagcatccagtgagaactaccatacacaacattacagctgggaatgtttctccaaaatgtcatggtcaaataatacaatggaaccattaaatcttacacatgcacgaaagaacaagcgcttttgacatacaatgcnnnnnnnnnnnnnnggggggggaccacatggattaaaattttaagtactcatcacatacattaagacacagttttagtccagtcaaaaatcagaactgcattaaaaaatttaatgtagtgcaatcaaaccaaaaaacttaatttgtgatcataagtgctctactacataaacattgatcatagcaaggaacaaaaagttcaaatcacacagtacaaaaaaatctgtaaataaatataaactacagtacaagagaaatattaaattatacaattccatcaaactgtaaacagtatattgaaatgaggtccataagagtaaagggggttcctgttttgttgtatgacacttgaacttctagaaatctgaaagataccattttccatatctccaaaggctatgggttttatatgtggagagaatttattttagatgtaagatatcaaatattaaagcagagaaataatctattttgttaaccacagatagtactgcagaaaacaaaagcaattttaaagaggcaagtcttaacattaaagatgcaaaggactaaaacactggaattagaacttcgcatcagaaaaaacttgtcactgagaacttcaaggctacaaaatacacggacaaaactgtctgctgatatgcagacctagacctctgctaatttttttgacattttacatactca

SEQ ID NO: 318183 - DNA, 497 bp, Homo Sapiens
tttttccccatttaaaaatatcttacaggggcataactttccctgtacaaattgggtttaagaaacaaaagggacaatttgctaatcaatgatgagcctttaatccaaccattatatatcccctttccatccttagatcccttgaagagaccatttagttaagactaccaacaggtgacaccctgacctccttaccaaccttgccttttagaggtgaccagagacctgtgcttttccaaagtactgttatacgtgtaattagtataatatcaatgtggggaaactctacctttggattttgaggactctgcttttcttgaaaccctctgggttagagactgtttattcatatgcacctcaggaacttgaggccaagatgaagttcactgtttcctagtccttttgttgttctcctggccattatgtttccaccttcattcaaaatgccttcctctttgaagctgcttataacccagcaacaccatcaactcactgtg

SEQ ID NO: 318184 - DNA, 605 bp, Homo Sapiens
ctggctagaagtacagttttacatctcatgttaagtccagtgaatttttctcctttaagaagaagggaaaacatttcaaaattgggtctaacttatttagtctttctgtctctgcttctttcttgtaattgtgccaatagaatactccaatttttggtatttaaaaaactaatctttgtttccatactttttagtaaaaactgctttggatattttgaatatttttacttctaaaacatgggcttcatttaaatgatatatttaaaatatttctacaaaacatcttatttaaatatattaatccaaaatccgacacttcttcatcatggtcctggggaaggcatggagacaaaattcaatagtgctaagaatccaagtggagtcactggccataatacttcacttagctatttacataaactccagtgtcatgcaagtacaaccaatggactaactacagctggtcccaattgtacaacccaatctcagtgaactgggaagactcagcactgaccccagaccctccatcactgtagaaatacttacacagctacaagtgaaacctcttcactgatagccccttcgaaagggtgcattgttgcaaa

SEQ ID NO: 318185 - DNA, 608 bp, Homo Sapiens
  misc_feature (371)..(446): n is a, c, g, or t
aaggtaaaaaactgggactcttagttcggtttttagatggggttactaatggtgaccatcattcttccctgaagcaaataaacatgactgtatggaacttcatcatgttaaataacatgctgaggaacccagctagggaaatatcaccaaggggaagatggattgttaatggaatttgaattagcctagctgtccctcctgttgattgtaaataaagcaggaagtcactgccctatccacaccaccaaatgacctcattttacaattgatttctgaggaaggtgatattttaaaaggcatacaaaggtgacctgtatatttatatagttggtaaggagctcattttattttttgagacagggactcactcnnnnnnnnnnnnnnnnnnnnnnnnnnnnnnnnnnnnnnnnnnnnnnnnnnnnnnnnnnnnnnnnnnnnnnnnnnnntggggggaaaaaaagtgatttcgcacagaaaactgaagaaattatttcaaaagctgttccatatcatcaataaaatgctgaggaatcaattactctgagatggaagagaagttaatagagtacacaaagaaaggagattctacctaagaatgacagctgctc

SEQ ID NO: 318186 - DNA, 555 bp, Homo Sapiens
  misc_feature (77)..(77): n is a, c, g, or t
  misc_feature (313)..(399): n is a, c, g, or t
attcttcatctcccttacgtgaaatcttttaacagacacaaggagagaacacaaataatattgttttgaagaaaatnttagtgtttctcttgtcagaactttgatttgatgaggtgattaacgaatatttattgagtacctactatgcgacaggcattcttctaggtaacggaataaatccagtggggaaaaaaatatcacatacatacatatcttcccttctgaagcttaactggtaagtgagagacagaaaataacttatgtatcagtaagacttccccagatatatgcagagagagtgagcaagacagannnnnnnnnnnnnnnnnnnnnnnnnnnnnnnnnnnnnnnnnnnnnnnnnnnnnnnnnnnnnnnnnnnnnnnnnnnnnnnnnnnnnnngctggagtctgggagttccagaccagtctaggcaacataataaaactccatctctacaaaaaaaatttgtgttaatcagctgcttgtggttgtgtgcacctgtagtcctagctactcgagaggctgaggctgaagtgggaggatcactttatccca

SEQ ID NO: 318187 - DNA, 1286 bp, Homo Sapiens
aaaaggtcagatattgtttaacacttgaaattccaaagagaaaaaatattcccaatgagggctctgtttcctatagagtaattgctgaaataaaggaacacagaaaacaaggcttttgccagttgtcacttacaaaaacatacagaggatcataatctagagacatggctaaggcctcaggtggtttcatgctcaagattgatgttttgccaaagagctgagttgtggagtcctgtttcggaagggctgtgatggtggggacttcatcctcagctccttgctttagggctcgggcaagcttttgaggtctgtaacttgttgaagacttgtggacagagaatggctgatatctcttaattttgtacagttgaggaacctgcatattgaagaaggaataactctgcttgatttgaacttctgaagacttaattgggaccagtccaaggccattaggagccaacttgttggagtcctggggtgggctgcagtctgggaaagcgaagggcagcaccttcttgggcgacacagagaaccggctggtataatcatcctgactgatccgcctcaggaagaatttgaagaaattcgcctcttgtgctatcgattgttttgcttggccaatctttctcagtatactctctttgtccatttcacgaacagcactcagcatattgaataatcgtccctgaatcatgaccttgcgtgctacttgttgaaaccgtttttgtgccctggacctgctgagccaagtgttattaatgagtggatcaaaagtaggatgaaattccttgattttctcttcttgattgcgaacgacccgtttatggctaacttctgttttaagtcgctgaaattcctcatccaaaataggatctcctctgtctagcttatatttggcacatgctttttgccactcttcagtaagctcttttttaagtttaaaagacataggatctttaccaaggtgcacctgccacttaagatgattttccatctcttcgtgaatgtcctgtctgactttctgttcaaagagtgcctccttcatctgtctcgtttttgaaatttcagtgccctggtccaaaacttctcttaattctttaatcttcaattttcctggttcttggtttaaaacagttgccacagcaaatggattcgataaatctactggaaatctgaggttctggtactcaatttccttcaccttctgaggcttcggcttcgctggcggtcggtgaaaatttatatgcatcattgctttttctggaggaacgtttactttcttagaa

SEQ ID NO: 318188 - DNA, 505 bp, Homo Sapiens
gacttttattgactaggttactaaattttatctgaatttcatcttaactttgtggcctttatatctcctaagacatctttatatacactttgaaagattaaagaatgtggaaaatatagttgaataaaataactatgatggtgggataattttactaatgcaaataaaatttattcgaagttaatctagaaaaaagttagtgtttatctagggtctattccagtcttccagaagagttctttgtctggttaacacaactgctgtcccactgcctactagggttaattaggttgaccagcctggctagtgaatatctgcttcttccatttctgcttgtggtttctcctttactcattgtgtatttggtgaagagggcagcttcccatatggagggggaccttcagtctaggcgatactggaagttcagcttccactaatacataaattctggtttcattgacctaatataataaagttaaatccacatatctgggtaaatatcttt

SEQ ID NO: 318189 - DNA, 706 bp, Homo Sapiens
  misc_feature (109)..(122): n is a, c, g, or t
  misc_feature (131)..(250): n is a, c, g, or t
gggggaatccaaccctattccttgccccggtttttttgggaaacgggaaggcccagttccctttcctttttgggcccgggccccaaacaaagggtttaaaaaatttttnnnnnnnnnnnnnnccccccaannnnnnnnnnnnnnnnnnnnnnnnnnnnnnnnnnnnnnnnnnnnnnnnnnnnnnnnnnnnnnnnnnnnnnnnnnnnnnnnnnnnnnnnnnnnnnnnnnnnnnnnnnnnnnnnnnnnnnnngaatagcaaatagtttattggtaagtacacggtttcaacgggagtaataaattcacatgaaaaggagacaataatcaagtcaaaagaataaatgcttactaatcatcagaaaatctgtggccattagggctggcacgtaaaaatccaaaatcactcagaggccaaatcttaaagaagattcgtcctcttattagtccatatggaataggtccatagcacctggaatctgtagaattctgtagattgtcaccttctaaccaaacatgacccattggcacctagaattagagaagaaatgcagcctcttaaagataaaacctaatttgggtactataattaaaaagcatgtcattcagaggtagggagaaatgtcctaaggctctcttttatagaatagatacaaatcctaatattgcatttttgcttttatttcttgcacaataacttttactaaat

SEQ ID NO: 318190 - DNA, 748 bp, Homo Sapiens
taactaaaatttcagacagcgacgtacataatatatataagaatatacccaaaaaagtaaatttctaccaccctcgcacagcagaaatttcaatgggttattctataccaaatccaagtgtttacatccaagatgtcacagaggtaacttccttttgtaccttattgagctctggaaacagttcctgtatcacaatgtccaataaaacataagtcagctgcttgttgagtactggttgctgtaagccatcaaacagaagtctgatgctttcatacttggtttcttcaccaatacacttgactaacagatctggaatgtaattcatcatttcttcaaaagtctgttttgctcctttttgcttatcttggagagagcgaggttcagtgttttcacagaatatagcatctctgagaagtgttatgagtgagaccaaacggtgctcctgaaatagctgttctagtttacactgaagatagtaatcagtatacatttccagggtgtttttaaagaggattcgagttcccattaagagatgatgaagccagtcaggaacctggaaaactacccgtcctacatacatcaggtaatcatagactccttctacagtcatcacctccataaaataattctgattttgctttctctctgtattttcagcacggtttgcattatttttaaacagatcattgaaaagcttcttgttgttttctgaagtagggctgagaatggtcagttctggtcgacttgg

SEQ ID NO: 318191 - DNA, 292 bp, Homo Sapiens
ctaggaatttgtccattttgtctgactagcataaagttgttcatgttatagtttatacatttgcaacatctgtaattatgtctgctttttcattcctagtgtttgttgtttacttgtaccttctcccgtttttccttgtcttggtaaaagctcattaggttcattggtcttacaagaagcagacatgtaggcattattgccctgtattactctgtgtctctttcctagttcattaaattctgcttttgcttttatctttattcttttttctatggtcttagagtacattctc

SEQ ID NO: 318192 - DNA, 249 bp, Homo Sapiens
aaatagatatgaaatacgtaccaagtttatttgcctttaaatgatacaaacagaaaagacatgttagtcaaaatattaaattttcttgcattttacagaagaaaaataaactgaagtaaaactgtaggaactgctgaacgtcagataaatgtttcttcagaacaagagatattagttcctaaaagattcttctaaagtttttttaaaagagattaagaaaaacagtaagccactgggttattacattct

SEQ ID NO: 318193 - DNA, 1006 bp, Homo Sapiens
  misc_feature (316)..(389): n is a, c, g, or t
  misc_feature (435)..(474): n is a, c, g, or t
  misc_feature (483)..(500): n is a, c, g, or t
  misc_feature (918)..(964): n is a, c, g, or t
tggggcggggagggcgcagataggcaccggggtatttgagaaaggggaggggtccgcggatggggggctccgggctatagtggagcaaatcgggggggaatatgggcgttgctggggaaagccgacttccctccggaaaagaagggaatgggggcttcaggaggcggcgagggaaaccccacgactgtaggcggtgggcttttttgtttggcaagcaggcagagtatgtgcgggaagaaagggttctcaaggaggatcgtggggatcccaaaaaaaagcccggtccttaggcggggtaaattcccgggtacggcannnnnnnnnnnnnnnnnnnnnnnnnnnnnnnnnnnnnnnnnnnnnnnnnnnnnnnnnnnnnnnnnnnnnnnnnnccactttgtacaagaaagctgggtcaggaaacagctatgaccatgnnnnnnnnnnnnnnnnnnnnnnnnnnnnnnnnnnnnnnnngcctcgagnnnnnnnnnnnnnnnnnncatttgtaaaaatctgtttaataaatatacatcataaaagtaccaaaataattaccaacaatacattatgtacaccatttacaggagggtaacacaaaccttgacaggtagtaacttttcaccccacatcactgaacgcttaacactcctggctgttacatgtcacaggataccactggggtcagtcactcgaagcacaataaatataaaatgtggtccttccatgaaatttttgataaccttctccaaaaaccccacaaaggtgaggtttaaaagaagttttctcagaatttcaatgatctttctcgtcccctacaaaaagttcacaaaagcaacaaaatgagggctgatcctaccacaaaataagacgttttgggctaggcagtgtgcagtgtggatataagtacaccctttaaannnnnnnnnnnnnnnnnnnnnnnnnnnnnnnnnnnnnnnnnnnnnnngtacaaatatacaagtccctcgtgccgaattcgccacccagc

SEQ ID NO: 318194 - DNA, 1776 bp, Homo Sapiens
  misc_feature (59)..(59): n is a, c, g, or t
  misc_feature (77)..(77): n is a, c, g, or t
  misc_feature (91)..(91): n is a, c, g, or t
  misc_feature (132)..(132): n is a, c, g, or t
  misc_feature (186)..(186): n is a, c, g, or t
ccctactcggattgaatgtaaagcaattgtaagctggggacaaaaggggctttatcaanccaagcagcaacccttanagatttcccaactnccttaggtcaaatgaacacaatcttagttgtagtgtgagancctctgaagcccagccaatctctgggcgcaatcttgtgtgcttttggtcagcanagtggtaggatgctcaagagcttcttgaaacgactggtgataattggagggaaatcatgaccaaaatctcaaaacaaggaaggatgagatttttctgctccctaggagctgtttgtggagagcagggaaggagagttccttccattccaaaggaataaaagacagctccaagtctgtgagccaagaaaaagggaagctctgtaagcagtaattaacctttctctaactggctgaatacccagctggtaccaagagttaaaaaattgctgcccaacactccatgatatggagcatcttgggagtcaggtatagttaatgcaaactttatttataaaagactcttaaattagttgtatcatgccatgcattcatacagaatacagtgacccttcagggcgacagagaagagctcacaaactgaaaggaaaactattaaagagtttctaatattaactattaaaaagctaggaaagattaggacaattttacaaatgagcaattaaaaagaaaaggatctgggaactagactgagcagagagggggcagctgtttacaagtctgtacactaaactcatccacggacagtcttctagagcagcaggacgctgacagagagaagcagagtatgtacaaatacttgtgccacaatgactcctccccctagctccacggcatgatacatacaaccagtttgtatacactaggcctgctgaggccattttaaactatgaggacttctagtttagtaaactaaagctgcagggtgccgggggagtggggcagcttcatttgcgactgctctttattctctccagtctttttttcaagtcgtctatgttagctgtggaggaggaggaggtcacagttcctgaagagtgagtctggttagaatccaggtctgaatgctggtgctgctcccgtgactcccggagctgagagagtttgctgtggagcatgtctgtggaagaggcgacagtaggaactgctggtttggagagcaaagaggtcaaaggaggtcggtcatcttgctttgtgttgtccagaccacatcgctgtcggaggatctttagcctttccaagtagacagatggccccacttcttccccatttgtgttacctatggaggacactgtgcttgtgggcgtgggcacacatgtgacttccatctgaggggagatgcctgttgaagtggaaatacgacctttgccctccctctccatctcaatcacccgaaggcctctttcgacatagctctggaagaactgtgaggaatttttcagaaatggttcaatgtcagcatctgagtatttcttcttatattcatataactctgctagtccctctttagtgttttctttagagccaatcttcttaaaaatctcagctaagaaatcattcactttggcctttgatgatttttcatctattcgagatgctcccttttctgtttccttatcagacttgctcccagtctggtccatactgtgcttcatcatccggcagagatgggcctccagctcagactcgtttttgttgtcgatcatcgttaggtggtccaggatctgagcgccacccaggcctcgctacctt

SEQ ID NO: 318195 - DNA, 603 bp, Homo Sapiens
aaagcaacagctttttctactagcttggagataaggaaagttgcaccagtgggcctcaaaaagagaaaataatttcattaaattaacttcacagttgcttttgatttgcttcaaagtaggctaggagatttctatcactccgacaggaatgatggaaattatttctatcattctatcgtttagttattatagagttctatcatttagtgattgttattttttaggttggacaaaaatttaaggacaacccttaggtacataatggagaagctggaaagtggaagtcatcttgatgagtttgcaaaatagatgaaaagataaaatggaaaagatgacaaaccaacaggtcaggggatgcctgataccgtatcacaaagatcagacatacgtgtggagactaacaggtaaaactattttccacaagaaaatttattgcacaaggaattaagaatgttgctaactctgcaaattaaggacttaatatgagggacgaagacatcaaggagatgaggaaattttattcctaaccatgtcttctgtaattttgcccatggaatgttaatatattcacttaatctaataaataaatcttgttgaatccta

SEQ ID NO: 318196 - DNA, 603 bp, Homo Sapiens
cttaaattatatttattatatgaaatacaaaatgtggaaaatttggaaattacagaaaaaccaaagatgaaaattacagtgactttgttccaccatacaaagataaccactcaacattttttagtatgccttccgtcttttttatctgctctacgtatacaagcatacacccatattttaaaaaacaaaattgaaatcacataacatgcactatttttacaaccttttaatattcaaggagcatttttctttcagtcagatgttcttttacatgacttttaatgtctgcgcggtactccaccatctggatggagatacaataatttacttaagcaatcccctattgcaaactttcgttacagcagaaaaggaataaattcccaaccaaaccattgcttcccatttttctccattgcaatgctgggatgaacatcttatcactaactaaatccttaagtattttcttaggataaattcccaaagatagaattcgtaggtcaaatgacatggaggcttttaggccacatgacacgtatcacccaactgtcatccaggaagcctgcaccgatgtatactcccacacgcaatgtatgggaatgtttt

SEQ ID NO: 318197 - DNA, 823 bp, Homo Sapiens
  misc_feature (47)..(47): n is a, c, g, or t
  misc_feature (138)..(138): n is a, c, g, or t
  misc_feature (141)..(142): n is a, c, g, or t
gaaaaaccagcttatttgggccccctgtttcccccttttcccctttncgggggcccccggccggccccaaacggaaatgggttttagagaaagctttcttcgaggggccgaaggccggcccgccaatgttttttgttnttnntttttttgttattggggttccttgggcaggctactgttggcttggaacagtcttttactcttcccccttttattacgaaaaataccaccttgacaaaagagagcctgtcagatgggaacgggaacaccaggtccatcccttcccacggattctggtccctgaggtagctatccatcagtccttgcaaagtccacctgaaatgtgtccgcgtcaccctcctgcatagttcaacacacaggggagccctctcacccagccttgagggccacatgcccatgtggctctcttggtgtatgtgacggtttcgcaatcagagatccacgtggagttctccatacattcctcttcgtttgggcactgtggttacagaaggctagttttcaagttgcaggttttacttgtaaagatttcaagacccttcagcatcatcagtatctgattgtgtggcgtttttttgaaacttcaattccattctcttctaacttcctctttgcacagtcctggcatgcattacccaataatgtggtgctgtccacgcgatcagcatctgggctttgctttttgcagatctgagtggcagggtcttgcacatattctggaaagtggtcaaaacaagtccccgtaggatacaactttgattccgtgcagaagcatatctgcctgatgcttaaagaaatggtc

SEQ ID NO: 318198 - DNA, 433 bp, Homo Sapiens
  misc_feature (15)..(15): n is a, c, g, or t
  misc_feature (29)..(29): n is a, c, g, or t
  misc_feature (37)..(37): n is a, c, g, or t
tgccccaaataaatnggaaagtgtagccnggccaccntgtagtccaggggcccaggcatacctagatgtccccatatgtcccagcacaactttaggatatcctcacctagacattcatttgttaaaatatgtttataattattcagccctaggacctaattcccattttacacacaaacccaaactactcttagcactttttacattgtcattgcttgtgcaaccgatagaaaacagctgttgttcagcaatgtgagtttagagacaaatttctttttaaggtagcatgagatattttaagaattctttatattggtcattgatggcgcttagtctctaagaatcctagtgagaggcttcacaaatcagtgaatatggttatcagtgctgttaattaaaaaataaagtgtaggctgggcatagtggctcacac

SEQ ID NO: 318199 - DNA, 811 bp, Homo Sapiens
  misc_feature (67)..(67): n is a, c, g, or t
  misc_feature (74)..(75): n is a, c, g, or t
  misc_feature (77)..(109): n is a, c, g, or t
  misc_feature (111)..(111): n is a, c, g, or t
  misc_feature (476)..(492): n is a, c, g, or t
ttggggccccgcgcggccaaaaccgaaatgggtcttagaaaagctttcttggagggcccgaggcggnccgacanngnnnnnnnnnnnnnnnnnnnnnnnnnnnnnnnnngngttaccaaagaagtgttttatttttcttgcagtagctttgttaattgcacaaaatcatgttttgtttttgccatttaaacattatcacacaatcctattctgaaagacaaatgttcattaaaaacaaagcaaaaataaaaattcacaaccttaattacctagatttgtcatttaaaggtttaaagaaaaaagggaggggctttcttacaagctttttcacaagtgtcacattttctccttaaaagggaaggatttcaaaagaaaggtgaaatagcttaaacagaaatattcataaaaaggaactttacagaattgtcaacaatattaagacaaaattgactaaccggtttcattaccgcatcttnnnnnnnnnnnnnnnnnagtgtgttccgccaggactagaacaggctttgtgttcagacagaaatgcttcaaaatcccagtgaaatgaactgtgctaaaaacccgacaggcatctttcctgcccttcccccactcgtcttctgcaatcctctaacccagtttctaatctctgaaaggggccaaagctgtgaggggggaaggaccccggcctagtgtggccaccctatatataattacatattgcatcgtaaatgctggccttccttctgcaaattatgattttggaaaatccaacccatgcagagggataaaaaactgacatcccttgggtaactcc

SEQ ID NO: 318200 - DNA, 227 bp, Homo Sapiens
tttttttatattgagtaggtttttttccattggagtattggaaaaaaggagttttctaggcatgtacttcttgttatatggaaaactgataaactttgttttcttgctaaaattttagtgggcccaggtagctttttaaaatgtttaatgcaaattaggctttttggactgtttagccccctttgctttcaccctttgggattaaacttttttgtatttaaggcaaa

SEQ ID NO: 318201 - DNA, 760 bp, Homo Sapiens
  misc_feature (158)..(167): n is a, c, g, or t
  misc_feature (182)..(311): n is a, c, g, or t
  misc_feature (352)..(362): n is a, c, g, or t
  misc_feature (386)..(400): n is a, c, g, or t
  misc_feature (409)..(560): n is a, c, g, or t
ggggcgagaattattatttccccacaggggccgccaaggggttctctaatcccccccgggggaattttaggtttcttcccaaccccgttggggagggggttccccctgcggcgggaaattctaaagaaatttccccccctttccccataaattgcccnnnnnnnnnntatttttatttgagnnnnnnnnnnnnnnnnnnnnnnnnnnnnnnnnnnnnnnnnnnnnnnnnnnnnnnnnnnnnnnnnnnnnnnnnnnnnnnnnnnnnnnnnnnnnnnnnnnnnnnnnnnnnnnnnnnnnnnnnnnnnnnnnnncttgggaaaaactttggccccttttcctttccttttggggnnnnnnnnnnnaaaaaatgtttttaaaaatttttnnnnnnnnnnnnnnnccgcaaagnnnnnnnnnnnnnnnnnnnnnnnnnnnnnnnnnnnnnnnnnnnnnnnnnnnnnnnnnnnnnnnnnnnnnnnnnnnnnnnnnnnnnnnnnnnnnnnnnnnnnnnnnnnnnnnnnnnnnnnnnnnnnnnnnnnnnnnnnnnnnnnnnnnnnnnnagaaacaacgtttattgtttattgttaaaatagtgagctctcatgagaaaagagtatgtaaaaagggccttcctacaccctgggctttctcacttatcccagcagactgggactgtcctcactgtgtaggagggaaagttctccacctgctcccagaaaattaggctactccagttttacttttgattatttgcaggcat

SEQ ID NO: 318202 - DNA, 170 bp, Homo Sapiens
gcttggtcacaatgaatgtttgctcattcttctgtctgtatagaatcctaaatgtgatgctgtgtggcaatggggaagatcatacaagatacagtttctgtccttgtggagatgacagtctactctggaaaacagaaagttgtacacacacgtgacccagcaacatggca

SEQ ID NO: 318203 - DNA, 490 bp, Homo Sapiens
ggattgaggaccaattcacctgcaaatcaaggtaatcgaaccaagtgcctacatcagacatgataggcaaagaccagatctgaggggtcagaaaacactgacaacaatgatcagagctaccactttaaagtaggaaagaaggtagacaagcaggatgccaatcaaagttcctgtacagactttcctgaacaatcgaaacgtatctagctgacggcagcttgtcttgtttccttttgcaaaatggttctttccttgtgtcattccatttttgatgtatgtgagcaaagattgcttgtatgaagatcagacaccttttgtgttaacactaccaaagaaaagttctgtctgtcttattctcatgtttaaaaaattctggtgatggtgatggttatgttttaagaagtacttaaaagaataagactccaaaggaaataaatgtcttttattctggagtcaaagctttccattccttttaaggatctaatgaatc

SEQ ID NO: 318204 - DNA, 667 bp, Homo Sapiens
  misc_feature (114)..(141): n is a, c, g, or t
  misc_feature (551)..(566): n is a, c, g, or t
  misc_feature (656)..(656): n is a, c, g, or t
agaatcagcaataatagaatatgctgtataaactattctctacaaaggttgatcagcattatttacaattggtacattgatacaaaagaaggcatacaagttatccaagtcgcnnnnnnnnnnnnnnnnnnnnnnnnnnnnatggctgacaggtctatgcattgcgttatgcttcacaaccagagctttcgagcctctatggctggcgacaagtcaggagatcttcaggcaaagaggggtgtgtgcagtcaaggggctgggagagaagactgagtgggtgtgcagaacagaaggacccagaggacatcaccctaaaaatgttttataggctgctccagtttaactccattaagacaaacccaaagagaaccttttatttgcattccatttttcaagctgcaagtttttaatacatcattgtaaagtaaacctgtggttgactgccaaggaagaatactgtgggctttccctttttgcccagttttccagaaatatcctcaccttggtcatagccagtcttttgacaaagtaagcagcattcgatgagggtnnnnnnnnnnnnnnnnctctttattccagcttccaattcaagatgtagagagctacaatgtctaaacctattgaattgctcctttagtccttgagacattatttcnccgtgccgaaa

SEQ ID NO: 318205 - DNA, 1086 bp, Homo Sapiens
  misc_feature (237)..(237): n is a, c, g, or t
  misc_feature (751)..(766): n is a, c, g, or t
tagaaacgattcctagaggaggattgctgggtgcactttgaacatttttataaattttgacaaataatgctccagaactcttgaaccagtctacactcccatcagcagtgatacatgcaccctcccatcccaccttagtgccagtgttactgactctccactagaagctgccctctgcctggactggttggcacttgagttaacatttttgttcaaccgtgatttgctttcctaagnacacaatgaaactgcaacaaaacctggtttttcaatcttaggataatttgccgcagtagcattattccctggagaacagtatcagaccagactttcctgggacttaccaaagcatacactgtgcatagtcaggtgtgggccacaccactaagttaaccagggtcagttttccacatcccatggaaagggagattaagttatgttagttattttctacaccgtatgcatttccagacagaacactgctagacacatttataaaatgtataacaatcagataactgttaccagtaattggcagccaagcaaatccaccccagctacaaatccacccaccacaggagcaaaataaatgttatttttcctttttcccagatgaatagaaccctcagattcatttcagctgtatagaatgaaaaagccttccagctagcagctgtcagtaaactgttctttttttctgtatagacaatataacatcaataaagatagtttgtgaaaacaggagggaggnnnnnnnnnnnnnnnntcctgacaagtactttatttttatttttacacatgtccttctatgtccatctgtcagtatctttatgtgccttgaaatcctttttatgaatacatttttacattatattttcattataaacacaatatttcattagatactccatgtaagagttgcagcctttgtggtcagtgtgtgtatggttcagtgagggatggtgctgacctccccagaaaagacttctgcttctttagatattccagtattggattaggattgctcattctgggtataccagagccttacagggtgcctagaaatgggagccagtgccgggagaa

SEQ ID NO: 318206 - DNA, 376 bp, Homo Sapiens
tcactcagtttttattaatattgttattatcaacagtctcagtgattgtctcctcctaggcttagatgctaatcacatctaaccattgcttcaaattatttaccacgggattcatggcattgaggaagagaatgtgggttactgacactcatccatcatcagtagtggaaaaatgtccaacaacacacttaattgtacagagcatcttggccaagtcacgtgccctggatggcgctgcatttgcctgaaggacgggcatcttttttcaattcacgcaaaagcacggtatgtgctaggagtggcccagaaaagaactcaacagcatagactctgatagtgaactgatgccaaacagtgggcattaatgatcccacga

SEQ ID NO: 318207 - DNA, 693 bp, Homo Sapiens
  misc_feature (248)..(285): n is a, c, g, or t
  misc_feature (574)..(574): n is a, c, g, or t
  misc_feature (663)..(663): n is a, c, g, or t
ttaaggctattatctcctttattcaaaaaataaatatttcactttgattcaacatatttcaaatcacattaagcacagagaagaaatacagtccctttggagattgtgaacacgtgttggaaagaggcatgatccaaacaatgggaatgaggtgagtgtggattccagctgtttcctgacccagaggttccatccctcttcaggtggagctacttatcgatttttaggagagaaaaagaagctcacgnnnnnnnnnnnnnnnnnnnnnnnnnnnnnnnnnnnnnntgcgcgcgcgctttgaagtctgaaaggcacatgaagtggaccataaggtgtatggcacattcactgataaaacatcccctattccctcccaagaaagcggagatactttaatcaagtcaaagaccagagaagacagggtgctcctgcttacagctcagcaacatgaacatctctgaatatgaaagccattttttgtttgcgtcccccttccgcgccttcttttccttgcgatggggtccgcggccggctgcggggctcacttcgtgattgtggggcgcgtggccacgtncacaacaccacgatcaagacacgaccacgggcagcgtggcagtaccactgtagtgatttggtggcgggcttctgcatggcttggttcgntcttcttgtccttggaggctccttcttggg

SEQ ID NO: 318208 - DNA, 468 bp, Homo Sapiens
  misc_feature (16)..(16): n is a, c, g, or t
  misc_feature (45)..(45): n is a, c, g, or t
aatgtaattttagtanaagacggggtttccactgttttgggcccnggctgggtttccgaaactcatggaccctcaaagtttatcccacttgccctcaagcctccccaaaatgcctgggattaccaggcctgagcccaccatgccctgacctaatgttttactttggcagtgttggtatacatacaagggctaacggtatggggtcccaatattatactataaaaccatttaatcaaatttttgaaaagtcggaaaaactgtgtgtattctaaagtcactggaaattaaaagaaaaatatattccagtagtgacttacagatgaaaatgatgctgacaatagacagtaatctgtttttccatgtctaggtttgtgagtttctgatataattatttctctatacatgtgatatgaaagaaagaaactatcagtctgtcctctatcccagtccattttcctgtgccgaaat

SEQ ID NO: 318209 - DNA, 463 bp, Homo Sapiens
ctttctagaattaatcctgaatatgttgaatgttaaaatagagaagtttgtatatacacataattaaaaatcaacccttctggcaagatttcactttgaaggtgtctgtttttaagggaaggctaaaactttgctgatatgtgataaaacttgaactctaaattgcctccttagcctgaatttttactagctttctagtgtaacatattctaaggacatgacatgctgcttatttggggggattatttttcaccaaaatgatcatcttgtgttgtaacttttcagctcacttgtatatacgcatgttttcatttttggtctagaaaatagtgcattttggggctcagcgtgcagaggaaattcctcaaagtgcccaattaggcagtcaggaaatactaaattcttcattcccaataatggatttgaatgatgacgttaattttttatcatgcattacccaaat

SEQ ID NO: 318210 - DNA, 609 bp, Homo Sapiens
ggtaaagacttttgtatagttttcctgatgccctaatttgttccatttaatttctataaatattcaaaggacatggaataggatctgttaaatcaactttattaatcccattttaaatatctttcatatgcttatttttctgcttgatcagcaaataatgaactaatcactttcaaactgctagtttctatacattcaattatctgagatttctattggcttttacattgtttgatattatacgttttcaaataaatattcatataaatgtctataggtcttatagttctgttgtaggctacacatgaacagcaaccaaaaagaggaaaaatcttctttgtccccatgctttttccttgaattctgcacttttcatattaacattagcccttgctttgtgatttgcctttgctttattttaccctgtcttaatcttaaccttcccaaatatttccatacagggtgcacctctcctagacaacacacagcggagagtgtgcttcccatgtattcaatcttcgtctcttgaaaggagaggtgccctcattacatttcactgtgacacaggatacccttggttttctgtcacaatgtgtcttgctgctgtct

SEQ ID NO: 318211 - DNA, 605 bp, Homo Sapiens
  misc_feature (490)..(490): n is a, c, g, or t
  misc_feature (503)..(512): n is a, c, g, or t
  misc_feature (578)..(578): n is a, c, g, or t
ttttttaactttaaaactgccgtcttctgctttattgacaggtaaattgttcaaaaatgttctcacaattcaataattaattacaaagactgagacttacattaaaaaagtaaaaaccagaaccccccaggtgcccatccagcagaaggcccaggagggcagtggggtggcagggctaggcggtgctgggccactcagtgccgacttggggaagtgcacgtcctgaacagccttgccaagcagccgaccggtgggaggacaggggaagcctggcccaagctgtggacaagctgtgtctgccgccacagttaatcacaagcctctgacgacacagggccacagagctggtcactcaacatctggtacaaagggtgaggtgaaatccacgcgcaggggattgctgtgccgtgggccggggccagtgtgcaggagtgtgttgggtgggtctacgtgatcatacgggctactaatcacgggggctccatgcggnggcaggactggtnnnnnnnnnncgggcagggcggagcggagtggggtattccaagggctgcttcgtggcgcccttgggctctgacttncctcaccaacaggcctcgtgccgaatt

SEQ ID NO: 318212 - DNA, 1252 bp, Homo Sapiens
  misc_feature (355)..(355): n is a, c, g, or t
  misc_feature (1010)..(1061): n is a, c, g, or t
  misc_feature (1138)..(1138): n is a, c, g, or t
  misc_feature (1162)..(1162): n is a, c, g, or t
  misc_feature (1168)..(1168): n is a, c, g, or t
  misc_feature (1218)..(1218): n is a, c, g, or t
  misc_feature (1230)..(1230): n is a, c, g, or t
atttgcatccagctgggcacgcgtctcgcccaggctagggcagcgggtgctcaccctgccctcttcctgttcacagcctgattcggactccaccaaacactcaactccatcgaatagctccaaccccagcggcccaccgagccccaactccccccacaggagccagctccccctcgaaggcctggagcagccggcctgtgacacctgaagccgccagctcgccacaggggccagggagctggagatggcctccagcgtcagtgccaagactgagcgggccctccagtgttgtccaaggaaatgtagaatcactttgtagatatgggagatgaagaagacaaatctttattattantattgatcagttttatgccgcattgttcgtggcagtagaccacatctgttcgtctgcacagctgtgaggcgatgctgttccatctgcacatgaaggacccccatacagcctgtctcccacccctgacaacccgagaggcatatggggccctgccaacaccacttcctcagcagaaacccgtcatgacgcggctgcttcggaagcagacatctggggacacagcctcagtacccagtcttttccctagttcctgaaactttcctaggaccttaagagaatagtaggaggtcctatagcattcccagtgtcactagaattttgaagacaggaaagtggaggttagtctgtggcctttttttcatttagccattgcacagtcagctgcagaagtcctgctgaccacctagtcatggacaaaggcccaggaccagtgacaccctgcgtccctgtgtgcgttaagttcattctgggtcgcagccatgaagtgtcaccagtatctactactgtgaagtcagctgtgctgttttccattcgcttccacggcttctgcctcctgccataaaaccagcgagtgtcgtggtgcaggcaggccctgtggcttgtggggctgagggaagtcagagccccagggcgccacgaagcagccactgggatnnnnnnnnnnnnnnnnnnnnnnnnnnnnnnnnnnnnnnnnnnnnnnnnnnnngcatggagcccccgtgattagtagcccgtatgatcacgtagacccacccaacacactcctgcacactgggccccggnccacggcacagcaatcccctgcgngtgggntttcaccttcaccctttgtaccagatgtttgagtgaccagctctgtgggncttgtgttcgtnagagggtttttgattaaattgt

SEQ ID NO: 318213 - DNA, 506 bp, Homo Sapiens
  misc_feature (455)..(455): n is a, c, g, or t
  misc_feature (466)..(466): n is a, c, g, or t
  misc_feature (479)..(479): n is a, c, g, or t
ttttaactttaaaactgccgtcttctgctttattgacaggtaaattgttcaaaaatgttctcacaattcaataattaattacaaagactgagacttacattaaaaaagtaaaaaccagaaccccccaggtgcccatccagcagaaggcccaggagggagttggggtggcagggctaggcggtgctgggccactcagtgccgacttggggaagtgcacgtcctgaacagccttgccaagcagccgaccggtgggaggacaggggaagcctgggcccaagctgtgggacaagccgtgtctgccgccacagttaatcacaagcctctgacgacacagggccacagagcttggtcacttcaacatctgggtacaaaggggtgaggttgaaattccacggcgcgggggttttgtttttgccttggggccggggccagttttgcagggatttttttgggtnggtttacgtgntcatacgggttantattcacgggggttccttgcgggggca

SEQ ID NO: 318214 - DNA, 662 bp, Homo Sapiens
tggtaccggtccggaatctcgggatatcgtcgacccacgcgtccggttgttgtatttatcctctgttggtaatactgaatggtagaatgttttgatagggtcacatttgtgcctcactggaattatctttaaattctgtatttttaaagttgtgaataagataggtggattcgtattttttaaagttcagttgactttccccaccaaatggtccatttgaatgcatccctaatatatgatatagtctcaactaataggtgcaatttgggaaaatcaggtttattttttggagtggaactgttataagtgcttatttataaaaggaatgtttctgaatgcaagtgcctaaaaagatctttgttggtatgcatatgttttgtcacacaattttatagtgcatctttcaccatttgtgcttttttaagatacgtatgtaagctcttatttttcaattggcaattcagttaatttttaaatgtttacataatggccagaaggcttgcaaatctgtatttaattgcattttaattaattgccagtttttacatgtgatagtcagttgtacaaagaaaatgcacttaaacctgtttctaaattatatattcagttatattatatttggctttagatggttttaatacatttgatagtttttcaccccg

SEQ ID NO: 318215 - DNA, 693 bp, Homo Sapiens
aaaactatatatatgagatttatttcacattttctacctactcagtcatgtgagctgttgctacatttgtgaactttctgaaaccaagtgacaaatatccacaaaagatcatttacaatgtagacatcactaaagtctagatttaaaagtccagtgaaaatggcacacagttggcttacagaaataaaaaagtccaatatatttgaaatagtagggtttttgttttccatttatgcctacatcatgggtgttacctgtggatatgttatcaacgatattgatatcagatactatgacccatgacatttagtatttttagcaataagaagcacacttaaatctatttcaaaaatatggacatgttaaattcttaggaaagtatcaactttacaaagtatcatacacctagaaaagtaaacatgaatttctcagtctaggttagaaaaaaagtgttttaagatttttattaaaaaaatttaaacaaaatttgtttatcttatctagaaacttatacgatcatgtaaaagtaaatttttttattcagtattatacagaacaatggaaccagtatggcctgcagagatacagaggctgtgagaggaggttggcttagtcaaatgcctctgtccacactgacatggcacttacccagcacccgaacctcctcctcccaccacacggagaaccatttct

SEQ ID NO: 318216 - DNA, 707 bp, Homo Sapiens
gcagaggcctccactttttatttcagttgtactcatctgtcccactgtgcaaatggagtcacacgctcactcaattctgagaggcctggccaaggcaaagagaaaagatgcccagagcagtctgttagagttgcattctcagactaatatctttacagtcttgagaaatcactgtcagggtttatttaaaatgcagatttttgaaggataaattttacgactaattttttttaataaactatgcaggattgttatttagaagatttgccaaatttagagtcttcagcgatggaaataattggccttcttgtcacagtcttctgtttataagtgggtaaagaaagttttctttccagaaaaatacagcagaaaatccgatggttctgataggagttaattgtggagatgtgccagagacagcagcttcgtggatggtgacaccacaatgtctgtggcttgagggccctgctgccttcggattctggcataatttgctctgatctccatcagttgttttaactcttttggggttttgaaaccatgtcccatagacacacagatgaccatatctcgctctatgtcgtcccaggactgaattggctctccactgggggtgtacagtgctctagctgggtgggtcattttgagacgagaggagcagtcttgcagcagctctgaaatagttttgccccaggcataagtgccat

SEQ ID NO: 318217 - DNA, 230 bp, Homo Sapiens
gcaggattagagggtttgagttttgcctccaattttcccagagtggagagggactgaagattgagctggtcaccaatagccaataatttaatcaatcacacctataccatgaagtcacacttttgccttcagtagttaacagcatctacagccccgtgtttccacatttgtacaaaggaatgttcagactgaaccacactttagtacaattttgaaacagcattaggctg

SEQ ID NO: 318218 - DNA, 472 bp, Homo Sapiens
cctcctttttcgaagcgattaagtccatctagcaggagagcccgagtacagtttattttcctctttaaaatctctctctagtgctttctacagtactgccaattaataggggcttaagaaatctttgttaaatgataggttgaatgaatttgtcgtctcttctcttttctctgacttgcggtaagagaaatttctttttttctaagactaaaccttgtcaatgatgtagaatttatctgattctttccactcatgccttcttcaagactttgattcatatgatgtatttcttcttagtttgtctttggtcttcatttcttcattggccacttagtggcttcctattaacacagacaaatgtcttagttttgttaaacggcctaaagggaatggtgactgggacaaggtatctgcgttggaatactaggttgggtagcaatattctgttgctttatatctgcgtggcggaaat

SEQ ID NO: 318219 - DNA, 576 bp, Homo Sapiens
ttttggtgtggcacattttttaaataccttcctgaggaagagaacatgggaagtaaatatggttgtaaatattttgagatttttgcatgacttaaagatgtttgtattctggccttaacaagaaatgtggctgagcatagaatgacagttggaaaataataccctcccctagcccttcccaagcgtgctggttgagatttctgatgccattttgattcccgtacctttatatgtgacttaggtttttttatccccccttcttggaaacatttaagatctctttattcttggtgttctgaactgtcatgatggtgttgtatcccgggtgttaaaccttgtgctgggctttcatgggaaatttcttaaattttcttgtgattatttacattctttctttctggaccccttattatttcaatgttggaccctcccctacacccaggttgatgctctaatattttttatcttttctatttttcgtctatgtttctgatctgctttcaggaagaattattcatttttatcttcccaatttgaatgttttattgattttttattttccaagttaataaaacc

SEQ ID NO: 318220 - DNA, 146 bp, Homo Sapiens
gaaagactagaataccatcttcgtagtctaatgttagctttcactgactccacctaagaattcaaaaattttcattttccacccacgatggccaagagaagaaaatgacagaggaatacatcttacaattattagatgaatcagaa

SEQ ID NO: 318221 - DNA, 603 bp, Homo Sapiens
  misc_feature (436)..(451): n is a, c, g, or t
tattagatgaaatgttttatttatgtataaaacatatacatataaaacatttatatatatggctttattccacagggcacagtggctgtatagcctcaaaattttaatataaaaaagtgtatgcatatatacacacacaaacatgcacaaattatttaacttattttgggttaaaatatattttgaatgacaatatatggagtagcaaaaacagttaaaatgacttctctttaagagttatccagaaaattaattgtattaggtcaaaatgccctttatttcacaggtctgtaagttaaggctatggttgctctattaccatatgccaatcaatactttaactgcattctgtgacagactgttaatatgaggactgcagacaccaagtggctctcctttgcagtgtttatgaattacatgcatttgagctatcaannnnnnnnnnnnnnnnctcaggtggagtgaagctgacagtacagtagatttggagagtaatacaaatcctttctttctggttagaacacactggcaaaagccatctctttcatctaaggaaaaggttaaaaatgcatgttggtatctcctaactatcacacaacttcc

SEQ ID NO: 318222 - DNA, 598 bp, Homo Sapiens
  misc_feature (25)..(25): n is a, c, g, or t
agtctatgttgtctttcttgagaancaaggacttccctttctagacaaatttctgagaactggctctttagtattccagtattaagtgtatcatgtggtaattaattatgtattccatatatgtttagcatctctgcagttaattaatacgcctcctagcattttacagatttcataaaatgaaatctgcgaggaaagatctcttgtgaaaagcattgggaaagcctttatgtctttacttaattagtgtgacaataagaatcactcacttgagggaaatggcggcgtctagggatcaaggttattccaatgacttgattatttcttttccttttaaaggagtctagtctattcaaggttgatacaactaaaatctcagtagagattaaactcatagggcttaagcgtttgaggggtaaatgcagctttgaggaacagaatataccaaagtccattttacctactgcctttcaaagtttataaataagccagtgttttcagacacctttaaatatagagaactttaccaatatcagacaagtaatagctgcaggcaagcagcaagtgcgagttattgatgaccagctgcttttgcttc

SEQ ID NO: 318223 - DNA, 340 bp, Homo Sapiens
agatctggactgagttttggtagacagataaagtattaggcacaaaggtacattatccacagagactctgataaaggattaaactggcagcctgtatagtccacaatcaccttttagttggcccatggaggaaatctggatatttagcttcttttgaaagatggacatatgtgattgtggctcacagtcctccaaggccttggtcagcaagagctgagctgctgctgtctctgcagaaggccacctgcctggcctccaaaaacacgtgaattttcaactaatctgaatgtgctttaagtatttaaaagggaagaataaggctgggtgcggtggctcacac

SEQ ID NO: 318224 - DNA, 575 bp, Homo Sapiens
gagtatttattttcattattttaaaaaactgcaacatttatttcacaatccctggaactgtaaaataactattcttttaatttacagaattgagggaagtattttaaatgtcaaaatacacatgctgaatgtgatttagcatataagcaccaaaaatcccaaaagtatacaaagattgtttaaacatataaggtgcatttattcatgaattaattacattcagtttgaaggaagaaacagtactccaaagttcatcaatatttaagaaattatccgaatagcttccaacttggtttacagctaaataacagatactgcttttaggtttttttatacaatgcatctaaactttaggttcgaaatttaagtgctgccttacactgtgaatggcagtttgatcactaaatttatgttcccgtttgaggatacttcatacacaacatatatttaatgccctgaaaacttttgcttaaaaactgagttatttagtgaacatctgaaaggtacaaaaaaagatagatcttctatatttttatgtagaaatgggtataaagtcattttgggtcaaacaccat

SEQ ID NO: 318225 - DNA, 313 bp, Homo Sapiens
tgttcagactttgaagactacaataaatacttaattcttcaatgcccagacactgatgaacatccaaaagcatcaagaccattcaggaaaacgtgatctcactaaataagtcaccagggcccagttctagagatacagagatatgtgatatcttagataattcaaaacagctattctggggaagctcagtgaaatcccagataacacagagaaagaatttaaaaccctatcagataaatgtaacaaagagattaaaataatttttaaaaatcagacagaaattctggagctaaggctggacacggtgccacat

SEQ ID NO: 318226 - DNA, 469 bp, Homo Sapiens
acaaatcaacatcaaagatggctcagagaatggtaaggcaacagtgagaaacatcagctgtacttgtcgagaaggtgtctgattacacagcgtgtaccatcccagctggccctttgctataacagaggagtgggtgagtgatatgttccaacagctggtctaaagaccagaggcacagtttcaggtaaagtgcaggaacagggtagaggctacaggtggaaagatctagaagctctgtgtccaacaaggtcctcacgcttcttatcagcatggactgactcaatctaaatttggtgtcccccctccacaggttctagtagaaacctacgcatgaagaatagaatgcagacagaatatagttaaatccaaaaaaggcccttttctttcaaaccctggggaaagaaaaatggtaatggtcagccaaaaagggcatttgagaggaaactactttttgctttaatttggatat

SEQ ID NO: 318227 - DNA, 510 bp, Homo Sapiens
ttttttcattttaacttctcaagaattgcagccttccttttattacactctcttcttatccaagcatgcctttataagcagattaatcttgccaaagatcagggctgttgttttacactggagtttaagccatatcaatttgcacaatgacacagcaaatcaggcatcctcttgcaggaattagaaccaaggaaaatcaagcttgttggttttggtgtgtgttccaggggacaggtatagcaagcacatccctaagatcatcaactttcagaggtgctcactcaaagaagttttcctccacactgaaaaccctccgtcttattcctccatttaaatcgtatagtttaatgtgagactgtctgctataatgagactcttcactttgcaagctacaatttctgaagaagtctgggggttcatgctgctctttcctgtttggttttcttgcaggacactggaacttcccgcttccaaatgccatgaagcagtccaagaaagagtgcttctcta

SEQ ID NO: 318228 - DNA, 587 bp, Homo Sapiens
  misc_feature (568)..(568): n is a, c, g, or t
tccgtatgctgggtgctttagagacatttttttcttaaatactcataataacgctgtgggatgggtaggtcgttttattttgtagatgagtcacttgagcatagtgaggtttccaaggttgctgtttgtggcaacacgaggcagagctgacctgaataggtctctctggctttaccatgaggttccccggtgttaactgataagggggtaaaagctgactcctctcaaagcccctcatccgaaagaacaggcagaatttattaacaaataacccatagtaccatctgctgatgaggcagtggttaaatgagcttgaaaatgggctttcatttttactttatcattgtgaaatcatattaatgttttaatctagaaacttgtgccagatttcaagaagaaagctgattaaaatgttttaaatatgtattttatacctaatagaaaaagactaaatattttacatttagctgggtgtggtgacatgtgactgtagccccaacaatttggaaagctgaggcgggaggaatgcttgagctcaggagtttgaggttacagtgagccatgattntctctgactccagcctgaa

SEQ ID NO: 318229 - DNA, 197 bp, Homo Sapiens
gtgtgagccaccgcacccagccaattcttagttcattttaataaagactttccagtacctacatattcaaggcatttacattacaacacaatgagtactctttattctccttgcctgcctcattgttgtggttagtaaatttttagtaactatacattttctgatgagatctttgtaaattttgtatttatatcagt

SEQ ID NO: 318230 - DNA, 593 bp, Homo Sapiens
  misc_feature (374)..(382): n is a, c, g, or t
ttggtttgttttcaattttttgagtatttactatttaaataaaaagcaatggcagcaaaggtttctatttccatgtccctttgagctttttccttgacatccacttctctcacaaggatctggccttcatgccaagtctctgctgatcttcactgcggagggcagctcctcccaggagagggtccagcccctccattggctggtgccggcctcacatttgtcctgaccctgtgtctggcttgtgctgcccgtgattatggctcctgccggccgctcagtggcccatgggattgtggagcagaaagcagaaaaggaattttggattacgggggggaaatgatgctttaaaaaggcaacagttttctgatgtctannnnnnnnncattctaagatagtttcataaatttcctcttcatttcaaccaagtacgcttggttacacttcctaaggaattttgttcaactagatggtatgttttggtgaattaatccaagaggacgctactgtaaaaatattatatatatgcagctttcttcacagaacatataacaggatatatatttgggatgttaatttaaaaaacaattttaagg

SEQ ID NO: 318231 - DNA, 603 bp, Homo Sapiens
gagtttattgtccagtagtcgggcaggcttgtgcctttccttatttgtcagattctttcatttgctgattctgtttaagctcaagggtcagtcactgtgaaatgaatttgcacctcgttttctctttaggctccaagactcccaagaactccagggctcccactttccccattctgtgggactccttagggcccagaagagtgtgctgtgcaaagttggcttttagaaaactggctagctagcttgctggctcctccactttcctctccaaaacttcagaattcaccactcactgtcctaccagaaatcccctagaattttaaggtcatgcttactcacaaagtcttgaacccttctaaacacacttcccaagagactgacttatctggaatctcatctctatagagaagcagcctcttcatctcccttcaactatcatcccatacttctctgaacaatttttcttggtcctgccaattcagtgtgattgaaaaccttgaaaccacttagcagagaatctgggcttacataagggttggcctgtgcagttgagacaaaagaaggagaaagaaggcaccggaatactggctgcttgagaatcat

SEQ ID NO: 318232 - DNA, 2213 bp, Homo Sapiens
atttccaggactatgtttttactatagattaaaatttaatataacttaattcacatataaagacaactctgaagaccatctggatatgataatggcctggggttaagtgaaataattgaggtcatgctcaggcctgagcagataccaacttgctcaagcctgagaaataggacttctctctttcactcatcacttcaaaatgcagtggcctcctgcagaagttgcactcagctgaggaatgaggcttcagttccagccccacttgcttccatgtgactagcagattctcaaggaagtagttcatcatctggggtgtgtggtgaggggtgggggcaatccgtaggagctcttctccccggggcaccgtagggtaattgattgcttgcacgtagatgttatgtctgctcattagttcatcacagacttctgtgtttttagcagcatctgcaacccgcacagggatgatgtggctggggcagtggacaacagggaggccggcatccattagcatctgtctcatgagtttgacgttgcgctggtgctggcggcgaacacccgtccctcagcgctcttcaggatccgcacagactccagggctccagccagcagcatgggtggcagagaggtggtgaagatgaagccagcagcataggaccgtacggtgtcaatcagagaactcgtgctggcgatgtaccctccaacacaaccaaaggctttgccaagtgttccagaaatgatgtccatttttggcatgactccatcccgatccccaatccctccgcctcgagccccataaagccccactgcgtggacctcatccacgaaggtgattgctccaaactcatgggccacatcacacagctcttccagtgggcacaccgccccatccattgaatggacagtttcaaatgccacaatcttggggactgaggggtcagatctttgcagcagttctctgaggtggctgacatcattgtggcggaagatgtactttggcactcggctgtttcgaatcccttggatcatggaggcatggttcccagaatcagagtaaatctcacagcctggcatcatcttagccagggtgaagagggttgagtcattggccacaaagcacgaggaaaacaagagtgcggcatctttcccatggaggtctgccagctcccgctctaagtccacatggaatttactagttccagaaatatttctagtaccacctgccccagcaccatgttgtttcaaagtgtccataactgccccacacacccgtgggtggcgactcattcctaggtagtcattactgcaccagactgacacttgctttttggtgatgagggagtctgaatagtcatctgccatggggaagatgtgtgctcgccggttcacagttttaaaaactcgataggtgtggtcattctttttctcatcaatttttttctcaaagaaacgatcatactgaaaagtggaaacagattttggcaagttatcttgaagaagatgagacactctttctggtctttgcttttgcatgatgtcctggaagttcttcagcagtccactgggatcccctccatcggttttcacactaaccacactggggcctgctgaggtttcagcaacctctttcctcacggcattcatttcctgcacatcctcctgaagctcaagactggctttgcagaagacactgctgcctctctgattcatctgtgctgccaggaaagggcatttgcttgcagtgccctggcttgtggcaggcaaggggtgtccagacggaagctgtgtgccatctggactctgctgggatccatcaggagtctgttggaccttggccttagcagttttgtctttctcactggccggaggggtttctttgatctgttggtagtgtactgctgcagtggacaatgcccgaggggctggcttggccccaacttccatcatcttggggcagttttgggcatagaacaacagagatttgcctgctttctgcagaaaggcctgggggactcgggataagaatgggcagcggcgaacaacactctccatgttcaggaagtatgctggctcctgtggaaagactgcgctgaggactgcagaggcggcggcgaaggaggcgggcactcaagtcgagaagtccaaacgaaacgctcgttgcccttgtccgggagcagcctcaggccgcgatcgccggcgccttaataatcccggga

SEQ ID NO: 318233 - DNA, 387 bp, Homo Sapiens
  misc_feature (26)..(26): n is a, c, g, or t
  misc_feature (70)..(70): n is a, c, g, or t
  misc_feature (106)..(106): n is a, c, g, or t
taaaaagaagggggtttccaacctanggttgggtcaacctatggtcttggaacctcttgaacctcgtgancctaccccaccttgggttcccccaaaatgttggganttacaggtgtgaagccactgcaccaggcaaactgcgatcttttaagtggtgcctcttctctcttttgacttaaggatgttgtcccttaaggaaacctggaggctactactgtgatacactacttgagagatggattgttgctctttcttctacagtctttacaaggagtagattataaagacagaagatgttaaccattgcattaatgtttggaagctgacagtcttctagatttctgctagcaaactgatatgaggtagagtcctgaaagatctttcagc

SEQ ID NO: 318234 - DNA, 364 bp, Homo Sapiens
gtctggcatccaatcaaaaatgttcagttatgcaaagaagcagggaaatatacctcgcaatgaagataaataccaataaaacttgaaccagaagatgttagaattaacagacaaggacattgcagtagttattataactatattccaagtgttcaaaaagttagaagaaagattgaacatcttaattagagacatggaagattttttataaaagaccaaaggggacttttagagataaggaccacagtgtctgagatgaaaattatgctggaaaagattgatggcagattagaccttgcagaagaagagattagtgaactcgaagggttagcaatagaaaataaccaatgtggctaggcatgat

SEQ ID NO: 318235 - DNA, 798 bp, Homo Sapiens
  misc_feature (160)..(160): n is a, c, g, or t
  misc_feature (166)..(166): n is a, c, g, or t
  misc_feature (612)..(662): n is a, c, g, or t
acccctagttccttgccccgggatctccttggggaaaccagctatggcccctgttccccttacccttctggggccccgcgcgcccaaaccaaatggttttagaaaactttttcgagggccgaagggggccgacaggtttttttcttcttttcctcccgtncccccnggtggttatttagattagattttgggtaagtctcccgggtttgttggaagggactcaggtttatgtggagttttgtcttttagttaatgtgccagtaacagagtttgcccgtttgtgctatgggatactcatgaggtgcccccaaacccagctggctacatatacagcctcttgcttcctcttcactgtctcctgggctcttcccttcagctctcctcatgccaaactcgtgactgcatggacccaacatagggaggtgattaggaccatgtattttggaggcaaactgtctgtatttgagtcctgcctaccctggttattagtgaagtggtttgagtaagttacttcaaacttctgtgcacttcagtttcttgatctggaaactgaaggtaatatacctaccttacagggatattgtgaggattaaaatagataatgtaaaatgnnnnnnnnnnnnnnnnnnnnnnnnnnnnnnnnnnnnnnnnnnnnnnnnnnntagataatgtccattgaacaccttgtaaagtacctgactcataattggctgttaataagtattttaaaaattgttatctgaagttcctccttttttctgtcctttgagctggactctgtaacacctcttagtatcc

SEQ ID NO: 318236 - DNA, 538 bp, Homo Sapiens
aatcaaagagcaaaataattacacagaccccattgcatggcacatccaaagttttctgcttaagggagaatgtaatcattcagcagtaagtttcggggagatttctttaggcttccaccttatacactgcaacaagggtcacatttactacctctccttaggggatttctttataactccaacatatatcactttttaaaggattcatttcttgctggctaacatacattattatttggaagcataaagttacattggacaaatattttgcatttttaaaaataagcgcttttgccacttttgcaacacagtacttcacatagtgatgcaacaaaagcggagcacatatttaccacactccttaagattcattttaccaccaccatttgccgaacccatattgctttttcctcagtacctttgggcagtgactgtaccatgatttcacggggagaatgttaatatgacttatgaataacacgcccatcaggaatactgaaaataatggcgatgtcacaaaatatgaaatttttaaggg

SEQ ID NO: 318237 - DNA, 498 bp, Homo Sapiens
agatggatatgatagattacacagtttattggaggacaataagagttatggcaaaaagcaaaaggaacacagggtaaaggggataggtgccatttggtggtgagaatgctgactgaaaaatagaatgatcaatttaatctgaaacaaatggttatttcttttataatccatataataaatttaaaatctaaaatgtaaaattttgaacacaacactggaaagggtatccacagcaggaagtccccagttcacctccatgactacagggcagctttgcacagccctctgggcgcactgtgtgcctctgcccagaagggggcctcgccgttccaccagaagctcagctccaggccctggaggggctgctgctcctcagttgcatttcttcagtagattcatttccttgatgcaaagcatctgtatttgttggttctgtcatttgagcgatgtctctgacttgtttgttttgaattacattacaggctggaatgtaaataa

SEQ ID NO: 318238 - DNA, 319 bp, Homo Sapiens
tgagccaccacggccggcctcacgtgttcatttcttaactgagctctgtctaaccctgaattatggatggggatgcctgcacaaaacacggagatgtagaaaggtgagaaatttcttagagaagccagttaatccaattattttaggcacttctccaatgaactatagggctaacacatccacctttttcagtttttttgcctctgaactttgctgtagtatttcatggtcagtctcaactatccagatctgaagtgtgctagccccttttcccaacagttaagaagtgtcacctctcagcgcttattcccaacttatc

SEQ ID NO: 318239 - DNA, 1551 bp, Homo Sapiens
  misc_feature (658)..(658): n is a, c, g, or t
  misc_feature (916)..(916): n is a, c, g, or t
catctgctgcaagtgtttattctatttagaagtctacaaatttgagcttttaagaaagattcacaaaatattcattcaaaaccacatttttggcttatcaaatttcaaatatattttactgtgctgaacaatatattctaatgctgtctaaaacacagctaaattatttttctttatttgtttatacacattcggtaatttctgaaaagcaagatttaaaaatatttattaacaaaactacccaattacaatgactgttctcccatacacgcaactattttctgtagctgtatcttcttacctcattccactttaactctgtataccgtattgatttgtgatgagatgatttattatgagaactcttagggagttctcatcttccatttctcatcaattcaaacagcaacacctttcacaagataacattaattcccttggcagggcagaagcttaagtttgttaaaagcactcactgaaaaacatttttaaatttataggtcatataaaataatttacaaagagacagatgacttcaaatattatttggcagtcaccttactatgtagaaacataaatgaagcatctgtcacacgagacaccagtcacttttggtcttttgaaggaagtgtgtgtggtgagtgttgtttctgcaggncccattccagcatccgctgattctggcagccctgagcccatgtgtcacatggagacctctcctcctcccccacatgaagcctcctggttcaggagcaggaggagccgaggtctccaggccctcagtgttgaaaccaaaggttccaagaaaataaagcaaggatatacacagagacgccaaaggagggtgtgacaggagggaacgtgaaccagaaatcacggggaagctcctacatcagaactcagaatttctcaaaangaaatattaataatcagaaacatataccatatgaaaaagtagcaaaacaatctgcaaaactatctggacttcactgccgcctgagatgtggttacttgttcatttaaagaggaatttctccaggaaatacacatcatgacttcagtattaagaaccgtagcgatcctgaattgaagtcacgactccattagcaaagacggagagttttccagcaaccgatctcactccctgcttgaactgcgccatgtcgggggcgttgggcagcacgctggacaggctgtagttccctgctggctgcttcctcggctcctcgaacagatcagccgagcttatggaggaacttgctgacagcctctctaggcgggccctggtctcataatcagcctgggattgtcttcccaaatacatatctgatgaaatggccttgacattgccaaacttcttctgggcctcatctgtattttcaactggctcataatctggcttgcggcgagcagtaggtctgtctgaatagcctgtggttttcagaactgtttcagtatctttgctggtctcttttttccaataggaatctgaactgtcatcccagctagagaaagaactgctccttaactccactggctcgtcaaagtacc

SEQ ID NO: 318240 - DNA, 294 bp, Homo Sapiens
tacatttcatcttagaaaaagttgcttatattcagcaggttggtttgtcaaattcagtgtttgagtttgtttctggtcagttcagtagctgctactttagcaagatgtggcctttcacaaaagaggtaagagtggccaaatagaattttagggcaataagtatagggaatatctctttatcgtaagataagaaacttgaactttttaaaggaaatgtcctcttgaaaagaacatttctgactgcatgcagaagggtacttaagacatatataacaggccaggagcagtggctca

SEQ ID NO: 318241 - DNA, 605 bp, Homo Sapiens
  misc_feature (48)..(124): n is a, c, g, or t
  misc_feature (361)..(361): n is a, c, g, or t
  misc_feature (377)..(377): n is a, c, g, or t
  misc_feature (404)..(404): n is a, c, g, or t
cgactgctgcctgactcccaccctgagatattctgatttcactggtannnnnnnnnnnnnnnnnnnnnnnnnnnnnnnnnnnnnnnnnnnnnnnnnnnnnnnnnnnnnnnnnnnnnnnnnnnnnagctgcggcattctttcagagctgtggctcggtcagcctgatggccttcactcagcctctgggcagggcttgcagtaatgcaggatggccatctgatagctccaagctactgagtctgcaagcctcacctgggctccaggctatgtgtcctccagtgggttgacgactgtgactgctttgctgcgtcaaggtccagagcagtagtgtgggagagagttagactgtcagaactctgancgcgggtagaggcaanacaggtgggaagggcttgagagagggnggctggatagggttgggaatcagacaggagccttggtcccattccacacagggaggctcactgctgccctgggtggactgtcaggacaaggatggctgctcctgctctgaggggctggccagcaattttggcacttcaaggagaaggttaagatgaagagctcaaggatcctccaggctcagtactgacttttctgcatga

SEQ ID NO: 318242 - DNA, 572 bp, Homo Sapiens
  misc_feature (17)..(17): n is a, c, g, or t
  misc_feature (30)..(30): n is a, c, g, or t
  misc_feature (65)..(65): n is a, c, g, or t
taggttttcaacccagncactggaaatttnaaaactccccaagttaattttaagttccgcaaaanctggaaccaactgaactgcggcaatcctttcaaaactgtgcctcggttcaacttgatggcccttcaactcaacctctgggcagggccttgcaataaatgccaggaatggcccatctgattagctcccaagctaactgaagtctgcaagcctcacctgggctcccaggctatgtgtccctccagtgggttgacgactgtgactgctttgctgcgtcaaggtcccagagcagtagtgtgggagagagttagactgtcagaactctgacgcgggtagaggcaaacaggtgggaagggctggagagagggggctggatagggttgggaatcagacagaagccttggtcccatcccacacagggaggctcactgctgccctgggtggactgtcaggacaaggatggctgctcctgctctgaggggctggccagcaattttggcacttcaaggagaaggttaagatgaagagctcaaggatcctccaggctcagtactgacttttctgcatga

SEQ ID NO: 318243 - DNA, 500 bp, Homo Sapiens
  misc_feature (229)..(356): n is a, c, g, or t
atttttcggcaaatcttcacaaatacaaaggggattgctgaggagggctttaggatcaatattttccaggatttttctctgtttattttgtgtgtttctgttcagtagtcttttactttacagttgttttaggagcctttcaagaaggtttacccaagtatttaggtgtgctaactgactcatcagcaataatttgatctgctaattaaaaaaaatacctttattgtcnnnnnnnnnnnnnnnnnnnnnnnnnnnnnnnnnnnnnnnnnnnnnnnnnnnnnnnnnnnnnnnnnnnnnnnnnnnnnnnnnnnnnnnnnnnnnnnnnnnnnnnnnnnnnnnnnnnnnnnnnnnnnnnngttacttcagcatggtggttcgtgctcgtggtgccacctctatcctagaatcagtcaggcctttctcttcaactatgcatctgtagtttgctcctatgcaaagtccagccagcttgggagcagcaaagaaataggcagcatttt

SEQ ID NO: 318244 - DNA, 503 bp, Homo Sapiens
tactttttaaaattttattgatgtaccacctgatcaaagcatgggatattttaatagtattatacataatatttttacatagaaaactttacatagcatttcatattatataattctgcttattctttcaaaaatttatacatccattgggcaaggaatggttttccttaaattacccatattaaatgcacttaatcattgtgtataggttaaaccaaagtaactattaactaacttttaggcattttaaggaggtaaaacatacattttacacataaatatttgatgcaaatatgcagataaaattttttaaaaattagaacactgagtaaaacacctttgatagattatattgttttgttttgagagcaaggatttccagatatgttcattctttaaaacactcagctttggtttctttgtttcccaaactgcaaagctgctgataacaaaactccaggattccatgtgagttcagctatgtctactttaacacaaatatt

SEQ ID NO: 318245 - DNA, 688 bp, Homo Sapiens
  misc_feature (200)..(200): n is a, c, g, or t
  misc_feature (259)..(496): n is a, c, g, or t
attaaaaattcattccagcttatccgcacaacattaagtggaaatatatttaatacgcctgtaaattgttagcacaccagtttttatgtcggcttttccaagattaatcatttaaatacctctataatatgcatgaaaattgataaactgtggccattagccttgcttgtttggggtatattcttttaacccctttgtancattgctctacaaacacttcaaacaacctgtactgttttggcttaaaaatagatttgtnnnnnnnnnnnnnnnnnnnnnnnnnnnnnnnnnnnnnnnnnnnnnnnnnnnnnnnnnnnnnnnnnnnnnnnnnnnnnnnnnnnnnnnnnnnnnnnnnnnnnnnnnnnnnnnnnnnnnnnnnnnnnnnnnnnnnnnnnnnnnnnnnnnnnnnnnnnnnnnnnnnnnnnnnnnnnnnnnnnnnnnnnnnnnnnnnnnnnnnnnnnnnnnnnnnnnnnnnnnnnnnnnnnnnnnnnnnnnntgttttgttttgtttttaagaaactgtcagaattggaatttttagataaaagaatatgacgattttatgattattattacagattatcagacaatgttccagcaaatgtactaatttacactgtcactgtatacttctccctataaccttgtaagtgttgtattttataattttcataaatttaatatgtat

SEQ ID NO: 318246 - DNA, 357 bp, Homo Sapiens
  misc_feature (158)..(189): n is a, c, g, or t
gaatctttctaagggaggaaagcaaattatgagtacagtaagtcttgtcaacagaattttatatagtgactctaccaacttgaattaataccttttccttcctaaaatatcaggtttttcacttgaagtagaatgtttaagtccatgtaaaacctacnnnnnnnnnnnnnnnnnnnnnnnnnnnnnnnnattatcagtaggaataataaattcttaccaggaataatttttatagattctttaaataattcaagatttttgtagaatatgtattatttaaccatcttatcttttccagagtaaaactctaaagtcagaagagtttaaaccagatctcttgcccatttaaataacagg

SEQ ID NO: 318247 - DNA, 529 bp, Homo Sapiens
  misc_feature (353)..(383): n is a, c, g, or t
  misc_feature (407)..(458): n is a, c, g, or t
tactaaaattgcttaacatttattgcttcttttggggttagcaagttgtaagcctcattagatgcatacactaagaaatggaattgattagactcgaccgtaggaatggatcaaactatgtactcttcttgttccaagtttcctccaaaagtagtagttattttgtttttcttcatccttgtacagatacatttagtagagcttaccacatagccttcccctaacaaattccaaagacgtccacagcccccttatgtaatgaggtccaatcaatgatcaattagccatgctagtggctaatagacaaggagattatctccataatctctccaaagatggcaaattatggctannnnnnnnnnnnnnnnnnnnnnnnnnnnnnnaaagacaaggtctcactgtatccnnnnnnnnnnnnnnnnnnnnnnnnnnnnnnnnnnnnnnnnnnnnnnnnnnnntgggctcaagcgatcctcccaccttaagcctccaagtagctggggctataggcagagggcaccacaccaag

SEQ ID NO: 318248 - DNA, 514 bp, Homo Sapiens
  misc_feature (18)..(18): n is a, c, g, or t
  misc_feature (28)..(28): n is a, c, g, or t
  misc_feature (101)..(101): n is a, c, g, or t
actgtgaaacgtaagccnagcatttggnaaaccgattgcctcggctgtccataggagcacttggaacccagggctggggtgaaagccaccgctgtgggtgnctgtggagctgccgaatagtcattgatgatgacctacagtgttgtgaccaagcgagttatagagaaacgccacactttgagacaaattaaggagtcctttattagctggcaaccgagaggcaagtaatgctcaaaattctcttggccccgaggaaggggctggttttgtttttatactgtggtctaaataggggaggggggagtttagctgaagcaatttttacagaagcagagctggcaaaaagttaaaaaattaattggttacaaaagcagttacaaaacaaataaacagttccaggtgcaggggcttaaactatcacaaagggataaatgcaggggttttgcgtgacattcaccgagtgcgtacccaggagcagctggtgcagcttgcctcaatatcttatcagtaagtg

SEQ ID NO: 318249 - DNA, 598 bp, Homo Sapiens
tcttattgcccaggctctgtctctcaaaaaagaagaagtatagctagaaattctaagaatgactttgtctaaaatatattctctgaagtctgcagaaactaggatgagcagttctttaatctgatccaacagggcatttgtaggacttttgtgaccttaaatgaactgaaataacacaaaaggtcatcagagaatgtccaagcttctcagtacacatcattttcccatttattaaatttgaaggtatcttatattcagcaaaaatgagagctcattcagctgcattttatttccactacaaagaagtcaaacctagaacccatgtcaatttgcagagggatcttcattcacctatgatcttcatcccctaggcttttgtttcatttcctttggttgtaattaatttattatggaaacttaggtaaactcagcttctctcagccaggaacaactgcaaacacatttatttatctttcttccccaaatctacaagacatcaaatattgactaaaaggtttcttcaaaggaaagtcagcctggtacacggagctcatttctagccatccttgaatgtttgctgtttcccaaagctgctgac

SEQ ID NO: 318250 - DNA, 474 bp, Homo Sapiens
tgccactgtctttctttgcgctttctagggcattacatttttcttttccgttttctccatgtttcttagcgagattctctaaaaggttacttctatttccatcacatcatcatctagctccagcaggcctacttttcttcatttcctctattgtattttctgcttttcattcttgctgtctgctcctctctcatcatccttgcctctgtctgtttaatcctcctgtccttcattttccttttttgcctctgcattcagcatttctacttccaatctccctcctctgctctttcttctttcctctgatctgcagacttgcttctgtcccctccttctgttcccctcctggatgtgtctttggccaacctttccttctctgagacttcgtgttcttgttggtagatgggggctgatacttctgggtcttgggcatgtcggtgtggcgctgggcacggacagagcgagctgacttgg

SEQ ID NO: 318251 - DNA, 887 bp, Homo Sapiens
gtttgctaaatctcactgtcactgctaaattcagagcagatagagcctgcgcaatggaataaagtcctcaaaattgaaatgtgacattgctctcaacatctcccatctctctggatttctttttgcttcattattcctgctaaccaattcattttcagactttgtacttcagaagcaatgggaaaaatcagcagtcttccaacccaattatttaagtgctgcttttgtgatttcttgaaggtgaagatgcacaccatgtcctcctcgcatctcttctacctggcgctgtgcctgctcaccttcaccagctctgccacggctggaccggagacgctctgcggggctgagctggtggatgctcttcagttcgtgtgtggagacaggggcttttatttcaacaagcccacagggtatggctccagcagtcggagggcgcctcagacaggcatcgtggatgagtgctgcttccggagctgtgatctaaggaggctggagatgtattgcgcacccctcaagcctgccaagtcagctcgctctgtccgtgcccagcgccacaccgacatgcccaagacccagaaggaagtacatttgaagaacgcaagtagagggagtgcaggaaacaagaactacaggatgtaggaagaccctcctgaggagtgaagagtgacatgccaccgcaggatcctttgctctgcacgagttacctgttaaactttggaacacctaccaaaaaataagtttgataacatttaaaagatgggcgtttcccccaatgaaatacacaagtaaacattccaacattgtctttaggagtgatttgcaccttgcaaaaatggtcctggagttggtagattgctgttgatcttttatcaataatgttctataga

SEQ ID NO: 318252 - DNA, 888 bp, Homo Sapiens
  misc_feature (874)..(874): n is a, c, g, or t
gaggatgacaactgaaaacatatattcaattgattaagaaggaggctaccaatgaccttattgccacaaatctagcagagtcttgggctgaaaagcctgattatgtggagtaaataaagaagaattttgttaatatgtcagacgagaaaaacagatctcatgtgccttttccctttcctgatgagcctattgcaatgagtgacaaaatatggttaaggctatgttgagccaggaaaactataaacatatttggagtagggaagggaggaaagtacaaaactgaattaaatcaggaggaggaaaaatcttctggtatctttaatttaggagctgaaaagtgctgctttcaccccaaatcagccaccaatttgttgtaaatatgtttcatgtaaatataaatttactttcttggaataaattgtgaagctatagacaagatggctaaggacccactagatgcagggaaactgggtcaggtacataagcccaggaaaagaagtttattacctgtggtatacatttgaattggattgaatgggcaacaaaataatatcttaatacaagatattcataaaatgtggggaaacaaatgcaaaaatgaaaggtcagtgtaagatgtgggagcaagaatagccccttcaaaccaatgttctttccttattgtttagtatttatttggaggaaaagtgtgtggtgtgtgagggaaaggtaaagccctgccacaggggaagctatcatttctcctgcatgtggagctcagctaaagggatctcccaacactaggcttagcccaaacaaacaaacaagccctacagtgattgggctttgtcctgcacagagtgcacttagtgcacttagtggccatccatacctnctagagcaggtgcc

SEQ ID NO: 318253 - DNA, 466 bp, Homo Sapiens
tcttcacttgtgattgtcaagatttattaaaacatatttttcccattcatttgctacttagacatctccagcaaagactcctggaaggtggtatctcagctgctatgtcctttgcttcccatggcatgaagcagaggactgtgccagttgatgatgcccaataaatacccactgattggatcaatgagtgagagtgggaatgagtcagactttggagtggttacatcatcattttgaagagactcagttcagttttgggtgccacattgtaaaaagcaaatccatgttttgttgctggatgtttcctggttcagggtttaggccaagaaaggcagaggaggagcagtctattcccatggtggcagcttgaagcagttactcctgtgggtagatcagtccaggcacttctttcctgggctttgataaagttgagtttaatgttgatgcaagtttacatatcttattt

SEQ ID NO: 318254 - DNA, 550 bp, Homo Sapiens
ttgattcaacaatacatttttaatatagctttaaaaaggcaaacgaattttaagatcaccaggggcaaatgcagagcataagacattcactggatccagttacgtgtgtaaatgccctttaccaagtcaatactattaaagagactagtggttgtggcagaaattgtttctgcttataagggaggcaagccaggttctagtgtcctcagcaaaggcacaaactcatagcataatgccaggccagtcatttaacttcccagagtctcattcccttcgctgacaaaataggaagattgaatcagttgatttctcatggattaactattttcatatccagtgaattttcagcttatcagctactcaattgccatctgcttttcttctctgtcttccatcacaatggcaaatgccctcccatgtgtatctcgtgattgggctggttgttcccttctaccactcttgggtgacatactcaacacagtgcagggataagatacactaggcaaggttaagtgaagccggccagcacactcaccccagggaagtcaga

SEQ ID NO: 318255 - DNA, 695 bp, Homo Sapiens
  misc_feature (206)..(267): n is a, c, g, or t
  misc_feature (271)..(271): n is a, c, g, or t
  misc_feature (274)..(389): n is a, c, g, or t
gactggaagaaaacagctcagaactcccaacacgtctctttcgcatctttccttgaagattcttaccaagaacaaccaggctttttgagtcaccatatgctgacgaacatttttgttgttttttgagacagggtctggctctatagccaggttgtagtgtagtggtgcagtcttagctcactgcagccacaacttcctgggtttannnnnnnnnnnnnnnnnnnnnnnnnnnnnnnnnnnnnnnnnnnnnnnnnnnnnnnnnnnnnntctncannnnnnnnnnnnnnnnnnnnnnnnnnnnnnnnnnnnnnnnnnnnnnnnnnnnnnnnnnnnnnnnnnnnnnnnnnnnnnnnnnnnnnnnnnnnnnnnnnnnnnnnnnnnnnnnnnnnatgagccactgtgcctggcctttacgaccttttaaaaacccattactaatgaggatgagaggaaggacagcatggaatcctctagcccttgcttgtggcccgcctggttttctctaacactccctgcctgcttctccttcactatttactgcatgcctggcatatgccagccagcaaccactatgaacatcagatgaataaaagatacatgtcttatgttgaacagttgtacacagttcttggttaaactcatttttgttaaattgttaagaactcatttattctgagtcccaaactctggcactt

SEQ ID NO: 318256 - DNA, 1889 bp, Homo Sapiens
  misc_feature (574)..(582): n is a, c, g, or t
cggtaacaaagttttgtttattgtctaaatttaagataaaatgtgtcattttcattacgaatacaattttatggaatactaaataaacatatataaataagccttggccaacattataaaccaggatctgacatagatataaatccatgccttccaacttcccttgacgtcacattatcttctcttaagagatagtcactttggctaatagggaaaagaaaaccagtaacatcagaaaacaatttccatctggcctggctctgactggcatcatcactctgagccatatgccttactttgctctgacacttcaggatgttccctcctggtatcagctgtgcaccaaagctaaaagttcacaaggctctccttgccattctcaataaatcagttttgcaaaatctccaggccttcttgcagagtattcaggcatatagggttgtagttgatcagccataaagatggggctccctttaggtcctgcagcagtatggtaccagtttgaaagcctccatccagtccacataatgaaagtcagaaaaagaccatttaccacttatctgtgctttctacnnnnnnnnnccagatacctggaatgagggccaagactgcctccctcatcatttcactatatgtctatgttgacaaagtcagcaagaggagagatatcaagtgcttgcaaggtccctaggcctgtccttacattcagaccttcccttgctacttgtaattccttgacagaagacattgtggtagtgggtactcaggagagaagcaacaagaatgggacaattctcccagggcaaacactgaatcctctctttctgttacagagtaaagttccctgagtcctggtcttgattgttcatgtagacagaatgataactattgaaactgtccctaatttagtaattctctctgagctcccttaagagggcccaagtactcttattttccatttctcttgacaaagagtaaaaaatgagactaagagccttgactatcatatgtctgttgagcacttgatacctgaaaaatttagatgactgggggtggggaagctttgaataaccagatatatacatatagatagatagctaaaggaatctcatcactacactttcatttttttatttataaagtactccttatgtatcaactcttgtgctaggcacagaagatgcaatgctgaataaaacagacagcttagattcctttttgtgaagtgtaacatgtacccttcccaaatgttttattaatcacagattcctatcattgggtgcctcataattttgtattctttcaccacttctaaagtcaagctctacatggtaactttcctcagtttggagacactagacatgcttcccttcttctgtggagtttctggtgtctaagaaggctcgatcgcctactaaagtttctcttgcataagctacacgtataaggctgctcacctgtgtgagttctctggtgtttaataaggtgggagttctgaatgaatctttttccacattcatcacatttgaagggcttttctcctgtgtgagttctttggtgtgtatgtaaatttgtattttgactgaagcttttcccacaccatgaacatttatatggttttattccttggtgtgttgttaagtgcttattaagatctgaactccatctaaacctcttatcacactgttgacatttatagggtttctcttcagtgtgaattctttggtgtttaataaggtcagagctaactctgaaggttttcccacattcctgacatttaaaaggtttctcccctgtggggcctttcccatgaagatccataagttttggaagctcttgtttacaagttgcaggtttctttcttttcttccttgaaaagctcgatgcca

SEQ ID NO: 318257 - DNA, 580 bp, Homo Sapiens
ttacgtttgagtttgttgatgttttattacagctttcattttattctaattttttatcatcttaaaaatgtttggacaagactttccaaggagtgtattttcattttatgtcagaaattatttaaaatgttttatttcacagtttaacttttcccctgcatcatcttaagcttgacagtgtcttaaacacttcaggacaaccaacctgaaacaatagcaagatgtttttctagaataaaatctcttctaccaatggccaatatccatccctcatgaggcctacttgttcttgtcaaaacttgagggtggactaggctgatctttcacatatgccggtgacaagtttttcatggtggtcataaaactcgtttcaagctttgacttttaaagatttggagggtccggttcttcacaaaccccacccttcttcctcctgttttcttcagaagggaacaggcataccacgctcagagaaaacacaagttcaagactttccgagatgatttagagttggatctcttgttattttagcataatgtttatttcctcttacagattccatttgcaaaaaacatttatg

SEQ ID NO: 318258 - DNA, 814 bp, Homo Sapiens
ggatttaaatattttatttaaagaaatattcttaaggctgcagtttattgataagaaaaatataaagcatacatgtttatagattatgtattgacattatagtatatagattctccaaataacataattaattttgtagtgctactagtggaatgcattctgcagaaacatggctttaccttcaaatctaagcacaatacccttacatcaaaaatgaaggataataaaagcacaactttgattcatttaaattttggtagaccacatctgatttgttgaagagtaaattcgtttatttacctcttcaaggaagtcattattttttgcatctctttctgtgcctctttatcctctttggtaacagtaggaagcaataaagccaaattacagaacttcaaagcattctggttttcctcaagatcagtataacactttgctaagtacatgtaattgggattagaataaccagggcatagttcttcagccttaaggaaattgtgtaaagcttcctgtacagttgaagatggtatttttccaaacagagtagcagccatttttttctcaatccagctcagttttgagacagtatagcagtatctccctttgaggtaatatagaaagggttcctctggtaaaagtttgattgctatatctagatgttccttgaagaggtgcccatagttgattttgttttgtaaaccctcaaactcagatacatagccacacaaaactgcataccacagatgacaatgtccattcatgggtgctctattaatagctctttcacttaaagtttttccaatattagcataat

SEQ ID NO: 318259 - DNA, 201 bp, Homo Sapiens
ctttctctccctcctctcataccctccagccaccaacgaagcctggaacccattgcttttgcaatactatttttctatttcacatgtaggtatctggaacccctgccagaggcctccaaatttttagctacacaatctgtgccatgctgtggtcccttctgcctctcccagggtgatctggagagacagaaactgcagagc

SEQ ID NO: 318260 - DNA, 650 bp, Homo Sapiens
  misc_feature (513)..(608): n is a, c, g, or t
ttcatatcaatatggtttattgaatgaatggctagacctatcaggattacagcctacttttttccccctacaatataattaaaagtttgtaattctcattccttaagtggtactttgcaaggtgtccattaacagacaaaataacctcggaagccctggagcacctgtcttcaagataagacagcagacacaggcggtggaaatgtggaaatacgcattccccagagcagatgtttcagttcctgaatttccatcgccttttgtgcaggcaagcggaggaaagttttcaaaagaatctcggctgactaggagggaagggaagccaatagcgaagggaaaggtacattttcacggtaagttagaggcatcaccaaaggagaacatggttgtgcccacccagagtgagaagcatagagcggagtggctgaaagaacaccctctggagccacagttctcaggcttgctcctggcttttcaaacccttggtcagagactgaaggcaaacctgagtcnnnnnnnnnnnnnnnnnnnnnnnnnnnnnnnnnnnnnnnnnnnnnnnnnnnnnnnnnnnnnnnnnnnnnnnnnnnnnnnnnnnnnnnnnnnnnnnntgaagaatctaggagccaaggtagcttttcacaaacattggc

SEQ ID NO: 318261 - DNA, 987 bp, Homo Sapiens
acttggtaaagtcctcaaagtagattttatttatacatttcttcaaatgattgtggtattttaaaaaatctctcccaaatttgatgacatagggacagtggtgagaacaaagtatccctaaaggaaacaaatatcgattggtgctttcctagctcactgagctaacactcagaagccaatttattctataatcctaaagaaccttaaatgtgggtttgtttgaattggccttctgagaatcattgaaataaaggaaatattacggaaaagagattagtttccaaaaatgtgctgtctttgaaaataaggtcttcagacatgtgtgtcggaaaagatctgcaaagcttgggtacagtgttaatgtgtaaaggggaaccaatcacctcccatgggactttaaaactcaaaattatctatggaaatactttaaatgacatggcattaccaacattctttaaagcatttcatttaaaagaaaaatgtaagactgttctcacccttttgaaaagacctaatccctttctaaaccaaaagtataatttgcaagagaaacaacattacaattcactggtaaattaagatttctgaagttgtaagaaatggggcccaaaacaagtcacgctcaaaaagggaatggttaacacaagaaatgtgcctatgaagtaaagtgcatgaaagaaagcctgctcagcctaaatgaagtagacaaagatcagaagtcaagggtcattcgccagagcggcagcaggctcgaaaaccacactgcaaattctggcatccactggcggtatcagcatgaggaccgttaatgttgtcacagtagtaaaagtattcatcattcagagaaggacatgctgaaaccaaatcctgcaggcctgcaccagttatagtaagacaaccagagagattaaggtgctccaaataaggcagccctcctcccagagtcaaaaccctgagaccatggtctgtgatctgataacatccaga

SEQ ID NO: 318262 - DNA, 405 bp, Homo Sapiens
tctgaataatttcttatacacttatcatgagatttacttctatcatataagtactgctagtaaaaccaatgaatgtttaactccttcataagcaaaattatttttatgtgatctctaagaaattcctcctttcacatttttctgttttcatacaggtcctcatgctgataccgccagtggatgccagaatttgcagtgtggttttcgagcctgctgccgctctggcgaatgacccttgacttctgatctttgtctacttcatttagctgagcaggctttctttcatgcactttactcataggcacatttcttgtgttaaccatccctttttgaggcgtgacttgttttgggccccatttcttacaacttcagaaatcttaatttaccagtggaattgtaatgttg

SEQ ID NO: 318263 - DNA, 681 bp, Homo Sapiens
ttggtgggaaaggttctttatcaactcgattttcctccccactttaagaacagaacaagcatctttcattttaatgagctgtggaaaaaagaatattttttttgaagaacaaaagggtggtaataaaatgctgggggcgtagacaaaattttgggcactttgtagttttgcttactgatctttaagactcaacagtgacttattgtgggcaaaactgttgtgttctgatccctacccagtcagctacatcactgacttccagaagccaccaaaacattgctatgacttcagctttcaagggggaaaaagaattagcaaacaatacatattacaaaatagtaaaaaacataatttgttgaggaggtggatgtttcaggaaaagccagtcacaaaatgcaaagccaagttcgtttgacacagttgtcattctttcatttcagattttctacctttcatgaaaagtctttcctgcaatccaatttatatgcttttcatacttgtaagtgtgatacagttcaatgcattcgttaacatgatctccttcatgcctaaatacctagaacagcaatatggaatgtcatcttcagatgcaatctttctaatgggtatgtttgtttttctctgccttactagcacactttcccccccacgaacagtgtgatggcgggtgtagcaaactcc

SEQ ID NO: 318264 - DNA, 1765 bp, Homo Sapiens
  misc_feature (48)..(68): n is a, c, g, or t
  misc_feature (263)..(271): n is a, c, g, or t
  misc_feature (418)..(418): n is a, c, g, or t
  misc_feature (462)..(462): n is a, c, g, or t
  misc_feature (466)..(466): n is a, c, g, or t
  misc_feature (473)..(473): n is a, c, g, or t
  misc_feature (566)..(566): n is a, c, g, or t
ttcatcattccacaaagattttattcacattaaacttgcacagtagcnnnnnnnnnnnnnnnnnnnnnctaagccacatatcaaagaacaatatacaatagagatttgaatttctcaatagcattggaaggtatttccataaataacatttacaattctaatgttaggactttcaaggtgtctgaagcttcacagtgctagaattgatttttatcagaacacatgcaaaaatgtgcaacataataattcatattaatgacacnnnnnnnnngcacgccagttatttgtcattccagcacggccatgccactctatgttctaaaaacaaacaaacaaccccccaaatccgggtcccattcattcttcaattatgcctttagtcactctgctttattatattcaaacagtcactgttagngctcttcaccacgactttcaggttgacgtcactccctgcctgcnggcngtcaggnctgggggacgcccctctcccagactcaccttcttccggatgtcttcatcatttgctccaagagaggcatagagcttgaatgcagcctggcggngttcgtgagcatgttttaaatcatgatcaagccttttaatatcagtgatggcactcactgagctgggatacttgaaataatcagcaagcatggcaatgaggtgatcagttatgctagcgattctctgtagctcaacatctggttcaatcagataggcaagtgtctcagctccttcaactctctcctctagtaatctctccttactgcacattcgaaccaaacaaggtaatgtctttaatacaatacagttatcatctgtccgaattgctccagctctacacatgtaagttaaacatttggctgatgtgagctgcatctccaataggcttatccctctgtaacatcttcacaaaaatctgtggtaacaattctccatcaaccaaaacatttacccagggtcatcgatacctgggggttttcaaaagctaaaactgagaaacatttcagtgcttgcattcgaactttgtaggacagtgaggttagtaggtgagcaatattctgaactgcaccgtggttaaataaaattgtttgatgatctggccctttacagcagtgtgagaagatctgacagatgtactcctgggtatagcgggacctgctaagcagtgccatgaggtgtggtatcactgtggcatctgtatacagtagctcctctggagtgacaggactggtgaagatggtacgcaggcatcggaggcaagcttcaataaacttcaggtctggggaaagtagtccttgcaataaggcagggataatatggcagtccagtagagacttgacattgttttcagtacccatagcaagacttcccaacaccactgcacattcagttttcagctctgtgcttgaggtttcttgctgaagcaagtacaacaatcttggaacagctcctaaaacaatgagattggctttctgcttgttgtttccaattacagcatttttcatgtctcgaaaggacgctcatgcggattggggtctccaacaagcacgccatcttgagccttcccacccggctgctgcaggcgccggcgcgggggccggcactttcgacagccaactattggccaacgctaggcaccgctccctaaaggcagccagatagacgagaactggccacgctctggacaccgctcaagtaccggaaaggcccgcagaaagaagggcaaaagggaatggcgtcaggggctgtcctacgaatc

SEQ ID NO: 318265 - DNA, 302 bp, Homo Sapiens
gtgaaagtagatttttattacagagcaaatttttctatcaattcaatgctttaaataaaacaacataataccataaactgacaatgacctgggagcatgtaaatacttaaggctggagaggcatttttattcttgataaatttatataataaattcttatgacacttgattccaaattgtatgtacgaattggcttgacataataaatataaacataagggcaatttaaacattggcagtagtttatgtaagtcaattcaaggtcagtgactggagaactatattaagagaaacctgagggt

SEQ ID NO: 318266 - DNA, 619 bp, Homo Sapiens
  misc_feature (43)..(55): n is a, c, g, or t
gaacctctcctggcacacaagagaatacattttattagaatcnnnnnnnnnnnnnctgcagaaaacatttgagatgctcatttgatataaacatctaattccaagagagaccagtgctcaaatatagttttttcagctaccatttgatacggccataaatttggatggtccatgttacaatccttccacaattctccacttaaagacatcatttttctatgtttttaatgactattgccatctaacaattctacaattcgcctctttgcctgtaaaaaggccaactctacgtccacctgtgtctcatattgctatcttttatttatctctgcttaagattgcaaaagtttttgattttattattcacctgaacaatgtattgcaattccaatacacccccatctcttgctgttatctacagcttgtgacaaaatgaacaccttgtagaaatatcctactggttgggtttcccaagtctatgacactatgagagaagcattgctgatggattgacgaggagaccaccagatcattaaaggattagatactctgaaggcaggaaactagaaaatcccattgatgaaaggatattttaatctagcgtaaaatgtttctttgt

SEQ ID NO: 318267 - DNA, 668 bp, Homo Sapiens
  misc_feature (134)..(145): n is a, c, g, or t
taattttgcatttattttcatttataaatatcacataaatatcactagcaggtataatagtaaatcgttaaactaatttctaaatattgatttaaaaagctttgagcatgtttcaaaaaaaacttagcaaaagnnnnnnnnnnnnccccagataatacacctaattattttcctaataatcaatacctacccaaaagttactgatatttgcacagttcttgtaaaaaatagatctggcacaagaggaacacaaatactggcaaataccacgtgtctcaagttatattttaagaaaccatacaatccatgatatttcacaaagttgtttattcttgttattaaaacttggactcaggtaatcttggttattctggaaaaagcaccttgtttgcagagatcatttaatcatccttttctacaatcacctctccatgaagcacctttcttctttgacgtaacatatgaaaatagagttgtggaaacaaaggtatatatgatgccatgggttattagaagaaaataatagtagtcaaaagagacatttgtatttgttaggaaagtctttttgaaaacattcttgttttctttacatgcggcaaggcagcgtatattgtaagaagttcaccagcaactccaacaggatataagatgataaaaaaattatatct

SEQ ID NO: 318268 - DNA, 597 bp, Homo Sapiens
agctgagttctaaataactcagctggttctaatgtagaactagaaccagttctacattatctcactacaccacagccgagttatttaacaactctgggcctcggtttcctcatctatatgttggatgactataaactgatgtgatgttctgtcctaagaatttctaattagtgctgatttcgatgaaagtgcttcaacaacatattcttatccatgtgcagaaatggtttccttctcttggtttgcctacaagaaaacgtcagccaaaaactcccactgataatcacattttctaatgttctgattgatgaagggtgacattacaaaatcaccttttgttcagttgatctagactctagagttacagatggggaggaccacatgctatgtgtactttggctgaaggacgacgtggccctctgccaaccagagctgttgtcccagtgattctgagaaatgagcaaagcctgccggctcgggacaaccagtcctctccttgcctccccagagactgagagttttgagaattgcttactgtaatcttgttctaatctgctggccttagaatctctgcctctccaatcctgctatccaaca

SEQ ID NO: 318269 - DNA, 355 bp, Homo Sapiens
  misc_feature (141)..(295): n is a, c, g, or t
  misc_feature (299)..(299): n is a, c, g, or t
gagccaactatgtcagatttttattcaatgtctttttcaggggacatagtttcacccataacaatggccacgaaaggacataagcagaagatactaacacagaacaacaaagacctaaaggtgcctttgcaaaaatcatgnnnnnnnnnnnnnnnnnnnnnnnnnnnnnnnnnnnnnnnnnnnnnnnnnnnnnnnnnnnnnnnnnnnnnnnnnnnnnnnnnnnnnnnnnnnnnnnnnnnnnnnnnnnnnnnnnnnnnnnnnnnnnnnnnnnnnnnnnnnnnnnnnnnnnnnnnnncagntcatgggagtgatgtgggctgcacccaggggaactcccaaagttccaagtgccacc

SEQ ID NO: 318270 - DNA, 298 bp, Homo Sapiens
cttataaagtttgttaatctggtgattgtatatttgcatcaaagaatttaggaaatgacaacagggaatggaaagttggaaccatttgaatgaacatagaggataacagctcatttacaaaatctgggtcttcccatgttgtcattctcatgaccccagctaaagaaccatcttattgtgaaatgacttcccagaagaataacctatgtgggcatctaccttccagcaagctaatataaatacatatctgacgtatctgttatacaatatgacaagtaaagagatatgtcagatgaat

SEQ ID NO: 318271 - DNA, 732 bp, Homo Sapiens
agcatgatttatttttaaatcataaaaaataatgtagcattatttatttttaaaaagaaataatcaaaggtaaataacaataaagcccttcttcctttagacttactgttggaacgtgagtctttttcactttgcactcagggttttttaatcagggaaaaaaagtcctattatttatctctattcatcaactgtaatatactagatgtactttgaacctattgcagtgattcaaatactaaagaaagttcacccgctgagtattttccaagggcctaatttgttaacaagagaagctgtcatctctgactttgttcatcagagatagaattgaggcactgttaatagatctattgactgtgtaagtccaaagtctgggcttgaattcccggaggaatgagtcacacacacacatttaccacaatctctgatcttctccatcgctcctagtcccagttaaccagggaaaatgactcatcaagtttctttccattaacaagagaagttaacattttgctctaattcattaatcagctttcagaacactcaaaccaaacttggtaaacaaaaagcaattttatattacaggctaacacacctaattcatttctttctcctatttggtttacaatctaaaatgaattccaccacattcaaaagggaccaatgggaagaaatttgccctgattcagtgaatacagagcaatgttagtagtggaaatctcactgttg

SEQ ID NO: 318272 - DNA, 601 bp, Homo Sapiens
ttcaattttattgtattaagaacaggaaggactgccatttctttaaataacaaactatacaaataaaaaggagcagaaataatatggaatgtttttgacgaaaacaaacttatggattcaataaataatataaaatgcctttgtgctaaaatagaactcttgtttcttatatatatatagttcagtgatctttatgctatccagaaaaagccagatctattataattaaacatagaaaaataccatttaacaataaaactaaaaaaatggccagtgttgagcttataaaccacatataatatatacatcatttaatataatcaactaagaaagtaaatttcaagttctttgtaatacaaatacacaattgaaaatatttctccattccctacccttacatcaaagacatctgatatttaggacaaaattaaaaatggaagcatagttaccagttttcagagatgattctgagattgttagatactggagcgctaactctactatacaaagctgagttatttaactctaaattgaaggattttttcccctatatgtgtttgatgaaatgcgtatactcttaacccattttctgtagtttgtg

SEQ ID NO: 318273 - DNA, 217 bp, Homo Sapiens
actaagaaaattacccaaggccactgcagctagccaggggcaggtatgggagtcagagctgggtgcagctgactacaaaccctgtgctcaggatgacaccctctaggagcctcgacctctctcccagttctcttctccctccactcaggcaaatgagctctgccttcacagggcaccaggctggaacatatgtctggaggccaggggcggtggctca

SEQ ID NO: 318274 - DNA, 379 bp, Homo Sapiens
ttagatttatatctttgccatttattttttaaaatcttattcaaaatattaaataatagtttcagatatgaaaaaaattactgcaataaaacggttcaggggtatttccattgtgcttcccttccctattaggaaagtacactgtccgcccaagagacaggatggacggccttcttccagctctacataaagcgcaagcccactggctcacccgggtcctgcttaacatatattagggctatgttttctaaaaagctgtagtgacacttgtaagtcaaccatggttcaaatcacatatttacatattgatcaattctttatgatagaaagacagacataaatgaatcccatagtaaatactttccagttgccatagaaa

SEQ ID NO: 318275 - DNA, 621 bp, Homo Sapiens
  misc_feature (519)..(519): n is a, c, g, or t
agggtcaggctcagtcacccactggagtacagtggtgcaatgacagctcactgcaacctaaacctcatcaggctcaagtgatcctcccactttagcctcccaagtagctggaactacgggcatatgccaccatgcccaaataactttttaatttttttgcagacacagtgtttcactatgttgtcccactccgatctcaaactcctgggttcaagtaatcctcctgtctgggccttcccaaagtgctgggattacaggcatgagccaccgtgcccagttgatatccatttttctaaaccacatttttaaaaagtacaagtgtagagtaggcacagttggatttaaccaactgcggttcttaatagagaaactggggtttctctattaagcaatgaagcaagtgagggcaagtgtactgagaacatttgcaactgaacaatcatgaccaacaacagaaattaaactgaataaagagaagggtaaggacataaggagagagtatggtgaggaacagtgcanagataatagggtcaatgggttctaagtctcagtgagataaaaagaaattgtggcactaagaaggcatgagccaagtaaagtgggaagtgatgatcaaggtaa

SEQ ID NO: 318276 - DNA, 403 bp, Homo Sapiens
  misc_feature (337)..(359): n is a, c, g, or t
ggtgtgcaggaataaatgaagagctgttagtatctgcaaatgctgcaagactgcaaagcaggattcacactcgattccattcctaaattgcctcctggaagagagtgatcctgggaggacccagatccttggcctgggaactgaagaggaaaatggatgactgatgtgctactcaacctttaaaaatggctttaaaactaattacctaagccacgttcaatctgacaggaggtattattggagctagcgcatcagtcagatcacttaattacttcataaatcctgggtcttagcatagattttaaagcacttttacacagaacaccattggagcagnnnnnnnnnnnnnnnnnnnnnnnaaagcaattaacttgcagagatttgcaggagattgaaatgaaca

SEQ ID NO: 318277 - DNA, 482 bp, Homo Sapiens
gaaatgcagagctcttaagcagcctagtcagtctgtaggttaatgatgatcagaaaacctgcactgagcactgtccatgctcttgttagggtctgtgatatcctctcactgagattcagccaagcagaggccctacattttgacaggtgactacacgaagctacggttcttgtccaactacctttgcccttcttgctaaaattaattcacgttaagttgaaaatattttgtgtcaacatatttgtcaaaaattattttttcctccagtatgaatagtatacagtgagaagtgaagctcctgcctcctatggtttcatccacatctagagactcactctccaggggtaaccatggtcaacagggtagagtatatatcattccagcctttcatctatgtccatataaatacatattttttaacagaaatgagataattctatagttagagttctggaactctcttttctacttgctcaatggaa

SEQ ID NO: 318278 - DNA, 588 bp, Homo Sapiens
  misc_feature (90)..(99): n is a, c, g, or t
ttattattacatattttaagatccattgtatttctttgactacaatctgtttgtcataccctttacccaattttccagagttttaaaggnnnnnnnnnnatggatttgtgggagtactctgatttcttcttaaatagtttaatttccatgttctatcagatatcctactatcttttcaaagtaatgatttagtcaatttttttattctaataataagtaatcatcaagggctaactccattacaagggagtgcatatgtagaatgtgtgaattgatttgcagaagtcttgaattcctgaaaataatttcacaagactgccttatgcctatacctattccatttcgtttcattttcctaacagccttgtgaggcatatagtattgttaactacaaagtgaggctcagagaatataaacgtccaggatcacacagctggtaactcttccacttccaaaatcttaaaatcctagtaatcatcaccactagccattccaattacactaagactgattcttgatgtctctaatttctaataaatggttgctcttctccttttcctactacaaacacccaatgaatatatatat

SEQ ID NO: 318279 - DNA, 484 bp, Homo Sapiens
ttctggacataaaggaaatttgatttacagactttttccaggatttgttaataaacaaacgctgacatcttagaataaattaagtatcaatgctacacgaactgaatttaatattctttgtgtttttttcataatttacaacaatttaacaaatttcaaaatgtttaatgaaaaagttaataaaattctcatatttttgtgcattatttaatgtaaaaattactgtgcttcctacattgtatttgaaagtatataatgccagacacagtcgcttaggcctgtaattccaacactttgagaatgtaacagccaatgtagtgaaaccttgtctccacaaaaaaatgcagaaattagttgagtgtgatggcatgcacctatagtcctagctactcaggaggctgagatggaaggatcccttgagcctgggagattgaggcttcagtaagctgcgattgcaccactgtgcaatctaatttaatctctt

SEQ ID NO: 318280 - DNA, 572 bp, Homo Sapiens
  misc_feature (144)..(144): n is a, c, g, or t
acttaaataaagcctgcttttttatttcatctgattccaagaagtagaaaagaatgcttatttaacagttactgccatcttcgctcacatacagagtacatgggggagtcaagacatttcctgaaaatccctcagaggtgagtngaggtagtgacttggggtagcaagactgtcctcctaagtcagttgaggagtgacatcgggatgaagctccacccacaagccctgcccacagaggtcttctccctgagtgtgtcctcctttagtacaagatgaggtttaacttattgctaatgtgtttcacattttccctccccacccatgtaaagcttgtcccaaaaaagctggttctttgatgagggactttttcctaagtccttggtccattctccccacacatggcagaatttctattcaatatactctggggcttactggggggtgactcatggctgaagccttatctacactccttatatacctaacatgtcttagaatcaattatctggacagacaacgagacagaaaattgaggattcactggggagtgagggcaggactgggcagaggaa

SEQ ID NO: 318281 - DNA, 481 bp, Homo Sapiens
  misc_feature (170)..(170): n is a, c, g, or t
  misc_feature (243)..(254): n is a, c, g, or t
  misc_feature (343)..(343): n is a, c, g, or t
  misc_feature (390)..(408): n is a, c, g, or t
  misc_feature (430)..(430): n is a, c, g, or t
gtatgagccaccatgcccctcaataacgctgtctttaagaagcctctgacatccaaggcagaccagggaaagacaaagctgttttctcccaggttcaggcacccattcagactaaagtgtaaatgacagatcctgcttctactcccagaggtatctggcagtttgcccgnaatccaaatccttccgcgaaagcatttaagttccactttaggaatttcaaacaggcatcaggcactaggagannnnnnnnnnnnaactgatgggggcacctccctgagcttgtgaaattagacaaatgtttacagagctgcattttataaggacagacagggtgggggcattnctaaaagaaccacccaggagggaagaaaaggaggttttgagggaaannnnnnnnnnnnnnnnnnncctcttaccattctaaaccatntttctagagagaaatctgcatgaatactgatagtgtgattgaagtgcctgt

SEQ ID NO: 318282 - DNA, 477 bp, Homo Sapiens
ctctttccaggtaccacagctcttttcacatagtaattagctgtatgtaaataatgcttcccaagtgcttgaaaaatcatttgttcccttaagtcttcaaacatctctcctccaattgtgtttgattgttaatttactcagcaaattcatttccaaatttcaagccagctgaagttgacttacttaggaatttcacattctctaggtcataattaacaaggcttgcctttatttttctgcaataagccttggttttttggtgaaggaaatgcacatgccctgctggaagcttaggcagattatgaggggccgtactttttagcttagctagaaatggaatctatgtgggaattgaactacctctatttcagctaacagcagaaagtacacctgcctttgcttgtatgcagattcatatatattggtgcagatatgacattattaacaaacctgcacatgtacccctgaacttaaaag

SEQ ID NO: 318283 - DNA, 521 bp, Homo Sapiens
ctgtagggtgaagcattgtaaagatgtaccagatcccagaaggttagcagtttaaacatttttcagtttgcaaatgcaacaaaccatctcccatagtgtatttactatttcaaaaattgaccctctaaaaagaacatgcaatccctggaattcatggaaagactgggaccactttaatgagattcccataaagtgaaaactgtttattaaatgttgctaggatgttttcttgctggaaagtagtattgtgtgttcatattataaacattaaatttaagggccaagatggattgcctatggaagactcttgtagtctatcagcagtcctcaggtcacattttaagaactgagaataagtggagaatggctcacttgtacaacactattgcctgtgtagcacctctgaaagtcctcctactactgagattaaacagcgctgcgatatggaatgtcattgccttcctttccctccaacctgttttttgtccctatagtacctgctgcctatagaatcatagctt

SEQ ID NO: 318284 - DNA, 597 bp, Homo Sapiens
aaggaattcaataagtgagtctggcattgtgcatctgttttagagatttcattcattagaaaatagagaacaccatggggaaagactctcaattttattaactaagtatggtccatgcatatgaagcgacttcagtagaataagttcaaaggaaaaatgaatgatgtcaaagagaaaagtaataattttacttcataagttgccaactcaggtagttgtcatttaggaaatatactgggacagcctaaaggtaagttaacttttttcttaattaagccttctttgaagaagttaagtttagtgagtaagatgcttcttttttataatggtttttatttacatatctcatgttggtgaatcatgtgttagtagaaatcataagggaatagatatgctgctatttaacttcagttctgttttttcaaaaaaataataaattaatggataatgtagcttctcacttatacaggggttacagggacctaattcttggatctacatagccatcaactgtagtaccatatttctcttgagggagctccccaaatgaatgggagagttaaccagcatttatatggcttaccttgtatctcaaat

SEQ ID NO: 318285 - DNA, 645 bp, Homo Sapiens
  misc_feature (114)..(152): n is a, c, g, or t
  misc_feature (269)..(284): n is a, c, g, or t
aaaatcctatgatagtataactttgcataagcctactgaatgataggaaagtttttagtttcttatcaaagaaagagaataaagtgaatcaggacatcagtttcacattgacannnnnnnnnnnnnnnnnnnnnnnnnnnnnnnnnnnnnnnaacaatagcacaaaaatgtttcaaggaagcagtctcacaatctgatgaccttctgaaataccgttaagccacaccaaatatgaatttctgttaataacacaaaatatttttttaagnnnnnnnnnnnnnnnnggtagggaaagaagaagggaatgagatttagatttaaaactcattggattaaataggtgaggcttattaggatatactgttgaagcaaacagtggcacacacaggcttacagtctttgttttttaaaccagttaccactaatgtattaagccctgcagcagttaccactgacttctcgcacgcataaaatgaaccgggagaagccagtgttgatactgttgtgaagaggttcaagagctggcttttcagacaactaagaccatttttagcagaataactccttcagaaaggcctggctgaagatctttttatttctattgtctcacctatataaatttcagggttcttataagtcatcttt

SEQ ID NO: 318286 - DNA, 917 bp, Homo Sapiens
tttttccggcccccaaaagtggaaagtggggggccgcggggggcccccgaggggcgggtttttaaattgtgtgagagttaatatggggtggcctcccaggggttgtggcggctcctcccgcgcttgggaaagagggttcccacagccttacaggggcctcttcagagaaccctcgcccatttttgggaggtttgtctcccagaacccccctccgggtttagcccgccccgggcacgttctttttttattggtgggggaagatagccaaaggcatttaaggtcatgtcccccaggattctcccctagggagaaccagctaagggaccagtgttccccttacgctgagtggggggccgcgccgcccaaaggaaagggtctagaaaaggcttcttgaggggccgaggcggcccgacagggttgggcctctcgcctttttgtttttgtttgcgaccgttgatttttaatattttcttaaaaaaatacaaagggaaattagctctgtaggtcaatacaactcagggaaagagggaaaaatggaatttcagagcaaaggttgtttaggttatcacattcccacactcctaatacccacaaaacaagaatttcactccatgacacagaggaacattgaatggtagctcagaaatgttgatagctgaggtactgaaactaacaaaaggattttggttgtccttgattattctgtcctgtgatgaataaaatctacactaaaggacaggtaaggaaaacttatagcagaaaaaagactagatgtaccaaacacagcagtacaaaccactccttggcagacatgtgcttctaaaagaatggggcagtaatcaggtagctgaactactaggctactgtcactcccagcccatccccaaataaatagtgtggaagtgtaatagtgtagt

SEQ ID NO: 318287 - DNA, 692 bp, Homo Sapiens
  misc_feature (395)..(395): n is a, c, g, or t
  misc_feature (438)..(438): n is a, c, g, or t
  misc_feature (440)..(440): n is a, c, g, or t
  misc_feature (446)..(446): n is a, c, g, or t
  misc_feature (448)..(448): n is a, c, g, or t
  misc_feature (457)..(457): n is a, c, g, or t
  misc_feature (461)..(461): n is a, c, g, or t
  misc_feature (465)..(465): n is a, c, g, or t
  misc_feature (467)..(468): n is a, c, g, or t
  misc_feature (472)..(472): n is a, c, g, or t
  misc_feature (493)..(493): n is a, c, g, or t
  misc_feature (497)..(497): n is a, c, g, or t
  misc_feature (504)..(504): n is a, c, g, or t
  misc_feature (506)..(506): n is a, c, g, or t
  misc_feature (520)..(520): n is a, c, g, or t
  misc_feature (524)..(524): n is a, c, g, or t
  misc_feature (538)..(538): n is a, c, g, or t
  misc_feature (545)..(546): n is a, c, g, or t
  misc_feature (554)..(554): n is a, c, g, or t
  misc_feature (556)..(556): n is a, c, g, or t
  misc_feature (560)..(560): n is a, c, g, or t
  misc_feature (562)..(562): n is a, c, g, or t
  misc_feature (575)..(575): n is a, c, g, or t
  misc_feature (578)..(578): n is a, c, g, or t
  misc_feature (583)..(584): n is a, c, g, or t
  misc_feature (587)..(589): n is a, c, g, or t
  misc_feature (592)..(592): n is a, c, g, or t
  misc_feature (594)..(599): n is a, c, g, or t
  misc_feature (607)..(607): n is a, c, g, or t
  misc_feature (617)..(617): n is a, c, g, or t
  misc_feature (635)..(635): n is a, c, g, or t
  misc_feature (638)..(638): n is a, c, g, or t
  misc_feature (640)..(640): n is a, c, g, or t
  misc_feature (686)..(686): n is a, c, g, or t
gtccatattcatatatttatagagctagtatgtcaaaaactttacacagtgacaccattagcccctggcccacccctctccttcccacttctgtgttcgaccctacttagaccctcgcacacaaaggttgatcaaaggcagtggccacctcagactagtgcaatgccagtcctgcaggggagaggcctggcaaggttgagggtgagtctcccacagtccaagacaggtcccagaccttggcccacccagcgaggacaaaggggcctcaggtctccaaacttagctcatgtaagagcaactgcccaccattgtccctgccatgccaacttatataggcatgaccctggcccagcagtgaggcaggctgaagggcatggcgggctcaggcccgaganccgcgggtggcccggtgcggagtagcgatggagggcatgcttntnaccgtncngctcgttcncccncccngnngtgncccgccgccatccttcacggntcangcccacnantcggcacaggtgtngcanccggggtggcggtnacaggannataatggntnaganangaatggttagagntgntggtnntgnnnttntnnnnnngtgttggngattgagganggggtgggaaagggaaanggnangaggggaagggaggaatgggggggataagtgagatggggaaagaanggatgg

SEQ ID NO: 318288 - DNA, 710 bp, Homo Sapiens
ttcagcagacccaccaccaataccctgcttatgaataaaagcatttaaaacattgatatccttgatttttccaggtcatctgtcaggcttgcaccttttgggccactgaaggtttgtgacccacagcaaaggcagaggcaaaccaccccaccctttctcagttggggctgagaaagagctgggaccctggcagcccacacacagtctcttcataagctgtaataaatcacttatactccttctcccaaccgcccagctaggcttcctacttatgaggtttttcctcttctagattgttctactaagtgttcatttaaaaaacgcttttgttgtctaccttggggaagggtttcacatcacagactgtccttccccagtccagaatgttccatctgctgccattcaaaaggaatcaataaatctctttaaagtctaataatgttagaatttttggtatttttctgaactgcccattccttgggaatttacagaactccagctcagaagctcccaaatcacagagacgttaggaaagggcatggagggaggatcgggaaatcttgctagcttgggatttggggaaaggaacaatccttcttggttttggtttcctcctctgcaaaacaggatattgataataatagtagtaacggtaataactgtcatcattagctacccagcataccactgccatttgtactgaggatcga

SEQ ID NO: 318289 - DNA, 904 bp, Homo Sapiens
  misc_feature (188)..(200): n is a, c, g, or t
  misc_feature (224)..(268): n is a, c, g, or t
  misc_feature (294)..(294): n is a, c, g, or t
ttttttgaatatttttaaattttattaatgacaaagcaaaatttattacagaagtatatatacataggttgtattaaaactaaatgttttaactctcaaatgttttaactctcaaatagaaaacatacacatctattacaggaatcacaaaacttatctccataaggaaactttaaactccagaggcnnnnnnnnnnnnnttatctccaatttcccccatgagnnnnnnnnnnnnnnnnnnnnnnnnnnnnnnnnnnnnnnnnnnnnnatactttaatacctttagtttttagnacaacagttaacagaatcaattttagatacaggtattttttaaccttaatatttaaaagtccaaaattatatagaattaatccaaatcatatagcaaagaattctgaaaactgaatgcacaattggtcacatgatctttaatgacctgcacactaccatcctgcatattggtttcttttatgctgtcgaatccaggtatattgtgaaccgtagttttgttcagtaatgaagataggtgatctccatctgtttctttctcttcagttattactgactcgtttaagttatctttttcctcatttgaacaagtagcacttttttcttttataaattcagattgcatttttgactcaggttgctgagattttccaagtatcatttgaggaacatcaagagactcttgttgaaagcatgtaactaaaccaaagctatctatttgtagtgctttaactgctatagatgaatcagaatcagttgtaggggtgttacaatgttctatatattccttttcagttagatgactttcttcatttactctttcctcctttccttgtagctgatcagagttactacattcttgcaactttgcattaatttgaatcttattacc

SEQ ID NO: 318290 - DNA, 622 bp, Homo Sapiens
ggcactatccgggccgggtgcggtggctcacagctgtgttttaactttttttgcttggctcatccagccctgctctgttctccacccatatcagtctctttgcccatcctccccatacggacacccgagtggttgttgcatttgtttctgcacactcatacaatcctctgtagacatgggtgagtgcaaacagagtcatacaaagattttgccattgtttgttttatacaagtggcattgtattatgcatacttttatcttgtttttctcacttaattatacttcacaaaaatccttctgagtcacttggtacagctctaacagatttttttaaaagctgcatgcagaacattccattccatggctaaatataatttattcacacattgccccatttgatggcatttgccctctctctttctggattttttttaaaccacacaaacaataccaaaacaaacatccttatgtgcctatcttcacacattactgcttttattttcatgggctagagtcccaaagactaaaatatctgtgtcaaagggtattaagtattttaaattacagtagatattgcctgatggctctcgtttccaccagcagctcaggacagcacactttt

SEQ ID NO: 318291 - DNA, 593 bp, Homo Sapiens
ccaagtgaattaaccctttttccgtataaatccattttttgttttgaagaggggaaattatatttattgttgtttactgaatcctggtgtgaaagcatatcagatatgtatgaactgctactgctgtacttccgatttacggacatcattttattgctatttgtagacgtgataacatgaacatgagtacctatttatgtgggccttcagtggatgggcagtgccactcaggtctctggggtttccctctctaattttaagtaaattgacatataactactatgcttataaaaatgaagtaaggcaaacaagtagtcctgtttgcccctaaaaacattttcaaaggaaaaataaaatgaaagtactttttactttttatgatactcagaaattaggatgaagaacttttaaaattgctgaagatcaaagaggttatctctgccagtcacaagtgtggctggtgtcattctgggtctgactggagccctcctggactgtttctttaatttcaaaagccctgcagacatagtacctggtcagaactatgcctcggtttattaaacaatttgaaataaaatcaaaatttcaacctg

SEQ ID NO: 318292 - DNA, 455 bp, Homo Sapiens
agaaaaacacgctaaggttgtaatacccaaaactgctaagaaaccctgagctaccagagagaactaagagaacttacagaacactctaaaatttgaaggagacacaacaacatccatctgttggacaccatgctgctactaagttgttgaccctgactactaaaaatgggaactgttagataatatttctggtctagggactctccgaaaaaattaatgagacagttaaggctccatgaactaaacaagtttggaaaccactgctgtaagttcatcagccatgtagaaagagataagatgcatcataaaagttcaggaccaggagtgatgacagacgagctggcatttgccagttagcacttaagagggaagagctagaccaacagggatggcagactcctctaaggggaaagtcagtctctgcaaagaatgttgcttagaattagtcttggtgc

SEQ ID NO: 318293 - DNA, 1572 bp, Homo Sapiens
  misc_feature (66)..(127): n is a, c, g, or t
  misc_feature (1012)..(1020): n is a, c, g, or t
  misc_feature (1064)..(1120): n is a, c, g, or t
ctgtataatagttttatttttctcattttactattgtcacattttatgcacaaatatttatctgcnnnnnnnnnnnnnnnnnnnnnnnnnnnnnnnnnnnnnnnnnnnnnnnnnnnnnnnnnnnnnnacataattggtattatgacagtataagtgtcgttgtcgttatttaaagagtaaaaatgtatgcaaaagtcctcctcccatttacaaaagattgagaattttgtttttcctggcagcaagtgaaatattgaagtatcaatatttttacaccctttagatctgaagacattaagttagtcacagatttgttttgcaattatgaatttttaaaaacatttttggtgctatttcaagggatacactagttcttttcttaaaggcagtagcataaaatgaatatggaaaacagcagacctcacaaaaatatttggtggtacaattctttttgtatcatacttgaatatcaccattaatcaggggagaaaacaactaaacaatttttcctaataacatagactgatacaaaaataactgtgatcagtcagtttatctgaagatcaaccacacatagcaattctgcctcatttgtttttctgatgccaacacaaatatttagactttaggctagcaagatatgtatgaaagttggctcaataaaaacttcacatggaaaacaaattttaaaacaaaaatgaacatttcttttacttaaattcttgtacttctaaggtacaaatgatgaccaataattttatctttcttcctttgaatatactgtaaattctatgaaaaattcatttataaaaacaaagcaaagaatagcataaattttattttctttcacaatgttatattttaatagaagaaaaaaactacctttctgataactgtaacctaagtaaaacaaatattttacatataatttgaggcaaagtaatgagtttcttgaatcaactggagaaattagtcacattacctatgtcatgcataaatgatggtaagaagnnnnnnnnngcatctgatcatgtatgagaactgtctctgttcaaattatgagnnnnnnnnnnnnnnnnnnnnnnnnnnnnnnnnnnnnnnnnnnnnnnnnnnnnnnnnnccatatgggaattgcatagatgagaaaaaaattttcattctagggatctaaaagtaatgtttttagctttaaaaacatacacacacatatataattgagacatgtctatcatcttggctaaaattttaatatatgtctccccaaaagcattttaaatatgaaagccaagattcttaagctcttgatgatataccagaagggtatactttattatttttttaaaactacaagcaacttgtcaactctctaggccgtaagaggatggtgcaaaacctttcttgctgtctatttgttacctgacgttagagcttctgtttattatttcatattgttattttactcagatattcttaaaaccacagtgcccaaattgtactaataatctgtccatatattctctttcaaaaaagcggacgcgtgggtcgacgatatcccgaacgtccggccgtacc

SEQ ID NO: 318294 - DNA, 555 bp, Homo Sapiens
  misc_feature (445)..(445): n is a, c, g, or t
  misc_feature (510)..(510): n is a, c, g, or t
tagactgaatgctcttttttgtaatagctgtttcgcattacaagttgaaagcagcgctcccttttcaatgatgtgtataaagctgcattacctcttttctgaatcactgatggtcggcatgttctttctaataggcttgtatatcccggcttgatcttttgtaggagtgggcataccagtttatctggaaataacatcataaaggttaatctacgaatccagcgctagtgctacggtgaaactctactcatttcatattatggattataaccgctagcagactcatacgtgcttagatctgttactccttatggaccatatgcactaggtggctccaggaggcgctacgcataagagggctgaaagatgcatctcttaccctatccttcaaataggactatgattcctaccggtccaaagacgggtgacgaggctacatggcacncgagagcatggctctgaccattggacatatattgaacattgcgcctactgactgcccgactgtangagacatagcttacaccggagggtcccttcctttggcatagggcg

SEQ ID NO: 318295 - DNA, 946 bp, Homo Sapiens
aacactttaggccatttgttacccatgaatcaacaaagaaactgacctttttggtaggaggaaacataagcactaaacactaagctgttgcaacagattgccttgtgctgtttgggcagaataaagacaagtgacttgagcggggtggtcagcagtgtacataatattccagtaggaaactgcttccaagtttaagcatgagctccccaaactggagaaaacatattttgctattctgagacaacaatcagaatacagactttggattccaggtcacagtttgctttttaagacaaggtaaaagcaaagaaagccacattgtgccatcttcagctccagtggctttagcagtgactgtttgacataaaacatgtaagaattgcttgttgggaagagtgctttagggacccactgttttcatttcttcttggagtttaccttgtttcagatgcagccatgggtaggtcagagatggattgttggtgcaataaacccaagaatcaatgtagcctcttaatcccatcaagatgtagtttgtagcagcaaagtgtacagtctgaaaccgtatgttttatccttatattttagagctttcagcagcctttttaagagaggccacttaccaaagttatttctataagctcaagagtgtttcggttggtaagttcttccagctgaagccactttttccttatagttaatacaaatgactatttttactttaaaaggcacagctgtcctggtgggaaatgaaacctgcagcagttcaggatgactaatgaaagcaattagcttgaacatttagaaaaaattcatatatgatctaaatttttatattatcatttctgtgccttctaagtcctgcatcctgttcaaaacatctttccagacattaacttacacattgtataaaaccgaccaaaatgatttcctaaagttcatgcaa

SEQ ID NO: 318296 - DNA, 1505 bp, Homo Sapiens
atttagaatataagttttttaatttttataaataacttatctgttacaaagatagtttacccagctaaatcacaaaaccatcaactcaagatatccaaattacgttttattaataaaacaagtaaaaactgatttatcaatcttcacatagaactgcagatgaagctgaaaaacaaggcctattttaaaaataaattgcatcaaacgtaagggctttgggtctatggtttaattacctaggattgtcatatttcttcccatatacaaaatgcaaagcctgaaagttagggctctgacattcatagagatcaactgtaataatcccatttaaaacacagccacttgcaaacatttacagtgggtggtagtctatattatcttccatcctttggctctatttcagcacttcccttagccccattctaagcactcatataatttcataattctgtctttttaaatgcatactgttctttttcttgatttcagttatatacattcctgatcatctgaatattttccttacaaaaatatatcatcaaaataaagagatgcttgagggtgcttcagtgttcaagtttgcttggttttttttccagcttttcttcagttgtcctaaatatggctagccttgttttataaatacacatgatactgtcaccaagtcaggattagaaatggactgccccaacagtaaagcatttaaacttctctccaaaaaaagggctgtaggtactgctgctgttgctggttttgagactgtactttcccaataacaactgcttgtgcaagttctgtgggacaccaagcagatgaagcttaaccttgttgttctgtcagtgggttaaaaatatcttttgttttaagcttccctgtggaagacaaacactgtgttgtgtcacccactgctcaagtcagtatttaatgtgacctacagacatcacttctgtaatatcatctgcaattcactgtgcagcatctgcctgtcttcacacaacattggaactcatgagggcaaagtacagaataagtagaggaaagttattctgtgcatactttcatctcattaatgcttttttattttaaggcattgttcctctcaggtaaggcttaaaaagggacatgatcgtgcttaattactaaaaggaaaaaagaaaattagttaacaaaaggctattacactatacatatagaaatataagaaaataatcaagaagaaaagaaatcacttaaagcagactcgagagatctgtacagtaggaaaagctttggggtatttcgctgcacatttgtacagacaatgcatgctgctttcctttgcatctttagcccctagatgctggcttcacagagtggagacacgttcagggaagacaaagacaaggccaagagtaccacagatttctgaagttcttccctatccaatggcactatgcggcagcaaatggttcttaaatagttaaaccttgttccttttcttcgtgtatgtagtgtttcactgaaag

SEQ ID NO: 318297 - DNA, 1098 bp, Homo Sapiens
aaaaactgactttcttggtctctaatctaacgtgctaatatattccgttgtgactagacattgcacatcatgtatatcattaatcatattgcattccactttagcttaatattagaaaggaccaaccctccatttccattaattatcataactacaatttattgaatacttaagtcccttcaagtgctgcttacaaaggctaaattaatattaaactaagtgtatttatgcccttatcagaaaacataggcacaccggaacagccagaacatcaaagaaactcatgatgaatgattataagataaaatagctggcttggaattttttcataatgtttcttcttttaactccaattttctctacctcccaccatttccccaaaataagaccaaaggaaaacatttgggtgacatacaaaaagacaatatttattttactcaagctttcctataagaagttaaacagaaacaatccctggttgaagactaccaaaaatgttaacattgtttcacatatcccttcagtgcccagatgaagggaaaaacttaactgaacgaaagaataagaattaccatcctgacactgggtttgcttaggtatgttaggaaaaaatccacataggctagacctaaaacagtaaatgagcctactaatttcccacaggggatgggaaatccactgatacagacacctccaagagctcccaagacctagggatcacaaccaccacaggtattcccataacttccttttccctcccttttccctcagctattttactgctaaaagaagaggatgggaacaaaagatcacttccccactcccagactgcattactggtcagcatcaatgtttgttgggaatttcacagcatcctcttcatggccatctaaataggataacagtaaaaatggctagggggaggcatgggttttgcttcccagaattataaaatacctggaaaggaattaatctcattcctatacaggaaaaccaaatattctttctagagaacagcagaacaaagtagaacatctactacggctgtctcccagcctcaatctgacttcaagaataactttacatctgccattgtca

SEQ ID NO: 318298 - DNA, 1149 bp, Homo Sapiens
gaaatgcagagagatgccaatagacaaattagcgaatacaaatttaagctttcaaaagcagaacaggatataactaccttggagcaaagtattagccggcttgagggacaggttctgagatataaaactgctgctgagaatgctgagaaagttgaagatgaattgaaagcagaaaaacggaagctacaacgagagttacgtacagcactggacaagattgaggagatggagatgacctacagccacctggccaagcggctggagaagatgaaggccaatagtacagcacttctggcccagcagtaggaaaaccacccttcaacctgggtgatgctccttggggccctacctagagggactgacttttgtccattgacacaaaccccttttagtactgttttgagttttgtcattaaaacagccacctttgtattttataatttatgacagaatgaagtcattttgaatctacatgaatgaacactttggattttgttgtagtttgattctagggtagaaccagtccatgctgtttttattttttatctccgtaattgtagaatcatgtttactcaacgtttttccccagctgcctcagtaactgggcactcggaggccttggcacgggttctggaggacagacagcaattctatgagtgctcactgagatacttgctggagacctcagaaaacacaagtgccttctccacggtgcaattcagacttcagtgatctccagtggtcaaaagacatttacccttaatatcagacaacatttatattttagtgaagaaacaagttctcgggtggggaatctatgtttcactcagatttatatgtttggaggaaaaaagcctttttttgtaaaatatttaaatttatataagaaaatgttagaaaaaaatatggggagtgtatataaaacttgctttattgcatggggcaggggaagtccaggcctaatactcctaaagtaagagttgggtcctttttttcttcaatacaactgtgctgtaccttgtaaagtattttatctgctgcttatttgtggaatgaaacctcaaacacccccaaagggggagggtagggcagggcaggcagataggaaatctgcctgcaaattctattaaatacacccttttgccaacc

SEQ ID NO: 318299 - DNA, 359 bp, Homo Sapiens
gcttctgggagtcactgttgacttctcttacttaggctgccatttgcactaagcttccaaattgtgacagcaattctctcctctggccctggggtttcccattataaatggtcctgttattaaactcccctcaatgtgcctaacgtgcatttgtttcccgcaaggagcctcactgatatacttctgatattttctattttttctatttcttcattttgtttgttggttgctcaaactttaactaccatagaatccctcgtagctctctgctttcatcttctgcctaggtctgtggcatgcaactggcaccagatgataggcggagatagagagaggcaaagtgaaagatggcttaacca

SEQ ID NO: 318300 - DNA, 462 bp, Homo Sapiens
ctgattgttcaaactgtgttcaaataaggcaaacgcccccctgtaaccaatgcagctgtttctgtatctcactgctgatttctgtacgtcacttccctctttttgtctataaatttgttctgaccaggaggcatccctggagtctctctgaatctgctgtgattctgggggctgcccagtcattcactgctcagtttaactcctttaaatttagttcagctgaagtttttcttctaacaggaatcagactggtaagccttgaatcctacctgtttatctcctgctcacctgaagttgtaaagtttagtacctctaggcctatttcttcacctataaaatggggacaatactgaccttgaaatcttgaaataattcaactagatatatatatataaacggtagaaaaattttgtctctccaatattctgttaaaattctcaccccctgccccgcccccagcac

SEQ ID NO: 318301 - DNA, 476 bp, Homo Sapiens
  misc_feature (24)..(24): n is a, c, g, or t
  misc_feature (42)..(42): n is a, c, g, or t
  misc_feature (67)..(67): n is a, c, g, or t
cggaattccaggtccaatggtttntaaaagggatcctttatnccatatgtgctgaattgattttaangaaagttgcatgatcctgtaggagcaacatttttacctaaaaaatgctaactttatagtatttctaattgttcaaggattttaaaattctatttcagggagtatatcttctgtggttttgaaggaggtgagttctgtatgtgccttgcagtactgtaattcaaaaataggaatctttggctgcaaaattttaatgaaatgttaggaagtaattttcgtgctaacattaaaattataactttttgaaaggtaatagattttccagaagtaaaatctgatggttctaaatcaatcaatgtgatagttcatttttaactcttagaagaattcagaggaaattaacccagctaagtaaaaaatctgtcttgattttgttacttattcctcagaatattaaacattgatcacat

SEQ ID NO: 318302 - DNA, 477 bp, Homo Sapiens
  misc_feature (172)..(197): n is a, c, g, or t
tcagattcttgataacctgttttaccaccctgggcggttgtcagctaaatagcctaaatttgcatattaaaggaagctgttcatgtgaaagtcaaatagcaaaatttacatggtaagatgcagagagaaaaagtttggattatataatttataaaggccttttaaatatatnnnnnnnnnnnnnnnnnnnnnnnnnngaagttcctacagcttttacttcagaacttttagccatgagataaatacaaatttaccagcttgcaaaaagaacttcttgggtctaaacagtggtttttatcttaatggaaatataacagcagatttagagcaggcagaaaagaaaaaatagagaaaaatagtacttaggaactctgtagtttgcaggtcgaccttagggctcttttttcttaatgtaaatgtgcacagagaccatattatttccattttacataaactttggctagtagaggtgccata

SEQ ID NO: 318303 - DNA, 889 bp, Homo Sapiens
ttttgaaacaaagttttaatttttattttacatatttatacataaaactttcaaggaaccctctgaatccaacagaatgttaatagcacatctaaaaaggaacttcaggtagtcaacattcacaaaatgttgaaaactgagtaaaatatacatattacggagagctacaacttcactacgaggcaggcatgtattttttgacttgtatagcaccgtcatttacagttcttctttaaaactacagtgaagaatgaaaagtagtcaatgggaaaatactgttccaacttaaaatctctaaacaaataaaaataaagttaaaactactctcttttattaaccatgatttgtggtggtgtcagtactgtacattttttgtaacaatattttattaaaatgcctgatattaagtggcacaagtaaaaaattaaaataaattaagaagcaaaggccaatcactggacattaagcttcagacattatcaatgactaacactgatatttgtttctgcgccacctttagcaacagcatttttacaaccacagaagcaaaataaattctagcttgttctctggttgaatggcttcttttcactttgcaggcattttctctgccatgtgcttctgctgactttcagcatgtctggtcaagtcttcaatgtccaccagcatggcatcctgctctgtgtgcagctcatctcggatgagaagcagctggaccaactcttcattcaagccgggaggaaaggcttggcttcccacttttgctacagctggtataaattcctgggccatcatcaaagaagcttccaagtgccaacttctgtctgatagactctctctcatttttctgtgcggaggtggagttggtcctcgcctggccctggttccg

SEQ ID NO: 318304 - DNA, 594 bp, Homo Sapiens
tttttaattttaaagtgtggttttattaatgcacttcagggtaagtgccagtcttattttagcttcttctggaagaaatactaccaattataaataatcacagcaacattttcattagacaaaaactgtgtgtgtgggtgtggtaggggggtatcatttatagcatactgcaaatataaactcaattcttgagctatattaacaacactgagcaacaatatttctttctaaaattttcttttctttaaggcagatctggttattactaacatggggcagggtaggtttaggaaaattactattttagtttcttaggggcaataacacagaaggtcagaaaacaagcaacaaaaactcttttttaggtcctctacctggccaccattttaaaaacacaaggtcctcatatatatagagatatttatatattactcggttaaaacacatttttacacactttacaggttattttaaggtttaggttataggcattcatgtgaaaggggtctattagggatggtcacttagaaatcctcactgtgattccacgcggctattggagaaatggagaagaccctttttagagcggtgctg

SEQ ID NO: 318305 - DNA, 1557 bp, Homo Sapiens
  misc_feature (69)..(78): n is a, c, g, or t
  misc_feature (81)..(119): n is a, c, g, or t
  misc_feature (174)..(283): n is a, c, g, or t
  misc_feature (318)..(326): n is a, c, g, or t
  misc_feature (347)..(371): n is a, c, g, or t
  misc_feature (400)..(436): n is a, c, g, or t
  misc_feature (441)..(441): n is a, c, g, or t
  misc_feature (443)..(443): n is a, c, g, or t
  misc_feature (500)..(508): n is a, c, g, or t
  misc_feature (585)..(585): n is a, c, g, or t
  misc_feature (665)..(676): n is a, c, g, or t
  misc_feature (1043)..(1061): n is a, c, g, or t
  misc_feature (1542)..(1542): n is a, c, g, or t
ggaattgggaaacaggggggtaaaaagttggcgagatggaaaggcggaataaaaggggtgtggaaaggnnnnnnnnnngannnnnnnnnnnnnnnnnnnnnnnnnnnnnnnnnnnnnnnacggatggcggagtggataagcgggatggtgtttaaggggcgagtggaaaatgcnnnnnnnnnnnnnnnnnnnnnnnnnnnnnnnnnnnnnnnnnnnnnnnnnnnnnnnnnnnnnnnnnnnnnnnnnnnnnnnnnnnnnnnnnnnnnnnnnnnnnnnnnnnnnnaggaaaagggaagataatttttgtttgcggcccgnnnnnnnnntttgttttttttcacggcgannnnnnnnnnnnnnnnnnnnnnnnngggggtgtaaaagagggggacacaatccnnnnnnnnnnnnnnnnnnnnnnnnnnnnnnnnnnnnngggtnanctggaccagggcaaagaaattacactgaacatcagcatctggcagtatttttttggnnnnnnnnngtgactaaaatgggtttaaattgattaacactattaaatcacatctaatatttgatactacatgattcaatacagcntatacgatacaattatacaaaatgtgttaacatcaaagaatacaaccaaaattaagatagcaaacaaaacctatataacnnnnnnnnnnnnacaggaaaatacttttgaagtatgcatgtaactgcccattcttttaaagaaaatctactgcaagcaaagttatcaacctccagaaaaatcacacgtagcattactaagcatatcccctaaaaaagtgtacaatatgcacacttggaaaatacaaaattaaaaaaattgtaagcaacaggtgagcttcatatttataagaatgtgaaaagaagtcccatttttagcactgttgtataaagaattgtcttttgatgcgaagttcatgaattgtcctcctgttgggaccacactttacaaaaacactgtgtttttgaaacgagattacagagcaagatagagcatcttagccatgtcatcttagtcaagnnnnnnnnnnnnnnnnnnnactactttatcaaaacatgtcccttaggtgtgtaggattcatttttaaaattcttcctagaaataatatacaaaggagaggcatatttattcccaatcacacttctggaagatgcttcccgtggtcgagaagggtcttctctcttcttttcactggttgtttttggccttagcatgtgttaagatgtgagatttcaggttagttgactgagcaaacttcttattacaaccatcgaaggggcacacatagggcctgtctccggtatggattcgcacatgtgtgcgcaaattgaagtccagtgaaaagcgtttcccacagccttcgaacgtgcactgaaagggcttctctccagtatgaaccagttggtgtcgttttagttttgaactctcaacaaaagctttgccacattctgcacagacgtggactctgggaccgtgggtgtgcagatgttttctcatggccgagttatcccttgacatcnttgtgcagcccttta

SEQ ID NO: 318306 - DNA, 1730 bp, Homo Sapiens
  misc_feature (444)..(445): n is a, c, g, or t
  misc_feature (458)..(458): n is a, c, g, or t
  misc_feature (463)..(463): n is a, c, g, or t
  misc_feature (472)..(482): n is a, c, g, or t
  misc_feature (494)..(579): n is a, c, g, or t
  misc_feature (629)..(674): n is a, c, g, or t
  misc_feature (1536)..(1536): n is a, c, g, or t
agagcccataccccggggggggtgttcccccgggcgcgattttaaaccggggccggaaacagcacatgttttttccccccccggtttttcgccatgggccaaaagtttatttgccaaggggcccacggggtgcggagttccccttgcccgtttcacgatttcaacattcccccattgggaatgggtttcccgttcgcggaaggccgtaaatgtatatcaaaccgcccccccgtttagcggcaaggggcgggggcaatccaaaattggagcttgcaatgggcctccggtttatagatccaggataccccctccggcttcatatttgcattgtttaaaaaccacgggttccgccgggggtttttttattgttagaattcaaaccctagtcctgtcccaggttctggtggcaacagaaatagccaagttccctttcctttttggggnngggtttcaaaaanaaatntttattaannnnnnnnnnngttctaggtttnnnnnnnnnnnnnnnnnnnnnnnnnnnnnnnnnnnnnnnnnnnnnnnnnnnnnnnnnnnnnnnnnnnnnnnnnnnnnnnnnnnnnntgaactacagaatttattaaataagaaagctatcaattggaacaggaggnnnnnnnnnnnnnnnnnnnnnnnnnnnnnnnnnnnnnnnnnnnnnncatttagtgctcatcgccgtccctctgaggggggccgtcagaaaggcaactgggacctgacagacccgggcacatacttgaaattcctgaattctaacctgcattgtacaaaatgccacttgaaacgtccaccagaacccccagccaaagaggcacatctggacagcttcacagcacggaacgtttgaccttggtccccgtgggtcccggaggaggacagcagcagccacgcggtggcccctgcgcactcaggccatgactgcagggaccacccactggggccacaagagtgacccgggagccagagggagccctgagcatcggcggaaggcacaggtccctgcccggggtggccatctcagaggcacatttagtgtttgttctacttatgaaatcaaggacaaccaattgtacttatcttacaactgatgttctgggatgggactggaaaacattgattccagaaccactctttttcttaaaatcactggcttttatgacaatgtcttccaagagctcattagaatctataagatcgcaggaatttcgccaagaagggctgcatagaaaccacagagacaactcggccagggctgctcccattgtggtggccaagaactggctgagggcacgacactggactcttgcgatcaacactttactctgggtgaagactgcatatttaaggacacaactgcacatttagatcgagcggtggtgacctcagggtatacacggagcttcatgctgagaacacccaggggtcctcaagagtcttcctcctcgtctttaacttcagaaattctgtctatagatttaaggatttcggcaacaagattcagtgtctcagctccggaaaccnagttgcttgatggaagcctgtgcactgttcatgaccacccggaggttctgcagggccacgtcggcgttctgcttcaccacggtcaggctggcaccctggccgcagcgcagggcttcattctctcgctggaagttggagacctgcgcctggagcaaactgatttcctgttttagtttcacgacgtggttctgtgc

SEQ ID NO: 318307 - DNA, 603 bp, Homo Sapiens
  misc_feature (22)..(22): n is a, c, g, or t
  misc_feature (172)..(172): n is a, c, g, or t
tagggcttattaatccacatcnttaacatgcatcccaataatcactttcatttcccacatgaattctttttcttcaccacatgaaaatacacatttgttcttaaaactgatataatacatttttgagcatttgtctatatttggtgagagagaatagatactaatgaaacanagattcctgctctcaaaaagctcccagacttggagttttctgaaatgtatgacgtaaatccaggctctgtagctatttatgctgtgtgagcctggacaggttgctcaatctctctgatccttggcaattaaactgcaaagggagaaagcaaatatttttcttcataaggttactagaagcattaaatgagataaagtgctcagtagaaagtaatgttgttcctattattcagtatttattatcaatttaatgtgcataacatacaattatattcgatatatgcagtgcatgtccatatacatagttatgtatacataattgttgtgtgtatgtgtgtatacatacacacatacacattaaatatttgttgctttcacacagagaaacatatgtgctggagtgacgagtagatttattccggaaggaaaaat

SEQ ID NO: 318308 - DNA, 495 bp, Homo Sapiens
acagcagcaatagaaagttaacatgggggcagggttgggggaaggagtccgagagcctgaggcctgagaacaagacgggaagacattgctggacatttattttatgacgtgcctcatcagcagaacaaagaagggcatggacttatgtttaaaaactgtccagaagtgaccaaagaaattcaccagtgatgcagatgagctcctaataatcatgccatcggagcaggctgtgatagcctggaaatcctgcctgaaaccaaactgcaacatttccaactaagaaatcaagcggtgataaacctcagtatctgaaagggttaaatattgtgcccacgtgactactgttctttctttctgtgaattaatgtgtgtgccagaaaatatttgtgaataaaaaacaattacataatctcattgtcatgaatgtggttatttatctctgagcgttaagactgatttttccccccactgaacatcttagtgtaaatatcagag

SEQ ID NO: 318309 - DNA, 1440 bp, Homo Sapiens
gacttgtagcttccaatattagaatgtccgtccaccatgtttgattgtggcatggtgttataacgggcgtgggagagtggggaaaagaggagaaaccctaaaataatgctttaatcccagtttgaggtcaggaaccagactgttcccagattaggtggaaaaccgaccccaggaactccacgtgcggtaaatgctgaattttaactgagctaaaaatgtctaggccatccctttttagaattcgcatgactcattgtagtcaaaagctataagaacatattccttaatagttcagcaagctttagggaaagctagctcattgtcttgggttctaaagtccttttgtttgattatttttattataatgaaattaaacttatgactattacagtatgctcagcttaaaacatttatgagtactgcaaggactagcagaagcaggaaaaatcctactaaaaatatttgttgatgggaaatcattgtgaaagcaaacctccaaatattcatttgtaagccataagaggataagcacatccatatgggaggagataaccagtctctcccttcatatatattcttttttatttcttgttataccttcccaaaacagagacattcaacagtagttagaatggccatctcccaacattttaaaacaaactgcaccccccaatgggtgaacaaagtaaagagtagtaacctagagttcagctgagtaagccactgtggagccttaagtggtgaggtcttccaatttcagagtgatgtgtcttcaacttgtatcatcattttagcggaaaaacataatttaattttggtgaaatgagattcatctcgtaacaggattagtaacagcattcactgaatttcacactcttcttttgtgaacagtgaagaaaatgaatggtagctagaagatcaatgggattccagctccagctgcagatggaatgacgatataccaggacaaaaaacacctatattttgatttacaaagctaacagcagttttaaatctgcaacttaattacagaccaactacaccacaaccttttcaaatggcaaaaatacaaaaaagtgttacaaaaatatttcagaaaaagtgcatagtctaagtgcatagtaaataaaagcactgaaaaatatcttgctagagggagttcagcttggaagttattaccaaagctaaacatttttattttacacaaactatactcaaaaatagctttatgagactgatttctggctaaaagtatcaaagggtttattagtcaagaaacaaatacctcaaccgacaagggtggatagaaaagaaacaaagaagctgcctaccccagaagttcagacttaataaaatttcttcagtattacggtactaatatcccttaatggcagaatgtgataatcatggaattaattattgctaaagtagttttcaaat

SEQ ID NO: 318310 - DNA, 993 bp, Homo Sapiens
  misc_feature (162)..(162): n is a, c, g, or t
  misc_feature (259)..(267): n is a, c, g, or t
  misc_feature (297)..(306): n is a, c, g, or t
  misc_feature (372)..(387): n is a, c, g, or t
  misc_feature (428)..(438): n is a, c, g, or t
  misc_feature (455)..(637): n is a, c, g, or t
acccgggtggtggggcctccccccggggcgtataattgggtttttcacacaaccccccgcaggagtgagggtgctctccccgccgggcgccggggggtgttttataataataaccccacccccctctttccccaaaaatggccccgccggggggggcgaggngcactatattgtaatataaaaaggcgccccgtgagagccccctcttggttgagaatcctcccacaaaagcccccccaaagaacccctcttttgttgnnnnnnnnnaaaaacccctcgcgttgccccccgcggggnnnnnnnnnnggggggaagaaaaaccccccttttttttgcccgggaatttcctctagaaaaacgcctattgccccnnnnnnnnnnnnnnnngggcggccccgccccccccaggggggttttaaagatttttnnnnnnnnnnnccggggccccccccccnnnnnnnnnnnnnnnnnnnnnnnnnnnnnnnnnnnnnnnnnnnnnnnnnnnnnnnnnnnnnnnnnnnnnnnnnnnnnnnnnnnnnnnnnnnnnnnnnnnnnnnnnnnnnnnnnnnnnnnnnnnnnnnnnnnnnnnnnnnnnnnnnnnnnnnnnnnnnnnnnnnnnnnnnnnnnnnnnnnnnnngccatgaaattattttaatatgtttttctccatgactgaatatacaaatataatggaagtaatgtattcttctgctgtaaagatgggtggaatatatcaaaatccactcgctgaattttctttagaaagtcctctagagaaaccgtctgaagaaaagcaggaaatgctttcacaggaacagttttgtgaaaggacctagcatgctttaggtgcaagtgtgcttgactggcaatgtcatatattacatctctcacatttttatcttggttcctccgtagaaagtcctcttgtgaaacaccatgcagcatacaaatatccatgggaaggaacacctttcttctgctcccatgatatgg

SEQ ID NO: 318311 - DNA, 682 bp, Homo Sapiens
  misc_feature (385)..(385): n is a, c, g, or t
ggaaattgttttattttaaaattaccttcccaacaaaccatgaaacacttggatgttactttatggtttttcattgaaaacatactacattgtagatggaatttctaagtcagacatagaattgatcaaaatctaaggacaatattatgtaaggacaatattaaaaatggatagaaaaagcttcatttggtgaggttaatctaaaggatgcataaccatgtcacggtggacggataaaaaaggtgataaccttgtgcttttattcaactaaggtacttaccaaaaccttaggttttatacaggtgttaagctcccacctggaaagggacagttttctatattacacctaaatttactttaaataactgaagcccaaggaaacagnttgtttaaaagaacttaacagtccaatagctacataatttaagtaaattaaaataccactaagacagtgataatttgatgtctcaaaactatacaactggggaaaatacccactgtgcacaatttggaggttgttaaagcgaccactcaggaggttgaacagtgcaagacatgcttttccagttacaagctcaaaataggagtgcaaacaaaattaaagcttttgtttaaagttgtagggtaaggaaagcttgaaactaatattaaaaagcttccctcaaggtcatcctccagaaat

SEQ ID NO: 318312 - DNA, 503 bp, Homo Sapiens
  misc_feature (277)..(277): n is a, c, g, or t
agtgctggttgagaaatcctggtttcataacctaataactacatgacctgggtctggcttaacctctctgagtcataatttgcttatctgtaaaatgaagtttacagagttattgtagggattgaattaaaaaatgtaaagtttgttagagtgcttagttcattgtgattatttggtatttactcttttaaaataattgtgataataattattaatattacattttctacagaaggactacatttacaccaaaattaaatctcacaagggaaaaaantaagaggaagatgaattactggcaagtaatatgactaaaacaaaactaggaagggaccatatttcctgatgataaacttttggtagcactctgtgcccctggtacaatttttgttagattgaaatggtttaatatatgaacaataataatgggcaagctgagtgttttccttcaggaaaaaaggttatattccttcctggtgacaaacctactcacgttgccgctt

SEQ ID NO: 318313 - DNA, 1874 bp, Homo Sapiens
  misc_feature (375)..(375): n is a, c, g, or t
  misc_feature (462)..(462): n is a, c, g, or t
ggaggcaccgttccactccgggaccacgtggcgggtgtccataaatgtctgccacctttgcattgagcccattttccagatagtgaaaatgcggctcccaggggaagtcactagggtcactcctagaggggccaatgacccaagggctgctgtaggggaggtaccggcctctgaaccccctttcttctctccccaacagggtgacgctgggggacccctggcctgcagggagccctctggacggtgggtgctaactggggtcactagctggggctatggctgtggccggccccacttcccaggtgtctatacccgggtggcagctgtgagaggctggataggacagcacatccaggagtgaccaccacgtgactncccaggccgagactctacgtgaaagcaacaggagcagcaggccacccaacaccccaccccaccgtaccctacccaaggacgggtgtnggggggctgtgggtcatggggatgcattttggtaccaccctttgttccaataaacacagcccctccaccctagctcactggctcagcacctcagtgtcacagcgaggaccaccctgcctggtgctcccaccaggacccggggtggaacgaagcagggtcaaagcaagccctgacaaggggaaggctgaccccttagcctttggggcaggggtggcagcagcaacacattcctcgtgactcagcagcccggtggcactaaggggaaagatggacttctcccaaacccaggggaggctgagaccctccgagctggggttccagggacacgcgtcacctcttcccagagacccctcaggagggaaataaagaggtttctctccgtcctccaccaatttatttgcccatccgcaggaggtgacagctcctgtggtgtctgaccacccccaactccgaagtccagacaagctgtccgcccagaatatgaggctgacttgggcacactaggggaataccccaaaggcctgaaggaggtgccactgggctgccagcacttcaggaaggcacagggccccacacccccgagatccaagctgcactggctggcagggggcagggcggggggtggcgaggacacagtcccgtgtgtcccagcaccggtgccaccctcctaagccccgggcaggcagtacgtacatgcggaccccgcctctcaaagcacgtttatggaaatgaacagggtggggtggcccgcgctcgccggtcacatgttggctcgttcccgctgcagccgcgagttgtaggcgcgagacacggtgttccaggcgtccatgtagcggtccatgcacatggcgatgcacttctgctcggagttgtccagggagcccccaggtttccctatacacttccggaaacacttgtccgtcatcctctgcagcagctcctgcgcgttggccacggcgatctgcactttcacctgctccattatgagccctgggtccagcttcccgctgccggagcccccgaaatcggagccgaagccgccctccatggctccgcaaagtcaaccggaccgaggccgcgtgcgccgactcgtaactaactgcgccggaagcgggccgcccggggcaccacgggaaacggagtccgcgcggacggggacggaggactacaactcccacacgaccgcgcgcgcccgggccattcaaggtcgcgcggggggccctccgctcatgcggaggcctggacctgccgttacctacacgagctacccgtggttgcgactccgcgggaagagggaggccctgacttggccggggagtaggggggctactgcgtgcggccgaggccgatcactttgtactcacgctctgcctccagctcgtcccgaagggcctgccgcgcatgcgcacgag

SEQ ID NO: 318314 - DNA, 1003 bp, Homo Sapiens
  misc_feature (157)..(157): n is a, c, g, or t
gattccaagcccttagttcatggcccaggttttccctaggaaaccaggttatgacccatgttccacttaccttactgggcccgcccgccaaacggaatggtttagaaaaattttcgaaggccgagggcggccgacaagggggtttttgggggtgggntgttgggtttcaattatatccatagtcacctttattctgaattaaccatttatcaagagtgcgcctgaaaagaggtaggaaaaaataaaggagcccatcaaaaaaaagttccctggcaagtgggagggaggacatgatgttaggagccctgtttggggaaggaaatgttatccaggtcatggatgccatttttgtcaatgattcgaacactgaaggttggcagattcaggatgaagcgtttctggagctcctccagacatttcctaaggagttccactgccctctcacgtgagatagtcggtgtgtagtatcggtcgaggatactgagagtcaggaaggcaccatagccgtgggctgcaaaaggggccttggccaaggctgccaggtagtccatgtaatacagcgctggcccttcatgctcatcatagccagccaggaggaggttcacatgatatggggtccgactccgaagacagtcagccaggtttcggcgtgtgaagttagctgctgccgtgggagacaattcatatccatttcgcatcttataaagttgcacgtttttctgaatatattctgcaaactgtacagtgtctccagcctctccaacacacaggagtaatatcttttcactcatcttaaacatcttgtcatgatcgtccttcatctggacaatattgctggcggccacccggtcggaggcgacaagaacatagtcggggccttggataccgatgaggtactccatggtggcggaaggccaggggctgcaggtccgacacagcacgagactcgcccgcttccaggtctcaccggtgagacagcacctcagagcgaagattggcgccc

SEQ ID NO: 318315 - DNA, 887 bp, Homo Sapiens
  misc_feature (788)..(788): n is a, c, g, or t
  misc_feature (808)..(808): n is a, c, g, or t
  misc_feature (819)..(819): n is a, c, g, or t
  misc_feature (855)..(855): n is a, c, g, or t
  misc_feature (863)..(864): n is a, c, g, or t
  misc_feature (876)..(876): n is a, c, g, or t
attgtttctttaactgcatgtgagtctgggattatcccaaaataaaagtgttaatttgtaaaaagtacacacagcatggcagttcccagcctcagagattctgatttaagggtctagccgggagcctgggcatgtgcttgaggcccccaggtgagtccagagtacagcggggctgagagtcgctgttgacattggctgcagggtggacagggcgagatgggccctgcccgggcagacctgtgtattgctaggtccttccggctctgatgctctgtgataattggccactttctctgccattttcctcccagagagcaaacacaggtctagactcaatatcgtgtggagctatcgatgaccacgggtcacttccatctccagcactgcaggctgtgcgggctggtccaactggggtacggttgagggtcctggctcagaccaggcctgactcctgggccagtctgtaaaacaggcccttctgggccagcagctgggccgggctgccgctctctgccacctgccccttgtccatgaccagaacccgggcacagtccatcacggagcgcaggcggtgggcaatgagcagcacagtgcactgtgcaaaccagctcccgagcatggcctgcatctgcagctccgtgccagggtccacggcagcagtagcctcgtccaggatgaggatctgggtcttccggagaagggcacgtgccagacacaggagctgtttctggcccacgctcaggtcctcgcctcggtcagcacacttgtactgcagccggccgggcagntggccacaaggctttgagcngcacgtctcanggctgccagatagctcgtcgagtcctctgcagcagncgaggttnnccgcgagagcanggaaagatggg

SEQ ID NO: 318316 - DNA, 931 bp, Homo Sapiens
  misc_feature (258)..(258): n is a, c, g, or t
  misc_feature (796)..(796): n is a, c, g, or t
  misc_feature (826)..(826): n is a, c, g, or t
  misc_feature (828)..(836): n is a, c, g, or t
  misc_feature (848)..(848): n is a, c, g, or t
tcatatttgttattttattatatattattgtatacaactttgataatgaggatattataaatcatactttaagcaaaaatctatgcatgatatatgtaagcagtaacattttgaagaaaaaagccatgaaagcatttacctaaaatttagtaacatcgaaaaacactagtttgtgcatagtaatgttgaaagcttcataatacactagaatactggtaagtcttcaggtattgtaagaaaaacctggtacaggaaaangcctaaaattagacacatccatatccttagatgtgcacatcatctagaaataaatcccacaatgtagcagtgcactaagtatcctttgtttggcacttaacaatacagacaaacgtgtatttggtttaacgtgattttattattcttagatacattttagttattttatatagataaaaatatacaatattgcttttcaaacttttaattttataactgtataactgattgtcatcatattcatgattaaaaagcctattttccactaaacaatttatccagtaacatgtggaagagagtaacaaaaatggtttatgtaagacttataataaaaggtttaaatgtaaaaatagagtattaatctagacctctggtctaaatccttagatacctcatgctggaaacaaattatgaaatgtttcagacaaattttttccaacacttaaattgattctacaggtttaaagttttgactgaaaatacacagaactcagagatattttgtccgaagccatttttatatacattaacttactanaagaagtagaagaaataaaaattgtatttncnnnnnnnnnggagacggagcncgggttctattggccaggctgggagtgcagtggggggcgatgcttgggctctgcaacctccggttccccaggttcagggctaa

SEQ ID NO: 318317 - DNA, 483 bp, Homo Sapiens
  misc_feature (153)..(153): n is a, c, g, or t
  misc_feature (164)..(164): n is a, c, g, or t
ttaagctcaaggagaaattgaagccatagtcgtgcctgtttgcttagcattcctattgacaactcttctgggagtgctgttctgctttaataagcgagacctaattaaaaaacacatctggcctaatgttccagatccttcaaagagtcatanttggccagttnggtcacctcacactcctccaaggcacaattttaattcaaaagatcaaatgtattcagattggcaatttcactgatgtaagtgttgtggaaatagaatgcaaatgacaaaaagccttttccagaagatctgaaatcattggacctgttcaaaaaggaaaaaattaatactgaaggacacagcagtggtattggggggtcttcatgcatgtcatcttctaggccaagcatttctagcagtgatgaaaatggatcttcacgacacacttcgagcactgtctagtattctaccgtggtacacagtggctacagacaccaagtc

SEQ ID NO: 318318 - DNA, 754 bp, Homo Sapiens
  misc_feature (102)..(115): n is a, c, g, or t
cctgatccccagtaacaagcaaggtgggcaaggagatggaatccaagtgaatagtcagtttcagcaagaatttcccagcctgcaggcagctggggatcaggnnnnnnnnnnnnnnggaaacaaatgatgacaactatggacctggacccagtttacgtccaccaaatgttgcttgttggaaagatggtggtaaggctgctggctcaccttcgtcatctgatcaagatgaaaagctccctggccaggatgaaagcacagctggaacatcagagcaaaatgatatcctcaaagtggtggaaaagaggatagcttgtggtcctccacaggctaaactgaatggacagcaggctgctctcgcttcccagtatagagctatgatgcctccttatatgttccaacagtatccgaggatgacatatcctcctctacatggtcccatgagattcccaccttctttatctgaaacaaacaaaggccttcgaggaagaggcccacctccttcatgggcctctgagcctgaacgcccatccattcttagtgcatcagaactgaaggagcttgataaatttgataacctagatgctggaagctgatgaaggttggggcaggtgctcagatgggaagtagattatacagagcaactgaatttcagtgatgatgatgaacaaggaagtaacagtcctaaagagaataacagtgaggatcaaggttcaaaagcctctgaaaacaacgaaaacaaaccatcagtagcaaa

SEQ ID NO: 318319 - DNA, 687 bp, Homo Sapiens
ctaattgaatgttctctttatttaagcattgtagagactgaggttcaaaggttattttctcaaagttacagcagcctctgaggtggtggagggtggcagcaggacagtgagctgacggccaacccctgtgcccaagtgtgctgctccgctcaactccatgtgcaccagggaacagccattctctgcaggctgatttgatctggaaccacaattgagtctagttctggaatctcagacacatggagaattacaccttgtctccagttgctacaagtcaagtccacctgcatgcagacagctacaattgtcttgtaaaattagaaaacagaacagggacaacagtattatctatattgactatagattaattattcatttgcattctttgtcttttgtacttataaatatgaaatttgtatataaacgtgtgttttacaacataagatacagatctatatatatgtacctttgaaagattattctctctgctctttggcctaaatttccaaatggaatcatcctgtgtacagtaacctgtgtctgaaaatttctgtccacttagagtaatgaaggcatggggtcataatgagagcaacaaaaaagttacactttatactgtgaaagaccgtcaccttattgttcatttacttaagtttttcattttgtttttatattttgaaatgttga

SEQ ID NO: 318320 - DNA, 659 bp, Homo Sapiens
agtgtaaatagtttattatttgctcatatgccatgaaaagaccagaaaagtaacatgaattgcttttataaaacattctaatattgctaagaagcaggcccattaatagacaaacagaaaagaacatgccaacgttgtctatttgtagattaataaataggtaattattttaatatacatatatgtcagcattgaactttggaaaacagctgctttgtagtggaagtccaacttggtcaaattgctatttttaatcgaagtgaatgttgagtccacagaaagacaaaatcgtggcatgttctttttaaagtaaagtacacatttatgggaatgtgcccgcaggtggcagtttaatctttctgtaaataggtacactaaagtgaaatgtggtaggtaacttgttccctaaactgtccttatagttaaatatatatattaaaaaaaactataagttaaaataacattcagattgtatagcataggctgatgcattttaaaacaatatttacaatattacccagaggcttaggtgggaattaaagagaagtgtaaaaaccataaaaaactgcaccgattttatagcaaaatatctgtacatttaaaaagatcatataactacacatccaaggaaaagggaccttcaccaaggggttcacata

SEQ ID NO: 318321 - DNA, 278 bp, Homo Sapiens
taacactgaataaatatttattgtgattttttccccggtggcataaggttgtttatttttcctagctctccaaatgacacagttgcggaacctctttcagctggtcttgcctgtgactcatgatatttccatcctatcatgtaatagatctggtatgtagcaggtactgaaccatcttcatttctgtacatttctctgtacactgccgcagctgccagcattgtgtctcgatgcagcagggcttttctattccaagcacagttactctcacccatacc

SEQ ID NO: 318322 - DNA, 685 bp, Homo Sapiens
  misc_feature (36)..(36): n is a, c, g, or t
  misc_feature (40)..(40): n is a, c, g, or t
  misc_feature (141)..(141): n is a, c, g, or t
tttttccaccagtattcagtttttctcacttctggntatngtatattgtagatttttttcattcatgtgttatttaattaacactgatctctgctattttaaccccccaaataagttatttgtcctttaaggttggttacntataatacccctcagtaagattccagtattaatttctgggcagtttgttctctgtatacaattgcaaatgataagcatttttgtgagtgaccacctttgcaatatgtttgttaatttacttcatgttgggttctttctgaaatgtacatctttacatataaaaacctcacattctacttgatttacacttcctagtctacattacatgtggttgaaggttttatacattctatatgcttttactaaatatacaagatttactactagaaatttggagaaagaacactaacacatgtacttgtgatttgttcatgttatattaaaaccttgagatttgtgtatttatgtagagtctgtattgacaagactgttgttttttgctccttgagctatataataatctgtgtattggattgttgtcttgatttggtctaaatttgaatatatatgagttacttgaatataacaaaaatgaattttgtttgatagatttatattgtaacctttttctagttcttgaataaatatagcctgctttccctag

SEQ ID NO: 318323 - DNA, 1281 bp, Homo Sapiens
  misc_feature (224)..(224): n is a, c, g, or t
  misc_feature (231)..(231): n is a, c, g, or t
  misc_feature (1145)..(1145): n is a, c, g, or t
  misc_feature (1192)..(1192): n is a, c, g, or t
  misc_feature (1196)..(1196): n is a, c, g, or t
  misc_feature (1209)..(1209): n is a, c, g, or t
  misc_feature (1229)..(1229): n is a, c, g, or t
  misc_feature (1231)..(1231): n is a, c, g, or t
  misc_feature (1235)..(1235): n is a, c, g, or t
  misc_feature (1237)..(1237): n is a, c, g, or t
  misc_feature (1244)..(1244): n is a, c, g, or t
  misc_feature (1246)..(1246): n is a, c, g, or t
  misc_feature (1251)..(1251): n is a, c, g, or t
  misc_feature (1273)..(1273): n is a, c, g, or t
aattggggtgggggagaatccccaaaggcccctaagttccacgtggccccaggggatttcttcccttaggggaaaaccacgctttattgggcccattggttttcccctttaccccttaactgggggcccccgccgcggccccaaaatggaaatggttctagaaaagctttcctccgaggagccgaggccgggccgaccatgtttgatttttttcaggaacgctngggttgncggccccaaatctgagttttatttttgctggaatcaggtcatctggcctggctgtcccaccaacccagctgggagcctctgagtggcctgccagcagcatctcattacaaaacagccccctggaaccaggtagccaaggaagcggcccacctgaaaggcatttagattgagaagaaaaactgcaccttcctgacaaaggtcaggggtcacggtgaagggagggctgctgggatcacagggacagcagcatcttctagcagctcggccataccagccactgaggtcctaactgcagccaaggggccgttctgcacatgtcgctcaccctctgtgctctgttccccacagagcaaacgcacatggcaacgttggtccgctcagccactggttctgtggtggaacggtggatgtctgcactgtgacatcagctgagtaagtaacaacgactgaggatgccgctgacccagggctggggaaggggactcccagctcagacaggcttggctgtggtttgctttgggaggagagttaacatcacagggaatggctcatgtcagccccaggagggtgggctggcccctggtccccgggctccttctggccctgcaggcgatagagagcctcaacctgctgccgcttctccttggcccgggtgatggccgtgtggaagagcctgcagtagaggtgcacagccagcggagagtcgtcattgccgggtacagggtaggtgatgaggcaggggttgcagttggtgtccacgatgcccactgtggggatgttcatcttggctgcgtctctcacggccacgtgtggctcaaagatgttgttgagcgttttcaggaagatgatgaggtccggcaggcggaccgtggggccaaagaggaggcgcgcgttggtcagcatgccgccccttnaagtagcgagttttggcgttctcgccacaattacgggccatgttctnaatnaggtacgagaacntgcggttgcggttataaaananagangnccttccngnaggcnatttggcggtgaagtcaaggcnaccgggag

SEQ ID NO: 318324 - DNA, 1065 bp, Homo Sapiens
  misc_feature (909)..(909): n is a, c, g, or t
  misc_feature (911)..(911): n is a, c, g, or t
  misc_feature (925)..(925): n is a, c, g, or t
  misc_feature (933)..(933): n is a, c, g, or t
  misc_feature (939)..(939): n is a, c, g, or t
  misc_feature (947)..(947): n is a, c, g, or t
  misc_feature (952)..(952): n is a, c, g, or t
  misc_feature (954)..(954): n is a, c, g, or t
  misc_feature (957)..(957): n is a, c, g, or t
  misc_feature (959)..(959): n is a, c, g, or t
  misc_feature (983)..(983): n is a, c, g, or t
  misc_feature (991)..(991): n is a, c, g, or t
  misc_feature (1006)..(1006): n is a, c, g, or t
  misc_feature (1012)..(1012): n is a, c, g, or t
  misc_feature (1018)..(1018): n is a, c, g, or t
  misc_feature (1022)..(1022): n is a, c, g, or t
  misc_feature (1024)..(1024): n is a, c, g, or t
  misc_feature (1026)..(1026): n is a, c, g, or t
  misc_feature (1028)..(1028): n is a, c, g, or t
  misc_feature (1037)..(1037): n is a, c, g, or t
  misc_feature (1052)..(1052): n is a, c, g, or t
  misc_feature (1057)..(1057): n is a, c, g, or t
gggatcctcgctctgccccgcgtcccagccatggcgacatcctcggccgcgctgccccgaatactcggcgcgggtgcccgggccccgtcgcgctggttgggctttctcgggaaggcgaccccccggcctgctcggccgagccgcaggacgcttggaagcgcgacggcccttatgatccgcgagtcggaggacagcaccgatttcaacgacaagattttgaatgagcccctcaagcactctgacttcttcaatgtcaaggaactgttttccgtgagaagcctcttcgatgcccgagtccatctgggacacaaagctggctgtcggcacaggtttatggagccgtacatctttgggagccgcctggaccacgacatcatcgacctggaacagacagccacgcacctccagctggccttgaacttcaccgcccacatggcctaccgcaagggcatcatcttgtttataagccgcaaccggcagttctcgtacctgattgagaacatggcccgtgactgtggcgagtacgcccacactcgctacttcaggggcggcatgctgaccaacgcgcgcctcctctttggccccacggtccgcctgccggacctcatcatcttcctgcacacgctcaacaacatctttgagccacacgtggccgtgagagacgcagccaagatgaacatccccacagtgggcatcgtggacaccaactgcaacccctgcctcatcacctaccctgtacccggcaatgacgactctccgctggctgtgcacctctactgcaggctcttccagacggccatcacccgggccaaggagaagcggcagcagggttgaggctctctatcgcctgccgggccagaaggagcccggggaccaggggccagcccaccctcctggggctgacatgancngttccctgttatgntcactctnctcccnaaagaaancacancnaancntgtttgagcggggagtccctttcncaaccctnggttaccggcatctnaagtgnttgtanttantnantngagttaaantcagaatccaccgtncactnagaacagt

SEQ ID NO: 318325 - DNA, 855 bp, Homo Sapiens
  misc_feature (808)..(808): n is a, c, g, or t
  misc_feature (823)..(823): n is a, c, g, or t
  misc_feature (833)..(833): n is a, c, g, or t
tttgtgtgtgtcgttttgtaaattgaaaggaaacttttattgagtcatgttttcaaagcaatctagttttaaaaaaagttgaagacaagacagaaaaaagaacatgacacctaagagaatcagacaggacagacagacgggagcaggggggcggggacagcggctccgtggaggtcagatcttctccatcttggagatgaggtcgtcgcagatcctggtcagctcctcgttctctttagtcttctgctccactgtcttctccagcgactggatgcgcatctgctccttcctcaggctggcctggagggccaacgcttccgcctgggccttgctccggacctgggcgatctcctcgtttgccagctgcagcttctcctccgcgtgggccttcagggcttggtacctctggccctcctgggtgatccttgccaggtaatcctccacgcacttcttcagtgactcttcgttcttgcggtagccctcgatcacctctttctgtttctcaaaacgcttgaagaggtcggagaaggacttctccatggagttcagatctgtggtaagttggtctttttcttttagaactttctggatttcagctttggaaagttccttctgcttctgaacttcctccatggcctggtacacaacctcttcgaacctagtccatgatcttccccagttccaggttcttcccgtggagctcctcacacctgctcctcagctcccggttctcctcctgtgtcgcctttaccactgcatccaggtccttctggctgtactggagcaggtccactataggtccggtggncaggggtgggccccnggcgcgggancacctgggggtgggcctggcac

SEQ ID NO: 318326 - DNA, 931 bp, Homo Sapiens
  misc_feature (21)..(21): n is a, c, g, or t
  misc_feature (23)..(23): n is a, c, g, or t
  misc_feature (52)..(112): n is a, c, g, or t
  misc_feature (160)..(160): n is a, c, g, or t
  misc_feature (209)..(209): n is a, c, g, or t
  misc_feature (844)..(844): n is a, c, g, or t
  misc_feature (860)..(860): n is a, c, g, or t
  misc_feature (892)..(892): n is a, c, g, or t
  misc_feature (901)..(901): n is a, c, g, or t
  misc_feature (910)..(910): n is a, c, g, or t
  misc_feature (925)..(925): n is a, c, g, or t
cgcggcggcgcggggacgcgngntgaccgttggcgccgaggggaggaggcannnnnnnnnnnnnnnnnnnnnnnnnnnnnnnnnnnnnnnnnnnnnnnnnnnnnnnnnnnnnttgcgcagatccgggccgcggctgtggggagggcgacggagcggcgtnaccttccggaggcgggagcgagcgaggaggcccgggagcgccgagcgtncgccgccgccgccgccatgaacaactcgggcgccgacgagatcgggaagctcttcgtgggcggtcttgactggagcacgacccaagatactctgcgcactacttttcccaatatggagaagtcgtagattgtgttatcatgaaagataaaaccaccaaccagtctcgaggctttgggtttgtcaaatttaaagacccaaactgtgtggggacggtgctggccagcagaccgcacacgcatagatggccgaaacatcgaccccaagccatgcacaccccgggggatgcagccggagagaacacgagccgaaggaaggatggcagataggacccaggagcgataacagttaatcaaataagatatttgtcggtggaattcctcacaattgtggtgagacagagctcaggagaatacttcaagaagttcggagtggtcacggaggtagtcatgatctatgacgccgagaagcagagggccccgaggttttggatttattactttcgaggacgaacaatcagtggaccaggctgtcaacatgcattttcacgacatcatgggcaaaaaagtggaagttaaacgagctgaggctcgggacagcaagagccaagcgccgggacagccaggtgccaccagtnggggagcggggttgtncccaacgctgccaatggctgggcaggccagcncccgcccangtggcagcnaggatatggcccgcnaggaaa

SEQ ID NO: 318327 - DNA, 1251 bp, Homo Sapiens
  misc_feature (1091)..(1091): n is a, c, g, or t
  misc_feature (1177)..(1177): n is a, c, g, or t
  misc_feature (1183)..(1183): n is a, c, g, or t
  misc_feature (1194)..(1206): n is a, c, g, or t
ctttggttagagctcccgtcagactttcgttcggccctaggatttggtagccccgaagtgtgggctctctccagtaccagactcatttcagtaccagcctttgggaagtcgtgtgaatacctcggtctcttagccacagggatagaatggcggcctgacggagccgcggcgccggcgaagtcgctgaggcgcgagctggaacccccagaccagctcaaacgggagccaaaactcgaagcttggaagaattagcaggaaatggcggatgaggcgttgtttttgcttctccataacgagatggtgtctggagtgtacaagtccgcggagcagggggaggtggaaaacggacgattgtattactaagctggaaaacatggggtttcgagtgggacaaggattgatagaaaggtgagcaggttggatttgaaaattttcttgcaggtttacaaaagatactgcaaggttcaaggatgagttagatatcatgaagttcatttgtaaagatttttggactacggtattcaagaaacaaatcgacaatctaaggacaaatcatcagggcatctatgtacttcaggacaacaaatttcgcctgcttactcagatgtctgcaggaacacagtatttagcacatgcatctaagtatttcgcatttacgtgtggcttaatcaggggtggcttgtcacacttgggaataaaaagtattgtaacagctgaagtgtcttcaatgcctgcttgcaaatttcaggtgatgatacagaagctgtaggacatactgaaatgcaaggcttcaacagtgtaaagagataaattattcatgtaaaagtatttcaagtagtgatgatttaattacattgttcgatgtttgtacaggagtaagcatgtatttttatcaatttcacacagatcaaaggagatggagggacattctgccatgacatacacttaaccaaaactattcaaaatgtaaaccggatttcaaataaccagacacccagatgcagggcccttattttaaacctttttatttggttagagtgatatgtatttagccatagatggagacacaaggctcagggtttgttgaattngcatgagagaaaattatgtacccacagaattatttgtgagaagaatgaacaaattttgataaagtatgaatttgttttattttaanaagcanacatactaaannnnnnnnnnnnnattgcttataatttattaagaatgtttacacctgtataaggattt

SEQ ID NO: 318328 - DNA, 1130 bp, Homo Sapiens
  misc_feature (638)..(638): n is a, c, g, or t
  misc_feature (1014)..(1014): n is a, c, g, or t
  misc_feature (1018)..(1018): n is a, c, g, or t
  misc_feature (1023)..(1023): n is a, c, g, or t
  misc_feature (1025)..(1025): n is a, c, g, or t
  misc_feature (1028)..(1030): n is a, c, g, or t
  misc_feature (1034)..(1034): n is a, c, g, or t
  misc_feature (1060)..(1060): n is a, c, g, or t
  misc_feature (1071)..(1071): n is a, c, g, or t
  misc_feature (1076)..(1076): n is a, c, g, or t
  misc_feature (1088)..(1088): n is a, c, g, or t
  misc_feature (1102)..(1102): n is a, c, g, or t
  misc_feature (1108)..(1108): n is a, c, g, or t
  misc_feature (1110)..(1112): n is a, c, g, or t
  misc_feature (1125)..(1125): n is a, c, g, or t
ttggattaaaaaacaaatttattttctcatagttcttgagggcgagaatcctaggtcagggtccacgagggtcagttcctgttgaaggctctcttcctggcttgcagatggctgccttcttgctgtgtcctcacatggctttgtgtgtgagagagaagagagcaagctttctggtgtctcttcttataaggacactaatcctgttgatcaggaccccacccttatggcctcatttaaccttaattatctccataaaggccctatctccaagtacaatcacactgggtgttagggattcaacatacgaatttgggggcgggcacaacccttcagttcataacatatttacgctctatcatttcctgtaattataaagacacttaggctaagtgaggttaagtaacttgtccaaggtcatatagcacgtaagtcagcagagctgaaactggagttcagaactgacccatgatagagccccaataactgagaagtttaaaaaagtattgctactagtttaatacaaagcccgtagttaatacatgattactagggttgttttcttattatgattatcatccccatttcaggtgcagaagaaagaccccaaggactgggctgtgcagtaccgcgaggcagtngagatggaagtccaagctgcgagctgtggctgtggctgaggctgaagccagggctgaggcaagagcccaaatggggattggagaggaagctgtggctgggccctggaattgggatgacatggatatcgactgcctaacaagggaagagttaggcgatgatgctcaggcctggagcagattttcatttgaaattgaggccagagcccaagaaaatgcagatgccagcaccaacgtcaacttcagcagaggagctagtaccagggctggcttcagcgatggtgctagtattagcttcaatggtgcacccagctccagtggtggcttcagtggtggacctggcattacctttggtgtggcaccagcaccagttccagcntcanaatanancannnttanctttggtggtaactgagcctaccccncttcacagccncagcnttagctttggtntcacaagcacagcntagttnannntaagcagcttagnttggg

SEQ ID NO: 318329 - DNA, 1019 bp, Homo Sapiens
gtgtgctttcaggaaagttcccttgcccggtgggcccggattcgggggttctttgtgggggcagggccttccccggaattctcccttgaaaggggctgctgtgctggccctcccaggtgtggggtgggcgtttttgggaatcaggaaccagggacgcgcatggggtggaggtcagagtttggagggctccccccttggcccagctcgatggctgtgatcccccagggacccagatgtcagccttgaagtcgtaggccgactgcttgatgacctcaggtgccatccagaagggggtgcccacgaatgtgttcctcttaatctgcgtgtctgtgagctgccctgctaccccaaagtccgccagcttcacgtcaccctgctccgagagtagcacgttggcagctttgatgtctcggtggatcttgcgttcggagtgcagataatccaggcccttcagaatctcccgcaggatcgtggcaatgtatgtctcctccaggggacctggtttaagcaagtccagtgctgagccgccgcccaggtactccatgatgatccatagcttggtgctctttaggtaggagccaaagtagcgggtgatgtaggggctgtcgcactgactgaggacagtgatctcctgctggatgtcctcgatctcatcctcggcctcctccaggtcgatgatcttgatggccaccacctcctttgtgtggttatcgatgcccttgtagacctccccaaacgagcccttgccaatgcggtcgagcttggtgaagagctcctcagggtccactcgagagtgctggttggcaaatccccggaggtgagccatggccgcgccgcctcagaccctccgccagcagccccaggaggcgtctggatcccgcggagaggcgcggagccggctagctcgcccctgcggcgtcagtccaccgcagcctctgttcgcccggggaccccgggcctcccagcccgcgaagcaacggtgcctcgtgccgaattcgccacccaggcctcgctaccta

SEQ ID NO: 318330 - DNA, 2104 bp, Homo Sapiens
tccaagtcaggtctttattgaaagtggcaggggctctcaatgttctatgaaaactaacatattaacctcagaatatttcaggaaacaagtaattcaattttcttaaaaaacaaaacattctggatgacacaagtacttatgagcagacacagtacctgatccaacaccacaaggcaaatctatggccatcatgggccccgggaggacagcggccaggacactcctctgggggctgccctgttgcctctccccacctcatgggaggaggaggcagagctgccctgatagttgctctgcgccttggtctgagcggccatagggctgcatgagtctgcagaagacccaggcgtagctcatgagggccacgccggctgctggagcccccgtgagcaatactgctgggccaggagagggaggagggcagtgggcatagagaacagcgtccctgacgtgcacaacagcacactgcaggggtggaaggagacggtgacctggtgacctggcatgtgaggcccacgggatccgacgtgtccctgcaggcacgacatagcacagggcaccttccaagtcagcacagttcttatggagctcagaacaaaaacaaacgaccttccgtcccctatctgaacagcagtgcgcttcagcgggtggatgtcaggtggtttctgttgtgtgaaaacctctgcactcgctccaccaggtgcaccatcagcttgtctgagatgccggggcaggactcctcggccaggctgaaggcgttctccagctcctccagcgcacccacgctcccgccgctctgcttgtgcttctctttgagctctccgaagacgggccggaccagcgtggacaggcactgggacctcggctgcctcttgacgggctccgcaggcttctgtgaactgtgcagggccgtccccttgtgaagcttgctgtgtggactcggccggatggtaggggggaacgtccagatggggccctgctccccgtcctccgcctcgccatcaatgtcagagtcctcagagctggactcctcgccatgcccctctgacttccagcgcttatagcggtcgatgagctccgtgaggaaggaggtcttcttggtgtagcgtgtgatgaacttgtgcttcaggagctccttggccgtgggccggaatcgggggtctttgttgaggcaggcctccacgaactccttgaagggcttgctgtgctggccctccagtgtgggtgggctgttcttgggaatcaggaacaggacgcgcatggggtggaggtcagagtttggaggctcccccttggccagctcgatggctgtgatccccagggaccagatgtcagccttgaagtcgtaggccgactgcttgatgacctcaggtgccatccagaagggggtgcccacgaatgtgttcctcttaatctgcgtgtctgtgagctgccctgctaccccaaagtccgccagcttcacgtcaccctgctccgagagtagcacgttggcagctttgatgtctcggtggatcttgcgttcggagtgcagataatccaggcccttcagaatctcccgcaggatcgtggcaatgtatgtctcctccaggggacctggtttaagcaagtccagtgctgagccgccgcccaggtactccatgatgatccatagcttggtgctctttaggtaggagccaaagtagcgggtgatgtaggggctgtcgcactgactgaggacagtgatctcctgctggatgtcctcgatctcatcctcggcctcctccaggtcgatgatcttgatggccaccacctcctttgtgtggttatcgatgcccttgtagacctccccaaacgagcccttgccaatgcggtcgagcttggtgaagagctcctcagggtccactcgagagtgctggttggcaaatccccggaggtgagccatggccgcgccgcctcagaccctccgccagcagccccaggaggcgtctggatcccgcggagaggcgcggagccggctagctcgcccctgcggcgtcagtccaccgcagcctctgttcgcccggggaccccgggcctcccagcccgcgaagcaacggtgcctcgtgccgaattcgccacccaggcc

SEQ ID NO: 318331 - DNA, 1092 bp, Homo Sapiens
tggattcctgaggaggactgccggtcgttcggacgtcttgcctgtcgctggaggagaggtccgggctctccaggaaggtggctgcggcgacaaaatgaagatattcgtgggcaacgtcgacggggcggatacgactccggaggagctggcagccctctttgcgccctacggcacggtcatgagctgcgccgtcatgaaacagttcgccttcgtgcacatgcgcgagaacgcgggcgcgctgcgcgccatcgaagccctgcacggccacgagctgcggccggggcgcgcgctcgtggtggagatgtcgcgcccaaggcctcttaatacttggaagattttcgtgggcaatgtgtcggctgcatgcacgagccaggaactgcgcagcctcttcgagcgccgcggacgcgtcatcgagtgtgacgtggtgaaagactacgcgtttgttcacatggagaaggaagcagatgccaaagccgcaatcgcgcagctcaacggcaaagaagtgaagggcaagcgcatcaacgtggaactctccaccaagggtcagaagaaggggcctggcctggctgtccagtctggggacaagaccaagaaaccaggggctggggatacggccttccctggaactggtggcttctctgccaccttcgactaccagcaggcttttggcaacagcactggtggctttgatgggcaagcccgtcagcccacaccacccttctttggtcgcgaccgcagccctctgcgccgttcacctccccgagcctcttatgtggctcctctgacggcccagccagctacctacggggcccagccgtccgtgtcactgggagctgcctacagggcccggccttctgcctctttgggtgttggctatcggactcagcccatgacagcccaggcagcctcttaccgcgctcagccctctgtctcccttggggcaccatacaggggccagctggctagtcctagctcccagtctgctgcagcttcttcactcggcccatatggtggagcccagccctcagcctcggccctttcctcctatgggggtcaggcagctgcagcttcttcgctcaactcctatggggc

SEQ ID NO: 318332 - DNA, 2182 bp, Homo Sapiens
tttaaatacaaatgttttattacgcaaaccacatgtaggtcccaggctcaggggcttaccctacagcccccactggtccctggctccaagcctgctccttgcccttgcccaccctggaaagccaggatctcctatggagtgtgtaggtgtccacgagtgtaccggtgtgcgggcctcctgggctgcaggcactcaggcatggtggcagcattgagggaaagacaggtgttggggagcggggtccccacctgcccaggctcaggagtcacaggggtctgcacagtcctttctgctgtggaacacgtgatagatgctggtcggggggaacatagcaacagcgccgagcagagagcccacctggatggccacgccggctgccagcaatgccggccggcccccgccatgcagcagggagctggctgccaccttcacgtaggagaacacgccaagacacagcacccacgacagcaccacgaggaccacccccgccgaggtgcccaccaggggcgggcaggggctcaggactgccagcgccatcaggtagcccccacagaacacgcccagcagagagaggccgcccagccctgccaaggacctgcacagcacacccatggccaggaagcaggccaggggattggcagcactgcccagcaccacagccaggtggtaggccagacgcccgtagggtaagcaggaaaagctctgcacggcaggcagcacgccattggtcagcgcgttggtggcggccaacaggcccagcaggcaggcactgcgggctgatagaagctgataggccttagggtctggaccaggggtggtgcctgctgcctggcttggtggctcttgcagtggtgaggactcttccacctcttcctctgctcctggggctcccacctggaggcctgatcctaactccgcctgtgggtacagatggtggtggcggcaacagcagcagaagaccctggaaggcagcagctgaagcgaccagaagggcagtcagtgcccagaagaaggtgctggcgggaaaacgctcaaggaagtcgagcggggggccaggggtgccgttgatgggggctggcgggcactcgaggcggcccacaccctgcactagggccagcacgcagggcagcagggcactcaggccttgacccaggaagaatgaccgtaagaagcgaggtggcaggtggctcaagaagggcaggaaagtgacattcgaggcacagcatgccagtgccagcacaaaggccagtgctaagaaggccacagaatgcaactgtcctgccactggggccacatggtgccacagagaggccagcagggctgtgcccaccatgcccagcacctgcaccacccggatggggacctgctcgtcctttcctggggccagcctcctccagagggtcaccaccagcagacccaggttccccagagccacaagcacagagacgtaagaggggaggctccaaccctctggaagctctttgaccaccacaggtagctccacccagatcccattgaccgcagcccaggagcccatgccgaagagagccaccagcaggtgggtcagcaccggacgggcgggcgtgggtgctgccattcagcccaaggctgggcccttccaggtcagggcaaaggtcacagccagttcttttcccacctagggccagacacgctttggctctcctgggaagtgaagacttcttctagccagcgggaccgccggcaggcagggaagcaggaagccggcccgagtcgctgcggccccaggggaggaggccgaaggagcgagtggagccctcctctccagggagaggcggggctggagtcaacgccaccaccaccccaagccggacgccgggaaagggcgcctaccaggaggagccacgcacaccccagggcttcacggtgcccgcgaccgcaagagccaagtcagatcccaggggagtggccgggacggctctgctcggaggggcgccgccctctcggtaccgtcaggtgggcgactcgggagccgtccggtccctgcgcctcccggtcccgcgcccagtgcgctcccgctccagtgccggcttcccgccacgccgggacaccgccgtccggcccagggacgccacctcagtccggagcgcgcaggacccggcagcagccacgacccgactcacccgtggcggttccgatcccg

SEQ ID NO: 318333 - DNA, 1433 bp, Homo Sapiens
acaaatgacttgaatctgataagcctgctgaatgaatgaatgaatgaatgtatccatctattatgagggttgggctttggctctttcctgtagtgagggagaaataatactttgaagatgtttgacggggctgcggtcaccaaggcctggtgctgcgacgttcctgcaggtttcgaatgaacctggcgttgagtatgtccccacccactgtccaggactgggctggcggggccggggcctgtggaggagctgtgtgcatgggcttctccccagacccatcctgtgacaaggcctgctcctcactggcagacctattctttgtttcctgttctccctgcttggagtcttggttgcctgtattgggggatgaggaattcacccccccatggcggctgtagcagcagctttgggctaccagacctgggggagtccccctggtgcgacgacgttgagctgggctgcccccagggtcagcagccaacagaaggcgggcggtagggtgtggggggcagaggcgcaaggaacgcagcagctcctgctctggcacaaaggggcggaggggacctcgttctggtgagtttcccaggctgctggagcgggggggtgggtgggctggaggtgtggcgcggcgaggggccctgtttaggggccaaggaggctccacagctaccttcagaaattctcggtcactagaggagtatggcttgatgtctccctctgctctcttgggtggcagcttccttgctggagcagcgggcgtgggatcgactgcagcagcacgagagtgtcgagttgccctcagagagggagcagggggccgatgttgatgggcaaagaagccttcaaagatcacaaagttgttcacctgtgggactgtggtctccagattgtagtgcttattcaggaatttcagcagcttctgtgagggtcggtcaattgccagttggtgcggttccactcgctccttctgcaacatatactggaagagttctcgcccatggccatggcgttgcacagactcatggatgtaaaagtccaggatgcaaagtggttctacctcattatgagcctcacgatcatccagtacaaagagcttcttgtatccaactttgatgaaaccaataatggctccttttccagccggtcgggctgaactgtctttgaggatataaacaacatggcggttactctgcatccttgatgcactagtgataggagcggaaagattctgggccttggcagaagccttgcccagttcatctataatggtcataatttgctgctgtagatcaacacgggccggcgttgtggttccgggtcggcgggctgggggcctcaggtgctggtccagcaccgtgatccgctccgggaacagcgcgtccacatcgaacgggaactccatggcccatcccgggaattccggaccggtacca

SEQ ID NO: 318334 - DNA, 1471 bp, Homo Sapiens
  misc_feature (56)..(56): n is a, c, g, or t
cgtttgttttgttttcctccagtggagtctttatttgttttttttgggaaacctcntgggacctgccctaggagagcctggcaactgcagggcactgtggggcgggaggtgcctcagcacgtggggccaggggctggctgcaccgcgctgcacagatgaggtcggcggtgaccaggcagaggtgacaccagggacggtctccttgagctgcaacaactggcccgaggctggggaccccacatggtgatttcatcccaaacagttcttgattctacgtgacctgatttggggggttcaggtttaagggaggccaggtcttggacgggcccccgtggttctcggtgtgaaggggacgtctgctgctccccaccagacccgcagtcccagtctgccgggtcatgaggggtggaagttcctgatgagcgccttcttgtcaatcttgcccatctggttccgcgggatctcctccaccagcaccagctccgagggcaccgcgtacggggccaggacatttctggcccactctttgagctccctgtgggacagtgagtgtccttctcggagggtcaccacagcagtgacccgctggccccatgtcatatccggaactccaatcacagccacatctgtgatgctggggtgggccagcaggtgccactccacctccagggcgctgaccttgtagcctccagtcttgatgatgtccactgaggtccggcctcggatccagtactggccatccttaaacaccatggtgtcccctgtcttaaaccagccatctagggtgaatgcactcttagtttcttctggtttattccagtattctcgaaacacggagggtcccctcaccagcagctccccctccttttcttcaaaccctggggtcaccttggtccccctctcgtctccctctgcgtggatggtgtaggagcaggcttccctctgtgggttttctgagacaatgcgcacctgtactccaggcagtggggtccccacggaacctggcaggcgcatggcagtggtcaggggcccggacagagccatgccgatctcggtcatgccataccgctccagcagggtgtggcccgtgatgttcttccacttctccagtactgggaggggcagggcagctgagcctgagaccatcagcctaattttttcttcacaaactgcacgcaagaaatcctgggcgtgcggctgggtaaaatgcctgtcgtagtactccatcagcttggtgtatattgtaggcactgccataaagacattgatccgcggcgtttcagaacttaagaacttttcccaaacctgctgagggctgaactcaggcatcatcacacaggtggctcccacccagagaggacagagcagcgcgttgaccacaccatggacgtggtgcagcgggagcacgtggaggatcacgtcgtctttggtccatgcccacttgtggaccagcccggtcaccatcccggga

SEQ ID NO: 318335 - DNA, 1298 bp, Homo Sapiens
  misc_feature (607)..(634): n is a, c, g, or t
  misc_feature (939)..(947): n is a, c, g, or t
  misc_feature (1286)..(1286): n is a, c, g, or t
cagccccagtcctggctcccaggcgcccctcagcagcagggtgaaggccgggctggagatgggcaccccaagtggaagcatggaaggctgaggaccctgcgacagttgacaggcagctgaggcagtggatgtgacggtggttggaatcttggaagtgggtgtcacagttctcgcagtactggagggagtgagtaggagaccgttttccgggctccttgtctcgtccatggctctccctgaccatgcgggctacctcgagggaagccagcttgcggcagcgagctgagccgcatcccggccactcaggctcacagacccccacccaggcagccccacggcccaggagatagctcacagctgccccctggcccgctcgagcagcacacatcagtggggtccaccagaaggcatcccgggcgttgatattccccccagctcctcctgcctcatgcggttccagcagtctcctaagttctggcaggtccccctcctgggctgccctcagtatccggtgagtcatcttatcctcagcctcaagggatctcccttgtccatgtcttcctgatgctccttctgccactgcttctgctgctggtgccttcattannnnnnnnnnnnnnnnnnnnnnnnnnnnggcaggttcagtctgagatctctgggagtcaggagcgctgctctcatccccaatcagggcctcatagaaagctcgggctgcagccccatccagggtggactctggcttctcgggctgtggctgctgctgcccatccttccagaggtcgctggggtcagtggctggggtgaaggtgatgagcaagggccgggacatggcttttgggagaactgagaaaatgataccaggcaagggaaggatgagacaagtaagccaagctcgtggtgaccctgtagcaaccacagcctcagagacctgcagtaggnnnnnnnnntcagcctggccctttaagtcttccgcgatcccatttcggagtttcctcttcccaaacaaaaatagatgggtcactccctagaagatctcggggagagtctcctatacgtgttgctgtgtagcttccgtaccgcaaaatggcgccattctctcccctcatgaggcaggagcccggaggaaacagtatgcccgtcaagggtctctggcgggactgattcgcactaggggcccaacaggcaataaggacccagcggattggccgaggataggccagtcccctgggcagcagcgccgcgccgggactagaggggaacgtgaggagagctgcggaaagagatcncagcctggcatc

SEQ ID NO: 318336 - DNA, 1543 bp, Homo Sapiens
  misc_feature (288)..(288): n is a, c, g, or t
  misc_feature (290)..(290): n is a, c, g, or t
  misc_feature (415)..(415): n is a, c, g, or t
  misc_feature (425)..(425): n is a, c, g, or t
  misc_feature (432)..(432): n is a, c, g, or t
  misc_feature (469)..(469): n is a, c, g, or t
  misc_feature (615)..(616): n is a, c, g, or t
  misc_feature (853)..(853): n is a, c, g, or t
  misc_feature (856)..(856): n is a, c, g, or t
  misc_feature (864)..(864): n is a, c, g, or t
  misc_feature (879)..(880): n is a, c, g, or t
  misc_feature (883)..(883): n is a, c, g, or t
  misc_feature (898)..(898): n is a, c, g, or t
  misc_feature (900)..(900): n is a, c, g, or t
  misc_feature (911)..(911): n is a, c, g, or t
  misc_feature (944)..(944): n is a, c, g, or t
  misc_feature (990)..(991): n is a, c, g, or t
  misc_feature (995)..(995): n is a, c, g, or t
  misc_feature (1001)..(1001): n is a, c, g, or t
  misc_feature (1059)..(1090): n is a, c, g, or t
  misc_feature (1093)..(1093): n is a, c, g, or t
  misc_feature (1103)..(1103): n is a, c, g, or t
  misc_feature (1108)..(1108): n is a, c, g, or t
  misc_feature (1110)..(1110): n is a, c, g, or t
  misc_feature (1131)..(1131): n is a, c, g, or t
  misc_feature (1133)..(1133): n is a, c, g, or t
  misc_feature (1205)..(1205): n is a, c, g, or t
  misc_feature (1211)..(1211): n is a, c, g, or t
  misc_feature (1392)..(1400): n is a, c, g, or t
  misc_feature (1420)..(1420): n is a, c, g, or t
ttttttaaacccacaaatggttgatttatttctgactctcagcccgtctctcacgaagacagagcctattgaccaaaaacttcaggatctgcatctgagcagatcccaggaaggggaagtcaaagggcccaggtcagaggcccaagttcagacttcagcagcagactagggtcagactttaccaaagtcagaactcgaggttcatgtaagtccttagatcccgctcccaagccctgtctttctcctccctccttctctcctccctccagctcagtgtggccacccgangnggtctctccctcccaaccacagctcgggtatcccaagctgggaaatgtgtcactcggggctggggtgctgatctgtagcctagtccttcctggtctctcttgaggacagtggggatgggattagnacggccctcnccccggngtcccagccccattcctggctcccagccccccctcancagcagtttgaagcccgggctggagatgggcaccccaagtggaaggttgggaggctgaggaccctgcgacagtgacagcaggtgagcagtggatgtgcggtggttggaatcttggaagtgggtgtcacagttctcgcagtactggnnggagggagtaggagaccggttttccgggctctttgtctctccatggctctccctgaccatgcgggctatctcagggaggccagcttcttcagcgagctgagccgcatccctgccactcagctcacagacccccacccaggcagccccacggcccaggagaatagctcacagctgccccctggcccgctcgagcagcacacatcagtggggtccaccagaaggcatccccgggcgttnatnttcccccncagctcctccctgcnntcntgcggttctcagcantntccttaagttntgtgcaggtcctccctctctgggctgcctctcnagtatctcggtgagtctatctttatccttcagccctcaaagggatnntccncttgtnccatgtcttcctgatgtctctcttcttgctctatctgcttctgctgttggtgcctttnnnnnnnnnnnnnnnnnnnnnnnnnnnnnnnnggnaggttcagtntgagntntctgggagtcaggagcgctgntntcatccccaatcagggcctcatagaaagctcgggctgcagccccatccagggtggactttggcttctcgggntgtggntgctgctgcccatccttccagaggtcgctggggtcagtggctggggtgaaggtgatgagcaagggccgggacatggtttttgggagaactgagaaaatgataccaggcaagggaaggatgagacaagtaagccaagctcgtggtgaccctgtagcaaccacagcctcagagaccagtaggnnnnnnnnntcagcctggccctttaagtnttccgcgatcccatttcggagtttcctcttcctaaacaaaaatagatgggtcactccctagaagatctcggggagagtctcctatacgtgttgctgtgtagcttccgtaccgcaaaatggcgc

SEQ ID NO: 318337 - DNA, 797 bp, Homo Sapiens
tgccacggaaaccagatacatttattaaatctactcttagccaagcaataaagatgtctacagagttcacaacctgcaacacttcaccagggaatgctaggtaaaggcaacttcagtttaactgagtactccatttcaagtgggtaatgtctgctggttggcagctatccagtttggaaaactgtggaagatgctgttgctacccagattgttctgttcaacaagtgggcctgaagcctgagcagtgtagccagctgtgtggggagcagaggttcactccattgcttctgcagcctcctcacctgactcctcctcctcctctagtaagcagcttcttgtcacagacttctggatagcttcccgctctccttcatcagtgcagttctgcaacaagatcaacagctgtctcctgttgtactgaattaggaacttctgacatgttcttattgtacctcccacatgtaatgtgttgaaaaagcatgggtaacggtgtcctttgttctccaagtatgtgatgaagggaagagctgaccacacaagctgatagaattcttttctgcatcgaagtagcactattccagtataggcattgagatatcgaaccgcgaagccgatggagcaggcggctgcgccgaaagttccgtgcaccctggcgatcgtgtcccgtacgaggctgctcagaactcggtcatcgaggcttaggcggcagcgggggtcgtcagacaccagttcgcagagcaggtacctgtgcttgaaccgcaccatggctgcctccgcgctctccggtccggcgtccc

SEQ ID NO: 318338 - DNA, 1116 bp, Homo Sapiens
  misc_feature (30)..(30): n is a, c, g, or t
  misc_feature (52)..(52): n is a, c, g, or t
  misc_feature (79)..(79): n is a, c, g, or t
  misc_feature (96)..(96): n is a, c, g, or t
  misc_feature (98)..(98): n is a, c, g, or t
  misc_feature (100)..(100): n is a, c, g, or t
  misc_feature (104)..(104): n is a, c, g, or t
  misc_feature (116)..(116): n is a, c, g, or t
  misc_feature (125)..(126): n is a, c, g, or t
  misc_feature (128)..(128): n is a, c, g, or t
  misc_feature (130)..(130): n is a, c, g, or t
  misc_feature (138)..(138): n is a, c, g, or t
  misc_feature (147)..(147): n is a, c, g, or t
  misc_feature (153)..(153): n is a, c, g, or t
  misc_feature (172)..(173): n is a, c, g, or t
  misc_feature (198)..(198): n is a, c, g, or t
  misc_feature (630)..(631): n is a, c, g, or t
  misc_feature (638)..(639): n is a, c, g, or t
  misc_feature (649)..(649): n is a, c, g, or t
  misc_feature (656)..(656): n is a, c, g, or t
  misc_feature (665)..(665): n is a, c, g, or t
  misc_feature (669)..(670): n is a, c, g, or t
  misc_feature (684)..(684): n is a, c, g, or t
  misc_feature (687)..(687): n is a, c, g, or t
  misc_feature (690)..(690): n is a, c, g, or t
  misc_feature (694)..(694): n is a, c, g, or t
  misc_feature (701)..(701): n is a, c, g, or t
  misc_feature (872)..(872): n is a, c, g, or t
  misc_feature (902)..(902): n is a, c, g, or t
  misc_feature (923)..(923): n is a, c, g, or t
tgttcagggccttgttctgtcgccagcagntggagtgcagtgtgcagtggtntgacatggtcactgcaacatcactttnttcccagggtcaaagtntncnattnctagctccaagnaggaggctnnangnattttcancatgccagntaaatntttaatttttttaggagtnngattccctatgttatcaagggggtntcaaactctgggttcaagtgatcctcccatcctcacctcccaaagtgctggggattacagatgtgagtcactgtgcccagccctatatttttcttaagaagagcagggccagttgtttactaagaaactgcaatttacacccatgatttccagccctaatgatcagtatgtggtcagctcctaggatgctgaggcttagaagctagcaggcaacaaggactgacccacggacccatcccatcagttctgcttctctcctgaccctcacacctgtgcatggcctgcatgcgtagcccctcctcaatgctggagctcaatgcctgctggttgtgcaggcggctcaggcggataagcactcggtcttgatgggcctcgtattcctcaaaaataggataaatattagagataagggcatcaaagtatggggtatgnnagatagnnatagaattgnaaaaaanattatttangaanntaagaaaatcattnttnaanatangtagggntgtgaaaatgaagtaagagcagaatctgtggaggcactccttggtggtcatcgtattcttcagcatgtccaggcagatagggcacatgagttctgaatgcagtgaccgaggggaaacagcaatctctgtgccatccattatggcttctgaggggtacggtgaagataatanagactcagttcccacgttttgctggcattntgggaattagacggagtagtnatggtgaccgggcgcagaccccccaccagggctccacagccgaggagaaggcgaagaaggccagctccagccgttcgcgctcccgccgccgccgcgcctctccctaggcccgggctcctgggccaagttcgctcggtccgcaaccgctgctcagacagcagctcccgccaccgccgccgccatggcccgggcg

SEQ ID NO: 318339 - DNA, 1232 bp, Homo Sapiens
  misc_feature (681)..(681): n is a, c, g, or t
aggaattagcaaccgggtttttattcaataaatatgaacatttgttttttaaccagttactattaggcagaaaaaaacagtcatttatcaagaattcaaaagataacaccatcttgaaaacaaagtgccaaaaatctttgccataaactcttcctcacttatagaactaaaagtaacaaatatttactcaaaataaggcttggaataatctaaaaagttccagatatattttaaagctataacagattttgcacataaagccaaaacagattgttttacacatacatagactatctgacaacccaatgaataaatgattgaatggataaattgttgagcattagtgattacttatgttcacattatgggccaggcttacatccatttcttgttcttctcctgcctcactgtcccttgctcttccaaggtccttggtgaggtggcttccagataggcctgggcagtaaggtgctggtggaagatgtgagggcaggataggtgagaccaaggtattctcttatctgtctcagctcactccatctcagtcagtggctttgttcttgtcatggctccattttccacaatccattggtggtcctaactcccactaggcagcccccaccatggttccagctcctctggatgatcccactactggacacaggaaaccaaacctcttcnccattatcctcatagccctgggtgtggtaacagcttcttgctgtttggcttctcttttatcatctatgtaagtcaatttcctgtattaaactccctctgttgaaacacctagaatggtttctgttttccagactggatcctgatggatacatatcagaatcattaagctttttctcctctaactcatatgagaacttttgcatgaaaatctgccctaagccaatgaaaaatcattcaaatcacactcaatacccacattctgcaataaagagcagtaaatatccccttggctgtgttttgtcaaacattgggattctttttgccaagtgcaaacatgactctaccactgttaccaccaattgcagtggacacagccatgagctttctccagaagtcacttctgttgcatgtattaagtctattaacaaggtaacagacatacaaagagaaaattaatcttaagagaaagttacacagtcaccaaatgaataacattataaaaaaagtctctgaaaattcagagaacaaaagacagcaccagaaagtttccc

SEQ ID NO: 318340 - DNA, 1135 bp, Homo Sapiens
cccatggcgagggttcccggtagttgaacaagccccgcctttgcccatggcccggtctgccaggtaaccagctgcgatgttgcctaccagggcccccaatttcccggggcactcatgtaggagctacctacaagggctgactgtcctttctccctggataaggaagaactggccccagtcagtacagcaggtctttactccaaacaccacaaggtaaccagtggagagcacccacaggtaaggggacagcagcagctcctgcagggtgctctcctccttccaaaggagcccttcttgccctcagagggcatggggtccaggttgcggagtccaacatcagcaggttcattgtggatgagcaggagacagaggaaggagacaaccacacacagtgccccagatagggccagcgtgctgcgccagctgtagctctgggcaaggatggttgccaggatagggcccagccctccagccaggttcatgctggttgacaggatggcccaccaagtgccaaactgagatggctcaaaccacttccgcaggaccttcccacatgggggccagcccagcccctgggccaggccattaaggaaccagagggcagcaaagacaggtactgtggagctccaggcaaagaatatgttgaccaggccaaccaggagcagcccagaagagaagagccagcgagcactcatctggtcagacagcaccccactgacaaacttgctgatagcataagctgccgactggctgctggtgatgaaccccaaatcatccttgtccaaagggatctcttccaccaatgatggcatgacaaaggagaaggtcttgcgattgaagtaatacaggctgtagcccccaaacatggctgagaagatcacagtgcgataatagccatagccctgggctgccatggtagaaaagagcaggccctaccagccaagacgcacagcctctgaccacagttcctgcttgccgctctcacagttcccagatctgctgagttgggttttttctgctccctcctccacccagcctcccaggctccctttatagccgccttctggacaatcattaagcctggggaggctccaaggggacccagtgtcctgaacagaggcgggagcccgaatag

SEQ ID NO: 318341 - DNA, 1514 bp, Homo Sapiens
  misc_feature (86)..(142): n is a, c, g, or t
  misc_feature (1322)..(1377): n is a, c, g, or t
ttttctaatagtaagagaccgaaggtcttccgttattttgtcccaggctgtttttcgaaccccttggggctcaaggagatttttcnnnnnnnnnnnnnnnnnnnnnnnnnnnnnnnnnnnnnnnnnnnnnnnnnnnnnnnnncagccctgtgtccctcccctcgtttttacaaatgaataaagagatgctggataagcccgaggtcacaagctttgcagtgtagcatcccccaacttgatcccctgtctctttggctccaaaacctacactcagtcctgggagcgattagcgccaacagctcagagaaaacgtgacgaaaaccagtctgtaaaacccgagcctgggagaggggcttcggtgcgcggggggaatttgcagacgctccctgctggcggagatttcctgacctgtccttcggcgcgggactttcggcgggtcccggccgggcagacccaagtgccggcggcggagactgcagtggagccagtaccggctgtagtggccggggccgtggcgggagagtcatgtcagagccgcagccgcggggcgcagagcgcgatctctaccgggacacgtgggtgcgatacctgggctatgccaatgaggtgggcgaggctttccgctctcttgtgccagcggcggtggtgtggctgagctatggcgtggccagctcctacgtgctggcggatgccattgacaaaggcaagaaggctggagaggtgcccagccctgaagcaggccgcagcgccagggtgactgtggctgtggtggacacctttgtatggcaggctctagcctctgtggccattccgggcttcaccatcaaccgcgtgtgtgctgcctctctctatgtcctgggcactgccacccgctggcccctggctgtccgcaagtggaccaccaccgcgcttgggctgttgaccatccccatcattatccaccccattgacaggtcggtggatttcctcctggactccagcctgcgcaagctctacccaacagtggggaagcccagctcctcctgatcatactctggtacctggcctgtgcatcggcctcctgcttcatgtcaacctcctactcctgccagggaatgtggacacctggctccctggtgtccaaagaccctggcacctgggtgggtttgagctggacagaagcttagagacaaaggcttcaagaagcagtggctgcagggagtcacagaagggcaggacctgaacgctgtctgcttccctggaatccaagatgctgagtggaagtggaccctgggtgggcccggccctgtctttttcaggaaaattacatcctcccatggagnnnnnnnnnnnnnnnnnnnnnnnnnnnnnnnnnnnnnnnnnnnnnnnnnnnnnnnnctgggcacccaggacccccaggtgcttgacagagtcaccccatggtggtatggctgaacaaggagcggcagacaactcagggagaaactcaggagtgcagtaccagggacacctcaggacagattgtctggccaggc

SEQ ID NO: 318342 - DNA, 1162 bp, Homo Sapiens
  misc_feature (18)..(18): n is a, c, g, or t
  misc_feature (40)..(40): n is a, c, g, or t
  misc_feature (45)..(45): n is a, c, g, or t
  misc_feature (58)..(58): n is a, c, g, or t
  misc_feature (71)..(71): n is a, c, g, or t
  misc_feature (76)..(76): n is a, c, g, or t
  misc_feature (107)..(107): n is a, c, g, or t
  misc_feature (123)..(123): n is a, c, g, or t
  misc_feature (125)..(125): n is a, c, g, or t
  misc_feature (737)..(737): n is a, c, g, or t
  misc_feature (763)..(763): n is a, c, g, or t
ggcctttttggaagtaangcccggctcccatggcttttgntgctnaatttcaagttgntcgaccaagtccnggacntcctaacgagcccaagttcgtttcccaaagnaaaagtttggggggtncnggttcccagccgtctgcgcacacagcaagaagcaaggcaagcaggaagcagcagatgcggctctccgtgtcttgattggggagaacgagaaggcagaacgcatgggtttcacagaggtaaccccagtgacaggggccagtctcagaagaactatgctcctcctctcaaggtccccagaagcacagccaaagacactccctctcactggcagcaccttccatgaccagatagccatgctgagccaccggtgcttcaacactctgactaacagcttccagccctccttgctcggccgcaagattctggccgccatcattatgaaaaaagactctgaggacatgggtgtcgtcgtcagcttgggaacagggaatcgctgtgtgaaaggagattctctcagcctaaaaggagaaactgtcaatgactgccatgcagaaataatctcccggagaggcttcatcaggtttctctacagtgtagttaatgaaatacaactcccagactgcgaaggatagtatatttgaacctgctaagggaggagaaaagctccaaataaaaaagactgtgtcattccatctgtatatcagcactgctccgtgtggagatggcgccctntttgacaagtcctgcagcgaccgtgntatggaaagcacagaatcccgccactaccctgtcttcgagaatcccaaacaaggaaagtccgcaccaaggtggagaacggagaaggcacaatccctgtggaatccagtgacattgtgcctacgtgggatggcattcggctcggggagagactccgtaccatgtcctgtagtgacaaaatcctacgctggaacgtgctgggcctgcaaggggcactgttgacccacttcctgcagcccatttatctcaaatctgtcacattgggttaccttttcagccaagggcatctgacccgtgctatttgctgtcgtgtgacaagagatgggagtgcatttgaggatggactacgacatccctttattgtcaaccaccccaaggttggcagagtcagcatatatgat

SEQ ID NO: 318343 - DNA, 1738 bp, Homo Sapiens
  misc_feature (180)..(180): n is a, c, g, or t
  misc_feature (378)..(378): n is a, c, g, or t
  misc_feature (798)..(798): n is a, c, g, or t
acactttatttgtagagctgggcctcaccggcctcgccttgggcaccctccagcctctggcagggcctgaccctgaccccatcctgggctctgctcatgccagggcagaccctgctcctcaggtgccccctactaccctgggggcgcgctcaggctaccatgcctggggcggagcgcggnggctggctccctttaacagaggacgggggctggcgctgggccttccagagccgcctaaggacacgtccttgggagcccggctcatgaaatggggcctcacggaaccttgggtgttttgggttaaatttgtgccttggctcctgttgcgtttaggcacccaggttcccaagcggtgtggtgtggacctcccctgctganaaacccgctggcgcgtggaggggcttgcccaggtccctccgacaggagaccctgctccctgggccttggcccctgctagcaccactgccaggcctggctctgagggacgctgcttctcccctgcccacgtctccaaggcctgaaaggcagggttctgtggaacagcatttctcaaaggggcatcctgcagacgttccagccccaggggaggccccgtgatgctggctggcctgcctggagggtgcttccagaaacaacggagatggtggtgaagaaggctctgggttcaaattccagttctcctttagggcgaaggggtgactgtggctaggtttgtcagttaccttatctataaaatgcacaggaccaggccgggcagtatcattttaactagggaggagagggaaggcttcccttaangaggtgatatttcaactcaaggatggtaaagagggaagccacaaagacactcgaaataaaggtttcagggaagggacagacagcaggggtggcggagaggtgggtgcggggcaggagggccatgaaggcgctcgtgtctcctgcgagggctcagggtgctcggcctgtcataaatggacttaggctttgacagagcagtttagctgccctaaagaaacctggggaggttcccttggcacttgggattgtccgtttccttttctgtctatgtgcgctgtctatgctggacttgagataattctccggagtccgactcaccaggagactcgggtgtcacccagattgaccttcaaggctcatttcttgtcagtccagtacccgtcccctcggttcacacgaccatccagaaacctcaaattcagtccatgcttcttgttttgggtctcggggctgggataaggcgggctgaccaccgcggggcatgtaggtagtttccgtggtgctgggggcgctctccagggaaggctacttggtctgcagaaaaggccttgacttgtgcatacctgggcagcgggcctatgagtggcagcgagagcggggtaaccagagagggcacaccccccaaccggagcgccccccaggttggcatctccacaactgtagaacctcccccatcagggcaaccctcccgattgggacaccgcccccagccagacacatcctcctagcagaacacccatgcttagccggagccgctcccccgccagacacctccccaccgggaaaccctccccagtgggacaccccagccagtccaggtattcccgccgttagggacaccccctccagccggagcataccctcggcaggggcattcctcccaaccgagggaaccccgccgcaacgggaacctgcctgaaccagagcaccctcccgcgcc

SEQ ID NO: 318344 - DNA, 993 bp, Homo Sapiens
  misc_feature (190)..(231): n is a, c, g, or t
  misc_feature (950)..(950): n is a, c, g, or t
gaggctagattctcagcagctttattgaatattgagaggtggtctcacctcccactggacatgtgtcctcaagttcataccagaacttctttgggacagacagacagacaggtggcagggcagggcaggtgtccacgagggtggggccagtgcaccaggggcagctcagctctccaaaggggccagcatnnnnnnnnnnnnnnnnnnnnnnnnnnnnnnnnnnnnnnnnnnttgctccagctcagggagggagagagtcttgtcctggctctctttctccttgaaggtgctgaagaaggagttgaccttgtccctcaggtccttctccaggaagctcaagtggccttccacgtcccccgcatgggggcccagtttctgcctgagctgttccatctgctgcaccagggctttgttgaagttttccccgtaggctccacccggcgtcggaactcctccacctgctggtccaggtgcccacccagctctgccagtgacttctgcagcccctcggtgttgcccctcaggttgccacgcacgtcctcggccaagggcgccagcttctgccgcagctcctcggcactggccgagatcctggccttgagctcctcggcgttcttcttcatctggaaggtcaggccctcaagctggtggttgagcttctcctgcgtgtcctgagcatagggagccaggctgcggcgcactccctccacggtctggtcaatcttgactttgaattcgtcagcgtagggcgtaaggcgtcccttgagctcctccacgttctggtcgatcttggccttgagctcgtcggcgtggggcctcagcgaggctgcaggctgtcggcgttctcccgcagcactctctccatgcgctgtgcgtagggggtcagctggcgccgcagctgctcggcctgcgtgttgacctggggtgcgcgtgggttccgcgtagggctncaagcggctgctgaagctctcgcaggttgtccccgatcttctg

SEQ ID NO: 318345 - DNA, 1087 bp, Homo Sapiens
  misc_feature (31)..(31): n is a, c, g, or t
  misc_feature (33)..(33): n is a, c, g, or t
  misc_feature (35)..(35): n is a, c, g, or t
  misc_feature (38)..(39): n is a, c, g, or t
  misc_feature (43)..(44): n is a, c, g, or t
  misc_feature (49)..(49): n is a, c, g, or t
  misc_feature (55)..(55): n is a, c, g, or t
  misc_feature (60)..(60): n is a, c, g, or t
  misc_feature (73)..(73): n is a, c, g, or t
  misc_feature (76)..(76): n is a, c, g, or t
  misc_feature (82)..(82): n is a, c, g, or t
  misc_feature (91)..(91): n is a, c, g, or t
  misc_feature (106)..(106): n is a, c, g, or t
  misc_feature (117)..(118): n is a, c, g, or t
cttcacgccccgcatgggccaattttgcttnantntcnnttgnncaccnggcttntgaantttcccgtaggcnccnccggcncggactccnccactgctgtccagncccacccagtnnccagtgattctgcagcccctcggtttgcccctcagttgccacgcacgtcctcggccaaggcgccagcctctgccgcagctcctcggcactggccgagatcctggccttgagctcctcggcgttcttcttcatctggaaggtcaggccctcaagctggtggttgagcttctcctgcgtgtcctgagcatagggagcccaggctgcggcgcagctcctccacggtctggtcaatcttgactttgaattcgtcagcgtagggcgtaaggcgtcccttgagctcctccacgttctggtcgatcttggccttgagctcgtcggcgtggggcctcagcgaggcctgcaggctgtcggcgttctcccgcagcactctctccatgcgctgtgcgtagggggtcagctggcgccgcagctgctcggcctgcgtgctgacctgggtgcgcagctggtccgcgtagggctccaggcgctgctgaagctctcgcaggttgtccccgatcttctggctcacctcattggcatggggcagcagccgggccctcagctcctccagctccttcccaatctcctccttcagtttctccgagtccttggccaggcgttcatgcagctcggtggcaaagggcaccagcttcttctgcaggtcacctgcgtaagtgttcacttctccaagtttgtcctggaagagggcattgagttgctgggtgagttcagatttctggagatgttccacggcctccttggcattgttgctcagctggctgaagtagtcccacatcaccgtggccacctggtcagcactgacctcagccctggctccggcgacagccaccagggccagggtcaggaccacggccttcaggaacatcctgagctgcttgctgggctggaggagtttcttgccacactggatcctccctacaatcaggggagctgacagagaggtcctcaggagagctcacctgcgctgca

SEQ ID NO: 318346 - DNA, 1641 bp, Homo Sapiens
cgttctgactatgtttgtacggtcacgctcgggccttatactcttaagtggtgcctggttcccccccttttttaaacccgggcctgaaggctcccacccgggagcagttttccgccgcccgcacaagcgacccggttccgccgcgaaatcaggtccttccccatcagagactattataggccaggttccctgtgccccatttccaagccggcggccaccagaacaccaaagaagggaaattatagtggagtagcagtttgtgaatctggagtccttggttcaatcacagaacaagtagggagaggagccaggacctaggccttcagtttttcagcaaggaaggactctcaggccatccttgcagttcagttaacaggaggaagcaaggatccccagagagctggagttctctgactctcggatagaaaggcaggacaatcggagcctggggttcacgtgagttaggaaagggagctctccacactggaatcgctgtagccgaggaggttctaatgggacgatcttcgacggtttcctttccagctcaaaagaaagcacaataggacggaggacagaggggctagtacaaagtgtccagaggaacatggtcatgggctcgtcaaccctggctgaagactcaagttgggctccaggccctgcaaactgcaagaccactctgcctggcacttggacgaaatctaggagggaggcccactctctaggacacagccctagtgctgctgccacatggtgattcctacaggtcaccacggcttcggcagtcccatcctccaccaggagcctgatgatggcctggcttatagctgtctgcgtagggcaagtggagcccaggcgagtgcactttccctgccggcagatgctggtacaataagcacacacccagaagagctgaaggctgaagacagagacgatatggcaagaggcagtggcctggaatggggactgaccaccctgcagaagttcagccaggtagatgtggggcaggggaatgctgatggtggtctcagggggaaaactcaggacctgcacataagtggatgaccggaaacaacaataaacattgtgagatctggaaacccttttctccaactggctgaagtggacccgggctcctggaagtagtcctagtgagggaggcaagtgtgggtcttctatatatacatccaggtgaggggggaattcacattcagcagtctcaagagcgactgttagcttcacacaccttctcatggcccccgtgttccccagtttcatccagagagacgccacaaggggttcacatagtgtccgtgacaaaatctcagcggagaaagacaccaaggaatctgtgaaaagcggggccaggagctacgagtcggtacacctgtcccgggtgcaagaactcaaaccagcggactgaagagccaaagaaaatgaggtgaaccttctgatcattgtcgtcatttccctggggctcgggcagcccccatccagtaccctccttcctctgggtgcccccaagccagctccccaacacatagaaactgagggcgggcttgggcacctctggacttgctcctggggggacacaaaaattacgcttcatgagggcctccttgtggcagagcaagaagagccggc

SEQ ID NO: 318347 - DNA, 1413 bp, Homo Sapiens
  misc_feature (85)..(86): n is a, c, g, or t
  misc_feature (141)..(141): n is a, c, g, or t
  misc_feature (190)..(191): n is a, c, g, or t
  misc_feature (219)..(219): n is a, c, g, or t
  misc_feature (402)..(402): n is a, c, g, or t
  misc_feature (416)..(416): n is a, c, g, or t
  misc_feature (550)..(550): n is a, c, g, or t
  misc_feature (915)..(915): n is a, c, g, or t
  misc_feature (952)..(952): n is a, c, g, or t
  misc_feature (964)..(964): n is a, c, g, or t
  misc_feature (995)..(995): n is a, c, g, or t
  misc_feature (1007)..(1007): n is a, c, g, or t
  misc_feature (1130)..(1130): n is a, c, g, or t
  misc_feature (1142)..(1142): n is a, c, g, or t
  misc_feature (1243)..(1243): n is a, c, g, or t
  misc_feature (1344)..(1344): n is a, c, g, or t
tcctttaaggctcgggcaccacccccgccgccccgcctcccgtgcggcctgggtctagttggcggcggggtcgggtccgcgcganngcgatggagctgcacatcctagaacaccgggtgcgggtgctgagcgtcgcccgtnccggtctctggctctacacccacccgctcatcaagctgctcttcctgcnncgccgcagccggtgcaagttcttcagcntgacggagacccctgaggattacacgcttatggtggacgaggagggctttaaagagctgcccccatctgagttcctgcaagtagctgaggccacatggctggtgctgaacgtgtcgtctcaaagcggtgcggcagtgcaggctgctggggtcaccaagatcgcccgttcggtcatcgcgccantggccgagcaccangtgtctgtgctgatgctgttcacttaccagacggacttcatcctggtgcgggagaggacctgtccgtggtgatccacacgctggcccaggagttcgacatttaccgcgaggtgggcggagagcctgtgcctgtnacgagggatgattccagcaatggctttccccgcactcagcatgggcccagccccacggtgcatcccatccagggcccacagaacggcttctgtgtcctcacactggaccctgagacgcttccagccatcgccaccaccctcatagatgtcctcttctactcgcacaggttccccagtgacctcctgctgaccagctccctcgggggagctgtggaggatggtgcgcatcggtggacagcccctgggctttgatgagtgtggcatcgtgcacagattgcaggtcccctagctgccgctaacatttctgcctactacatcagcaccttcaactttcgaccacgccctggtgcccgagaacggtatcngcagcgtcatcgaggtcctccagcggcggcaggaagncctggcttcctnaggcccatgggcaacagagcagcctccctgntctcccctcganccaggcttccaaagacttctctaagctatttccttaagctctggaacgagccccctgttctgctgggaaccctcgttccgctctctgtatgtaagctgcgtgcaggcaccggcttttacgcgnacacctgtgtanactcacaggtggagtgggcaggtgctagcctgactgcgtgtctgcccatgcaggggaacacggtgctcggcggcttaagcccccaacccattactccctgngcagcctcggcgtttgcacagtccctgcctgaggcctgagccattccccaaaggcttcctgggccagctgccccgctgacctccgttctgcctctggtggngttgccttccctggccaggtgagtcctgacagtgcctctccctcctggggcctccaaggaaagtatttt

SEQ ID NO: 318348 - DNA, 1057 bp, Homo Sapiens
  misc_feature (151)..(151): n is a, c, g, or t
  misc_feature (166)..(167): n is a, c, g, or t
  misc_feature (262)..(262): n is a, c, g, or t
  misc_feature (370)..(394): n is a, c, g, or t
  misc_feature (857)..(857): n is a, c, g, or t
  misc_feature (871)..(871): n is a, c, g, or t
  misc_feature (927)..(927): n is a, c, g, or t
  misc_feature (979)..(979): n is a, c, g, or t
  misc_feature (993)..(994): n is a, c, g, or t
  misc_feature (1000)..(1000): n is a, c, g, or t
  misc_feature (1038)..(1038): n is a, c, g, or t
ggatgcatattttaggaagtgaggaggaggcgcgggctggagctgcggcggggtctggggcgcagagcagcggcgggaggaggcggacacgtggcaacagcggtagcagcccgggcggcggcagcaacagcggcggcggcatcggcccganccgccggccgccctnncaccctcccgccccgcggcagccctagctccctccacttggctcccctggtccctctcgcttggccgggagctgctctgtgcttatatctctctntattctccagcgacaggatccggcgccgggcactgagcaccgccaccatggggaagggggttggacgtgataagtatgagcctgcagctgtttcagaacaaggtgatnnnnnnnnnnnnnnnnnnnnnnnnnacagggacatggatgaactgaagaaagaagtttctatggatgatcataaacttagccttgatgaacttcatcgtaaatatggaacagacttgagccggggattaacatctgctcgtgcagctgagatcctggcgcgagatggtcccaacgccctcactccccctcccactactcctgaatggatcaagttttgtcggcagctctttggggggttctcaatgttactgtggattggagcgattctttgtttcttggcttatagcatccaagctgctacagaagaggaacctcaaaacgataatctgtacctgggtgtggtgctatcagccgttgtaatcataactggttgcttctcctactatcaagaagctaaaagttcaaagatcatggaatccttcaaaaacatggtccctcagccagcccttgtgatttgaaatggtggagaaattgagcataaatgcgngaggaagttgtggnttggggatctggttggaagtaaaaggaggagaccgaattcctgctgacctcagaantatatctgcaaatggctgcaaggtggataactcctcgctcactggtgaatanaacccagactaagnntcaganttcacaaatgaaaacccctggagagaggaaattgcttntttcaacaattgtgtgaag

SEQ ID NO: 318349 - DNA, 2100 bp, Homo Sapiens
  misc_feature (456)..(469): n is a, c, g, or t
  misc_feature (2000)..(2020): n is a, c, g, or t
ttttacaaattcttttttattagtcaaaatcacaatcaccttgattaaaaggatgggacactccaccctcagcagaaaatgatacagtttatagaaaacctccccgcccctcccacaccccaattaaaaactacaaaaaaatctcccctccttccctacgatgtcatggtagtctgactcctccagtggcactgcagctctggagtggccagctcaccacagcaccctccacttcaccttggggagaggagggatgctggtggttaaggaggttaaaaccattagttccagtaatgccagttcccaaacatgcacttccttcctttcccccaaggtctgggaccaaggagaaagggaccgaaatgagcccagccatgaggagcaactcgaggagagaaaatatagcccaaggaggttagaagagttccaatatacctcctccctccccccacctcnnnnnnnnnnnnnnggcagtttagggtatttatcacaccaaaaatggttccccctcaggcctgagaaaaagaccaagatgtccagtcttgagggagtactgagaaactcagagctcatctatccttgagcctccattaatttcatctccagggcaatggctaaactaggtcccttttcttggcaacctgcactgtccagaactggagatggagaaatacagggcgaggacatcaggagggcaccccaggcccaggggtcccccctaggttccctcagtcctcgggtgggatgcgcagggcagaatacaccatcacccgactgtcctcctgccgtcggcctgcagaggggaagggaggtgagtcttgggcagggtgagagcagagcactgacacagggggagtcctggacacaacaagggggtccccaggtggtggggataagtgcagattcaaacccaccagtcactgactggctgaacccaggctgctcctggtaaagcttagagactaacggtcacaaaaggacaaagcaaaaccctggaggtagtggggtagaccgacgagaaggagacagagaatgtgggcaatggaacccgggctggggctgggctcagtcatgggcagtggacaggcaggtgggatctgtcaggcgatcagtccaggtagtcagtccttacacaagaagctgcgctgaatacttcggagggaccctccagctgtgatgaaggcccagagccccatggaaacagtgactgcatagatgggcagcaggctggcctcataccaggggttcaggaatgtcagtcccgatgtcagtaggtgactcccaaccaccaggcccaaagcccagtaccgtctcctctcacaggcatcaaagaacacaactccccaaaaggtatggagcaggataatggctgctgtcagaaaggctgaagtcaggaagtaatagggtgagtctccatggatcccaaccacacctggcccaagtgcatcagccaaaatattgataacagagaagacaccactgatgataccgaaggagagaccagaaacataggccatctggcggatggagatgggtgatcttccgtcctcactcagcgatgctaacccctcatctgccttcttaagcagcttgtagtaggcaaagcggaacacctcctgtagaaggacagagacagcagcaccaaaaatcaggaggccgtactggagccgggcatctgaccggtcggtcacatggaccaagatgaaccagaccacagaggccaggagcagggagaccagccagaaaaatgcccctgcgaccaggatgataacgcgaagcgggtccccagccacagtgatcaagaaaagcgcgaaggccgggccgaacgcgacgaaagtgcagccgaaaaacaccgcagcccccatggctggtcaggtgggaaggggggtgggggcctgaccaggacaggcaaatgggaggggcgcgccagctggggagtccgcgtggggtggcaacgcgaccccacgaggggcgcggtgcaatgtcacccccagaccccnnnnnnnnnnnnnnnnnnnnnccgataccccaaatgaaggtccgcgccacttcctctacggaagccgaagaccagtaggccaacagtgattccctatagtg

SEQ ID NO: 318350 - DNA, 1589 bp, Homo Sapiens
  misc_feature (16)..(16): n is a, c, g, or t
  misc_feature (215)..(215): n is a, c, g, or t
  misc_feature (231)..(231): n is a, c, g, or t
  misc_feature (338)..(338): n is a, c, g, or t
  misc_feature (341)..(341): n is a, c, g, or t
  misc_feature (354)..(354): n is a, c, g, or t
  misc_feature (358)..(359): n is a, c, g, or t
  misc_feature (361)..(361): n is a, c, g, or t
  misc_feature (368)..(370): n is a, c, g, or t
  misc_feature (372)..(372): n is a, c, g, or t
  misc_feature (377)..(377): n is a, c, g, or t
  misc_feature (397)..(397): n is a, c, g, or t
  misc_feature (574)..(574): n is a, c, g, or t
  misc_feature (583)..(583): n is a, c, g, or t
  misc_feature (617)..(617): n is a, c, g, or t
  misc_feature (619)..(619): n is a, c, g, or t
  misc_feature (636)..(636): n is a, c, g, or t
  misc_feature (647)..(647): n is a, c, g, or t
  misc_feature (650)..(651): n is a, c, g, or t
  misc_feature (772)..(772): n is a, c, g, or t
  misc_feature (1207)..(1207): n is a, c, g, or t
  misc_feature (1391)..(1404): n is a, c, g, or t
caacataatgctttanctcttaaaaataaaaataaagtactaattctatatacatcacaggtaccatacaaaaatgtatccaaagtttctattgctaccaaagtgttctaaattaaaacaagttacagaaagcccctcattgtaaacaaaagattacaagttataaaatcaaagtacacacaggccagaatcatttatacaatgcaatgcattcngctcccaagccaagtngaatttttatgtgcctgtataaaaatgcatatcaatatacctttgcaaatgtatttttcattataaagcaaatgaatacactttctacaataaataatccgctgggnggnacacctgcggggnttgnngnggggggnnngnggggngcggggacacacccaccggnggtcacgggcagcggagtgtttttggtgatctgcaagtgatgtacacagcataactttattctcccctctttccacaaagtaccattcaaaataatgtcattttctttcttaaaatacacatttgtcattgtaaatttacatcccgtcttattaaataagtggtactctgtgaaaanaacatgaanaaaaaattattaaacattcaaaagtctttaagananagctacatatcataganagtgacgccanaannacggcctggggacgtgcgacagacgcactgggctgcccggacgtgcccaccccactcacagcgcccagacggagatgggttcctagaaaacttggaaataaaacctcccccctccccgggngaaaaagaattaaagagctataactaaaaatcagaataagttaagttttggacaatatacaaacatgtacagcttatcaacactatggacaagacccgcgctggcggccgggctgtcagtccatgtcactgaggtcgctggtcggctccccgtggacgcggctcaggtggttcatggcgcggtcaaaagcgatccgcacggccttccggatgctggaattcctcccttccatcatctttaacttgtctatagtttcgtcaataccaaggggaaccattttggacttaggaagccactgccaacttctcttattatcaaaaaagagaacgaggaacagcttctcatcagacttggtctgcatgtgctccccaatcttcagcacgtacaggggtggggccgggatggtgacgccgttgtggtggccaggcacacggngcatcttggggtcgatgatcagtgccgggtaggaggggtagccgctgcacttggcccacaccaccttcagaggctccagcaccgaggcggcggaatcagtggagatccacatgctgctctggaccgcttctgcggagaggggcgttagcaaggacacaggcgtttatcggacacggggcaccgnnnnnnnnnnnnnnaaaaggtgcagcaacaagggtgggtttccccgagcaccggccaattttccaagtctttttttaagccaactccggtaaggaaccattgccttcccttgtgggggatcaaggcccctttggtttcacccactgaagccttgagagaccccactggggggccaccacaggcttcttcccacggaccc

SEQ ID NO: 318351 - DNA, 1807 bp, Homo Sapiens
  misc_feature (31)..(31): n is a, c, g, or t
  misc_feature (40)..(40): n is a, c, g, or t
  misc_feature (49)..(49): n is a, c, g, or t
  misc_feature (91)..(91): n is a, c, g, or t
  misc_feature (487)..(487): n is a, c, g, or t
  misc_feature (1408)..(1651): n is a, c, g, or t
ataaaagaattgtccaagtcaaaacagcccnaaacaggcnaggggcttncaaacccccaggcacccgggtccccagagtctcccaccctgnaactggccatcctgtgaacaatggtaacgcacacaggtcaatcggctaagaattaggaatctttgggcttcttctttttgtttttctaattctatgatctttcgttcttgttctttctgtttcagtcgttcagcctccatggacttttgcttctggagttgttgcttattgtgtatttctcttagttccttcagctgattattgaaaatatcaatctcctgtagttttgatctagtttctttctccacttcatccagttggtctcgtaggtgctgccgagctagttcttttgcttctaaggctcttttaagtgtaacaagtgaatctctgtgcaaactgttctgctgaacttgttttaattggtcattgagtatctgttttctggaataagtcttncaagcatttgctgagattcctgtaattgttgctttagatgggtgatttcggcaattctccactctctagatttgtttgtgctctcaatttcttgcctttgggtggtcaatcgacatctgatatcttgaagtttcccttctagttgatgctttttatcatttagagcttctaattcacattccaaagtctttttctttgctttcaagtacaactatgtcctcttgttctttgtttctttgatttagtagttcttgccttcgattccgttcccactcaagttgtcgttgcctttcaagttcccgttttgcagcctctcgcctgtcaatttctttcctcctctcctcctctctctgccgttctagctcccgctgcttttccagttgcttctccagttccagttgtcttttgcgctcttgctcctggcgctcacgctccttcctctcctgctccgcccgctccagctgggccaggcgctcctgctccttgcgctgctgttccaggagagcttgccttcgtttctccagttccaggttgccacgttcaaagttctcccgcttcttatcttcaaacgttacaggtaatttcttttctaattgttgttgttcatcttctaaaactggttcctctggtagcctctgatctacagatgttgagcttatgacagatataccactgccagatcgaactcttctaaaagaaggtggaatgtattctggaggcaggacaggtggcagtggttggccagacatagctacatcaatgaggtgcattgccaggataaattcctctgctgtaagttttccatcttgatcaatgtcagaaagattccatattgaagccagctgagcctgtggtaaacttgactgcataagaatagttcttgcttggggaccttcagtgggccgggtgtggtggctcatnnnnnnnnnnnnnnnnnnnnnnnnnnnnnnnnnnnnnnnnnnnnnnnnnnnnnnnnnnnnnnnnnnnnnnnnnnnnnnnnnnnnnnnnnnnnnnnnnnnnnnnnnnnnnnnnnnnnnnnnnnnnnnnnnnnnnnnnnnnnnnnnnnnnnnnnnnnnnnnnnnnnnnnnnnnnnnnnnnnnnnnnnnnnnnnnnnnnnnnnnnnnnnnnnnnnnnnnnnnnnnnnnnnnnnnnnnnnnnnnnnnnagagtgaagctccatctgttaagtgtccactcatagttttgtcatgactattgaataattgcctgtatttcagtcttgatgactgaggaacagcccactctgccactggtgggacacatgatctattctgctgtgggtacttctgcaccaaccatc

SEQ ID NO: 318352 - DNA, 1578 bp, Homo Sapiens
  misc_feature (416)..(416): n is a, c, g, or t
  misc_feature (1248)..(1260): n is a, c, g, or t
  misc_feature (1280)..(1336): n is a, c, g, or t
  misc_feature (1339)..(1339): n is a, c, g, or t
agaatttaagaagtgcaacatggccaggggctgcctctgctgcttgaagtacatgatgttcctcttcaatttgatattctggctctgtggctgtgggctgctgggagtgggcatctggctctccgtgtcccaaggcaactttgccaccttctcccccagcttcccttcgttgtctgcagccaacctggtcatcgccataggcaccattgtcatggtgacgggcttcctcggctgcctgggggccatcaaggaaaacaagtgcctcctcctcagctttttcatcgtcctgttggtcatcctcctagcagagctgatcttactcatcctcttctttgtctacatggacaaggtgaacgagaacgccaagaaggacctgaaggaaggcctgctgctgtaccacaccgagaacaacgtgnggctgaagaacgcctggaacatcatccaggctgagatgcgatgctgtggtgtcactgactacacagactggtacccagtgctgggggagaacacggttcccgaccgctgctgcatggagaactcccagggctgcgggcgcaacgccaccacgcctttgtggagaacgggctgctatgaaaaggtgaagatgtggttcgatgacaataagcacgtgctgggcacggtgggggatgtgcatcctcatcatgcaggtaagaggggcgtcccagcagcctcacccaccctgctggcctcagccgcagagggaaggaagcacagagaagtgaaagcagtgttggtacacggcgggagggtctggaattcatcacagctattcaagcttagcagctgtgcctgccaccgtttccgcagagctctgatatgagagcacgtgtctactcagcactgagagtggtgctcagggctgcctgtggccaggcccaggctgggatattgaagctggagtcaacccccgtgggttcccccagttctgcccaaaccttgagctcagagagccatgcaagacacacacggtgtcccccggtcaccatctttacagcctgtgcacatggcgcgctctctgtggtgaccgtgagaccacaccgggcttccttctgcctcctgcactcctctgggtccccggctcctttgaggattcaggagggaaggggcacaaacgagtagtgacgtggtcctgagcacacatcactggaaagacagccctgctgctgccaagacatcgcaccatgtgttccacaagcagacaagagaggcttgacaggagtcctttannnnnnnnnnnnnaagagacagggtctcacttnnnnnnnnnnnnnnnnnnnnnnnnnnnnnnnnnnnnnnnnnnnnnnnnnnnnnnnnntgngctcaagccatcgtcccacttcagcctctcaagtagctgggactacaggcatatacaccaccatacctgaatgatttacaactttttttcaaaaacagatggagtcttcctctattgcccaggccgatctcagccatcctcccaccttggccttctaaagtgccaccgtgccccgctggcctgagctctcgaagatccctgccacctcccactccccaacttggctcctgggagccccc

SEQ ID NO: 318353 - DNA, 2068 bp, Homo Sapiens
  misc_feature (98)..(98): n is a, c, g, or t
ggggggagaatccaaagcccctaggtcaaggcccaggattctccttaggaaaccagctaaggacccatgttcactttacctaactggggcccgcgccnccaaaggaaatggtttaggaaagcttcttggagggcccgagggcggccgaacaagaggtatgtaggcgggcgaagtagcttggcgggaaagagaattttatttggaatgaaaatatagagcccaccctcccgcctcctttggggagggagcagagggctgggcagtggtcggggagatggtccctcagaggtcgaggagctcgcctgggcgtagacatcctccacaggaacagtgaggaaagctgggcgctggcttcggcctgggcctgggacgggtgggggtgggaactgacccctgcgctgcctcagaggctctgggcagccagctagcccggtgcgacccgctggcagaagctgagtgggaagggggcggcggaggagatgaaggtggcgtgtggctgtggccctacgcatccccgttctccatgcggcccagctgctcctccaggcggcagatgcggtcgccctgctccttgaccagcgccctcagggcccgcagctcctgcatcacctcctccagcttcccagcctccccggctctggccaggctgccgctgggggtggcatcagcagcagtggtggtggaggcgggggcccctaggtgggaggagcccggggccatggcgggccggctgtcagacaacacgttgcgccggctgatcttcaggtcccgctgcttgctgggcacgtaggcctcccgcagtgagatgaggatcgggtcggcatcccgcccgctcacccactcctcagcctccagggctgcctcgggcccggctgtgtcggggtacagatcatcctggaagaggtccgactttcttggcacagtcatgacgatgggctcacacttgcgctcatgcagtttgtagaaccgggcgatctcgcacttgctgacctccaggccccgcttgggcatgctgcccataccccgctgcggctccttgctggtgaacgtgttcaggaagtggatgtagggaggctcctctgtgatctcaaagtaccggatgctggagtcacccttgccgcagacgtagaccacactggtgtcggggtcgtagaagggcagcagggccccgttgctcgagtccagttcctgcagggccatgggttcctcgaggttttctgggtcccagagcgccagctgccgctcgctcattcggctgaagcctgtggtgaacaccttgccatctgccaggaagatggcccgcatgggccgggccccctcatgagccttctcccgctctgccaccagggtgccccgacgggggtcgatgatgcgcacgctcttgtccttgcatgctgagcaaaacaggctgccattgtggttccagctgacattgtagatgaggtcagggtgcaggctgtccaggcggtacagctcctccgctgtgcccacattccagatgagtaccacgttgtcgcagcctgcactgagcagcacgtttcgggccgtggggtgccaggcgatgatgcccactcgcttggtgtgcccctccagtaccaccaccggctctgtcagcggggaggtcagcccgttctctgggatctgccacaccatgaccgtgcagtcctccgagccgctggctatgacttcgtcgttgtgaggacaccagtcgatgtccaggacaggtcccgtgtgcccacacaccgtcgggtaggccttgtcaatgcggcccgtcttgcttagggggagcaccagaaaggcaccccctccactggcctccacaatcaccgccaggaacttggggttgacggcgcagaaggtgctgtcccaggtaacacgggacacgcgaatgtcctcatagcactggtcgttcttgaccggctgcccgaacacatgccggaatttgctctgccggaccactttgcggaaggacatgtcgggggcaccgggggcgcagggggctgcggcaccggcttcgggcggctccggatcccggcctctgggaagcaggaagcaggattcaggaagt

SEQ ID NO: 318354 - DNA, 2412 bp, Homo Sapiens
  misc_feature (2359)..(2367): n is a, c, g, or t
aggctggctggacatctcctagggtcactgtgcctctcagctagttggcgggggtgctggactggactcttgttcactttaccttctgccaaatgcagagagggaggccagtgtcaagggtcggagtggcctggctcttagcactgaccgaccattgccatttcctggcctcgctaggcccaggagaggagggaggcaagccagtcgggtttcctggagcaatgggtgtgccagccctcagcatgactctgccaagcatccagaccacaaatgcaggaatttggctgaggagcagctttaggtatggattgatgactaagtcaagctacttcctgagcttctctcagatttccaagagccagagatgaattgtgctgcatcttgccccaattcttaggatttcttttcctccgccactgcagtgattgttagaggtagttttcttgaattaatattaaatcacagttccagcccttgttattcttgtccttagtcctccagggggagctggggttgcagggcaacagtacagtcgcgcttacgacctggctagaacacaaggtcagatgataaacagaagcacaggaactcagcccatggccgcaagctggtcaaggcctgctcactgtaaacctggctctgtaccattgagtttaacacaattttattagaaattagtgtttgcttccatcacttatgctgagcaaccaaatattacagttatgtgataaaggaaaaattctttcctgcccaggacctgcgccatcctttaggccgaccttggtcacataccaaattcaataaaacccaatactggcctgtgttgttaacagcaggctgccaggtttctcagaaactgacaagaaaatctgaccttcatccatactttgtttacttacccctgggctgcttggagttgaaaaatgcacacagccaagagttgctttctgaatagggctggaaactttcaaagggaaacccccaaacttttaagtcacaaagtctgattaaagaagctaagatcatgtcagtgagttcaatgttagtattttccttaagaccaaggagagattttcagtcagagaagataaatgcgcagtgccagactactgtgctttctcggcaaaaaagactgagacactgaggatgtgaatgtcaaagtagtaagcagggactaaaggggagggggagggcaaaaggcaagcatcacaacacctcagtggggagctgggaatttgagtgttaaaggacctcaagagggcagctgagaaaataggccagtggtctcaggctgacgcattccagtctctgtgggaaagtcataaagccaaagcctgaatttggccaaagaagtggatttgtctttatcttgttacctcaatgagggctggaagaactagtagctgatcaccaaggtacctgacctgagagtcttagtgctgtttatacattcaagactgtgactaacataaaatgcctaattagaaagtcacatttcccctgtcccgccgtcatgtcacttcaggtccttgtgtctaaccctgggtctggcatttgcccataggctctgtggcatcagctatcataagagtagtcaagagagatgaacttgataacctgtgttctctccaaagagcagaaagtgggtactatacgtggctacgttgctttgttaggctggcagaacagtccctccctgacagcattcctttggaaaataattcagataagctgaattctggtttggccaagccaaacaaaaaggaatgaaaaccaaagccctaaagaggaactcacctcctggctagtgcttggcatctccatggctgagttacccaacaaggagtgaaggccttcagggtgcttcggttgctcctgtcatcccgcgctcagagacaccactgggcagaaccgccatcccagccagcaccaaccaagagcatagatggtgtgggcagggagtagatgtgtggccaagcatgtgccacctctgtaggggctgctgggagtttgctgtcctcagctgatgggcatgccagccaacaccatgcagtgcccacgggctccacggtcttcctgccgtggctcatgtttctggcccatgtgacagctctttggctttaccgtatgtgaggacagcatggctggaagcccaagggtactcaagagaatcacaaagaggcagtcgtgctagacctaggagtcagtgatgtgactatgatgtggggggtaaaatgtcctttcttacaggcaccctgtgaggactgtccgttccaacttaaaccattccttcccttcttggtgcacttttgaactgttgcccacagctggcaaaccacgagtgctctgtcggatgtgnnnnnnnnnattggctccctctttatccccttccttaaatggattctggaaggg

SEQ ID NO: 318355 - DNA, 1589 bp, Homo Sapiens
  misc_feature (627)..(627): n is a, c, g, or t
  misc_feature (631)..(632): n is a, c, g, or t
  misc_feature (641)..(650): n is a, c, g, or t
  misc_feature (680)..(680): n is a, c, g, or t
  misc_feature (701)..(701): n is a, c, g, or t
  misc_feature (715)..(715): n is a, c, g, or t
  misc_feature (729)..(729): n is a, c, g, or t
  misc_feature (732)..(732): n is a, c, g, or t
  misc_feature (736)..(737): n is a, c, g, or t
  misc_feature (904)..(904): n is a, c, g, or t
  misc_feature (1191)..(1191): n is a, c, g, or t
  misc_feature (1411)..(1411): n is a, c, g, or t
tgtgactcatcaaagtttattatggcaattaattacacaaacatacaggcggtcggtcttccagctcataagcactcataccagtagtgtccattagtgatttctctttataaataacttaggagaagcaagcacatttggtaaagaaccggcagcgctgacctagcgtcacgcggatggcacgtaggccggggaggggcaggcaccagaaggtcaaggtccctccttggccccagcagccccgggcccaccagatgctgcgtcctcaggtagtggacatttcaaggcacgtacaacttcctaagcaatagcagctccaggctcttccctgagacctggtttacctctggaacaaccaagttaacactcatcacaccccctttgtctattgtattcattcttattactgaacatgccccaaaccccacagtgcagggggctgcatattaaacagagacataatccccaccctttacattctgaagacagggaggtgtgaaaaaattgcccctaatgtagtgatggtgttttttaaaaagcaccatttgggaagtaaagttagggcctcttttgatgcctgtcttaggatggacactgggggtgggaggattacatcaacagagtganaccnngaggtgaannnnnnnnnntgattgtgaatgatatttaagggaataaangagtggatggatgcgtgggcnttgggcaaagttgncctaaagtggggantcnagannagagaagggagggtggctggggaggtgacctggccctccaatcctaaacaagccccaatgtgaccacaatctccagggctagagctgcccgcttccctctggccagagggcccaaggcagccccctgggttctccaaccactgcaagcaaggtctggggacaacctntgacaacccccagccttcttgctgggctggcgctgctgcgactcaaataggacataggacaagcttgtctgacatcagctactggagttaaattatggctttataggactcaaacctgttgtttttcccaactctgttctctccctccaatccaacccctgccacagtgcatgggcaggctagccttgaatggactggacagacaccaacagctgcatcccttggcatggggctccatgtcaaatatgccaaaccccaggggagatggagggggctggagacccggngcctcctcatagagataactctgcactgggttcaaatggccctgagtgcagccgcaagtagatgctcataaatgcgcacatgcgctcactcacacagacaccggcgagaggtgctggactccagcctggctagcaccgctgtagccaggcactgaaaggaggggcttccaggaggacctctggccagaaggccagcaagtgccatgaccagtcacaccgnccagtgcccttgttcctccaaggcctttgggtgccgacgcaagttcacagggagcaccaacggcacttccagttgacccttcgatcttgggcgatggctggcccaaaaggttgaccgtgggtgggaactaagggaggggcccgaggcccaggaattgggttttaaacccaaggccagg

SEQ ID NO: 318356 - DNA, 1692 bp, Homo Sapiens
  misc_feature (19)..(19): n is a, c, g, or t
  misc_feature (91)..(91): n is a, c, g, or t
  misc_feature (381)..(430): n is a, c, g, or t
  misc_feature (501)..(516): n is a, c, g, or t
  misc_feature (1194)..(1194): n is a, c, g, or t
tccaaaagcaacaacgatncctgggtcattcacaggcaagtctcccttcaccagctcagaggtgagccactctcactgtaactctgccttncggcaaggaacctactaggtcctgtggggtctcctgggaccaggtgggttcctagttcagccccgtctagactaacttcaaatatagtcccctgacagtgtattttttccagtcagccaaatcaccgttcatttttacaatggtttttaaccattacatttctaaggcaaccaacgtagtcctgtgtcagagcagagtttcatcaaaaaagcacaaagaatgttgctaatcacaggctgcctagcactttcctttcccttcagagaaggagtaactgttttataggtatnnnnnnnnnnnnnnnnnnnnnnnnnnnnnnnnnnnnnnnnnnnnnnnnnngtttttccctgatactggaaattctttgtgaactagccacgctgatttctgctgaaccttttttttttttnnnnnnnnnnnnnnnnggaagaaagaaaaggagccacagacgtgtccaggtctggaaggggctgaccagctctaagcacatccaccttgaactctgacacaggtaacgccaaaatgaggccaggacctgaccaagccaaaaaagcagcaaaggatcagatggggtccaatgtgtagatccagtagagaagaatgtcggaaattctaaatacacagttggacatccttcaggcttgttttagattcttagttcctcctgatctcttttactattgtcaacaattgtcttaaaaaaacttctttaaaatcaacatgatttctaccctttgctccttagcaaggcacaaagcctcttacatggggagtagaagtagggggcactttaaagggatgcccaaagggtggcagaagcaactccattgtggtgacgtggaaacgagcttgccagtgacagtctgagcagatgcctgacacgcacgatggagctggggttttatacataacgttcgttttggtttcaacacctccgacgcaagagggcttccaggtccagtccttcacaccccaggttgcagctgaccaactttccacaggatgccaccaggctgggaaacaggttttacctgtatttgatgtcgaatactgtggagtcctcatcttcatcatcctcttcatttagtggcgccatttccacntcgctctgctggagtggtgatgatatcatacttgcgtgtcttctttaacctctttcccgacctgaagacgcgcagcagcaggcaggcgatgaggagggtggtaaaggcgaacgccacgatcacggctgccttgagggtgggtaggtcgcggaggaggatggaaatgcgggtcaccaaggcgtcgccgctgctgttggagctgccgctgccgcccgccgccccagacccaaaccgggtggtgttcccgggccccgggccgggcggtggccgcgactcgcgctcgggttcgggcgcggcgcggagacggactcggctctgctggcgcgggcggcgggagcggccaggagcgcgagcagcagcagcggcaggagcggggcgggcagcggcacggcgcgcatagtgcggtgggtcggcacaggatcgggcagggcgcgcgcggctgagctccaggatccgcaccagcacggaggcctgcaccgggggatctgcggcggaggc

SEQ ID NO: 318357 - DNA, 300 bp, Homo Sapiens
tcctcctcatcgcctgcctgctgctgcgcgtcttcaggtcgggaaagaggttaaagaagacacgcaagtatgatatcatcaccactccagcagagcgagtggaaatggcgccactaaatgaagaggatgatgaagatgaggactccacagtattcgacatcaaatacaggtacagggtggagacagaggcttcctcctgggcttggggcagtgggttggtgggacctcgaggtcaggcatggtgtccatgtgttcttgttttttagtgaagtgttgggtcctggggtgttctgcacgtgg

SEQ ID NO: 318358 - DNA, 1550 bp, Homo Sapiens
  misc_feature (181)..(181): n is a, c, g, or t
  misc_feature (227)..(227): n is a, c, g, or t
  misc_feature (302)..(302): n is a, c, g, or t
  misc_feature (634)..(634): n is a, c, g, or t
  misc_feature (677)..(677): n is a, c, g, or t
  misc_feature (758)..(758): n is a, c, g, or t
  misc_feature (1113)..(1113): n is a, c, g, or t
  misc_feature (1277)..(1277): n is a, c, g, or t
  misc_feature (1335)..(1335): n is a, c, g, or t
  misc_feature (1431)..(1431): n is a, c, g, or t
  misc_feature (1444)..(1444): n is a, c, g, or t
  misc_feature (1450)..(1450): n is a, c, g, or t
  misc_feature (1513)..(1514): n is a, c, g, or t
  misc_feature (1547)..(1547): n is a, c, g, or t
ggggctcaccgcaccaatttttcacactggccttcagcaaccgggctctccaggacaaggtttactgccagatcctaaacaagctaacgccccacttccaacaggcacacgaaagagcgggggctggcaactgcctgtggctgtgcacgggcctcttccggcccagcaaggggctgctgcnccatgcccagagtttatagacactcggagggggaagctgctggccnccgactgcagccgccgaatccaaaaggtcctgaggacggggccccggaagcagcccccgcaccaggtggaggtgnaggccgcagagcagaacgtctcccgcatctgccacaagatctacttccccaatgacaccagtgagatgctggaggtggttgccaacacacgggtgcgggatgtgtgtgacagcattgccaccaggctgcagctggcctcctgggagggctgcagcctcttcatcaagatttcagacaaggtcatcagccagaaggagggagacttcttctttgattccttgagggaggtgtctgactgggtgaagaagaacaagccccagaaagaaggggcccccgtgacgctcccctaccaggtgtacttcatgcggaaattgtggctcaacatatctccnagggaaggatgtgaatgcagacaccatactccattaccaccanggagctgcccaagtacctgcgcggattccacaagtgttcgcgggaggatgccatccacctggcgggcctcatctacaaggncccagttcaacaacgaccggtcccagctggctagtgtccccaagatcctgagggaactggtgcctgagaacctcacacgcctgatgtcctcggaggagtggaaaaagagcatccttctagcctatgacaagcataaggacaagacagtggaggaggccaaggtggccttcctgaagtggatctgccggtggccccaccttcggatccgccttcttcgaggtgaagcaaacctcggagccttcctacccggacgtcatcctcatcgccatcaaccgacatggggttctgctcatccacctccaagtaccaaggacctgctcaccacctatcccttcaccaagatctccagctggancagcggcagcacctacttccacatggcgctggggagcctgggccgtggcagccgcctgctgtgcgagacctccctgggctataagatggatgacctgctgacctcatatgtgcagcagctcctgagtgccatgaacaagcagcggagctccaaggccccagccntggccagcacctagcagcggatgctggcgtgtctgctcaggcgcccttcccgacctcntagcctggcggcaccttcccaggccctctcaacccagggcctgtccttggcgggcagccttccatgctgccccccatacaaagcccactcagcccngcaggcggccccntctgtncctgggcgctgcccagggaggccaaaagacgggcccagaatggggtcgggagtctcggacccnncaggctattggtggatgactgactgacaggacncct

SEQ ID NO: 318359 - DNA, 1645 bp, Homo Sapiens
  misc_feature (304)..(312): n is a, c, g, or t
  misc_feature (537)..(537): n is a, c, g, or t
  misc_feature (625)..(625): n is a, c, g, or t
  misc_feature (1105)..(1105): n is a, c, g, or t
  misc_feature (1199)..(1199): n is a, c, g, or t
ccccccgcccctttcttaaagaaagggggttgttaccccccccaaagggtggtttgtggcccttttgggaagacccccccggtggggggcccctgttagtgggcgaaaaatttcttctcccccaagggggggagaaaatatttttaaaaggcctctcttaaaaggggaaaaaagccccccaaaaaagggccacaaggcttctttgggggggccccttccggaaaaaagttattttttaaccccagtttttacaaagacacgggggtttttccccccagttgggttgaaaagttggcctttgggnnnnnnnnnggttgtcattccggaaaactgggtcttcttggggccccccttccccccattccttttttcccctttgggaagggaaagcttttggggtgggccaaggcctggggcccctttcctccctgcctgagggctacccaggttccccaggggccactggggcttccacaagcccctgaccctgtgggctgtggggcctgcagaagaacgtcagctgcctcaacaccagcnctggtgatcctgatgctggcccgacggaaagagcggctgcccctgtacctgcggctgctgcagcggatggagcacagcaagaagtacnccggcttcctgctcaacaacttccacaacctgctgcgcttctggcagcagcactacctgcacaaggacaaggacagcacctgcctagagaacgtgagtgccccacccctcaagggggtgatgggtgggccgcggacccagggcctctcagaggggtgtcccggtgctgggcttgacctgggtcctccaggcgccccccagcccctccctctttgcccagagctcctgcatcagcttctcatactggaaggagacagtgtccatcctgttgaacccggaccggcagtcaccctctgctctcgttagctacattgaggagccctacatggacatagacagggacttcactgaggagtgaccttgggccaggcctcgggaggctgctgggccagtgtgggtgagcgtgggtacgatgccacacgccctgccctgttcccgttcctccctgctgctctctgcctgccccaggtctttgggtaancaggctttttgggagggaattcctatgaatcccttggtccccctgggtctgagggccctaggtcatggagagcctcagtccccataatgagtantagggtaccatgcccacttttccttcagaaccctggggcccagggccacccagaggtaagaggacatttagcattagctctgtgtgagctcctgccggtttcttggctgtcagtcagtcccagagtggggaggaagatatgggtgacccccgccccccatctgtgagccaagcctcccttgtccttgtcctttggaccccggccaaagcttctgagccctgggcaggggtggtgggtaccagagaatgctgccttccaccaagcctgcccctctgcctcattttcccgtacttcctctggttcctgttgcgtcattgggctggctgggtttaatcccaggggcgttactcccaccaaatggtaggagcccttttttcctcccttaccctcgagggcaactggggaagccaggtgcccctgcccctgccttttggaagtgtgaggcg

SEQ ID NO: 318360 - DNA, 886 bp, Homo Sapiens
  misc_feature (25)..(25): n is a, c, g, or t
  misc_feature (176)..(176): n is a, c, g, or t
gagctcacacaggctaatgctaaantcctcgtacctctgggtggccctgggccccagggttctgaaggaaaggtgggcatggtaccctgtcctcattatggggactgaggctctccatgacctagggccctcagacccagggggacccaagggcttctaggacttcccttccccanccaagcctgtacccaaagacctggggcaggcagagagcagcagggaggaacgggaacagggcagggcgtgtggcatcgtacccacgctcacccacactgggcccagcagcctcccgaggcctggcccaaggtcactcctcagtgaagtccctgtctatgtccatgtagggctcctcaatgtagctaacgagagcagagggtgactgccggtccgggttcaacaggatggacactgtctccttccagtatgagaagctgatgcaggagctgttctctaggcaggtgctgtccttgtccttgtgcaggtagtgctgctgccagaagcgcagcaggttgtggaagttgttgagcaggaagccggggtacttcttgctgtgctccatccgctgcagcagccgcaggtacaggggcagccgctctttccgtcgggccagcatcaggatcaccaggctggtgttgaggcagctgacgttctcctgggtcagcgtctgcacgtggatgatgttgatgaggcggaagaggaaggacatctgcgtgggcacctgggatatgtaggcgagcaggcggcattcagacagtacctcggcaactttcatatccacctggttttcaaatcggtccagggacagagtgacacagcgcaccagcatgttggagtccaccagggagctgttgatctgcttcaggaatacctggaactttgcatcggt

SEQ ID NO: 318361 - DNA, 963 bp, Homo Sapiens
  misc_feature (136)..(152): n is a, c, g, or t
aaccgctttctttcccggggtataccccatccacaccccttgcccacagggggtttcaaggaaagcccttgttgccttggggtccccaaaagggcccagggggaccaaggggaggggctttgggtttccccagatnnnnnnnnnnnnnnnnntccacccccattttgttttctttccccccccttttgggggatctggatttgacaagcccaaagaaaaacccggccagggaggctcaccacaggaggcttaatgctaaaatgtccttcttaccttcttgggtggcccctgggcccccagggtttctgaaggaaagggtggcatgggtaccctgtcctcattaggggggactgaggctctcccatgacctaggcccctcagactcaggggggaccaagggcttctagggacttccctcccaccaagcctggtacccaaagacctggggcaggcagagagcagcagggaggaacgggaacagggcagggcgtgtggcatcgtacccacgctcacccacactggcccagcagcctcccgaggcctggcccaaggtcactcctcagtgaagtccctgtctatgtccatgtagggctcctcaatgtagctaacgagagcagagggtgactgccggtccgggttcaacaggatggacactgtctccttccagtatgagaagctgatgcaggagctgttctctaggcaggtgctgtccttgtccttgtgcaggtagtgctgctgccagaagcgcagcaggttgtggaagttgttgagcaggaagccggggtacttcttgctgtgctccatccgctgcagcagccgcaggtacaggggcagccgctctttccgtcgggccagcatcaggatcaccaggctggtgttgaggcagctgacgttctcctgggtcagcgtctgcacgtggatgatgttgatgcctcgtgccgaattcgccaccccaccccggtt

SEQ ID NO: 318362 - DNA, 1569 bp, Homo Sapiens
  misc_feature (112)..(112): n is a, c, g, or t
  misc_feature (114)..(114): n is a, c, g, or t
  misc_feature (1448)..(1448): n is a, c, g, or t
  misc_feature (1499)..(1509): n is a, c, g, or t
  misc_feature (1531)..(1531): n is a, c, g, or t
gcggccccatcagctggtaggaaatggcctgtgagtcagaggggcagtggagtcggcggcgcggaccggggcggccccggggagggaccgtcgcagggaggggcgcggcagngnctggggggctgcgggcgccagggcccgctagtgttgcacacgaagctgaacagcgaagagcccagtgcctcccctgttcctacccctgctgtcagccgtaccctgctgggcaactttgaggaatcattgctgcgaggacgttttgcaccatctggccacattgagggcttcacagcagaaattggagctagtgggtcatactgcccccagcacgtcacgctgcctgtcactgtcacattctttgatgtttctgagcaaaatgccccggctcccttcctgggcatcgtggatctgaaccccttggggaggaagggttacagcgtgcccaaggtgggcaccgtccaagtgaccttatttaaccccaaccagactgtggtaaagatgttccttgtgacctttgacttctcggacatgcctgctgcccacatgaccttcctgcgccatcgcctctttttggtgcctgtgggtgaggagggaaatgctaaccccacccaccgcctcctctgctacttgctgcacctcaggttccggagctcccgctcaggccgcttaagcctgcatggagatatccgcctgcttttttcccgccggagcctggagctggacacagggctcccctacgaactgcaggctgtgaccgaggcccctcataatccacgttattcacctttgccctgattgccagcactctgaacccatgcgggctaatgacctgcccatcctgctccatcttagagaacatatatggagagacagcaagagacccttcaggcttgaattaaagccctcaccatgctcacgcccaaatggattatttgggtgtttaaagcttctgattcttactacaccctgccctacttcgggtactccatgtgcctgtcccctcccttgggtttcccaggccagcttaggtagtagggaggaactggagctaccctgagattttctcaagttcccaggcaagttatgccagcgttgcctccctgtcctgggcaggggccacttgttattttatttatttttaatttataatttattcaaattggattgccttggtaacctcccacacctgataattggcatcactcctccccgcttcccactctcagatattgctccaacctcaggagttgaagaggcttatgcggtgggggcaggaggagaactgctttccctcaagctgagggaagaggggctattccagagggactgagtcagtagccaaagactcagcttcccctgtccctccccagtcccttcacttccccttaccctctgaactatctctgaaagccaagttatgcgtattggtgtgtgcacaagcttgtctttgngctggatgtgggggggaaggttcatttccgcccactctcgtgggttttttnnnnnnnnnnnttgggtctcaaaataacaaggnttgacttcattaccacctgacctctcccggttcggggg

SEQ ID NO: 318363 - DNA, 1024 bp, Homo Sapiens
  misc_feature (258)..(258): n is a, c, g, or t
  misc_feature (318)..(371): n is a, c, g, or t
  misc_feature (639)..(670): n is a, c, g, or t
  misc_feature (840)..(840): n is a, c, g, or t
  misc_feature (882)..(882): n is a, c, g, or t
  misc_feature (934)..(934): n is a, c, g, or t
  misc_feature (940)..(940): n is a, c, g, or t
  misc_feature (954)..(954): n is a, c, g, or t
  misc_feature (957)..(957): n is a, c, g, or t
  misc_feature (975)..(975): n is a, c, g, or t
  misc_feature (987)..(987): n is a, c, g, or t
  misc_feature (990)..(990): n is a, c, g, or t
  misc_feature (995)..(996): n is a, c, g, or t
  misc_feature (1001)..(1001): n is a, c, g, or t
  misc_feature (1011)..(1011): n is a, c, g, or t
caagtttcagcaaatgcttgttcccctcagcccagccccaggagttaggactgaggctgggtcagagtctggagtggggaatggggtagtttggaaccacatgactgagtttgaggggtgcccctcaccccagctgaggtaggtgggtcagagtctggccaggtgagaggaggcaccccagtgcttggccctgactctgccccctggacaccttcttcagtcaggaccccaaaacaaggagacacaggtaggaggagnagggacaactggagtgtggagccctaggtgaggggtggttaacccctgtgtgtgtgcatnnnnnnnnnnnnnnnnnnnnnnnnnnnnnnnnnnnnnnnnnnnnnnnnnnnnnntacgcataacttggctttcagagataggtcagagggtaggggaagtgaagggactggggaaggacaggggaagctgagtctttggctactgactcagtccctctggaatagcccctcttccctcagctgagggaaagcagttctcctcctgcccccaccgcataagcctcttcaactcctgaggttggagcaatatctgagagtgggaagcggggaggagtgatgccaataatcaggtgtgggaggttaccaaggcaatccaatttgnnnnnnnnnnnnnnnnnnnnnnnnnnnnnnnncaagtggcccctgcccaggacagggaggcaacgctggcataacttgcctgggaacttgagaaaatctcagggtagctccagttcctccctactacctaagctggcctgggaaacccaagggaggggacaggcacatggagtacccgaagtagggcagggtgtagtaagantcagaagctttaaacacccaaataatccatttgggcgtgacntgggtgagggctttaattcaagcctggagggtctcttgctgtctctccatanatgttnctctaaaaggagcnggntgggcggtcattagcccncttggttcagantcnggcannagggnaaagtgatangtggatatgaggg

SEQ ID NO: 318364 - DNA, 2786 bp, Homo Sapiens
  misc_feature (231)..(296): n is a, c, g, or t
tagtgattgtttctcttcacccccaagatttccgtttaccaaggtcgagttggagagaaattcattgaacaacgatttgtgctcctgtcctggagcaaattcttctcctctgctcgacgcgacctcaggcagcatggacagggcaaagggctccaggcagaaatcctggtggctgggcagcagagtggcagtgtggcgatcgcttcttctcgccattgccagtagattcannnnnnnnnnnnnnnnnnnnnnnnnnnnnnnnnnnnnnnnnnnnnnnnnnnnnnnnnnnnnnnnnnattgttgtattgagtacaggtgcacgggtggcttgggcagctccccacagatctggcagaggggacaacccctgcttctattgcacatcctggctcagcccccctgccccgagcagtaggccacaaaatgaaacactttccaaattcagagagcccggtgctgtgtgccaggctcaaggaggggaggtgtgttgttgtgtggcttgttctggaagatagatatgtatttttaagttactccatgatggggccaaggcaacaattttgcctctttgcataaggggtctggacatctcagggtcctgtagtgactgggcctcttcccaggcgagtgcagaagcctcggaagaagcctttcccccaccggcggacctcctggctccatcagatgaagaggcagcgcccaccggccacaccagcccctccggactgtcacgactctgggccacttggggcgacctctttctctgaacacctggagaattctgtcaaatgaccctggagaaaaaccttttatactacatgtttttccataaaatggcagctaagtcccctcaaataaaacctttttcattctcattcttaccagtgaaatcaagtgggacaggaataagctatttaactgacattagcgacaggataaaacccctctaaaaaaccacaggggggagtgggaactgattcagatttggcaaagctgcaaatctttccccttcatgggctggaacgaagctggtgggtgaagacaaatctaagtgtccaatggcaagaactgcaggctatgaaatgacaggtcagacacaggactgtataaatcgtggcactataaagatgagaaggcaggtccatgatacagctgggagcaagcctttggagcatcgcttccagaaattctatctgtcctgtagtaagtagtagcatccagataaaatcagtggttctcctttctcctcttccaaacacattctgagagtttcttgtttaaataactatgtacacacccagcaagcctggtctctcttttacatgagggtccttcacttgagggtcctacaatggctttagagtcggttccaattgcctttttggagatttactgcttgggaccaaacctccctctgataaggacagtttctcaagttcagcttcaagttcagcatctgagatcctagggttaggcacgctgttggtaaaatgcctattgcgggggttgtcaggcagatccaaaggttctttggtggtatcctgaaggaggatgtccaattccttctccagttcttcactgtcaaaatctaagccatttgttaccccaccagccagagtctgagaaacttcatcctgggtgtcacagagctcttggatctgatccacgaggctctctgccttctccactggtgacatccttcatggagagtttgaagtgctcctaccccagcctggtaggcgttaaaaaccatctgatctgtctgggaggcatagatccggtccaggatgccttgaacagtgtccagcttggcatgcaaggcctcgatgcgcttctctgtccgttgcttggccttgagagacctcagtgccagctgcttctttcctgctcggcatgcccggcgggcttcttctttacacctctctgcttcctgggataaggactccactttgcgtgagagaagctgttcactctgcatcagctggtacaccccaacatctacgtcattgactggagagaccttggcacgtggccctcgggcaaacttcacaatcttctccccgttctgctcgaggactgtgaccctcttctccttctgcagctgcagcaacaccaagtagaaggtcctctcatctgggcaggagttagcacagagggtgctgagctctgacagggccaccacggggtgggaggagaggggcgagttctgatacagacgatacacctcctcagccttttccttcaacagctccacagcgacaaggacctcctcagctggaaccttattatctcccagcatgttagaaagagtccacttgagaggcttcagcaggaagaccccaaccccccaggagatccagctgctgtctacactggccatgaagtctgactcccgctgcagctcccctcgacgcagcaggtcctgcagcaccgtggccagccccagcgggacgctccccttgcgctgaaaggcctcctgcaagtcccgcagacgcaggcgcaccaccccctggcggcggctgtggctcagcaccaacggcgcccagaagcccatcttgctgtcccagtcggtgctgttcacctcgcgactcctcttgaaagcggagaacaggaaggacatgcgctcctcgtcctcctcccactcggggggcagaaggcccgccgggtctcccccggctggggcctcggcctcccgctccggggaccacatcggaaccccagccccggcaaggctgcgaacacaagcctggccatcccgggaattccggaccggtaccagcctgctt

SEQ ID NO: 318365 - DNA, 430 bp, Homo Sapiens
accagataaaaaaggaaaaaatagtgattgtttctcttcacccccaacatttccgtttaccaaggtcgagttggagagaaattcattgaacaacgatttgtgctcctggcctggagcaaattcttctcctctgctctacgccacctcaggcagcagggacagggcaaagggctccaggcagaaatcctggtggctgggcagcagagtggcagtgtggcgatcgcttcttctcgccattgccagagcattcagaccctttcccgtctgtccccctaccccgagtcccccagtccctcaaaggaggcagggagtgggggactgcaggaaggcagggacaggtgcacgggtgggcctggggcagcttccccacagattttggcagaggggacaacccctggcttctattgcacatcctggctcagccccctgg

SEQ ID NO: 318366 - DNA, 1582 bp, Homo Sapiens
  misc_feature (74)..(89): n is a, c, g, or t
  misc_feature (136)..(156): n is a, c, g, or t
aaaaaggcatctatttgcttttaatacgaaatatatagagaaatcagaaaggtaatatcatacaagccagttcnnnnnnnnnnnnnnnntcccaaccaacatatttgtcacattgggcctgcattagaaaacaggnnnnnnnnnnnnnnnnnnnnncacagtccctgaaatctggcaggtggtttttagaggccacagggagcttgccttagtcatcctggtgaaatgggacagaagtggtttttggaatatggccaccgcctcctgtttcttgctagcaatggtcatctgaagggagggtgctagcctggacatccaacatttggcatcacttatgcagtctgaggtctcaaagacaagcggccttggagtcttccagtccatatcttcactgaatctctcccatatacagtctcttgtcactcgatgctgagataatgatgggctcatcagggtggaaagccacttcattgatggagccagcatggccgggcagcttatacaatattctcctgcttgtggtatcccacacataaacaaacctgtcggctgagccagctgctattttgcttccatcaggtgaccaagaacatctcagaaggttcttttcaaagttgtgcacatttccttgaaatatctttacacatctctctttgggggcaaatggccagacatcccagacacgaactgtattgtccattgcattggacaaaagataagagccttcagaacttaaactcaggccagtcactgaatctgcatggcctctcatggtgtaggttagcttgttctggcgcaggtcccagaccttgatatcattgtctattccaccagaaataatctgatcacttgtgtcattgaaggtcacagctaacacctggtacgtgttctgaaatgtctggatggctgctttcttccggatgtcccaaagcttaactgtgccatcgtcactgccagtgcagacaagctgagggcctctcctggctggataacaggaattcacaaaggaagtatgtccctttagccttttaaccctctcacctgtttcactatcccacacagccacggttttatctgtggatgctgagaaaagcatactgccatctgtgttgtaatgcaattccatcactgctccactgtgtcccttcagtgtggcatagttatcacagtcaccatagacattccacagtaatatcagtcggtcaaatcctgcagatgctaaggtggatccgttggggtggaacttgcagcagtagacttccccttcatgtccagagagcagcatgattggggcttgaagggaggaacatcttggaggtcccgcttgcagcaaggctcccggcgtcgcctgctgctgcccggctcctgggccagaccccgctcccaacagcaactcatgccgctgccgcttgactggaaccagcggcaactctgggcccttacgcttctgctgttctatcatggcggcaaccggtctcttcagcgcccgacgcgtggtcgacgatatcccgtgaattccggaccgtaccagccgctgcctgtttattaaagcccagcgtggttctatatcacataaattccc

SEQ ID NO: 318367 - DNA, 1499 bp, Homo Sapiens
  misc_feature (1051)..(1059): n is a, c, g, or t
  misc_feature (1356)..(1416): n is a, c, g, or t
ctcttcccggctccagctccgccgccagctccagcctttgctccccctcccaaagtcccctccccggagcggagcgcacctagggtccctcttccgtccccccagcccagctacccgttcagaccagcagcctcggggggcacccccccgccagcctgcctccctcccgctcagccctgccagggttccccagccatgaatctcttccgattcctgggagacctctcccacctcctcgccatcatcttgctactgctcaaaatctggaagtcccgctcgtgcgccggaatttcagggaagagccaggtcctgtttgctgtggtgttcactgcccgatatctggacctcttcaccaactacatctcactctacaacacgtgtatgaaggtggtctacatagcctgctccttcaccacggtctggttgatttatagcaagttcaaagctacttacgatgggaaccatgacacgttcagagtggagttcctggtcgttcccacagccattctggcgttcctggtcaatcatgacttcacccctctggagatcctctggaccttctccatctacctggagtcagtggccatcttgccgcagctgttcatggtgagcaagaccggcgaggcggagaccatcaccagccactacttgtttgcgctaggcgtttaccgcacgctctatctcttcaactggatctggcgctaccatttcgagggcttcttcgacctcatcgccattgtggcaggcctggtccagacagtcctctactgcgatttcttctacctctatatcaccaaagtcctaaaggggaagaagttgagtttgccggcatagccccggtcctctccatctctctcctcggcagcagcgggaggcagaggaaggcggcagaagatgaagagctttcccatccaggggtgacttttttaagaacccacctcttgtgctccccatcccgcctcctgccgggtttcagggggacagtggaggatccaggtcttggggagctcaggacttgggctgtttgtagttttttgccttttagacaagnnnnnnnnntctttccactctttagtttttgattctgatgactcgtttttcttctactctgtggccccaatttttataaagtgtttttgagtgtcctatgggccggggcagggtccaagatcttttcccttccccaggcccctcggctccctcccagatcccacccccagccccactggttgccaaacactaaatctgccgacacccatctgccccacctcctgccatggccatgaaccgcgacccccactaaatttctagattggggatagggagaaagggaggcccaggaaggtcttccctgannnnnnnnnnnnnnnnnnnnnnnnnnnnnnnnnnnnnnnnnnnnnnnnnnnnnnnnnnnnntggcaaattaggggggcccggggctcaagtgcgggaagggggctggcccgaggatcccatggctctcacaccatgtttttgta

SEQ ID NO: 318368 - DNA, 952 bp, Homo Sapiens
ggggggggttcttaaaaaaagtccccccctcggatggggaaaagtttttcattgtgttgccgcctttcctttgccttccccgttgcttcccgaggagagaaattggagaggccccggggttatcccggcaaacttcaacttttttcccctttagggactttgtgatatagaggtggaagaaattgccgtaggggactgtttgggaccagccttgccacaatggcgatgagttgtaagaagccctcgcaaatggtagcgccagatcccagttgaagagatagagcgtgcgggtaaacgcttagcgcaaacaagtagtggctggtgattggtctccgcctcgccggtcttgctcaccatgaacagctgcggcaagatggccactgactccaggtagatggagaaggtccagaggatctccagaggggtgaagtcatgattgaccaggaacgccagaatggctgtgggaacgaccaggaactccactctgaacgtgtcatggttcccatcgtaagtagctttgaacttgctataaatcaaccagaccgtggtgaaggagcaggctatgtagaccaccttcatacacgtgttgtagagtgagatgtagttggtgaagaggtccagatatcgggcagtgaacaccacagcaaacaggacctggctcttccctgaaattccggcgcacgagcgggacttccagattttgagcagtagcaagatgatggcgaggaggtgggagaggtctcccaggaatcggaagagattcatggctggggaaccctggcagggctgagcgggagggaggcaggctggcgggggggtgccccccgaggctgctggtctgaacgggtagctgggctggggggacggaagagggaccctaggtgcgctccgctccggggaggggactttgggcctcgtgccgaattcgccacccaggcctcgctacctagga

SEQ ID NO: 318369 - DNA, 1051 bp, Homo Sapiens
  misc_feature (77)..(85): n is a, c, g, or t
ccccttgttgaatctgctcgctgaattgcccagagtggtcctacaccacgaggtgcggtgtttttaaatgaaaggtnnnnnnnnngagtgggggaagagctttgtgttttttcttcaccgccccgtcccgtgtgcccttcgcggggggctcccgagggcaagagagatggtgagggcccgcgggggtattcgccggcaggaccccgagcgtctttccccctttaggggccggtgggtgcatttaggaggttgggggggaccccccattggggggtctctttttgggcccccgggcctctcccccaaatgggcgaaagggggttggaaggaacccccttcaaaatggtgagcggccagggtccccagttggaagaagaaaggagccgtgcgggtaaatggccttagcggcaaaacaaagtagttggctggtggatggtctccccccttccccggttcttgctcccccatgaacagttgcggccaagaatggcccctgactcccaggtagatggagaaggtccagaggttctccagagggggtgaagtcatgattgaccaggaacgccagaatggctgtgggagcgaccaggaactccactctgaacgtgtcatggttcccatcgtaagtagctttggaacttgctataaatcaaccagaccgtggtgaaggagcaggctatgtagaccaccttcatacacgtgttgtagagtgagatgtagttggtgaagaggtccagatatcgggcagtgaacaccacagcaaacaggacctggctcttccctgaaattccggcgcacgagcgggacttccagattttgagcagtagcaagatgatggcgaggaggtgggagaggtctcccaggaatcggaagagattcatggctggggaaccctggcagggctgagcgggagggaggcaggctggcgggggggtgccccccgaggctgctggtctgaacgggtagctgggctggggggacggaagagggaccctaggtgcgctccgctccggggaggggactttgggcctcgtgccgaattcgccaccca

SEQ ID NO: 318370 - DNA, 852 bp, Homo Sapiens
  misc_feature (16)..(16): n is a, c, g, or t
  misc_feature (33)..(33): n is a, c, g, or t
  misc_feature (78)..(78): n is a, c, g, or t
  misc_feature (88)..(88): n is a, c, g, or t
  misc_feature (131)..(131): n is a, c, g, or t
acaaaacaaccccaanatccctgaactcccccnaaaaccctggaatccttcccactgttccccccctgaaaacccggncaaggaaagncggggaatgggggaaaccaacaaaaaaggtggggtttcctttnaaaaaaaagtccacccccctggaatggggaaaaagctccttccatcctttctgcccgcccttccctcctgccctccccgctgcctgcccgaaggaagagagatggaagaggaccggggctatgccggcaaactcaacttcttcccctttaggactttggtgatatagaggtagaagaaatcgcagtagaggactgtctggaccaggcctgccacaatggcgatgaggtcgaagaagccctcgaaatggtagcgccagatccagttgaagagatagagcgtgcggtaaacgcctagcgcaaacaagtagtggctggtgatggtctccgcctcgccggtcttgctcaccatgaacagctgcggcaagatggccactgactccaggtagatggagaaggtccagaggatctccagaggggtgaagtcatgattgaccaggaacgccagaatggctgtgggaacgaccaggaactccactctgaacgtgtcatggttcccatcgtaagtagctttgaacttgctataaatcaaccagaccgtggtgaaggagcaggctatgtagaccaccttcatacacgtgttgtagagtgagatgtagttggtgaagaggtccagatatcgggcagtgaacaccacagcaaacaggacctggctcttccctgaaattccggcgcacgagcgggacttcccctcgtgccgaattcgccacccaggcctcgctac

SEQ ID NO: 318371 - DNA, 1109 bp, Homo Sapiens
  misc_feature (307)..(357): n is a, c, g, or t
  misc_feature (524)..(532): n is a, c, g, or t
  misc_feature (607)..(658): n is a, c, g, or t
  misc_feature (724)..(842): n is a, c, g, or t
  misc_feature (850)..(923): n is a, c, g, or t
ctcctgtagatagagatataccgcgcgcgggcatataaagggcgggatgtggtcaaaaaagaaatcggggcgaagaaatggggtggtgtaagtagagaagagaagagcgggggcccgcgtttgtccccaaaaaaagggtgtttcttttggagagcgaagtgtttttgggtgtgtttcagtcgccagaaggcgtcggggggggagaaatgtcgccaccggtgtgggcggggtaaaagagaggggggaaacacgaggtgtggggcagagttgttttgtttgcgccccactgtggtttctcccacggggnnnnnnnnnnnnnnnnnnnnnnnnnnnnnnnnnnnnnnnnnnnnnnnnnnnggtggaaggcggccgacgacggggtcggtttatgaggaggttttcctaccggggcggccgcgtttttttagggagggcgtgtcactaactctgcgggggggaaaagtggtcctctgatgggagttctcccacccccatttctgtatatagaaggccgcccagggccnnnnnnnnnaatttggataatgcgggtgcccgggcgggccccccttagaaaaaacgccgggagtggcccccagaagctcccttnnnnnnnnnnnnnnnnnnnnnnnnnnnnnnnnnnnnnnnnnnnnnnnnnnnnaaaccaacccagtagtcatgacagggttttttttgaaaaaagggaaggccagtgtcgggtccctannnnnnnnnnnnnnnnnnnnnnnnnnnnnnnnnnnnnnnnnnnnnnnnnnnnnnnnnnnnnnnnnnnnnnnnnnnnnnnnnnnnnnnnnnnnnnnnnnnnnnnnnnnnnnnnnnnnnnntaaatagnnnnnnnnnnnnnnnnnnnnnnnnnnnnnnnnnnnnnnnnnnnnnnnnnnnnnnnnnnnnnnnnnnnnnnnnnncattttcttctgtttatttcaagagaacaaagattcaaccatcagttctgtacaaaaacatggtgtgagagccatgggatcctcgggccagcccccttcccgcacttgagccccgggcccccctaatttgccaaaaaaccaggagaagaccaaaaaattcaaactctggggaaaaaaattactatg

SEQ ID NO: 318372 - DNA, 437 bp, Homo Sapiens
  misc_feature (123)..(184): n is a, c, g, or t
  misc_feature (199)..(199): n is a, c, g, or t
  misc_feature (316)..(366): n is a, c, g, or t
tttatttcaagagaaccaaagattcaaccatcagttctgtacaaaaacatggtgtgagagccatgggatccttcgggccagcccccttcccgcacttgagccccgggcccccctaatttgccnnnnnnnnnnnnnnnnnnnnnnnnnnnnnnnnnnnnnnnnnnnnnnnnnnnnnnnnnnnnnntcaggggagaccttncctgggcctccctttctccctatccccaatctagaaatttagtgggggtcgcggttcatggccatggcaggaggtggggcagatgggtgtcggcagatttagtgtttggcaaccagnnnnnnnnnnnnnnnnnnnnnnnnnnnnnnnnnnnnnnnnnnnnnnnnnnnaagatcttggaccctgccccggcccataggacactcaaaaacactttataaaaattggggccacagagtag

SEQ ID NO: 318373 - DNA, 2160 bp, Homo Sapiens
  misc_feature (557)..(557): n is a, c, g, or t
  misc_feature (1671)..(1671): n is a, c, g, or t
  misc_feature (1675)..(1675): n is a, c, g, or t
gcggccgcgtgcagtggggtttggccgttaaagtccaccaggcccaggtcactgcccagctccacaagcgcctgcagcgcctccacgtcaccggcgtgggcagcagcacaggccaggctgggcaccagggcattccgcagggcatctgcctcctggctgccgctcagactgaggagccaggagaccccaccgcccagcgtgttgccctgcagtgagggccggcgctcttccaccgagggtggcgtcatctccccccgaaggtccttggtcagcagctccttcctgacatccagcctcagccctggctggcccagcacatacgatagcttggccagggcggcctccgatgtcatgtcgaagcctgagatgacgccggctcccgccatggccatgccagctgcatagtctgtggtcacagccccctggaggcagtgggtacagttgacgatgaccaggccgcgctcggtggccacccgcagctcctgcagcaggtcgggcttggtgggtccgttccctgaacggaaggtcttcatgaccacgcccttcaggggaggctngcagaagggccgaccccagggcggcagggatcccggggtagaggcgcagcaggcccacgtcctgctccatgctgctgtgcaccaccagcccagccttcccgtccaccttccgcacagctccctgttgattgtgatgtcagcacccactgtggccagaggcagcaggttcggggagcagaaagctgcgaacctccgagcgtctaccttggttgcccggttgccccgaaacagctgattctggaagaaaaggcagacctctgggatcacatactggccagccatgagcagtgcccccagcaggttctcacggccgtcgctccacagggcatggatgggcacctgggccccagtgaggatgacagtcttctgcaggttctccagcatgaaggacagcatcgaggcagcaaaggccatggtgtcggtgccgtggatgaccacaaagccgtggtactgctcgtagtgcctcttgatggtctgggcaaggcaaacccactcagcgatggtcatgtcactggagtcgaagaggggctggcactccagcacggtgtagagaatcctctggttgcggctggccgggctgcgggacagaaacagcaggaggcggaacagcaggctcccgctctgcacctcctcctgctctaaatgccctgacccgctctgttcccctctggcagagctggggcccctacgccaagggctccgcacatagcaagttctcagcatcccaggtacggggcccggccccccttccacctggagctccccacagaggcaaggacgtgggtcaggatgggccactcccagcagtcttcttcccacaccagctcgaagaggggggctgggaccagccatcccccaggcaggagaggatgcttgcaggaggctcgcctgtggcggctgtggtggtcagccaccacgagggcaactcccagctcaccccccagctgtgggggacatcagggagctgggcccagagctgagaaatggaaggacctctatgctgggggcaaggccacctgggccagctggctcctgatatacaggatccctagacggggcgccctcatcacacttgccgaagcagcctggctgggggtgtgggaggagggtgggnaggnaaggtgggaccaggcacggggaaccctcagaggttcaggctctggtggaaggcgactgctggtcagtcctaaagccctgtaagctgaggggattttagagacaggggtgagcaaatggctcacgtgggcctggccagcagtgcccagcctcaggatcggtgcccctcagcagccatgccctgtccgggactgggaggagcccacactcacggtagcaccagggtgtcctcagagaggccgcgggctcgggcgtgctcctcgtcatggaacatgggcagtgtcctcaggatggcagccaggcccgtcccgggcacaagcacgccgagctcactccgcatgccaatggtgccgccggtgtagacggccagcagcctccgctcgggccccaccgcgcgcgccatgccggaccggggaccacgggagtggacgggggtgtgcagcggggacgcagggctgcgggactcagggactgcgcggaggaggcc

SEQ ID NO: 318374 - DNA, 1199 bp, Homo Sapiens
  misc_feature (661)..(661): n is a, c, g, or t
  misc_feature (904)..(904): n is a, c, g, or t
  misc_feature (942)..(942): n is a, c, g, or t
ttcacgtttcatttttattgtgctgggggtcaggcagcagccccactgaggccccacccagcctccgggctgcctggcctgtgccatgggtcccaggctccagcagggagctcgtaccttccctcagctgagggcccacctggccttgggatgccgttggggtagccagggtgggggtagccaggggtggattcacagagaagatcccagcccatcccatgccagggtctggggagcctcccgaggaaggggaggaggaagaggaggaaggccctgcctggccttccgctcagtcaccccgaggtggtttctggacccccagcatgttgggcaggggcatgggggctgcagggcggcgtgaggggctcagtccagcctggggcgctgggcagtcacgagtcttttcttgcaggagcaggaccccagctgctcctccaggaaggaaatctgctcgctcagggagtcgatgcggccgagctgctggaaggagtgcacccaggaggctgccggggtccgggagcccatgctccagtgcctgcgaggccaggctgtgcagtggggccagcaccagctgcagcttctgtgggtgcagaagggcagtgaccctgggccggcccccgccctctctgctccaccggggtctaggggaggacccctgggnaagggctccacaagcctccagcccccgcctccgcggcagggctccaagtgtccactagaggggggctgccgtggcagaaaagcttgccgcagagtgggtgcctggggcatcaggctggcggggtggtcccagccttggggtccctggcaggagaactagggggacagctggaccactggccagtgggaagactggcaagagctctttgtcctggtggggacaaagatgggggggtggggaggnctcgtctgggtccaggctctgtgtattgtctggggggntgtcaagcttggttcctccggccctggggggtcctggtcagtgtccagctgcttctgcccagcatggatccaggccagggccccctcggcagtcagcagcgaggaagccacctccccagggccaggaccttttcagaccacccccagccatccgtgggtcgggaccatgtcccaggagactacggagcctgtacccgggcctgggcctctgctgttgtgaagacctgccccctgccgacgcctcacctcctccagca

SEQ ID NO: 318375 - DNA, 1311 bp, Homo Sapiens
tgttgggtgaacttaactccccccagggtggcaaacgggcccttgggcccttctatagatgaggtgggcctcggtggtccaaggaaagaaaagcctttgcaatttttcttttgggcctccaggcggccctgggccccccagaaacctctgtttcctgtttaggcgctgggccttgcaattagctctcctcccgggcaagcagttctcttaaaaggcctcagtttttctgggtgtagcaagggtgcatctcattgtttcccagccctccccggtgtccccaaattcctccttttgagtggatgcgagaaactcctccagggtcacgaggcggtcctggttgtgtccacattcttcatcacatctcccgcatgcgcagtcgctcctcctccatctcccgcatgtcgtcctcctcattctttgggtcgtacactttctccagctccttggtgaagagtgcctccagctcctgctcatccaggacaccatcactgttgatatcatgcagtatgaagaaggtcttggggttaaacctgttggggtccagtccatccagctcctcccacacctccttcaactgggcttggctgccaggcacgttgactttagggtgctcgcggtgccggcgctgttgctcttccagcttcctctccgcctcctttctctgctcctctcccagtgactccagataacgccgtctctcgtgttccttaagcatctcgtagcgcttgaactcttcatgatgggctgcgtcgtactgggcaaggtcccgggtggccgtctggatcagcagctccaggtcgcgggcctcgaatgtatgctggttctgagggtccaggtgttcaaactgtttcaggagattcagatgatccacctgtacattgggatcctgctcggcgtccatcttggccttgagcagcatccgcagccgtgacacctcctgtcgcttgagctcatccagcttggtgcggacgtggtggctgacaaagtccagctctcggctcagcttcccgctcttgatgtcctccgcattggcagcctgcagcttctctcggaaatgcccatccgtctccagtacatcgatgacctcctggaggtaccggtggtagtacaggcctgtgtcgggactctcagtcgcaggggtctcctccttgttgggcgcccctcgctccagggggacagccagcacggcgcgaagcaggagcagcagcagcagcggcaacagaaggagggttcctcggggcccagagggaggcatggcagtgtggtctctccttcaccgcagagggcgttttatcccgggaattccggacc

SEQ ID NO: 318376 - DNA, 1523 bp, Homo Sapiens
  misc_feature (69)..(69): n is a, c, g, or t
  misc_feature (72)..(72): n is a, c, g, or t
  misc_feature (80)..(80): n is a, c, g, or t
  misc_feature (85)..(85): n is a, c, g, or t
  misc_feature (114)..(114): n is a, c, g, or t
ttcggagactctgattctttacgacgcccccatgtggaaacaggccttagatctcctcgaaactaaggncgnatgttganaggtncagcgtgcccaaggcggaatatgttctgnaagtcctgagcccggcttcttaaacggtgcaggggtgagttcccgtagtccttggtcaggccttggtcctcttggccctcgcggggcagctgcacgttctggtgcttcgagagcgtgatgcggatgggctttcccgtgcagcttgtgcccgttcaggtggctcatggccagctgggcctggtttgccgtccgccatctgcactagggcgttctccttcttattgaccaggatcttcacgcgctgcacgtcaccgtagacgccgaaaagaataaagaggctttggggtgtgactctctctgggttgaggttgctgaccagcaatacagaatttcctgcccccgccaggcccgggatggcgatccgacctgccgccgcagctgccgccgccgccgaggggatggccaggggggccagggcgccgtggacgttcggaacggaaaggccgaaggccgcggccatggtctggtccagcgagggctggctgtccccggaaggcaggtctgggcgtgtgtagtcacggctcttgtcattgttgtacttgacgttgaggctggtgagcttggaaaagtcgatgcgcagcgtgcagcaggcgttgtagatgttctgcccgtccagcgacagcttggcgtgctgggcgctcacggggtccgcatactgcagcagggcctggaactggttgttcttggtgaaggtgatgatcttcaacactgtgccgaacttggagaaaatctggtgcagcacatccagggtcacagggtagaagaggttctccacgatgatcctgagcacggggctctgcccggccatcgccatccctgcgtccacggccgccgccgaggcagccaaggccaggttccccgactggaccgagttcaccgcctgcagggccgcctgggcccgcgcctggttgggagagctgtcggtcttcagctccttgtggttggagaactggatgtagatgggctggccgcgcagcacaggggtcaccgaggtgtagtagttcaccatggtgttggcagcctcctccgtgttcatctcgatgaaggcctggtttttccccttcagcatcaggaggttggtgaccttcccaaagggcagccccagggagatgacttccccctccgtgacgtcgatggggagcttccggatgtggatcactctagaggggacgcctgcacttcggctgtcacctttgaacttcttgctgtcatttccgtttgctgcagaagccgagttgctgctcatgataaacggtccgttagtgacacaagtagagaaaagctcgtcagatccccgctttgtaccaacggctatatctgggacaatgccgtccatggcacacagagcagacccgcgggggacggagtggaggcgccggaatagcaggaaccgacccaacggctccgag

SEQ ID NO: 318377 - DNA, 932 bp, Homo Sapiens
atccccaggttgcccccgaaaggcccgccgggcccatggtcgtggttccaggcgaggggctgggctgtcccccgggaagggcaggttctgggcggtgtgtagtccccggcttcttgtccattgttgtacttgaccgttagggctgggtgagcttgaaaaagtcgatgcgcagcgtgcagcaggcgttgtagatgttctgcccgtccagcgacagcttggcgtgctgggcgctcacggggtccgcatactgcagcagggcctggaactggttgttcttggtgaaggtgatgatcttcaacactgtgccgaacttggagaaaatctggtgcagcacatccagggtcacagggtagaagaggttctccacgatgatcctgagcacggggctctgcccggccatcgccatccctgcgtccacggccgccgccgaggcagccaaggccaggttccccgactggaccgagttcaccgcctgcagggccgcctgggcccgcgcctggttgggagagctgtcggtcttcagctccttgtggttggagaactggatgtagatgggctggccgcgcagcacaggggtcaccgaggtgtagtagttcaccatggtgttggcagcctcctccgtgttcatctcgatgaaggcctggtttttccccttcagcatcaggaggttggtgaccttcccaaagggcagccccagggagatgacttccccctccgtgacgtcgatggggagcttccggatgtggatcactctagaggggacgcctgcacttcggctgtcacctttgaacttcttgctgtcatttccgtttgctgcagaagccgagttgctgctcatgataaacggtccgttagtgacacaagtagagaaaagctcgtcagatccccgctttgtaccaggggctatatctgggacaatgccgtcattccga

SEQ ID NO: 318378 - DNA, 949 bp, Homo Sapiens
ttgtccattgtttgtcccttgaccgtggagggcttggtgaggtttggaaaaaagttcgatggcacagcgttccaggcaggcgttgtaggatgtttctgccccgtccaagggaccagcttgggcgtgttgggcgctcaccggggtccggcatactgcagcaggggcctggaactggttgttcttggtgaagggtgatgatcttcaaacacctgtcccgaacttggagaaaatctggtgcagcacatccagggtcacagggtagaagaggttctccacgatgatcctgagcacggggctctgcccggccatcgccatccctgcgtccacggccgccgccgaggcagccaaggccaggttccccgactggaccgagttcaccgcctgcagggccgcctgggcccgcgcctggttgggagagctgtcggtcttcagctccttgtggttggagaactggatgtagatgggctggccgcgcagcacaggggtcaccgaggtgtagtagttcaccatggtgttggcagcctcctccgtgttcatctcgatgaaggcctggtttttccccttcagcatcaggaggttggtgaccttcccaaagggcagccccagggagatgacttccccctccgtgacgtcgatggggagcttccggatgtggatcactctagaggggacgcctgcacttcggctgtcacctttgaacttcttgctgtcatttccgtttgctgcagaagccgagttgctgctcatgataaacggtccgttagtgacacaagtagagaaaagctcgtcagatccccgctttgtaccaacggctatatctgggacaatgccgtctatggcacacagagcagacccgcgggggacggagtggaggcgccggaatagcaggaaccgacccaacggctccgagttatagactcaatcccgggattccggaccggtccagcct

SEQ ID NO: 318379 - DNA, 1424 bp, Homo Sapiens
  misc_feature (52)..(52): n is a, c, g, or t
  misc_feature (103)..(103): n is a, c, g, or t
gctcccaagttgaaaggctgtggtgtaaaggccaacccggaaggcggatgcnagaaggcgggggaacaccgcccgcccccttccctgaagcctcaggggcttnttaagataggaaccggggcttccttgtgcctgaacccactgggcgggccccgcctgctctctggaaactgggtcctgccctgtgacttaattacaaggaataaaataaaagtaacagcatacaaggtaataccacaaggaagtttagattacactcataccattgtatcatcttgctataaaaagttacttataactatttcttttgcatataaatgaaaaaagattagaatatttgttcaactggaaatattgctaggcacagacgtctgcaactgcaaagtatatgatacagagattatgtcgaccagttccgcagctggagcagcgtggtagccctgcctggggtcagaagggaaggccctggggtcggggtgaatgggagaatcacgtgacttgattagagggctggggttggggtgtcgcagccgcggccgccgcgccccagctgcatgatcctgcaggagccggccaggccccctgcctctctctggtgtgacccccccaccccttgggtccccaggacaccccgggtgggtgtgtggctgcaggaaggcaggttttttaaggcacaaggaagccaagtcgtggtcggggcgcccacctgcaggccccacgcccgacacaggccccaccaaggcatggccccgagggtctggccccgggtgtggagggccgggaactcccgctgccacagtcaccaagagcctgagctgtccctgtcaccgcagggtgagcaaggtgaactagatttaatttttttaaaaacaggtaaactgatttctctttaaaaaaataaaatctctggtctgctaaggtcacttcagctgtttttaaagtggcttttctctggaatgatggaagttgtcgccagggggcccggccgtgggggcctgtgcccctagatggtggacttggagaaggagacccgcaggtggtggttctccccgaggtcgtggttgtgcaggtcaatgagggcctggaccgcctcctccacggagcccatctggatcagtgccatcttgcggtccttctggaagaacttgaatcctttgacgacgcccccattgctggaaaacaggaccttgagatcctcctcggagactgagggcgggatgttggagaggtgcagcgtggccgagggcgggaatatgttctggaagttcttggagcccggcttcttgaagcggtgcaggggtgagttgccgtagtccttggtcaggccctggtcctcctggccctcgcggggcagctgcacgttctcctcgtgccgaattcgccacccaggcctcgctaccttgaaccctggagttactgccgtt

SEQ ID NO: 318380 - DNA, 1309 bp, Homo Sapiens
accccttttggttccataacaaccctgcgccccccccaacaaatgccaagaagcggggattacacacgcccagacctgccttccggggacagccagccctcgctggaccagaccatggccgcggccttcggtgcacctggtataatctcagcctctccgtatgcaggagctggtttccctcccacctttgccattcctcaagctgcaggcctttccgttccgaacgtccacggcgccctggcccccctggccatcccctcggcggcggcggcagctgcggcggcaggtcggatcgccatcccgggcctggcgggggcaggaaattctgtattgctggtcagcaacctcaacccagagagagtcacaccccaaagcctctttattcttttcggcgtctacggtgacgtgcagcgcgtgaagatcctgttcaataagaaggagaacgccctagtgcagatggcggacggcaaccaggcccagctggccatgagccacctgaacgggcacaagctgcacgggaagcccatccgcatcacgctctcgaagcaccagaacgtgcagctgccccgcgagggccaggaggaccagggcctgaccaaggactacggcaactcacccctgcaccgcttcaagaagccgggctccaagaacttccagaacatattcccgccctcggccacgctgcacctctccaacatcccgccctcagtctccgaggaggatctcaaggtcctgttttccagcaatgggggcgtcgtcaaaggattcaagttcttccagaaggaccgcaagatggcactgatccagatgggctccgtggaggaggcggtccaggccctcattgacctgcacaaccacgacctcggggagaaccaccacctgcgggtctccttctccaagtccaccatctaggggcacaggcccccacggccgggccccctggcgacaacttccatcattccagagaaaagccactttaaaaacagctgaagtgaccttagcagaccagagattttatttttttaaagagaaatcagtttacctgtttttaaaaaaattaaatctagttcaccttgctcaccctgcggtgacagggacagctcaggctcttggtgactgtggcagcgggagttcccggccctccacacccggggccagaccctcggggccatgccttggtggggcctgtgtcgggcgtggggcctgcaggtgggcgccccgaccacgacttggcttccttgtgccttaaaaaacctgccttcctgcagcacaacccacccgggtgtcctggggacccaagggtgggggg

SEQ ID NO: 318381 - DNA, 1249 bp, Homo Sapiens
tttgaggatacagaagatttattcgaagtccaggtacagactggccaacctgcctctacagcgtccacagcgaacacagggctagacaagggaggagtttctcaaacggttttaatcggttctctccgcgtcacaagccatcgggtaaggcaacggaatgtgcgtggggtcccctgtggctccgcggtcacaatactgagcctggaattgctgttagcaaaatatacatttgtgtcaccataaaaaaccgcgccgccgcccctcgggtctcacaacaggtataaaaaattataaatatttacacccttgttacacgcttttacggaaaggggatcctaggagagcccccgggacaggacgcgggggcggtagaaagagcacagagaagacaggaggagcgcccgccttccgggtcccagcatcagaggcaggcaaaacacagaaatgagactttggtccaaaatttgaaggaagaaaaaaccctgaagtttgagagcaagttttctaggcgactgcaggtgaaggcgtggtgtaaggcaaccggaggcgatgccagaggcggcgacacgcccgccccttccctgaagctcaggggctctaagataggaccggggctccctgtgcctgacccactgggcggccccgcctgctctctggaaactgggtcctgcctgtgacttaattacaaggaataaaataaaagtaacagcatacaaggtaataccacaaggaagtttagattacactcataccattgtatcatcttgctataaaaagttacttaaaactatttcttttgcatataaatgaaaaaagattagaatatttggtcaactggaaatattgctaggcacagacgtctgcaactgcaaagtatataatacagagattatgtcgaccagctccgcagctggagcagcggggagcccgcctgggggcagaagggaaggccctgggggcggggtgaagggagaatcacgtgacttgattagagggctggggttggggtgtcgcagccgcggccgccgcgccccagctgcatgatcctgcaggagccggccaggccccctgcctctctctggtgtgacccccccaccccttgggtccccaggacaccccgggtgggtgtgtggctgcaggaaggcaggttttttaaggcacaaggaagccaagtcgtggtcggggcgcccacctgcaggccccacgcccgaccctcgtgccgaattcgccacccaggcctcgctacctt

SEQ ID NO: 318382 - DNA, 460 bp, Homo Sapiens
  misc_feature (27)..(27): n is a, c, g, or t
  misc_feature (177)..(177): n is a, c, g, or t
  misc_feature (432)..(432): n is a, c, g, or t
cctgtgtttttgccctgccctctgaangcctggggacccgggaaagacgggcggctccctccctgtccttctcctgtgcctcctttcctaaccgcccccgccgtccctgtccccgggggctctccctaggatcccctttccgtaaaaacgtgtaacaagggtgtaaatatttataantttttatacctgttgtgaagacccgaggggcggcggcgcggttttttatggtgacacaaatgtatattttgctaacagcaattcccaggctcagtattgtgaccgcggagccacaggggaccccacgcacattccgttgccttacccgatggcttgtgacgcggagagaaccgattaaaaccgtttgagaaactcctcccttgtctagccctgtgttcgctgtggacgctgtagaggcaggttggccagtctgtncctggacttcgaataaatcttctgtatc

SEQ ID NO: 318383 - DNA, 1849 bp, Homo Sapiens
ggcctgaagcctcgcacccggccactgtctcagtcttatacacaacctcccgtgtgcattaacatccccataggcccccaccttgatcagcttggagaaagtctcatagatgaagatgagggaaatgaggaaggagaagatctcctgggtatagcgggagatgaagcggaccagggaagctaccctcgaagggccaccaccaacaccaccagcaggatgagccagaagccgatccacacgcggcccacgatgtactctagaccgttggtctcgcagaacgagaagaaggcttcctcaaacaccagcaggggtcctgagaagccgaccacaagcaggggctgagcccccagcagggcgaagagaatgccctgcactgcagtggagatcagcagctccgacactcccatctggttccgggtcttttctcccaggaggccgccgaagtgatggcgggtgacagtgcagcaaagtagatgaagatgacggcagccaggacctgggggctgaatgcatctgtgatgtcactcaggtaataggggtagcggcgccggatatcacgcaccaggcccccgaagagctggcctgtctgctgcagagggtcatctgggcccccatttaagtctaggcccttgtagaagctggagtctggcttggcagggctggactgatagcgccttcgaagtagctccctctgcacaggcaccagactgagcagtgcctgctcggagggggcatcggtgggaggcagcactaggctgcagtccaggaagccctctagggagtgcagcagctcccctcggctctgagccatgtaggcatctatgcggaacaccctctctgacatgagggtggcagcagcccggccaagctgggtgtaatcgatgtggggggcctcaggtcccagcaacacaaagaggaagcgtataggcaccggcagctccaccgcctccagctccgctgcctcctgcagcctcacgaagcccagcaccggctgctccaggaagtcggcgcggcccactagcaccaacgtggcctctgaatccgggggaatcttttccagaattccagatggtgagtgcccttctgtgcccccatctccctgctcacagaagagctgtgtctccagtgaggagtgttgggggagcagaggctgtgaaggatccccagagcgtgtcaggactgcaggcttcacaccccccagggcctccagctctccagcgtggctgtgtttaagcagcagggcccggagcagctcctctcggtcctgaggccggatctggtcttcaaagataaacctgtctagcagttggttggccactccagccagggaggtctcttgcaggtctaggaggacagtacccttggtgaagactctacgcagctctaggaggctccagaaggtgaggtgagagaggtgcgggcggccccaggccccattctcccccaggttctcctccagttgcacccagcgcgccgcctccatccatctcagctcctggttcttttcgtccatcaccagctcctgcagctccacatagaccttgtgggtacccgggtgtgatgtggtgtggtagtctgtggctgttgcctcggtgtcgtgagctgccggctcctccatctgggactcggggatgtctgggtcttcatattcctcctgctccagattctcctccatcatgtcttcataatcatcctgcagctcctccatggcgtggtcctgagtgtccagttgtctacggtgatctgagcccccagcataaccgcaccgcgggtccctgctcacgagcctcagggtcccttggtgaagtcctgcagccgctggtgccctctgcgaccagctacgttccca

SEQ ID NO: 318384 - DNA, 712 bp, Homo Sapiens
  misc_feature (700)..(700): n is a, c, g, or t
ccgtgtgcattaacatccccataggccccccaccttgatcagcttggagaaagtctcatagatgaagatgagggaaatgaggaaggagaagatctcctgggtatagagggagatgaagcggaccaggaagctaccctcgaaggccaccaccaacaccaccagcaggatgagccagaagccgatccacacgcggcccacgatgtactctagaccgttggtctcgcagaactgcagggtggtcagaagaagccggtcagtcaaagggccttggggcaaggcaccatgcatcaggcaggtggtgcgggggacatgacagggtcagtggggcaaggacagaactaccgagaagaaggcttcctcaaacaccagcaggggtcctgagaagccgaccacaagcaggggctgagcccccagcagggcgaagagaatgccctgcactgcagtggagatcagcagctccgacactcccatctggttccgggtcttttctcctgtgggtagaggtcacagtgggatcaaggtcaggagatcatttccaggagcccatagagcaagtcatggtcaggctgatgcaggggtctggagggtcagacagagtcagaagttggggctgagacagaggccagagggtcagaggcaagagttagggagacaggtattggcactgacccaggaggccgccgaaggtgatggcgggtgnctcgtgccgaat

SEQ ID NO: 318385 - DNA, 2536 bp, Homo Sapiens
  misc_feature (42)..(42): n is a, c, g, or t
  misc_feature (455)..(554): n is a, c, g, or t
  misc_feature (777)..(777): n is a, c, g, or t
  misc_feature (2522)..(2522): n is a, c, g, or t
actgatttccgggggcccctcagtaaaatgttttgttggaanttaattgaattgattgaacttaatgaagtgttttgaagggaaggaacccaaaacacttaggaggccctgagtccccaggccccaatccctggatcaatccttccctctacccttgtcctcaccaggacgcctctctctgggcccagagaagagggtctcaaggtaggggctgggagcagagtggggaagggaggagtcacaggggaagggaaagtggaccgcatgactgacagaggacagagctcggaccttgaaatcagaaggcctggttcaaatcccagctgcacggctcagttcaaatcccagctatgtgaccttgggtacgttcaaagacaaatgatgactgctatagaacagtccctgtggagtttacaaagccctattttacatgtatctttggtcctcagtaaccnnnnnnnnnnnnnnnnnnnnnnnnnnnnnnnnnnnnnnnnnnnnnnnnnnnnnnnnnnnnnnnnnnnnnnnnnnnnnnnnnnnnnnnnnnnnnnnnnnnnccccacccgctcacccacctccttcctttgcttctacccctgcctgtgctgggaagagggagggctcagatctaagtcttccagcacgggatccccagtgaaagtgtggcaacaggagggactgtgcaacaaaccccctaatgtgggccccatcggccatccccagccagaaaagccaggctaccctttgtggaaggtctcctggacacgccttccttccctncccacagccctggggcctcagctgctgctccaggaggatcctggagtccatgaggtgcccatgaacttctgcttttccttggaaggtggggatgtggaatggtgggggagggtctagggcctgggcccgcccctcacacaggcatggccacttcgtcgtattcatcccgaccttcctcctcatcaaaggttggcttggcatcatcagcatacggggcactgaggctccacgttcctgaagatgagcggcagcaggacgacgccgcagcggcacagtgaggatgaggacgaagggcagggccagggaggccggcgtggacttcaccacccacagcactgccaggcagatgatctggatgcccgtgaataagtgcatgcgccaggtcttcacccgcttgacgtagggcacatctgggtgatacttgggtggcttgaacagaagcaagatgcggtcaaagagctggatgccgctgagcgacgtgacccccatgtagaggaagatgccaaacagtacagccagggggatgcgggacaggatgggctccatgaggatggacaggcccacaagcacagcgaccaggagtccactgatccgctgctctttgacctcctggatctgggctgcagcccctggggtgctggctttgccatgacagtgagggcgttggcatgggtgacggaacgcacggtggtggcactgagccagggcatcccaaagagggcggccaccccacccatgcctactaccagcagcaggtccaggtggaagccggagcccttgaccatcttgcgctcaggtttgctgacaatcagcgtggtgatctgagactccaggaatatgaggatgaagaccagcagagcaggcagggcggaggcaaacatcatccagatgggaaactcggaacgcaagcccagtgggtgggatgacccagccccgggctgaggagttggacaccttgaagccatcaggcaccgagagtttctgggtgtaggtatcctgaatgaagaaatccaccaggaccatgatcaggatggagatggggaccccgaagtccccgatgacccgacgcagcttgccagggaaataggagctgttcttgaacttgcgcagcatcatggcaaagaagaaggtaccggccatgagcacaagggagaggagggctgtgttgggcagggggccctgaggtttgggcaccatcaacacgttgtagttataagtcttctgtagtgggtggtcctggaagatcttgatcagcttggagaaagtctcatagatgaagatgagggaaatgaggaaggagaagatctcctgggtatagcgggagatgaagcggaccaggaagctaccctcgaaggccaccaccaacaccaccagcaggatgagccagaagccgatccacacgcggcccacgatgtactctagaccgttggtctcgcagaacgagaagaaggcttcctcaaacaccagcaggggtcctgagaagccgaccacaagcaggggctgagcccccagcagggcgaagagaatgccctgcactgcagtggagatcagcagctccgacactcccatctggttccgggtcttttctcccaggaggccgccgaaggtgatggcgggtgacagtgcagcaaagtagatgaagatgacggcagccaggacctgggggctgaatgcatctgtgatgtcactcaggtaataggggtagcggcgccggatatcacgcacctcgtgccgaattactgggnggcgtagggccaaa

SEQ ID NO: 318386 - DNA, 992 bp, Homo Sapiens
  misc_feature (5)..(5): n is a, c, g, or t
  misc_feature (7)..(7): n is a, c, g, or t
  misc_feature (11)..(11): n is a, c, g, or t
  misc_feature (13)..(13): n is a, c, g, or t
  misc_feature (17)..(17): n is a, c, g, or t
  misc_feature (29)..(29): n is a, c, g, or t
  misc_feature (40)..(41): n is a, c, g, or t
  misc_feature (51)..(51): n is a, c, g, or t
  misc_feature (63)..(63): n is a, c, g, or t
  misc_feature (66)..(66): n is a, c, g, or t
  misc_feature (70)..(71): n is a, c, g, or t
  misc_feature (104)..(104): n is a, c, g, or t
  misc_feature (130)..(130): n is a, c, g, or t
gctanantatnanattngcaggctactcnttctggcagcnnagccactgcngaaggctcctgnccntcanncggccagggctactgtagacccaggtggagatntggcaccagcactcatcaggtactgnacatctagactgccgtcaatcccggcccggccccggccctgttgtccaaccacacgggctactgatgcctgatgtgcaaagttgccaccgaagaggcgcatgaactgagccaggtctgagtcatggaaatactgctccaggaactgggcacaggcttggctgttattgctggtgccagagctcatgtcttgtgaggtcaatttgtatcgcttacggatcacagagggggttatcccacagattcaggcctacattccctttcacctgtcggctcaggacgttgcctcagggatgatgttggggggtaacaggtgcagtccccccacaaagtccacatggggggccaaggcctgtggaagctggtagggatgtggggaccttacaacatgggtttccgtaggtcctcccacatagtgatgaaactcagccccagggagcagcagctctgcttgtcggatgctcagccagcaagtcagaaagtcctgtgtgatcacagaatggcacttctgggctccggctgccaagagccatttttgcaccgtgtggagggtcagtggggatggcctcaccagatcagccacattctctagggtcaggtattttccgtattgaggagagctgggatccgacacagcctgcaccagctccgagagtctttccacattctgctgtctcagggcaaaggtgagactcagctcttcctcagggtccgcacggcccagggacacccagcctgggggcagcgtcctccgctggtcgggctccgggctgtaactgcatttgccagagaggatgagggcaaagagccctaggaggcaggcttggagtcccattctgcccttccgcggatctgctgtcatgt

SEQ ID NO: 318387 - DNA, 1082 bp, Homo Sapiens
ggtggtggttattgtagttatgtcggttgtaattgtgtcgtggtagtatatggtgtgttgtgtgtagagcactatgtgagttgtagggttgtttgtgtgtcgtggggctgttatttgttgtgtggggtgtggtccgagggtgggtccgcgcgctgtgtttatgtgttcctcgtgcgcagggttgccgcgggctctgcaggtgtgtcccggttgcgtgccgttgtgagtcgcggggctctgttccttattcctgtggtatgtcggcgtctgcatatagggggcccgcgttgggaacagaatcttgtgatgtgtttagcttggcgccctgtagggatacttttggtgcggccggccgtttttttgttgtgtgacgtggaccctctgcatctcagaaaggtttattatcaattgaaggaggtaacatgtagcctttgctggggacaaagatgcaacaagtctctgccccatcctaggtgctgccccgtgtagggctcttcccaggcccgccccccttgggcagcctggtagcgctgggctggcgtggcatcctctggctggatccttcgtggctgctgcgttccgccagggccaatgctcccccgagggcagcgctgcctttgtttctccctcgggtctcgggcacgctcgacgtgggcagagacacggccgcagggtcctggggctcgctcgctagcctctgcccggcacacatggacttgagcatctggaagacggcgaggggggccacgttcagcttcagcaggtccaccaggatcttgaacacgtcggggtcgataccgccgcccgccgcctgagccagctcgtacagctccatctcctcggtgctcagcaccttcttgcgccgcagcgccagcttctgccgggccgcctccagccccgggggcgccgccgaccccggcccaggccctacgccctgcgccgccatccccgcggcccgcggaaaggtgcgctccgccccgccgcgccccctagcggctgcagcaccaccacacctctccctgcagcgtccgacgcgtgggtcgacagatatccaaggaattccgaccggtaccagcctgcat

SEQ ID NO: 318388 - DNA, 1525 bp, Homo Sapiens
  misc_feature (130)..(130): n is a, c, g, or t
  misc_feature (174)..(175): n is a, c, g, or t
  misc_feature (223)..(223): n is a, c, g, or t
  misc_feature (239)..(239): n is a, c, g, or t
  misc_feature (246)..(246): n is a, c, g, or t
  misc_feature (249)..(293): n is a, c, g, or t
  misc_feature (314)..(314): n is a, c, g, or t
  misc_feature (318)..(318): n is a, c, g, or t
  misc_feature (339)..(339): n is a, c, g, or t
  misc_feature (347)..(347): n is a, c, g, or t
  misc_feature (353)..(408): n is a, c, g, or t
  misc_feature (414)..(414): n is a, c, g, or t
  misc_feature (418)..(418): n is a, c, g, or t
  misc_feature (423)..(424): n is a, c, g, or t
  misc_feature (430)..(430): n is a, c, g, or t
  misc_feature (433)..(433): n is a, c, g, or t
  misc_feature (438)..(438): n is a, c, g, or t
  misc_feature (440)..(441): n is a, c, g, or t
  misc_feature (446)..(446): n is a, c, g, or t
  misc_feature (448)..(448): n is a, c, g, or t
  misc_feature (451)..(451): n is a, c, g, or t
  misc_feature (453)..(453): n is a, c, g, or t
  misc_feature (456)..(456): n is a, c, g, or t
  misc_feature (469)..(484): n is a, c, g, or t
  misc_feature (487)..(487): n is a, c, g, or t
  misc_feature (491)..(491): n is a, c, g, or t
  misc_feature (494)..(494): n is a, c, g, or t
  misc_feature (501)..(501): n is a, c, g, or t
  misc_feature (514)..(516): n is a, c, g, or t
  misc_feature (520)..(520): n is a, c, g, or t
  misc_feature (534)..(534): n is a, c, g, or t
  misc_feature (541)..(541): n is a, c, g, or t
  misc_feature (543)..(543): n is a, c, g, or t
  misc_feature (550)..(550): n is a, c, g, or t
  misc_feature (569)..(569): n is a, c, g, or t
ttaaacaagaccaacacatctcttcaaatttatgaatcttatattaatttgttactatatctgtagggggttgggaaactacaaattattgcactcataactataaatggaatttaacattaatattaanatactaaatccaacagtggtttaaaaatataatcctcccccaannttcaaaatcgaatgaacatttggaaatccaccgatgttagtgtctggnttaggaggtttagggnattctgnttnnnnnnnnnnnnnnnnnnnnnnnnnnnnnnnnnnnnnnnnnnnnnccagtgcatgttccaattgtnaagnatcttaaattgattgacacangtgttttnctttgnnnnnnnnnnnnnnnnnnnnnnnnnnnnnnnnnnnnnnnnnnnnnnnnnnnnnnnnttcggnttcntgtgnnagtgtnttnttttntnnttttntnttntnttnttctttctgtgcnnnnnnnnnnnnnnnngcntttnttntgttgtnatgtttgggttgnnntgtntcgtgtttgtttgnttttgcntngtgtggnggtgtttgtgtgctttgtnaacctgggaggatctacagtcagataattagaattgtaaggttgctggctggattagtcaggttagcaagaatacaatgtagtaattaagaaataaacacaacctctggtttgattcacgcacacatttattcttgcatataccatgtctgatcttggcaccagaaactctccatagtgtgtcctacatgcagtgattcagtgatccaggctgatccaatctcataatactgctaactccccaccaggcctctgcatctctcaagcagggttggcaattgccttcgtccctctgtgctgctataacagaatagcacagactgagtaaattataaaaaaagagaaatttattttctcacagttctggaggctgagaagttcaatatcaaggtgcaagcattagtgtctggtaagggcttgttccatcgatggcatcctctcacagtgacatcctcccatggcagaagacacaagtgcaaaaaggggcaaactcttgctgaagcctcttttttattaatccattcatgaggacagagcaccatgacttcatcacttcccagaaggccctcacctcttaatctcatcacaatggagattaagtttcaacatgaattttgtagaggatgcattcaacccgtaacagcaattatgttcacacattaatataaaaacaaagatctatctttataaaatgttaaacatttattttgcattccaaattcccagatcctagagttaaaatcattatgaagaagtttttgagcctctattatatggctgtaacatttacaaacctccaaatatttcaaagccactgttttggtattgattaaatgagaataaaatgtgttatgagctcacctcaattgccctgtcatatagtattttatcccatttttatctctctcttcttctcatgaagcttttagagcattaaacagtttatatatgcaggca

SEQ ID NO: 318389 - DNA, 1872 bp, Homo Sapiens
  misc_feature (249)..(249): n is a, c, g, or t
  misc_feature (483)..(483): n is a, c, g, or t
  misc_feature (785)..(785): n is a, c, g, or t
tatgggttctgtttattaaaatcctattgctcctactggccctgtgtcccgcctccattcctgtggttggggggaaggaagggcaacccgacccctttccactggccccatcagccctcagtggtcacgggcagtagccgctcctccagcagggttatggcaagcatgaggccgccccccagcagcagccccagcccctgcaggagcacatggggcgtaggcaggggctccggaggacggaagcagggntgggtagcatgtccacaagggccacatagaggaagaccccagcagtgaccccaaacacccagggagtgagggggacagggcccagggctgagccccacccccaggactgcaccccccaatcccagggctccagacacgaggctcagcagcagcagccgccgaaaggacagccctgactggagcagcatggcaaagtcacccagttcgtggggcagctcatggcagaagaccgcnaaggtggtactgaggccgctggagaagccatcagagaaggcagcacctatggccagcccatcagtgaggttgtgtagaccatctcccaggaggaccatccacgtgatatcagtgccaccctggtgcccatgactgtggccttggtgcccaggaggggccagagctggtgggtgctggctgttcttctccctctggccctgagcccctggctctggagctgcctgttggggctgaagggccatcccactgccattctccggatccaagttgcgtgtttcgagattccttcgttttcgcctgcngcatcttggcctgagccctcggtgccgcaaaagccccagcatgttctccagcacaaagagcaggaagaggcctccgagcactgacagccccgggcccaggtccttctctggtagtccgcccaggtcccttgtgccgcccttcttgtgcatgcggtagcagatgtagcagtgcatccccacaaagagtgcccaccgccagggcccccaggaagcccagcaagggccgtagtagacgaggtcccaggagccgcagcagcagcagggataggggagaagggaggctgagcaacaggactgccagggcactctgaagcagggcagatagtagatcccctgggggtgcaggggccggagcgccgatgcagacgcggctgtcgatctgataaagcagggctgggcacagcagagcaaactgacgaggggtcagaggagcagcggggctcaagccaaaattgaccagcagctgggagccgttcagacaatcctcattcaggtggtcagccaatgagtggtccagcaacagaagcctgtgaaggaggtccaggcccgagggggctggcccacggggtaggtgaggggcctttgactcttccaggtcaccccaccctgagggacccagaggcatccctgcccagacatccacactcagctcagggttctgtggcctgtgtgtggaattgtctgcagctggggatgcagcccgtccagtcagaggcccatgctgtcccaggcgaagcccctgaactcggcctagccccaggctgtggagaagccgcgccaagccccctgcagtcagcgtcccattctcgccgtacaggccaaacagctgggccaggtaatggttctgctcctgctcagcagggcccaggttggggactgagccccctacccagcccaagacgacccacacacagaagccggccagcagatgactcactggggaccccatcattggtgaggggaatggcttaggggctcaggttctggctcctattctccccgaaacatcctgaggactgtgccctgatagcaggagacaaggacacccagaggaagggggacacaaccttcttggttccagctgggg

SEQ ID NO: 318390 - DNA, 1039 bp, Homo Sapiens
  misc_feature (12)..(13): n is a, c, g, or t
  misc_feature (46)..(46): n is a, c, g, or t
  misc_feature (50)..(50): n is a, c, g, or t
  misc_feature (566)..(599): n is a, c, g, or t
ttttttacacannatacaaataaaagtttattgtacaaaatttaangccntcgtatttcatagtccaccagggttaaagaaacactggataatttaagtccttcacaaaaatttcacttttactcctcctcatctctaactattaaaatgacccagccaaatgttatcaaaacaaacactgtaaataacaccaagtcttttaaagacgactatcccaaatgttatttcttggcataggtgatcttcatagcatgggacggtgtgatcttaaatccctgtaaagcatccctggcagctccagcctgcccatcattttcaaattcaacaaaagcaatgtcatgcctccctggtaccagacgtacttccttgaagccagggaactgattaaacagcatggataacatcatctcattagtctcttctggtaagttattaaggaataaaatatagtttggagggtaatcagggacctgaggatttggtgttgaatttccttgggtattagctgaatttggagttccctggccaggctttttgtttgtggttgttgcagtctgttccacagnnnnnnnnnnnnnnnnnnnnnnnnnnnnnnnnnngtcagcaaaagttccacgcatttttgatattatatccgaatctgtttttgcatactgtattcgcattggtttaccataaaatggaaatccttgtagctgtctcaaggcatttgtggatgagcccagttccttaaatatgacaaaggcctgccccctcatcttcatggtctttaaagccacaatgtccaccacatgaccaaactgagaaaacagggcatatagggatctcttcaattcttcctttttaattttgtcattcatattgttgatataaattgtatgatttggtctgatatccatgtttgtgttaaattcttcaggagacagtaaaaaatctaaggcctacgccgactactgtaagaaccaaaagcaggaaacggagccaggcaccggaagcaacgtagccacgctcctcaatcgagcgccgacaagtctagaat

SEQ ID NO: 318391 - DNA, 1083 bp, Homo Sapiens
  misc_feature (576)..(609): n is a, c, g, or t
ccccgggaatccaaaataaaaagtttaattgtacaaaaatttaagggccttcgttattttcatagtttcaccaagggctaaagaaaccactggataatttaagtcctttcacaaaaattttcacattttactcctcctcatctctaactatataaaatgacccagccaaatgttatcaaaacaaacactgtaaataacaccaagtcttttaaagacgactatcccaaatgttatttctatggcataggtgatcttcatagcatgggacggtgtgatcttaaatccctgtaaagcatccctggcagctccagcctgcccatcattttcaaattcaacaaaagcaatgtcatgcctccctggtaccagacgtacttccttgaagccagggaactgattaaacagcatggataacatcatctcattagtctcttctggtaagttattaaggaataaaatatagtttggagggtaatcagggacctgaggatttggtgttgaatttccttgggtattagctgaatttggagttccctggccaggctttttgtttgtggttgttgcagtctgttccacagnnnnnnnnnnnnnnnnnnnnnnnnnnnnnnnnnngtcagcaaaagttccacgcatttttgatattatatccgaatctgtttttgcatactgtattcgcattggtttaccataaaatggaaatccttgtagctgtctcaaggcatttgtggatgagcccagttccttaaatatgacaaaggcctgccccctcatcttcatggtctttaaagccacaatgtccaccacatgaccaaactgagaaaacagggcatatagggatctcttcaattcttcctttttaattttgtcattcatattgttgatataaattgtatgatttggtctgatatccatgtttgtgttaaattcttcaggagacagtaaaaaatcccagcttcgcgcttcgtccgctcccagctgcaacaggggagaaaagggccgaggagccaggaaaaccgaaacagcgaggtagaaggcgcacgaacccacctaaggcctacgccgactactgtaagaaccaaaagcccc

SEQ ID NO: 318392 - DNA, 1015 bp, Homo Sapiens
  misc_feature (45)..(45): n is a, c, g, or t
  misc_feature (59)..(59): n is a, c, g, or t
  misc_feature (73)..(73): n is a, c, g, or t
  misc_feature (105)..(105): n is a, c, g, or t
  misc_feature (157)..(158): n is a, c, g, or t
  misc_feature (161)..(161): n is a, c, g, or t
  misc_feature (189)..(189): n is a, c, g, or t
  misc_feature (214)..(215): n is a, c, g, or t
  misc_feature (220)..(220): n is a, c, g, or t
  misc_feature (229)..(230): n is a, c, g, or t
  misc_feature (242)..(242): n is a, c, g, or t
  misc_feature (251)..(252): n is a, c, g, or t
cccggggtataagttcgttgcccttccacccccccttgttgaaanccccggtagcccgncccttgaaggagtntgggttcccgtcttggacccccggcctgggancaatagggtccatttggggagctgcccaggggcctcccgctggatccttcgnnaanggaagaaagggtgtcgtgcttgggtcancggggctgggggtgcctgctggggnnctggnaagagggcnngtcaaagttttnccagaaggnnagcttctccaaatgaagtttatccagtcggcattctcgggtgaacccccatgctcccagggaagatctgtcggaacttggagcggaccttgagcagcgggtgaaggtggccgctgtcggggaggacaccgtgggccaagaagttgtagggcttgaagggccggtcccgccaagagccactggagatcatctctgggctcagctctgtctcttgcttggagatgctggtactaaaggcactgcctttgctcacccagtaggtcttcagagtcacttcagccaacagcttcctcttcctcagctcgctcctctccttctcccccagcttctcagcctgtcccccccggaccagctggagccgccgctgcacctcatcctccatgctgtccaccactcggaacacccggggcccgtcagccgcactcttgtccacccgaatccacttgttggacatggccttgctgaagcccactttgccactgggcagtcgcataagctcgctctgggccaggccctctgggggaatgcttcgaaacacacgggcctcatggctgccctcccgggcaatctcctcgccctccgcagtaagctcccagtgcttggtggaccgaagttcagcctcgatgacctcgcccagcgcctgaaggctcttcacggcgcccaccaccgcctggtgctccatgcccagctcagccgccaactcggcgctgtccaggccgccatcagacgcctccagccgccggagcagcagttccgccacctga

SEQ ID NO: 318393 - DNA, 1873 bp, Homo Sapiens
  misc_feature (35)..(35): n is a, c, g, or t
gacaaggggattatagtttagaggcgcgttaaggnggaaagccaccagatgggggcaactgcccactttattagacaatagggtggccccacaggtctcctcagggcccaccctcacagtagacacaccacacaggacaacagaaggaacctgctacccagtcctctgtccctgggattctggtcctgggacaggtgggaaagaggaaggtgggggctggcctcacagaggcctcataaatacaaggtcactggccagggatgcaaaggagcgcagcagcagggactcggggaggatgacctgtcctagagtggcccatgtcacgcagcctcctgtgtgggagggggcctcggctcggcatccaggcggcacaggggactgtcatacaccatctgcaggttcaccttgtggcccaccagctcccggatattgttgatgccatatttgatcatcgttgggcgctccagggagaggccccaggcaatgaccgacacgttctcgggaagccccatgggcagcagcatctctggacggaagacccccgagtttccgacctccacccacttcttcaggccttggtggtagctgaacacctccatgctgggctctgtgtatgggttgtaggctggcttgaagcggagttgcgtgatacccagcttggtgaagaactcccgcagaacgcccatgaggtggcccaaggtgagaccatgatccgccaccacgccctcgatctggtggaactcagccaggtgcgtggcgtccagggtctcattccggaatacgcggtcgatggagaagtacttgaccggagtgaagggcttcttctgggcaaggcggtagagcgcacgggcgctggctgatgtggtgtgggttcgcagtaggtttttccgggcctcgtccagcttccagttatacttgtacccctgtgagccgtagccgccctgagagtgggtccgcttgacccgctggacatagtccattgggagctgcagggcctccgctggatctcgaaggaagaaggtgtcgtgctggtcacgggctgggtgctgctggggctggaagagggcgtcaaagttccagaaggagctctcaatgaagttatcagtcggcatctcggtgaaccccatctccaggaagatctgtcggaactgggagcggaccttgagcagcgggtgaaggtggccgctgtcggggaggacaccgtgggccaagaagttgtagggcttgaagggccggtcccgccaagagccactggagatcatctctgggctcagctctgtctcttgcttggagatgctggtactaaaggcactgcctttgctcacccagtaggtcttcagagtcacttcagccaacagcttcctcttcctcagctcgctcctctccttctcccccagcttctcagcctgtcccccccggaccagctggagccgccgctgcacctcatcctccatgctgtccaccactcggaacacccggggcccgtcagccgcactcttgtccacccgaatccacttgttggacatggccttgctgaagcccactttgccactgggcagtcgcataagctcgctctgggccaggccctctgggggaatgcttcgaaacacacgggcctcatggctgccctcccgggcaatctcctcgccctccgcagtaagctcccagtgcttggtggaccgaagttcagcctcgatgacctcgcccagcgcctgaaggctcttcacggcgcccaccaccgcctggtgctccatgcccagctcagccgccaactcggcgctgtccaggccgccatcagacgcctccagccgccggagcagcagttccgccacctgaccatccgccatgaccctcgtgccgaattcgccaccca

SEQ ID NO: 318394 - DNA, 1038 bp, Homo Sapiens
  misc_feature (1009)..(1009): n is a, c, g, or t
ggggctttcttttcgggcccaagggccggttgaagccccacggggcccctggggtcgaattttggggtggggttctcccactaagggtttttcgcggagccctgggtccaaggtttcccagttaatgcttggtaccccctgtgagcccgtagcccgcccctgagaaggggggtccccgttggcccccgcgggacataagtcccattgggagctgccagggccctcccgcggatttttgaagggaagaagggtggtcggggctggtccccgggcctgggtgctgctggggcctggaaggagggcgtcaatagttccagtaggagctctcagatgaagattatcagtcgggcatctcggtgacccccatctcccaggaagatgctgtcggaacttggagcggacctgtgagcagcgggtgaaggtggccgctgtcggggatggacaccgtgggcctagaagttgtagggcttgaaggtccggtcccggccaagagccagtgggagatcagtctctgggctcagctcgtgtcgtcttggcttggagatggctggtactaaaggcactgccgtttgcgtcacccagtaggtcttcagagtcacttcagccaacagcttccgtctgtcactcagctcgcgtccgtctccttcgtcccccagcttctcagcctgtcccccccggaccagctggagccgccgctgcacctcatcctccatgctgtccaccactcggaacacccggggcccgtcagccgcactcttgtccacccgaatccacttgttggacatggccttgctgaagcccactttgccactgggcagtcgcataagctcgctctgggccaggccctctgggggaatgcttcgaaacacacgggcctcatggctgccctcccgggcaatctcctcgccctccgcagtaagctcccagtgcttggtggaccgaagttcagcctcgatgacctcgcccagcctcgtgccgaattcgccacccaggcctcggtacctataanaatgaggcgggagcgtgtggttgattttt

SEQ ID NO: 318395 - DNA, 3281 bp, Homo Sapiens
  misc_feature (1426)..(1426): n is a, c, g, or t
  misc_feature (1707)..(1707): n is a, c, g, or t
  misc_feature (2031)..(2031): n is a, c, g, or t
  misc_feature (2061)..(2061): n is a, c, g, or t
  misc_feature (2233)..(2233): n is a, c, g, or t
  misc_feature (2809)..(2825): n is a, c, g, or t
gctcataccagctcaattttaattttaaagtgacaaatgtacaggtggaataaaattttaagcgacaccctccaaattccttttatatgacaagaaggagctgaatgtaattttacaccattaccaactaaacagtagttctttagcaataattaggaagtcacagcacaaaaacgacaccccagagttgtggtccatttataaatagattttcacctaggcttcgttggaagaagtgattttatatctatcctcaccaatgggtcaaagtgggcacaggtggggctgtttctatactttgaggcaaattatgcctcactaggctgggcaatgttttgcggggaacctgggccgtgcagctgggttcaccttacctgcatggtctgatctgcactttgaccctcctaaggaaggtccctggtctgagtgaaactctcaggtgccatgtaaccaaataagggtagggtagatctgacaggtggcctctgctttaacccagcagcttacaagttttttgtgacttggggaaaagaaataagcagtaatggctaaagactgaggtaaccctaagttcgaattgtagtctacctgtcatgaataaaataatgactaatatccctccaaacaagctataatttacagtagtagtccatacaaactgtaatccacagtggaactcagcgaagttcttaccaaaacatcacttgagcaggaaaccctttgtaatatggctgtgcaatgagaggaacgatcctttggaagggagctcaatctgggagaatgaggtggaaaacactggggagttctatgcctttgcagaccctcaagtcaccccggattactggtcagagaagctggctgtgccatgggccaaaccagcagcattctcccttggcttctgttgctgcactgaggctgccggggacacagaaggatttagttttctttacaagtaagcactttggtgggaaagcattgcaaaagttgtcaacagaaaatcattaaaaccctgaagaacaaggtgtgagggtcacaggcaaacagttatcagcatatgattcaaacactggtttgtcctcaccacagagcttggaaggttcagaaaacttccaagagagatgatcagacactcacgttccatccactgaagggcacagaacagtaggaactaagttggccctgttaagcaggcacatgcagccatgtccgatccacggatgtgcttttattctttaagaggatcatctagaatcctcagaaatgttatcttagcagccctgagatcatgccctcaataactctgccaagggaagaggggagaaaccacagacctagagatgagtcaggatgcccactttgtgccttggggtttgctaggggggctaagctgctaactgggctgtgccttattggtgacactgaattnatggcaaagccactagaagcacaaagtgttggtgcaatcactgacatctcaaaagtatatcctgaaaatagaaatgaacagattccatatgcagactagaggtgatttatacttaaaacattttaatataaattaagctataacttaagttacaaccaaaagaaaagccaaaaagacactcagcaattaagaatgctgaacacatacacaggacatcccaaacacaaggccattaaagcgatgtcattttcattgtgccaactttacattcatcatgtgcnagtccggtggggccacgctgccccgcaccacgtcatgccgtctggcactgcactccagcctggggcccgtcttcgtcctcctcgtaggcctccctgtgctgacgccagtgctgctcattgggacaaaactccttcagctccacctgatccatgtcatctgtcatcctcactttctgtcgaggagggagtgaagcttccagctgaggaagcttttccagagaaagccagtttttttcaggaaagattactaaaaactgtatgatcagaatccctttttccaggggtgctttgtagatgggcattccttcatcgcgcacgcctctnaggtccccgtgcttgatcacctcacctgcnttggatgtgataacaagaattcgattgtgcaatgtttttatcgtcttcttgaagccacaaagagcttcagaaagctgaattttcattttcatgatcaagtcatggcctcgtctctgagagacactatgatccttctgatcaagcacaattatgacatcaccaggctccagcncaggctcctgatctccttctccatgaaatagtatcttttgcccatctttcatacctttttcaacatgtacctcgataatcttcttctcacggatcaccttggccccgctgcagctctcgcagcggtccttggggttgatgcgctcaccctggcccttgcactcgatgcacacggtctggatctgctgttccatgcccggcccgatctgctggatgtggatctgcatcccccgccccttgcacagcgggcacttctccaccgatcccttcttcccaccaacaccttcacatttctcacaaattacatttttctggagggccaatttcttcgtgactccattatatagatcttcaagagttacagataactggtgtacaacattcttgcctcttctctctctagccatccgtccaccaccaccaaagaacatgtcaaagatgtccatgggtgaagagaagctggggctgcctgagcctccttctttaattgcctgctctccgccttggtcataaacatcccttttctttggatctgaaagcacttcatatgcctgggatatgagtttaaactttaaannnnnnnnnnnnnnnnntttttagagaagtttcagttgttttgttaagcaaacctgccatataaacatacaaagtaatagaggtattctgcccccaaacccttgaactagccagtctatacatcctctacctggaatctgacttgcctgtctacctactcctttggtaaagtgggaaacacagggcaaacatattaagggactggtggtagggacacgataagaataagggagagaagccagtagagagggaaagtttctcactaatccggctgcaccagacaggaagtcgagaccagctaggataccatgagacagtgccaggggtgaacctctaaccagatagagccaggactctgggcattaccactggctcacctcctcatgggaatcatttcactagtttactagaatgaaattcaactacaggcatctgtgagcatctaaccacgtgccagacattggatacaaacc

SEQ ID NO: 318396 - DNA, 537 bp, Homo Sapiens
  misc_feature (32)..(32): n is a, c, g, or t
  misc_feature (45)..(45): n is a, c, g, or t
  misc_feature (52)..(52): n is a, c, g, or t
  misc_feature (68)..(68): n is a, c, g, or t
  misc_feature (75)..(75): n is a, c, g, or t
  misc_feature (86)..(86): n is a, c, g, or t
  misc_feature (97)..(97): n is a, c, g, or t
  misc_feature (119)..(119): n is a, c, g, or t
  misc_feature (151)..(151): n is a, c, g, or t
  misc_feature (418)..(418): n is a, c, g, or t
gggaaccgaacccttggaaagggaacctccanccggggaaaatgnaggtggnaaaaacactggggganttcctangccctttgccnaacccctcaantccacccccggattaactggtnccagagaaagcctgcctgttccccagggcccnaaacccagccagcattcttccccttggccttcctgttgcctgccactgaggctgcccggggaacacagaaggattttagttttctttacaagtaagccactttggtgggaaagcattgcaaaagttgtcaacagaaaatcattaaaaccctgaagaacaaggtgtgagggtcacaggcaaacagttatcagcatatgattcaaacactggtttgtcctcaccacagagcttggaaggttcagaaaacttccaagagagatgatcagnacactcacgttccatccactgaagggcacagaacagtaggaactaagttggccctgttaagcaggcacatgcagccatgtccgatccacggatgtgcttttattctttaagaggatcaa

SEQ ID NO: 318397 - DNA, 1858 bp, Homo Sapiens
  misc_feature (458)..(505): n is a, c, g, or t
tgagcaccaagcccggccatggatgagtttttatagcatggaattgctgggtcataggatatgatttaaattttacaattgtcctccaaagtagctatactaatttacaacttgaccagcaggaaatgcatatcactttcctaagccttgccaacactttagaaactttttactcatcggatagaaggaaatatggtttctcactgttgtaattgataattccttacatcataaacatcttttagacatttttggctatatttctattttataaattgttcatggattttgtccatttttaaaaactcagttgtcttaatgatttataggtctttatataatctttatactagtgctttttgtctcacttgtcatttatttgtggggtgccttaggaaaagttgtagaatttgatcctattcaattggtaaatctttcctttgtgattgttattattnnnnnnnnnnnnnnnnnnnnnnnnnnnnnnnnnnnnnnnnnnnnnnnntatggttttttctttttacgtctttaaagaaacttctcctaccccgtggtcacaaaaattcttacattttcatcaatatttcaacagctttgtgtttaatgttgggccttaaattccagattaattttagtgaatagtgtcaagtggggctctattatttttaatgagtaagcaattgtcccaactctattggctagcccaccagtctgaaatactgcctttatcacactaaactcccatgtgtacacaggacggtttccgaactccggttaagtccatcagtaccacagttttacttgtgttatcctcacccagtcttcacagggactccagtcccatttaacacacctgctctctccaactgtgcaatctcgttttttctagtacccactctcagggcttgggcatgaacctacagcccttgaactcagttggggagtagggaaatgccagtatcgcagcgattcaattcatatcttgatgattctccacatatcctttttcccttttagcctttatacccaagagaaactcagctggacaccagtaacataagtgctattcattgaaaagagcaaagcaagagcgctgaccccttacggacaggatgaaacaaaacaagctctgcaagtctgcctcctgctcagcatataggcttgttgccccactgggccatcttgttgttgatgggcatcttgcagaactgatcagactgtaagtaggcagcgattttctccaaagcctcaaaacggcacatgaaagccttcaggtttgggaactcatccaggcacttggggtcaaatatacggttctgatccaagatatcataggtgagaaaatccacaaaggtgagcttttccccggcaaaccatgagaatttccccagaaacatggagaattgtttcagttgtccaggtagctcttccaagtactgaggcttcagtttttcgtggtcagagctgtaacagagccttatcagttgtgtgcggaaatccattacttggttctctatgatgtccactcgaatcttttcttcttcagtctcaccacacatgttgtgcttgcgagcgatgtagcgcaagatggcattgctctgggtgatcttgttcttcccatccaggaggtagggcagattaggaaagtccaggtctagcttgaatttcacatccagccattggcttcgatcatagtcaggagcttccccgcacgtgtaccgtttctcctcataagaggtatccgtgaactccaggagcaggcggatggcgtgcgccagcccacgaatatcccagtacccgagaaccatagacgactcgcacgacatggtgacgggcttccgagccttcgaggactccc

SEQ ID NO: 318398 - DNA, 886 bp, Homo Sapiens; identical to SEQ ID NO: 135674

SEQ ID NO: 318399 - DNA, 1673 bp, Homo Sapiens
  misc_feature (177)..(177): n is a, c, g, or t
  misc_feature (329)..(342): n is a, c, g, or t
  misc_feature (742)..(742): n is a, c, g, or t
  misc_feature (780)..(780): n is a, c, g, or t
  misc_feature (1155)..(1155): n is a, c, g, or t
  misc_feature (1236)..(1237): n is a, c, g, or t
  misc_feature (1239)..(1239): n is a, c, g, or t
  misc_feature (1269)..(1269): n is a, c, g, or t
  misc_feature (1301)..(1301): n is a, c, g, or t
  misc_feature (1304)..(1336): n is a, c, g, or t
  misc_feature (1349)..(1349): n is a, c, g, or t
  misc_feature (1351)..(1351): n is a, c, g, or t
  misc_feature (1354)..(1354): n is a, c, g, or t
  misc_feature (1358)..(1358): n is a, c, g, or t
  misc_feature (1375)..(1375): n is a, c, g, or t
  misc_feature (1380)..(1380): n is a, c, g, or t
  misc_feature (1397)..(1397): n is a, c, g, or t
  misc_feature (1420)..(1441): n is a, c, g, or t
  misc_feature (1481)..(1481): n is a, c, g, or t
  misc_feature (1483)..(1483): n is a, c, g, or t
  misc_feature (1485)..(1485): n is a, c, g, or t
  misc_feature (1490)..(1490): n is a, c, g, or t
  misc_feature (1499)..(1499): n is a, c, g, or t
  misc_feature (1502)..(1502): n is a, c, g, or t
  misc_feature (1510)..(1510): n is a, c, g, or t
  misc_feature (1514)..(1514): n is a, c, g, or t
  misc_feature (1521)..(1521): n is a, c, g, or t
  misc_feature (1533)..(1534): n is a, c, g, or t
  misc_feature (1537)..(1537): n is a, c, g, or t
  misc_feature (1560)..(1560): n is a, c, g, or t
  misc_feature (1576)..(1576): n is a, c, g, or t
  misc_feature (1579)..(1587): n is a, c, g, or t
  misc_feature (1592)..(1592): n is a, c, g, or t
  misc_feature (1610)..(1610): n is a, c, g, or t
  misc_feature (1625)..(1625): n is a, c, g, or t
ataagaagcagcggctatgtaaaagtatatataaattgagcagcaaaaggaccctccatagaaggagatggttggggacatgaagtttttcgcgaatttaaaagaattgtagcaatatggtccggctttatatgttttagtgtaaacccaacataggtgcaagtttatttaacaagnctataaatattgaaaaatgatttagtcaagtataaatattaagaacagcttagtttcaaacaaatacaattattatggagaattcaccttgcaagtggaaatgccaatcgtctaatcagcagtagacttcacaaaaggtaagtgttcaagtnnnnnnnnnnnnnngatacatgctttactatctttaattaacgaattcacaggaaaacaatgtgttggtttctcagatgatcagttggtggcttttttaatatgaatctcattaagaatggcccaaacagcagaattctgaataactgaaagtcgaaaggctgaaatgggattgagacttggatccaccattccttctgcaacaccattctcaaattttcctattctgaaatagccatcaactaatcgtttgtctttggtttctttgcttatttccaaaccttcactcttaaaaggcaaaacttccacagttgtgtttagcagaatatctccaggatgttcttggttgccgctatggaacaaataactttctacattgactggtttatcagatttaaacaagatgtagtctccnagctatcggtgtgatagcccagaagaaatcctctcccnatgtaagttttctccagcgtatgcccttggtagaccttcaaggaagtagatacctccgcaggtgggtttacatggattttaagcaagtaatggtttcatataatctttatccgtgagtttttggatttttcctgatagtgatgagtgcagaccaacatgttggaaaagggaaggtctgaagcgaattcgcagatttgctttctgtctatcacaatgttttgcatctttttcagggttgcagactttcacccagagaatatggtccaggagccaatcaatgggtttctccttgtaaaacatgaatatgaattctacaatcagagtaagatccggcgcttgaaacattttaccaatgaagcccagctgggaaaactntagaatcatccattcctcagaagaaagttgaagtgcaaaattttttttggtattaaaataattttgtttgacaataatttnntnttcaagctgaatgtaatttatgcccttttnttgagcatacatcattagaaaacagtaatttnggnnnnnnnnnnnnnnnnnnnnnnnnnnnnnnnnngagtctccaaatntntcntttnggtttgtcaagtcaggntaatngttttcagggggtgatntgacttccaccaagccagaactnnnnnnnnnnnnnnnnnnnnnntccaggttggctacaacaccatgtacataatcaatttttntntntcctntgaagactnctntaacacantccnacttttnttcaggatacannttntcaataagggaatgaagagtttntttgaggtaagatttnacnnnnnnnnncactntgggaatgcccatgactnttgaaactcctgttnttccgttgccaatctgtacagcatgttgaagacttccttcatttttca

SEQ ID NO: 318400 - DNA, 1486 bp, Homo Sapiens
  misc_feature (156)..(156): n is a, c, g, or t
  misc_feature (1193)..(1193): n is a, c, g, or t
  misc_feature (1224)..(1224): n is a, c, g, or t
  misc_feature (1230)..(1230): n is a, c, g, or t
  misc_feature (1249)..(1249): n is a, c, g, or t
  misc_feature (1266)..(1266): n is a, c, g, or t
  misc_feature (1301)..(1317): n is a, c, g, or t
  misc_feature (1321)..(1321): n is a, c, g, or t
  misc_feature (1341)..(1341): n is a, c, g, or t
  misc_feature (1357)..(1357): n is a, c, g, or t
  misc_feature (1396)..(1396): n is a, c, g, or t
  misc_feature (1412)..(1413): n is a, c, g, or t
  misc_feature (1421)..(1421): n is a, c, g, or t
  misc_feature (1423)..(1423): n is a, c, g, or t
  misc_feature (1428)..(1428): n is a, c, g, or t
  misc_feature (1443)..(1443): n is a, c, g, or t
  misc_feature (1446)..(1446): n is a, c, g, or t
  misc_feature (1451)..(1452): n is a, c, g, or t
  misc_feature (1457)..(1457): n is a, c, g, or t
  misc_feature (1462)..(1462): n is a, c, g, or t
  misc_feature (1466)..(1466): n is a, c, g, or t
  misc_feature (1469)..(1469): n is a, c, g, or t
  misc_feature (1472)..(1472): n is a, c, g, or t
  misc_feature (1478)..(1478): n is a, c, g, or t
gtacatgaccttaatacaattaagtatttgttaaatacatacattttaaagaaacgtcatcatatccacacacctatgaggcacctgcccaggaccacagagccaatcaatcaggtgatgagtgattccaggccagccaggaaaaccaccgcccanttgacacagggacttgcaccatcccatccttggtttgcatggtgcctgccatgcttccctgtattactgttaaatacatggggcaggcctttggaggatcccaatgttttaaaagggcaatacgaatatgattctaatacataaaaagtatgagggcagcaagaatttagttacaaaacccaaaaatcctcaaagagaagccacatagcactgtgcagtgttaccactgcctcgggtcgtgggcagggcacaggtgaccgggacaagtcttatttaactgatttcacaagaagggtccgagttttattagacaacccatgtcaaggtacaaaatgattaatgacaatatcagccatattctattagccaagtgccacctgtcactatgaaactatcctgtaggacatccctgggctctcagttgctaatgggctgctgaagaaatgaatgtcctcaaatcgagaccctaacacaaagagattccagagagtggcttagaaaacccagctactcttaccaatgtggggaaagggtcaggggaatgaacctctgcaggacaatttgaattcccaaactgagtaagagcgaaacaaatatgcaggcaaggcaaagcctcaggggggctcctgggtctggggcagggggtgggagacaggagaggcaaaatggcagggacttgacagcaggttcctcttgtctacttcttcctcccgcctctctccttgagggccaggtggatgactgcgccattggccatgttgtagtaagccagtgagttggaatctttgatgaagataccctcatactgtagcttctgtttccctgcaggcatgcctgtggcttcatgaatcttcaccttaatgacagagacctggtccgtgtgtgggtgggtgtagaccagcacctgcccattcagtttccattccgtcttatcctgcatgttgggcacctggtctttgttggacactggacccttgtttctgcgcgggaactcctcctctggcatgaggctgtcctctgtcttcagttttttggangtgggctcatcttccatgggaggtgggggangcacanggggcattggggctggaantgggacaagtgccacangtggagcaggcacaaaggctgttggcacaatcatnnnnnnnnnnnnnnnnnccanaataagaggggccgagggangcatgggcacacgttnattctgggcgcgtggatgatgggcggcataggggcgatnaatgagcctgggggcnnccggacananatgcnattgggggcgggggntgnagggnntgcgnaaaantgtntangantggagnggattgtg

SEQ ID NO: 318401 - DNA, 2733 bp, Homo Sapiens
  misc_feature (679)..(695): n is a, c, g, or t
  misc_feature (1813)..(1856): n is a, c, g, or t
  misc_feature (2006)..(2006): n is a, c, g, or t
  misc_feature (2235)..(2266): n is a, c, g, or t
ccctaacccaaggagatccagagagtggctagaaaacccagctactctaccaatgtgggcaaagggtcaggggaatgaccctctgcaggacaatttgaatttcccaaactgagtaagagcgaaacaaatatgcaggcaaggcaaagcttcaggggggctcctgggtctggggcagggggtgggagacagtagaggcaaaatggcagggacttgacagcaggttcctcttgtctacttcttcctcccgcctctctccttgagggccaggtggatgactgcgccattggccatgttgtagtaagccagtgagttggaatctttgatgaagataccctcatactgtagcttctgtttccctgcaggcatgcctgtggcttcatgaatcttcaccttaatgacagagacctggtccgtgagtgggagggtgaagaccagcacctgcccattcagtttccattccgtcttatcctgcatgttgggcacctggactttgatggacactggacccttgtttctgcgcaggaactcctcctctggcatgaggctgtcctctgtcttcagttttttggaggtgggctcatcttccatgggaggtgggggatgaacagggggcattggggctggagctgggacaggtgccacaggtggagcaggcacaaaggctgttggcacaatcatnnnnnnnnnnnnnnnnnccataataggaggggccgagggaggcatgggcaccacgttgattctgggcgcgtggatgatgggcggcatgggggcgatcactgagcctgggggcagccggaccacagatgccattgggggccggggcatgacgggtactgcggagacaactgtagtacgaactggaggtggcattgtgggtggtcggggcactgaagtgatgggtggagccgagctggggatgttggtggctgaagatggtggcggtggctgttgagggatttcattgggcttgctggggccaatcttctctttagtgtcatcctctggcaccaggcctttggccttgtgaatggcctcaatctgctcctggagggtgatgttggcctgggcagcctgctgggtccgggccatgctgcctgagtggccatcccaggtcaccttttcctctggcttctggatctcctcctcaccgatcttcttaccaatggctgtttcctctacaccgaagatgtcagtacgccgctcagccaactgcttcaagctgctctcaatatccagacctggtgcgtacacctcatcatcgctctgcttctcacggatggagcgatcccgctgctccagccagcgagggtcaagaagtccaatgcgcatgtgttcctgcattttgctggcggggatcttctccccagtaatgggggacacaagatactcatctggagcaggggctggaggcaagggcttggaggctttgggatcataatccttgcggacaatgacttggtctggagttgggggcagaggtggaggcatgggtgtctctgggggtgggggcactttctgcccttcttcttcatcatctgaaccctcatccatatcttgtacttgggtgtcctggtccagctgggaaggaggctcctccgccttctcctgtttgtcatcctcctcatcagactcgacctccatctcaacttcctcactctccccaaacttttcatagcgctcctgaatgaggattcgggcccccagctcctctggcgtggtggggggagggaagttcccttgctcattgggttggaagtccactgtttccaccaccacaaaatcatgccagtcgatctgagcataggccacccgnnnnnnnnnnnnnnnnnnnnnnnnnnnnnnnnnnnnnnnnnnnnggaatttggcccattccactcggtaacacacctgatccaaaacttctcgggggttttcagcctctttcttgagctttgaaaataaacctttgggtggaatcaagatcttggtgtactgttccactagcttctgtgaagtagttgaagagntctgtgctgtgggcggagaaagtcaaaactggtagttgcgctgctctttctgcatcagctgggtcagaaactggcgcccattcctggccacaaactgagccgtcagcttcaccacatccaagtcgaaggctgagatagagggaggatcagcaatgaactcaaactcaggaggaggctctttgggcacgatggtctcttggattacttgggcttggaccttctggggcannnnnnnnnnnnnnnnnnnnnnnnnnnnnnnnatgaccttggggatggcggcggacggctcctgagccttcccttccttgaactcgctgaccttgtggcggtagtaggcatggtaagggtcattggggttcagaaagttgaacttggggttgttgatctcgttctgtcggatcctagcttcaaattcaggcccgtttctggccacaaagctggcagtcttgtcaacaatatttctgacctctggaggagggtaaataatccccacaactggcttagaaggtgcagaatcctcctttgaagatgcttcttcttctgtgggctgtttgggctccgtgggcacgggcggcggcgggggcaccgcctgcacgggtccggccggcatgactgcgacgctcagggctgccagtccgcctcggtgtcggtgagcggtgccgcctcaagacagcctccccgctcggtcagtacgacgagctcgcaagatggcggcggccgagcgagt

SEQ ID NO: 318402 - DNA, 1840 bp, Homo Sapiens
  misc_feature (35)..(35): n is a, c, g, or t
  misc_feature (39)..(39): n is a, c, g, or t
  misc_feature (360)..(363): n is a, c, g, or t
aataaagcacatttattaaggcaaaggcaagctgncttncagaacatggccaaggcgcgtgacgggattgctccactttaccaccactcagggcacccaggccccaggggtcctgggtccaccccaggccagcagaagctatgaagcttacgcataagcctggctctccctcttcacgaaggcctggaagaggctgcccagctcccagagggttggggcccactcgccggccagcagcccctgtgtggcctcgaggttttcctgctccagatcctgctgtttctgctggagctgctgcccccgatcctgccccaagggaaagttgagatgagtctgtccgggacaggcttcccgccaggnnnnggggggactgtgtaccccttcacacaagcaggagcaaggagaataccccccgccattccccaaaggcagttgctggctttgaaggtaggaactcctctccccagctctgaaatctcttccactccctagttccttcatatttccagagtcccactgggagtgggggaggtctatcatcccctcaaggtagcccctactccctgggggatacctgatctctctccatcagccccagggctgcctggtgtccacggtagagggtatgccgacgatctacctgagtctggaatcggggcagggtccgaacagggtcttgtgctccaaaagtgggggacagcacctggggggcctgggccacccccaccccgaagatgaaaggtttgaacacagacctggatgggtctggcgtggcggtaagaaagtgcacgcagggctgcgtgggatcctggggcaggacagacaccatgctggccgtggtgcgaaagcctcccgagtccatacagataccactctccttgtctctgaggatgcccatcatcacctctgccgtgatgcccccttgccgttgccgcagcagctcccgccctgcctggaagcgggccttggcagcctccatgcgcacaggctgctgggtcagggagaagatctgagcaaagtcaaaggcaccctgcccatcccaccagcccttggcctgggcatgagtccgcagctccgggtgttgggccgagatgtccgtgccaatgctcagctggttggagatgttgcgggccccctcctggatcctctgtgcagcccagagcctcccagctgtctccagcacccacgcctcagtgcggtcagccagcaggaaggtgctatggtaggagaatggcgcagcatcctccaggcagttgcccccctgcccatagtgctccagtaaccctgtgatcacatgcaaggcctcctgggcagagctgctccgttccaaagccagcctgagtaggtccatgcccagcagggcttccccctccccaactggctccttcgtccacacagcctcgttgccaatgcagacaccatgctcgttggcgcccatctcagccccccatagccaagaaggacggctcagaatcacagcgtgcgtcttcgacacctgttccacttcaatgtaggtgcactggagccggctcccaggagtgtgagtgcctgcggggacaaacaccacctcctgcacctcgtcccggggtcggtccgagttcttggcaaagatcacagccgggatggctgaggccgggggcacggagacaaagcagtcgcaggaacatggggagtcagggctcgacgacgccatctggggagaggcgggcctctccattaccctggccacgggtcagccccgaggagcagcctacccccacacgtgtaaaagacgcgcaaggaagacaccgccgtggctcctggacgctcggcgcacacaccatggacgggatcccgggaa

SEQ ID NO: 318403 - DNA, 2105 bp, Homo Sapiens
  misc_feature (216)..(216): n is a, c, g, or t
  misc_feature (267)..(275): n is a, c, g, or t
  misc_feature (721)..(955): n is a, c, g, or t
  misc_feature (979)..(987): n is a, c, g, or t
gaacttcacttctgcctctgccacctacctccgtatatcacgacgatactttatcgcttatcatatctgcaattcacaaaaggcgtggcactacctaattattctgcttactgtggtgttgccaagtcaccccgagaagtcttccaatccagtagcagttcccgcacaactgttaaacgcgcaaggcctactatatacaacccccaatagggcccntggacagaaaactgggtacgctaaacctgggcctcgagggatatcttgagnnnnnnnnntttgttgttgtgtgttgttcactagaacagaaataaattttaattcattgaaaagtgcagcagtgaacagggtccttttgaagggcactttctaagtcaaatgactgagatgacacagagcaagggcagaataggaacagaggatgcaaacacaggaagttacaaaattcagtgggaactaagtggtggtaaaactcaagaacccaactctacccatctaattccattggtggatcagttgaattaacttttgctttctttaggatgaatcctgggacaactttcctttaaaaaagcactaaaccttagtttagacacttaataagtttaagaacacttctcacagaataaggtaaaacttccatggctatcattactattttgtacaacagccctagtgttgtcaattaaaatgtgtttgcaggccgggcacggtggctcacacnnnnnnnnnnnnnnnnnnnnnnnnnnnnnnnnnnnnnnnnnnnnnnnnnnnnnnnnnnnnnnnnnnnnnnnnnnnnnnnnnnnnnnnnnnnnnnnnnnnnnnnnnnnnnnnnnnnnnnnnnnnnnnnnnnnnnnnnnnnnnnnnnnnnnnnnnnnnnnnnnnnnnnnnnnnnnnnnnnnnnnnnnnnnnnnnnnnnnnnnnnnnnnnnnnnnnnnnnnnnnnnnnnnnnnnnnnntgacaaccgcgagacttcatctcnnnnnnnnngtgtttgcaacagcaccatttgtcaaattcaaagatgctcaaaaggtgttccctactttgcatgagagggagagctttgtaacaggaaattgtataaggcaaactctctattcattcctaaggcctctgttcattcctaatgtttacatggttctctactctgaagggcaccaacatggacctcaccttcttaacatggaaaatcaaaatctaaatgaatacaattaaaaggaggcagcaagcttcttgcagtgggtcccttaaacattatgaaaacatcagtgcattgtgtagtctgttacgctataaactgaggtctctttatgaaagattattttagcacaaattcagaatgaagccagtccaagaaaaaaagaattggaagctatttgaaggttagataggaaatataccaaaaatagaagagcgtagagagggctgcaccacatcctaccacgcaagcacacccactgaactgagtaagagtggcgtggctgaggtgccgtcagcagctgactatgtcactcttatgagttctgctcaggaacaagcataaaactgaataatatgacatcacagtccaagacctggtaagagttggtttctttttatttggaaataactatggtcaactttcattaatgtggaagttgactgataatgttaagagtcaaagtgaaaaagaaagccgatacccatattcaacagtgctttcagttacaacattttttgaatttccttctctaaaacattcacagcagaggtgtccatttcacttgcctgtttcacctctagataccaccacagttgctggggtcatgtgaggtaaaggaatatatccaattgactgttagcccaacatgactatctgcaattctgatagaaaagctactttcagccatgtcttacaaagtgcttaaagctggacagaagactttaaataaagctaaaatcgcttattgcctgagttgaacaagttacaaaccacagctcttcctcctcccctgctgtctcaccaccaattagccttcttgtgaggacaacattagaaatggaactggtttttgagccaagaaacataaaaatttaggtgttcttagccaagcgtggtggctcat

SEQ ID NO: 318404 - DNA, 918 bp, Homo Sapiens
  misc_feature (143)..(146): n is a, c, g, or t
  misc_feature (148)..(156): n is a, c, g, or t
  misc_feature (159)..(162): n is a, c, g, or t
ttcggactccccttttagggaggcccggccagatttatccactttggtacaagaaaagctgggttcaggaaaccagctatggcccatggcccattttcattccctcttttttcggcaccccgacatagatgcctcgagttttnnnntnnnnnnnnnttnnnnggatttcacaagaagggtccgagttttattagacaacccatgtcaaggtacaaaatgattaatgacaatatcagccatattctattagccaagtgccacctgtcactatgaaactatcctgtaggacatccctgggctctcagttgctaatgggctgctgaagaaatgaatgtcctcaaatcgagaccctaacacaaagagattccagagagtggcttagaaaacccagctactcttaccaatgtggggaaagggtcaggggaatgaacctctgcaggacaatttgaattcccaaactgagtaagagcgaaacaaatatgcaggcaaggcaaagcctcaggggggctcctgggtctggggcagggggtgggagacaggagaggcaaaatggcagggacttgacagcaggttcctcttgtctacttcttcctcccgcctctctccttgagggccaggtggatgactgcgccattggccatgttgtagtaagccagtgagttggaatctttgatgaagataccctcatactgtagcttctgtttccctgcaggcatgcctgtggcttcatgaatcttcaccttaatgacagagacctggtccgtgagtgggagggtgaagaccagcacctacccattcagtttccattccgtcttatcctgcatgttgggcacctggactttgatggacactggacccttgtttctgcgcaggaactcctcccctcgtgccgaattcgccacccaggcctcgcttctt

SEQ ID NO: 318405 - DNA, 1405 bp, Homo Sapiens
  misc_feature (48)..(97): n is a, c, g, or t
aagtcttaagataatagcattatattaaagtgaaaccatcttcttttnnnnnnnnnnnnnnnnnnnnnnnnnnnnnnnnnnnnnnnnnnnnnnnnnnggtgcaagtgttggtttgaacaatgaggttatgagttctgggcagcagggctctgatgttggcccaatcggtgccttgcgtctgggccccgacaaggcaggcgggagagccccgaagcctccaggcagcaggagacagaagagaggacacagcattccaccattcaggagcagccagaagctctgacggaacagacttggggggagatgggaaaagcaggtttggacgcttccactcgagccagacgctgctttgtccccagggttagctgaacacggtgttgtgctgctgggtcacccggatgaatgttgccctcctgctgagctccttgagtttggcggcccccacgtaggtgcacgtggacctcagtcccccgagaatatccaggatagtgttttccacatctcctttgtaaggaacttccacagttttaccctcagaggctctgtactcagcaactcctcctgcgtgcttgttcatggcggtgtcagagctcatcccgtagaagagcttgagcttccgtccgttcctctcaatcacttctccagcacactccgtatgacccgaaaacattcctcccagcatgacaaaatctgctccagctccaaaggctttggcgacatcccctggacacgtacagcctccatcagagatgatgttgcccttcaggccatgggcagagtcggcacactcaatgacggcactcagctgggggtaccccactcccgtcttggtgcgggtggtgcacacagaacctggtccaactcccactttgatgatatctgctccggaaagaataagctcttctaccatttctcctgtcaccacgttccctgccataatggtgtgttcaggaaatttggcacggacaagtttcacgaattccacaaaatgttctgaatacccattggccacatccaggcaaataaacttaacctgtggcacagcttccaggatgctggtcatcttttccagatcattctgcccactgcctgaactcacggctacattctgcaggcattctgggtgatttgtggcaaagagcttccagtcatccagggagtaatgcttatgaattgctgtaaacatggagtgctgtgacatcacggctgccatctcaaacgtgcccacagtgtccatgttggccacgatgatgggaatccctgagtaggtctgctttgaatttcgaaacgtgaaggtgcgttcaagatccacctcggctcggctcttgaggctgtccgcttaggtcggagcaggacagtccttgaagtcgagcttgaggtccgcatctatgcggggcatggtgca

SEQ ID NO: 318406 - DNA, 770 bp, Homo Sapiens
  misc_feature (14)..(14): n is a, c, g, or t
ccctggctggcctntccgctgaacagagctgcggctgtgatgctgaggctgggttgcgtgtgctctgcagcgggtgaagcaaccacaggcttagaaaggtgcgggatccgacaggggcttgtcaccactccccgctgaggaagggaggttgtcactgccgttctctctgtcacccacaaccttagactttatggtcccaactcggtcctcaaacgacttgaaggtcgcagagttcctcatgtctccaagcttcctgctgatggcagagcccactgtggacagggcagctgaagtcttctgtcctgcctgtgaaagagtttcctgagtcttcttgtaggcgctagagacctgcacgtcatgccagctcctggacaggttctgtttcagctcccccagggtggagaggcccagcctcctcttgagctctccacagtgcctctccttggctgccaggacctggcgcagagtgacaatttcctcttccaccttggtaagctcagccctgagctcctcctcctcagcctctgtcagaccctcaacagcaggagtccgggcagccacacctgtgtcgacaggaacatccgtcatggagtcagacagcagacctttgttaggagaattcaggttgatatcttggccggcggagtccatgttcgggcggcgtccggaccgctgtcgcgggcgctatgggagccgagcgggcggcgccgggagaagctcgccgcgtacacactagccagcggaactgcctcagctccgcggcgtttcgt

SEQ ID NO: 318407 - DNA, 741 bp, Homo Sapiens
ggctgctccgctgaacagagctgcggctgtgatgctgaggctgggttgcgtgtgctctgcagcgggtgaagcaaccacaggcttagaaaggtgcgggatccgacaggggcttgtcaccactcccccgctgaggaagggaggttgttactgccgttctctctgtcacccacaaccttagactttatggtcccaactcggtcctcaaacgacttgaaggtcgcagagttcctcatgtctccaagcttcctgctgatggcagagcccactgtggacagggcagctgaagtcttctgtcctgcctgtgaaagagtttcctgagtcttcttgtagaggtctgactgggtcactttctcattccactctccaagtttctcagaagttttcacataggcgctagagacctgcacgtcatgccagctcctggacaggttctgtttcagctcccccagggtggagaggcccagcctcctcttgagctctccacagtgcctctccttggctgccaggacctggcgcagagtgacaatttcctcttccaccttggtaagctcagccctgagctcctcctcctcagcctctgtcagaccctcaacagcaggagtccgggcagccacacctgtgtcgacaggaacatccgtcatggagtcagacagcagacctttgttaggagaattcaggttgatatcttggccggcggagtccatgttcgggcggcgtccggaccgctgtcgcgggcgctat

SEQ ID NO: 318408 - DNA, 1544 bp, Homo Sapiens
ggtaccggtccggaagttcgggatatcgtcgacccacgcgttcgcccacgcgtcggcctgaggacagtcctgcccatccacgcgggagatgtggctgccgcgtttgcatgaatttgaagaacacaggcttgtacaacagatgttttacactcacgttgtagatgaaacagatcactgtgctgtccttcctaggggtgcaggaagtggacagggcggagggtttgaaagaatattgagccaaagcccaggctccctttgggaatcatgttagcccatcagaatgttgaaggattgaagagttctaagcataaaataagtggcattttctgacttcttcctcctcctccttccctgactcacagaaggaatgcaatcacccagcaagtcctacctgttacgcaattttttatctcaaaatgccgaacgagaaaactgtccattttctgagacccccagaaaggaaactgaccctcagcagctgcctgattgttacgcgaatctagctttaacggaagcaaattcattattttttaaatgcagtggacttttcaaaaagtttaaattaggcaaagcagctttagcctcatagaatattatttctttggactcaagctgaaatacaagccttacattgccttatgctttatttctttctaatttttatatgtatatagatgagggttccttaatggttgtgagcattgtgtggaattttacacctggcctgcgtggcagcctcttccagttgaggtgttttatgtcacgcacactccatcccagtgtacaaaacctgcttctcttctcaaccgtggcagctcccgctggctcctatgccctgccctaaagggctcttgagcctctgggaatgggaggggccaagagaaggaaaaccctgtctttagcaccctttaaaagaactgtgccccccttctcagtgctgcctttgcatgggcctggcccggctcacattcgtcagtgactccaaccctcctgcttgctgtacttgggatgaaacgaccccacaggtcaggtggagggtggggcgtgggcatcagccaggattgccgttacagtctttttctcaggagctacaaagatctcttcctgttactaaatggtcgcaccccagcagcctctctcgcacaccggggccctgcatgtcagatggcgtggtctgcagggggagctctgtgccttagtggctcttggcaggacactgagggcctgcctgtggtgtgcccggctctgccactcccgggaggggaagggctgctcagctcaaggtgtcctgttcggtagagcaagtgtcctctgacagccgtgtccccggacagttcagacacccttggggatggcactccacacacgacagagatgcaggggccagggaagcccagcgctcggtgcccttcgtccagggttaaaatcggcctgtggggtgtggtgagaaggcaggttgtgcgggtgttgaccgatgtatcttttccttaaagttattataataatgggtaatttgtcaataaagcattcctttggggaaaaaa

SEQ ID NO: 318409 - DNA, 1707 bp, Homo Sapiens
  misc_feature (223)..(223): n is a, c, g, or t
  misc_feature (235)..(235): n is a, c, g, or t
  misc_feature (1518)..(1520): n is a, c, g, or t
  misc_feature (1529)..(1529): n is a, c, g, or t
cagcagcagcaaaagcagccccaagttaaaaccatggtttctcacttcccaacttcggccttgagagaaagggacagcacggagcaatcccccaaatgagaggacatgaggtaggggaggcctggaattgtcattcatggaggagcagaggaagggggttctgggaggccaagtctctactaaaaccccgtctctactaaaaatgggggataatatgggagcnaatgaggtggtncacaggcacaccaaagcctgacatctgctttccaaggccaccacttggtctctggaccgaggagttcctggggacccctgaatatatcctcaggagagccaaggttcaatgcaggtctcataaagggtacggttggagtgccaggctgtgtgggagataccggccattggacacctcactatggccccccgggccaatagagtcttcaacccaaaagaatcccgcagataaaccagttgctcctccatctccaggacggtctcatttgcatcatagaaaccaaagaagctggactgccagggagtaataacaccatcatcagggcccccaatcagcaccaggtggcccacacgcagaaagttcttccgccatactgtggcattgggatggtctctttccccattgatcagggccaggaagctgctggcattgaggtacaagtcatcgtggtggggatcatgccagtagttgcagatggagaattcctggccccaggggctatagcagatccgatagaggttagaccgcatggaggtggggaacagccacttcaagtagtccgtgtctccatactgtcccatctgtggagaggagagggagatgaaagaatccacgttgtgatcatccatgacagaaagcagagcccggcacacaaggcccccctgcgagtagcagatgagatgcaccccttgaggggcctttgccatgatggggaccacagcctctcggaacccttgcacctgttcccacaggggtcgcaagctctctctcccatcgaagagatcgagcactgtcaccacagtcccggggtgtgtctcattgatgtattccagcaggtggcggaagctgtacgagctgtcgaagagcccatgcaccacgatgaccggcttgtaggacgcgcggtggggcgcgggggctgcaagcagcagcagcggcaggaaaggcaacagaagcaggacccacgccgcggggagccgctgcccccagagccccagcatgctcccgccaacgcgcacccgaagtcccgcctccaactcagcgttcgggggacttgttctctaggtccaggatcttcctaatgcatcgcctcagccatgaacaacgcggagttctttaatacccgtgagcagcagcccaggccccttgaagagtgcagactcccacctggcctgggtccgtaggcctcgctccacccgctgtttacttatcccaagtctggaacccacggtggcggggggaagggtgaggaaagagagcgcaggggaatgacggatgggaggggnnngggcgggcngcttggggtcgcgcaaatccgtcacgtccggggctttctctggcaaccgcgcgagcgttccccgcaacacagacccaggacaggaggggcaatggaatattccattgcgccctaggtgaactcttcattctgaagtgcgtgtagtgcccttgtctccagagacgcagagagtcctcga

SEQ ID NO: 318410 - DNA, 1096 bp, Homo Sapiens
  misc_feature (590)..(590): n is a, c, g, or t
  misc_feature (607)..(607): n is a, c, g, or t
  misc_feature (1057)..(1057): n is a, c, g, or t
  misc_feature (1066)..(1067): n is a, c, g, or t
  misc_feature (1077)..(1077): n is a, c, g, or t
  misc_feature (1081)..(1081): n is a, c, g, or t
  misc_feature (1087)..(1087): n is a, c, g, or t
ctgaggaaatggaactttatttccataaatacagggataacacctattcaaaggtagttaaaagagggcctggggcctcaaagaaactaggctctcccaggggggtactccaacactgatcatagggactgggggatccccaaacctgagatgggcctcataggccacagatattccccaacactgacacttcaagaacggaactgtccccataggggagcctcagaaccccactctcatgggtagtccctcttaggagttgggagggctgatgtcaggggactttagagaaaaaagggaacatggggaggagagaagctaaaaatgtcctgagtggcctgggaaggagacccctgtggtggggcagggggtgggttctccacccatacagccagatacggaggagcagcagcagcaaaagcagccacaagttaaaaacatggtttctcacttcccaacttcggccttgagagaaagggacagcacggagcaatcccccaaatgagaggacatgaggtaggggaggcctggaattgtcattcatggaggagcagaggaagggggttctgggaggccaagtctctactaanaccccgtctctactaanaatgggggataatatgggagccatgaggtggtcacaggcacaccaaagcctgacatctgctttccaaggccaccacttggtctctggaccgaggagttcctggggaccctgaatatatcctcaggagagccaaggttcaatgcaggtctcataaagggtacggttggagtgccaggctgtgtgggagataccggccattggacacctcactatggccccccgggcaaatagagtcttcaacccaaaagaatcccgcagataaaccttcaaggtggtcgaaggggcgtggaagcatggaagagagacacaaggagagacaaagtgagttactgctgggatcctggacctccctccccacagggtgaacaccttcagctcaggagtcacagagagggctctggaataaggtgggacagcggctagaaggggaagtaatcccagggggctcanagttgctcnncatctcaggnaggntcattncatatagaa

SEQ ID NO: 318411 - DNA, 1532 bp, Homo Sapiens
  misc_feature (3)..(3): n is a, c, g, or t
  misc_feature (7)..(7): n is a, c, g, or t
  misc_feature (9)..(9): n is a, c, g, or t
  misc_feature (11)..(11): n is a, c, g, or t
  misc_feature (13)..(14): n is a, c, g, or t
  misc_feature (542)..(542): n is a, c, g, or t
  misc_feature (633)..(633): n is a, c, g, or t
  misc_feature (1478)..(1478): n is a, c, g, or t
cantttnantntnnattggcatttttgtcaattcagactgagaaatgatgagccttttttgttgttgtttttagtagcttacatggtgcttttagttctataaaactcccatctttgttgaatgacgagattgtaaaccagaaaccaaaaaccaaaaaacacccacacagctgtcttatacttctgtaaccatttctgaacttaaaactctcttgttcgttacacctcattcattgcatcttagttttagcttgtcaaagatcttttagtagctctaacatagcccactagctaagtcttgtaaatgtgtataagctggacatttggtaatattatttttaaaaaaggaaaaggaggaataggtatacttatttaatacttattgtgcaccagaggctaagtgcttgacttttattctctcatttgatcttcatgaccattctatgaagtgggtgttatcatcattcccattttgcagataaagtggagggtaggaaagaaggagaagggtatggagccttttgccatttaatttatataanagacccaactggagtgtctgatcccctgacccacatttcccagttccctgctctataccaggtcatcctgctaagcgctgagatgggaganatgagacccagtccttccccttgagaatctcgcagtcccaacaggtggtccgcctgtgacacactccttaaccgcatgatctctcagtccaggtcttctagaaggactgagtcagaaaaccagagtccagtttagttattcggattccttcaagtttggattaaaccagtccccatagccgaagctctgttgtgtcattttccttcctttggtctcctctcttcctttttctttgtctatgtcttcttccccttgttgataattgtggatcccattgttaaaccagctcagaaaccaccagcccttctgagcactgctgtcatcaacttctgggttttttgagtgatatatccacaagaaagagccttctgtgctgttgataaattcccaaaacacaatgatcacagttgagacaaccagcattgacagaattacttttcctttgacattcattattttctcagtgaagtccctgagccggcatccttcttccaggtccactgctggagagacaaggacttggtcctcttccaaaactactgagggggccaccgagagtttagggcgatccacccgtgaccccagcatggcagaagcaaatcatttcaccatctcacatacctcctgccgctttcaccccagagtaaaaggcaaaacaacaaagttcttttgagctcccttctgcagaaggaggcaggactcagagaaagggaaggtgctggtttcaactcctgatccgcagaaccagggcgccgagggccggcgcgcggtgagctgggctgagcaggaccgcgcccagctcccggccccggcgaagccctacgcgctctgatcagccaccgcgnccgcctccgcccgagcggaggcgcgtcctcccgcccgtgggccggccatcccgg

SEQ ID NO: 318412 - DNA, 373 bp, Homo Sapiens
  misc_feature (123)..(123): n is a, c, g, or t
  misc_feature (348)..(348): n is a, c, g, or t
tgagccactgcgcccggcctcccctctcatttatgatgccctctgtgcaggcagacggctcttgggctcttttccccccctgtctctaacacaggccccacggttgatggccacaggcagtangaggaggattgaggatggtttggggagcggggagtcgcggcttggctcttcctggtttctgagagggacatcttcatccctactccccttggtccccaaccacagtcctggtgaagatgtggatgataatggtgccttgatttccaaatgaagacagctttattgcttaactctattgtacataggatacacgttcagtgtaaaataaagtgtaaaggggaattncaggcttaatgctgcacctagatat

SEQ ID NO: 318413 - DNA, 2142 bp, Homo Sapiens
  misc_feature (215)..(256): n is a, c, g, or t
  misc_feature (294)..(294): n is a, c, g, or t
  misc_feature (305)..(305): n is a, c, g, or t
  misc_feature (2045)..(2095): n is a, c, g, or t
caacaccaaagcaaacccatagcccctgtcaagccagtcctcagggagagtgagctggaaggctccccctgcacttctctgagcagagatcttgggcccctcccactggaccccagcctgagcagaggtgcaaggctctgcctgctggtaccctagggggtgggggagaggcgatcagctccaaaccatgcaagaaaaacaagccaaacccattnnnnnnnnnnnnnnnnnnnnnnnnnnnnnnnnnnnnnnnnnnacgaaaggtgaatgacaccgataacggtggcgggcagnactgggtgagncagtttgctccgcagaggccctgtttgccagtgcccaggggaaggccttgggcggctcatggcatctccctcatgggagtcttggggtattcacacaactcatcccctcttgtgtaccccgcaccaaagccgggatagaggtgtgccaccctgggccaaagtgtgcaaagtccattcagtcgagagattaaaaaaatatacaacttggatggcatccaggctgggcaaggcggtggcccatccacccaggcactggcagcctgctgtgcaggggcagcagcatccacagggggcatccaggccccttcagtccaggatctcagcagctggagacgggtcctaggagcagcagggagaggcactggtggggccgacaagggcctggctgggagccccaatggtctgcttctttggcacttgggacaaaatggctcgccacagagccaggtgggagcagccccctcggttcctcccagatgccctgggccaggatggcagtagcttatggtgtgggtgagcactgcccccgcagatggggctgtggggctctggagggccggagtggggtccgaggcccagcccctatgagtcttctcccaggatctccttcacgaaggcagcaatgtccgtcttcttggttttgtgcaaggtgaagaaggggtgctccatcagctccaggtagctcaatacgctctgcggggttcttcctcaggcactgagcagtgaagtccacaaactcgggggagaaacggtcggctgggagctggggggacggctcctccaccacctgcttcagctgctggaacggggtcccccaggactcgtaagggaaccgcaggatggccatctcaatcatggtgatgcccaggctccagacgtcggacttgacattgtagcccttctggttcagctctgggttgatcctctcaggggccatgtagggcttgcagccggcatccatcgtcttggccacagagtccaccaagtagccactgatgccaaagtcacacatcttcacatggccctccttgttgataaggacattggagggcttcacatctctgtggatcaccgacagcttgctgtgcagatgctccagggcccgcacgatagacacagcaatctccccaaggatgtcctctggaattgtcatgtttttatccagcaccttccggtagaacttgtccaaggatgtgtccatgagctccatgcagatccacacgtctccctctctgaatagtgccccgtagaaggtgacagtgtagaaacagtcgaccgtgcgcatgttgatgtccaggtccatgagcagccgcttctgctcctgtgagttcacggtggcccggatcgcttcacggccatgatggtgccgctctgggcgtgccgcaccttctctaccaccccataggctccacggcccagttctgagatggtcaccaagtcatcagcctccacctcaaagtttctgtctccaatggtgatgaaggtccgggagtccaggttccgggggggtgtggggttgggtgcgggtggcttggacatgcaggatatccgtagatccttcttcctcttggattttcctttggactggggcatgctggcgggctggctcgaggcgggcgactccatgctgcaagtgggtcctggacggcggtggagactaatctagaggactgcgggctccaccggggccgagcacgctcatggctgcgggcagacggcccaggccaggcggaggagcannnnnnnnnnnnnnnnnnnnnnnnnnnnnnnnnnnnnnnnnnnnnnnnnnnactgcagcaaggacgagtccgcgacgggcggcgccggagacagactg

SEQ ID NO: 318414 - DNA, 488 bp, Homo Sapiens
  misc_feature (283)..(283): n is a, c, g, or t
  misc_feature (309)..(309): n is a, c, g, or t
  misc_feature (386)..(386): n is a, c, g, or t
  misc_feature (471)..(471): n is a, c, g, or t
caaaaaaatatattttctttttttaaaaacaacaccaaagcaaacccatagcccctgtcaagccagtcctcagggagagtgagctggaaggctccccctgcacttctctgagcagagatcttgggcccctcccactggaccccagcctgagcagagggcaaggctctgctgctggtaccctagggggtgggggagaagcgatcagctccaaaccatgcaagaaaaacaagccaaacccataaagcaaaaggaaaaaatcaacagaggataaatttaaaaaaanacaccgaaaaggtgaatgaccaccgnttaacggtggcggggcaggacttggggtgaagccagtgttgctcccgcagaaggccctgtttgccagtgccaggggnaaggccttgggcgggcttcatggcatctccctcatgggagtcttggggtattcacacaacttcatcccctctttgtgtacccggnaccaaagccggggatag

SEQ ID NO: 318415 - DNA, 1074 bp, Homo Sapiens
  misc_feature (15)..(15): n is a, c, g, or t
  misc_feature (22)..(22): n is a, c, g, or t
  misc_feature (29)..(29): n is a, c, g, or t
  misc_feature (32)..(34): n is a, c, g, or t
  misc_feature (37)..(37): n is a, c, g, or t
  misc_feature (43)..(43): n is a, c, g, or t
  misc_feature (47)..(47): n is a, c, g, or t
  misc_feature (51)..(51): n is a, c, g, or t
  misc_feature (58)..(61): n is a, c, g, or t
  misc_feature (67)..(67): n is a, c, g, or t
  misc_feature (100)..(100): n is a, c, g, or t
  misc_feature (161)..(161): n is a, c, g, or t
  misc_feature (163)..(163): n is a, c, g, or t
  misc_feature (275)..(275): n is a, c, g, or t
  misc_feature (551)..(551): n is a, c, g, or t
  misc_feature (580)..(580): n is a, c, g, or t
  misc_feature (624)..(624): n is a, c, g, or t
  misc_feature (662)..(717): n is a, c, g, or t
  misc_feature (719)..(719): n is a, c, g, or t
tcaaaagtatggganttgaaantttgganaannnatntaaatntttntaanattgaannnngccagnacggaaggaacagacaccaaaagcttcatcttngtgagaaaagggcttatcgcctgtgtcttccacccctgtgtgattgcctgtgctgtggtcnanctcacttgtgagggagtggcgctcaaatctttgttggaaccatcacctggccaggctttcctggggcctgctcaccacccggatcacctctcctttcttagaacagggcagnactgtcctattcctgccctagacgcttctggccagtcaattctcctgctgctgctctcacaaatgtaggtttagaaattggggctcacaacccaccatcaccccgtgccaatgtgtgcgtgcgtgtttttgcaaatgtgtgacacagttatgactatgcagtcctttccaaggtacaggagccccagaccctgagtctgctcagagttcactattacacaacattcgctgcttgcctgaatcctaaagatagtagaaagatatggaaagataattnttaaaaattgcaccaagatggcaaaagtnttaagcacgtttatgctcattgacctagagatgcccccaccatnacaatctattttaagaaagaattagaaatatggataannnnnnnnnnnnnnnnnnnnnnnnnnnnnnnnnnnnnnnnnnnnnnnnnnnnnnnntngcaaatgtatatgcatatacatacaaggttacacatttatataaatattatacatgtatacacttatacatataaaatgtactgcaactttatgtctacttactaaaaattgcaatcaatctaaatattaggatattatgaattataattttaatgacctactgaaatgctcataatataatattcagaaataatgagtgattaccatataatctcagttaactaaaaagtttaagagacaaaaagaaaacccagaaggaaatattctatcatgttaaaacagccttcaccacattgtgatttgttgttaaaaattactttattctttttattcctctgtattatctcagattgt

SEQ ID NO: 318416 - DNA, 1862 bp, Homo Sapiens
ggagcgccgcgcctaggggggtgtggcgctcgaaccacccgccgccgggttgtttgcgcgccggggggcgtgtttttgggtgtggtgggggcaaaaaagcgtggggccgcgccgcggcggcattttatcgcggcccgcgcggggcacacgaagcaaaaccatagggggggcgcacgcacaaggaagaaaaggggggaaaataattcgggggggcgaggggaacaggacaaacgggcgggtattagggcatcggatgcgagggtcgcgccgggtggggaagcgtatgttgtatcggtgtcgtgggtaggcggggaggggttgcggggggttctgcaaaaatttattatttattattaaaaatctcaaacaaacacagacatatggggataccagcattcccctcctggataccaggcagcttcagccctggcaggcacgatagaagaaaatacttgttacacatcctcatcaactctcagagggatcctgagccgtagatggaggaaacgcagacggagtaagcacaggtaaaagatctccccaggagctgacacgggcacaacgatacaaatccctgccgtgccggcgggctgtgagcacagcatgctgcatgtgcccatctggacagcacaagtgacaatgcacatggcgaggccgtttaaggacaggctgagtgatacggggccagcgatgagcctcctctggagacccccgagcaaggatcaccatagagaacttttcttcctttggtttcttgttccagctgaaggggatgggatggtacgcctgtgagaagctacaggccaggttggtcaactggggacaagggagttcatggggacacggggcaaagacaaaaccaggtcgagggtccaaaggtgacttctcttttcccttaaggaccagatccctggcatccatgagaaggctgtgcccagcttttgttccattctccaccagtaccaggaaatgacctgtcttacgccataaggtttgaactacctcagtgcggtcagccttgctgggcagttcacttaaggaaaaagctgacactactacatcaaactgcaccttgggtgatacaggtagaaactgtctgaaaaagacacctggaatataaggctccccagattctgaaccacctttcagtagtttttctgccaaaaccaacatggcagctgatctgtccacacacatatattcacgtaggctctggccccaaatactgtgagcagcccaggtgacagaaccagtacctgagccaaagtccatcaaagtttgtggctgaaatgctggatttcgagcccggatctcatggaatgctctggagactgctgcaaagccaccatccagtcttgctgccatatacaccaggctcagtccctcagtgtagctcagttcttgccaatggtaggtagttttacgtagtgcgtgtagcactgctccacgaagtttctcctctgtctgagataagtctgggttttccaggaattttttctcaagatgcctagcccgtctttgcaactcctctggctctacaggcaaatgtctgctccagagataactggtcagtgtttgcacctgattctccatagtgggcccagcgctcccaagtagcaataactgggcaccgttagccagtgcctgtggcagccgcacgtgcggcagctttaggatgccagggtgctggcgatgaggcctcttctgcaggaaaccggacttgttatctacctgggtcactccgggtactaaggcggcgagcgcccgggcctggggagccactccaaggccggggcaccatcttcctaatgtcagtagacacttcagtgccgccgccatggcatcccgggaatccggaaccg

SEQ ID NO: 318417 - DNA, 373 bp, Homo Sapiens
  misc_feature (267)..(267): n is a, c, g, or t
cccaaaaatttattatttactattaaaaatctcaaacaaacacagacatatggggataccagcattcccctcctggataccaggcagcttcagccctggcaggcacgatagaagacaatacttgttacacatcctcatcaactctcagagggatcctgagccgtagatggaggaaacgcagacggagtcacgcacaggtacaagatctccccaggagctgacacgggcacaacgatacacatccctgtggaaacagattgctggcgntgggctgcagcttcctgccacatcccactgattttggtcacaccccccatacctgccgtgccgcgggcctgtgacgacacgcatgctgcatgtgcccatctggaca

SEQ ID NO: 318418 - DNA, 1526 bp, Homo Sapiens
cattttaaaaattttgatctgtttcacacattatatttgtttgaacttcccatgtttaaaaattttgaagaaaatccctggagtagacaatccctagagcactgacatgctgtggtccaaggttcaccaggaacagtgcctgtgccctgccacatggcggggttccttcaagcctctggtgatgaaggtgctcagggaaaggaggacggaggggcgcggaaggacccagccactgctggccaccctggcctctgctctgtgttcacgggggagcagactctggggaggcgcccctcctcaccacggcctgcaggccgggcttggagcctgcgccttcaggggccttgcatctccagctggaccccctggcacaggatgtgctgcagtagcccgttgaccacatccagagtctcgtccttctccagcacgatgtcataggagtccatgtagcgctcccgccgctcctccaccttgtcattcaggaagccaattttgagaatgttctgcacaccaggaaccccatcggccatggtgaggtccccgatagagtctcccagcaggatgacattggttttgccctcaagttgctggaagtaaccacagttctcacacacagagctgttcttgttgtatgtgtgtatcagctggcccttaaatccctggagaaaaccatcttcattaaaatccatgtagttagacacgatgtggatgttggggtggaacactttcatctgtcggataatttcttccaggatatcaccaatgcccgcagaaaagatgaaaaggggaatgttgttatggtagagtgtgttgaagaaggtcttatatccctccctgagcattgcattggactctctaaccacctgggctatctgaaacttctgaatcttctgctgacataggagattgtgcgctttggtccaccattccaccatatgaggtagcttctccttgacggtccggtgtgggtcgatctcaattgggtaatagtggtgaaggagcgctgtgagctctttccgacactcctcactgatgatcttgctattatccagaatattgtaagaagaagggcatcgctttccattatatgcaaacctgctcaaggtcatgtcaaaatcagaaatcacctgtaaccggtctccgccgcccttgcggagggcgcccacgatctcctgcacccgcccaggctgccgcatcaggaccgtggccttcatcagggtgctcacctgtcccgagacccgagagaaccactgacccctgcgccacgctgggcccgaggggagcccggggctcgctcgggcgcgcgtgtgaggcggggccggggtgcgcgagggggcggctactggcctgggtgaagcggcggtgcctccggtgaccagctggggggctcgaagcgccccgggggtcggagtccgggcccgccccactccggacgcttcctccctcctcacctcctctgccatcccgttcgaggcccgactgcgtgggtcgacgatatcccgtaattccggaccagtaccagcctg

SEQ ID NO: 318419 - DNA, 964 bp, Homo Sapiens
  misc_feature (951)..(951): n is a, c, g, or t
gccagtcacatgcttacctgcatttttaaagacagctttcaggtatttggggactacattattaccaaactttggctttgggagattatacaggtccgaggaactcgtgtctactgcagacgaatgcaattaccccactttcctccatacagaattgttaggaaatgtccactcctttgggggtgatttttctcctcaagttgtagccaacattttgtccgtaactgatttcagggcaaacatttctgacatcttcctccagctcagtctgccatgccttggcaatccagtttcctgtcatatgcgagccatccaagttgatgccaagtaagatttgcccagctcaaagtgaaagtgtttgcgtcttggtatccggaatcctcagccccagtagcaaagctttagtcattcaccttcatccaatagacgtttgtgaacgtcctgctgtccattttgtcaataaacaggcagccctgcaggtggtccatctcgtgctggatgatgcgggctgcccacccgctcgcctgccacaccacctgttctccattggggtccagccctgcaaaggaagttacagccctggtgagtgggaacagctgaactgcatcatcctcaacctccctacccctgcccccggtcctggctgttcccattgacaagaggcaacagcagatggcaaatgtagacagcagctcctcttctaactggaaaacgtccctcatctcggtccattaccaagcgttcaacctggttcccaactctggtaattaggttatcgagctcactgtagagctgagatgagaaatcatctttctacggtgcgacccttccgaacactcctcccacttctgaggtacctgtgggctcccaactcctaacagaggttctgcagcttgagaccccacttgtttttctgaccatcttgaaccgacgggcttgctgtgcaggaanaatcaccccgacc

SEQ ID NO: 318420 - DNA, 1933 bp, Homo Sapiens
  misc_feature (740)..(740): n is a, c, g, or t
  misc_feature (1579)..(1579): n is a, c, g, or t
  misc_feature (1589)..(1589): n is a, c, g, or t
cttctgcaattcggggttttattctttccaaatctcaggcttatgcacaagatggaagagcactgttaaaattaaaaaatggacctaaagtggcttggctgacgtggctagcgggccactgagccgcgggtcccgggtcccaccctgctgtggggggagtccctgggccctggggcctcttggcactgtgtgacctgtgtgcaccccaggtgaccaggcgccgggacccctgcagggcagagcaacagggcaggggttggccctgcgggggagtgtctccagctgccgcgcacccgcaacagcccgttgtcccctcccgggccagctggtcttgcagccgtcctggcagagctgggggcagagcccgcagtcttgttcccagaggtctggagttgccgcaggtggtgttgcggtgcctctgtgcctgatgacccaggccggggctacctggctccggcaccacactcagagaatctgctcggtgctggaggccgagatgtccaggagccgccaggcgcgtaggggttgagctcgtcctggtctcggcagagcgcccacacgtacagcatccgcagcaccttgtccgggtcaccctccaccacctcgcctttggggttcctgaccaccatcaccagctgtgcctggaaggtgatgatcagcaccggcccctgctccatcatcttgcccatggccaggtcgacgttgtcaatgtctaggatgcgagaatggaactggagacnccagtgccttggcctgctggatggggtgggccagctggctgtaagtagcttcatagcaccagtctttgagaatgtcaagctctccagaaatcatggcctccaggacattggggatgatgtcgttctcgcactgtttcagaaaccggtccttgtcaaaggccgggtccacccggaggatctccgtgagcacctccgacatctctgtcttggagaacaggccccccagcaagtcggtgaccttgtccgtaagggcccgggatgcccggatgaacgcgttgtcgctttcgtcatacttcatcttcatctcgaagaacccggttaaacaccacgttgttctccttgaagtccttccactgctggtaccacttggagtccttgtgcagcacgacccccagggcctcctcgtttggctcaaacactttctcctccttgaacttatctcccgcaaactccgttctcttccggagtcgctggggcctccggtagggcccggtctgtcccaggacgctgtcgtcaatttccttcttcacggactccaccccctgggagagggctctgaaggccgctgtcctgcccagcttctccccgcctttggataccgactcggccgactgcttggccgtcttggctgcttcctccacgccctccttgattttccggccgagatcacttttactgacttcgtgaaggctctccttcacggtgcccgtcagctccccaagcttcttccgtagcacctcgctcgtccgcacggtttctgactcgatggttttgtatttccttctggcctcctggagcacgtctgattcttctagccttctggcctcgtcacggaattnttttatactntctttcatttctttgtttttggctaattcttgtttgacattatctagcaagccggacagaaagccttttctgtttccagaagaatatgatttggacagtggcagctctccgcccggccggcgcatctgataggtcgacccatggggtaggttgtggctggaaagaaattggattccactgccgaggcatctccgtggacagcggcaccagccactccgcagggccgccgccgccatgttggagaatcgtgtgaccttctcgcggcgcggcccggttgcgtcatccgccgcttcggcctagagccgcgcaagcctgagaaaagccgctccaggagcggggtttcg

SEQ ID NO: 318421 - DNA, 1256 bp, Homo Sapiens
ggaaccaaggggaatgacgggaggaactcggatggcagggggagaggtgcaatgccaggtaagtttcggggaggcatggaaggaagaggtggcagacctgggtttacaagttctggtaagccaacccctggcatgatgtgtggtgctgggaggttgaggttgaggttggggaggttgggcagtcctgctggtaaaggcatcagacctggtaatgtagtagctggattcattggtggcacagaagtgagggactggtttacttgtggtggcaataacggtactgttggtacacctgtactgagaacactactgacagctggtggagttgagctaatagaaagtccagtcagactctgttcaattcctgtagttcctggtggtgacaaagacgggggattaactgaggacagctggacctctgtaaacccatctttaagaggtgtaataggtgtaccagccatttgtcctggaagagaaattttctttccttcctcaaatgggcgtgtaggtattcgatgcaaataaccatatccaatgccacatcctaggctgccttctccaccccatgcagaatttggtgtaataatcacttctcgacagttatcagtgtctgtgttgtacacatacagtttcaatggttttgcttcatgtgtttcgataaggctgaatagatcttcagactcattcatgactgtatctgctccaattatataatcactgtgtggtctaagacctgccagtgctgcaggagaatttgattccacctccagcacatgccaaacattttcatttgccccatcaaagctgcagaaacgaatgctcactcccaataagccctggccgccccacaggttacttggtgtgactgaggtctctcgcagttccaatgttttgctgctatagataagcatctttacaggcttttcaacgtttgctttcagcagatccttaagagtgtcattgtctttatttaatcttgaaccattaatagaaacaataaaatcaaagaaaggctccaaaccagctctgtgtcctggggaattttcttgtacccgcagaacgtggtagccctcggtgcccccgcccgggatctcgacgctttgcgaggagcccatggcggcgggcgatcggtgtggccgagccgggctccgcgctgctcccgcccccagcgcaccgcctgctctaatcctccgcgtagcacttgggacgtggcactcgcctcgtgccgaattcgccacccaggcctcggtgctggg

SEQ ID NO: 318422 - DNA, 1664 bp, Homo Sapiens
  misc_feature (125)..(125): n is a, c, g, or t
  misc_feature (127)..(127): n is a, c, g, or t
  misc_feature (129)..(130): n is a, c, g, or t
  misc_feature (186)..(186): n is a, c, g, or t
  misc_feature (662)..(662): n is a, c, g, or t
gcaggatctacaagatggtttttttgaaattgaacaaataacacaacagtcttcctaagctaggggccatcctccccaagccatttcccacattatagaagcacagagcttgcacagtacttaananannagtcacctctatatagaaatcagactctgccacgacatcatcatggactatttacnaaccttcacattataagtattccttttatggtttttccctcctttctttccctacccaggggttctagtgctttcccttgactgatcctgaaggggtgggggttactgtaagggagggggtggtaggctactcataactactggcaccagccttagggtgttgtcccttaccacaaggtggtgaacagtcccctcccaattggaggggtggaggatttggtgcaaagccatggagattagacagaataggtgggttggagtaactccccataggcacaagcatccgcagcctgtcctgaccccagcctgcactctctcaactcctcaactgggggttcggggttggggggcaacagttagttgcagtagggggatcagcccagccctgggtagagggagaagcccccacccagtccccactcctatcaatagccagcaaactgtccatccatctgaaggcgggaacaaatggcagngtaggtcggaagaatcaggctggccactgccccccagccctctgtccaacacaggagggaatcgaggtagcaaatggctgaaatgctctgactaggggttaaaagggaagtgaaggaaaggaagttcctacttgtatacagtgcccacagcctaggggctggaagaaagcataccttgcttgtaaagtgctgtagcctctagcagggctaggccccaggcaaacttggaagaaagcagaccaggcaaggaaccaggtaacgggcattcctgactggtatatgccctgctgtgctgcttgcaggggtggcttgggagagtggggtgctaactctgccattagccttcaccacccaccaaccacctcttgtccacacacaaaccaacacccaaccaatactgtgggaccgacccgctcacagctgaaggttatgggccaacagagtttattcagggttgtggccccagcctgggctcctcaatggaagccacaccttgattgagcctgggagtttcttgccggggcagggggtgcttctgtctgccacctcccagggtcacacctcatagaggatcacagggaaatccacgtggatgcgggggtgatccagcttcacgatgccctgaggaatcagattcttatgcactcgcctcagcttggcccgcttctgcccgttcttggtgacgattgtctcctcatagaactcgtgagccagatccccatcctcatcatagaacatagagccgcggcgcgtgaatacgaaggggggcacagctcggccccgaggccgcaccaaagcttgctcagctcctgctgcctctgagccgccgcctccggccgccgaggcgaagggccacaggccccgagctttggacccgctggcgcccatgtcagggccgccggcgcatggcgggccccgtggccgctctgctcacaccgcagtccgcactaccataacctgccccagccgctgatcgcaggtgccgccgccgccgccttcccc

SEQ ID NO: 318423 - DNA, 876 bp, Homo Sapiens
  misc_feature (674)..(674): n is a, c, g, or t
gctgaagtacaaatttaataaagcctttgatcacatctcaatccataagttagctacaaaaacaaaaaatcctacaactttttagagccatcaagagccatcaaggtgtcagtgaacaccagttacaaaaggagattcagtgtttcagatagtgcaatatttccagctgctgaaaagaatttaaatgaaattacaaactacccctccttgtcaaaaatccacatgaagttgatattggtgtttataaatcactctctcccagtccctcactggttccaaccttcaggtgataaaaattaggatgggatccatcttccctgtgctgacagtctggggtccccgcatgtatgcacgaacccgcccagcgtgcgcacacacgttcagaagaaatcttcaaaggaaccgagcgtttggagaaagtggcaagtccacagaatcagaggttacgaacacaccttcaataatattaatacattcctgtctttaaattccttgccatgtttccatcaaagtagagcacacattgttttccagaagcctgggggctcgacctgggtgggacaccaggatgcagctgaaactctgaaggactgtggagacgggtggcccctgctttgctgccactgtgacagctcttgttggaaaatgttttgcgtctttgaggagagcagaanagggactgggccttcctggcttcgaatccggcatcaaccttggtggtgcaggtgcaggagcatgaggtgggagagggtgggtggctgtcaacacagaccacaaacagggcctctgcctcagttccctggagctaaagttcttacaacaaaggtaaagaatgagggcagaggaacacaatgggttggaagagaaatgaagttt

SEQ ID NO: 318424 - DNA, 1405 bp, Homo Sapiens
  misc_feature (23)..(23): n is a, c, g, or t
  misc_feature (37)..(37): n is a, c, g, or t
  misc_feature (48)..(48): n is a, c, g, or t
  misc_feature (83)..(83): n is a, c, g, or t
ccctccggcccctaaacctcctncccccctattaggnacccctggttncccccacccgaaataaagaagttaagggtaaaganggtaagcctccttccaccctgatggacaatccccatttaaagttttgggggcatcctttccctgcccctctgcccaaccctcccctgctggcccccaggtgagaggaggaagaggggtctggaaagaaaccccagaatgcggcagaactaggagtaagtccatctcaaggtggacttctgatcattgaggatggtgagataaataggttgaaaacaatcatctgtgagtttaggagtcttaagatcctcacagcacgggagcagggagaggctctagaacaaggtttcacaaccgagatgcctttgacattttgggctgaagtgttctttgtaaggaaaacctgtttcctattttgtgcattacaggatatttagcagcacccctggcccactctagttatgacacccaaaaatgtctctattcattggcccgatttctcctaggggggaaaatcgcctccatttgagaaccacaactctaaagtcaagatatttttctctgaagtgatttctgcttggcacgctaccctcatcatcttactcatcttaagcccgagccatggatcaactaggagcccatataaatgaggctcagtagggctgcacataatctccaaacaattctttattcagtgttttgcttgtgtttgcatgttgctatgatggacaggtccccctcctccattcttgccctctggagaagtggttcctgcagtgtagagatatgaacagggtatggtaggattggggaaaggggagagagaagcagtagatacactccttatcctccccaaattttaagctctatttctgtgccctagtcctagacacacattagactcagggagttttgtctgaagaccaggtcccactgccccctggctgaagagtctgctttaaatgggaaaacaacgtaggagcaggggtttttaggcactttcagtattctcaggtgttcttcgttctggcccttccagggtaattaggaaggcagaacaagacagatgagctcctgcctgctctgagacaagaagggtggggtctcattagctttgcaacaggaaacatcctgttttatggtagtggggtcaggaatgtaggaactggtatccattctgccaattccaccacccattcagtttgcttatccctatcctgttaaccctttagatctctagtataacactcaggctactgaggtattttagagcaacaagctgggttactttcagagcaaccagcttgactggaactgagagtaaattgggaatgtatgaccaatcttagaccctgaaaaatggcagaaaatacatggaaatttg

SEQ ID NO: 318425 - DNA, 890 bp, Homo Sapiens
  misc_feature (22)..(22): n is a, c, g, or t
  misc_feature (35)..(35): n is a, c, g, or t
cctcctcgtcagtgcgatgtantaactccatctgnttccctgggttcttgtaactttctccatcctgtttattgttgatgaagtagccacgtctgtatgcacagcagatgcccaacgtgatcagggccagtacagcaaggacaaccagaacccccccaataattccgccaatgttcaggtcatagacttccatctcctgctcctcacacctggctgagcctgcgtcattggaagcaatgcagtagtactgcccagagtcgtccttgtgaacagcagtgaacaccaaagtgcctgtttcagagtttaagtggaaagaagaattgcgaaatctgggattggctctggaatccgtgggcagtggtacatcattgcgataccagctgtagtgaggccgggggtggccctcactctccctggcagtgcagtgttgccatcttgcctactggtcacccttcggcactctacagacaggggtcactggcttcacttgcacagttaactcgatcacaatctcatcaatttccttgcggtcatttcgagcaacgacctcacagcgataaagggctgagtctctccgtgtcacattccagatcttcagggatgtcttccccagtatttctgcacgacccgccaagtctccctgaattttgttgtcaaaaaacacatatgtggtttgttcatcttgaattttcttccactcgatcctggggtcacttgtctgcgaatccgtaatgatgcaagacagttccacactttcaaattcctgtaccactggggttcgattgctggatttgagatttacagcccctatcaggcagcccctgaaaagcagcagcaggaagaagtcaggcagccgagcgcagagccggagtcgcggtggccgcctcagc

SEQ ID NO: 318426 - DNA, 1358 bp, Homo Sapiens
agcagaggggcccttctggggagcaacgccccagcctgttgtccttcccggaagggtggttctcatgggttgccgtgccctcaacccagccttgcagctgggccctgggaggcagggcctgggagatgcctgagaggggccgtgttggagggccaggctggctgcatgatggccctgggctggggtgtgactgcctgcagctactctgacagcctgctcggcccacagctcttcggggacgtctgctacaactgcagccatgtgattgaaggcgatgtggtgtcggccctcaacaaggcctggtgtgtgagctgcttctcctgctccacctgcaacagcaagctcaccctgaagaacaagtttgtggagttcgacatgaagcccgtgtgtaagaggtgctacgagaagttcccgctggagctgaagaagcggctgaagaagctgtcggagctgacctcccgcaaggcccagcccaaggccacagacctcaactctgcctgaaggccctcttgcgcagctgcctctcggcccctccgccttctcccctcctgctgtccatgcttggccccctcgtccccatccacctgtgccctccgcatcttaccctccctttctcttttctcattgccttctcccttcctgttccctcatctctgccttccccatgtctctcctctccttgggcgtggcttctgtctgtgaggaaggcaggagctggggagtgggagcctatgaccccacttctgacagccatgtccacctgtgcccacagcttccgcccacagacctccagggacaggagcaaattgcaccacagctccccgcctggcctggccctccccaggcggctcagtggctcatgctgtcctgtgagagcccctgccccagagcggccccactaagcgcatgtggctcctgggctacccacagccagggcagcctgctggagccacagggccagggccatgcagatggaggcctctgggagccacctccaatccctcaccactcactcaaccagtggcacagtgtccttgtgcccacactgagccagcaagtcctgctgtccacacccacaagctacctggagggacaggacccacctccatccttcggaaggccttcctggaatcccaccttggcctccgccctcggttccgccccgcccctctccccccgaccttggggcttgtgtcgagcccttgggtggggccaggaggaggtgatggcgtcagaggaggtgtggtcagaggtgacttgttcccacctccagggaggacgcttcgtcttcggccagcgcagacctggtgtttgtttgttgggcgtcacgcttgcacaatgaaggcttgttcacacaa

SEQ ID NO: 318427 - DNA, 1722 bp, Homo Sapiens
  misc_feature (3)..(3): n is a, c, g, or t
  misc_feature (42)..(42): n is a, c, g, or t
  misc_feature (683)..(683): n is a, c, g, or t
  misc_feature (752)..(752): n is a, c, g, or t
  misc_feature (821)..(821): n is a, c, g, or t
  misc_feature (1398)..(1398): n is a, c, g, or t
ttnttttgagctaccatgcatttagccttgcgagagttaganacatttggaacactatctcctaggtcatatcaagaactctcctctagtccagaacccattttacagatggagatgctgaggccatgctgctcacagcttccagtggtggccgttgagtgccctctgcctccttccttccagtgtaagtgggaccacagtgcatgaggcagaaggacatcctgagggcccataccagtttaggcatcccaggctttaggggaactgctggaagacatctgctgcttaaccaggtggctatggatgtgagccggattctgagagctgatccaactcaaacctttcttcttgtccttgtccttcctcaggggctgctgcgaggtggcgtgcaaggcctgcgactgcagggcctccaccgcagccttccggcgattgaaggcgttggtctcctcctccagttcccggcgcttttcctccaccttgcgcttctcctcctggtggacccgcttcaggtgctcaaacttctcatggagctccctttccttctccttcagctccagctctgtctccttcactttgttgacaaacatctgcctcaactcttcctccttcctctgcagctcacttaggaactccttcctcttggcctcgtatgtctcttgtaggctgaagggctggctgtnaccatcgctgtcctgaaagcccatctcctccaacttgcagcgccggtagagctcgtagtgccggctgtnggtctgctcgcggaggtcttccatgttcacccggatcaacatctcccgcagcttcacgaagtcgcagtnattctcattctccacctgcaccactccccaggggtactgccgtgctcggaccagcttgttccccaccttcacctcctcggtgctgcccaccacggcaaagggcagatgtgcattccatgaatgcgttaatctctgcaacagcctcatcatccgtggggaactggtagatctggaccccgttgctgaccaactcgcccatgatcttgatcttgaacttgtggagctcgctcttggagatggtgtcagccttggcgatgatgggaataatgttcaccttgctgtctagtttcttcatggtcactagatctagagacttcagggagtgccctgtgggcgtgatgaagtagaggcaaacgtggatccttgtgtcatggtagtcgaagagcgagcggcggatcttcagctcctcctgcagataattttcaaactgcgcatcgatgtagtcaactatgggcctctcatccttattgatctgatccccaaagcccacggcatccacaatggtcagcttgagctgcacgttgctctcctggaggtcataggtctggggccgcaggcgcacgcatgcctcatggtnactggcttcctcagtctcgaaggtcgtgttgaagagtgtgttcatcagtgtggatttgccaatgccggtctcccccacacagaggatgttgaagctgaagccctgagtgaccgacttgctgaccagctggtcggggaggctgtcgaaacccacatggccgcccagggagaggctccggggctctggctctgcattcgagaagcgctccaggtcggtggccgccatggcgagtccgcaccgggcgggtgggctgggacgagcgcaggggcagcgacagggaccagccggctgcgggacgcgtccgcccgggcggctgcggctgaa

SEQ ID NO: 318428 - DNA, 1114 bp, Homo Sapiens
  misc_feature (49)..(49): n is a, c, g, or t
  misc_feature (331)..(331): n is a, c, g, or t
  misc_feature (889)..(889): n is a, c, g, or t
  misc_feature (1075)..(1075): n is a, c, g, or t
  misc_feature (1085)..(1085): n is a, c, g, or t
  misc_feature (1091)..(1091): n is a, c, g, or t
  misc_feature (1110)..(1110): n is a, c, g, or t
ttttatgtttgcagaaaggcaggaaactttattgaataatcttttcttntggggtagagaagttgagaaaccaaagcgtatccaggtcagagaggagagagatccgaccggacgagaagagcacagagggcccaccatcaggagagagtcaggacagggggtcctgagagcagagggactgagccttgggtccagcagcccctcctctctcctgcagggaacttccggctctctcctcctctgggtgctgaagacagagggaggggacgccagggaggatttaaggcctacggacatcagaagtgcggcgacccagaggcatttagaggtnggttggtaacagaggcactagaagtcgtggtaacagaggtgctacgggggctgacgcttcctgggaaacaagagacaagacatgctcaggctggagaagacccacctcaggacagggcagggcccccctggagggctcacaaactcctcattagtcaggtggtgcgtggatggagactctttattgtccccaaagatggctcttcccaagacagccaaatagctctgtggggcagagccatcagtttcaaaaggaaaatcagtgagcgaatgaccacttccaccccagctctccccctccctacactggagagcccagcactggctccctccctccccgcgagctcccacccccattggggcagtgaatgggaggctaactctgcctccccctacaccacggggctgttcccttacctgctgaggaagggaaaccaatcatcttggcgtcctggctctcgagcaggctgcggtaggtggcgatctcctgctccagacgtgtcttgatgtccagcagcatcttgtactcttggttctggcactccatctcactgcggantctgctcagctgggcctcgatgctgctgatgagtccctggatctgctgcagctgcagggcatagcggcactccgtctctgcgaccgtgttctccagccccgctttcatgctcagctgggactgcagctcaatctccaggcttggagcgtgcgctgagctccgtgatctctgtcttgctggtctgantatggcagtntggtanaactcttgttcagtctgantctg

SEQ ID NO: 318429 - DNA, 1531 bp, Homo Sapiens
  misc_feature (1012)..(1063): n is a, c, g, or t
  misc_feature (1194)..(1194): n is a, c, g, or t
  misc_feature (1393)..(1393): n is a, c, g, or t
  misc_feature (1424)..(1424): n is a, c, g, or t
  misc_feature (1446)..(1446): n is a, c, g, or t
  misc_feature (1478)..(1478): n is a, c, g, or t
  misc_feature (1498)..(1498): n is a, c, g, or t
  misc_feature (1507)..(1507): n is a, c, g, or t
  misc_feature (1512)..(1513): n is a, c, g, or t
  misc_feature (1529)..(1529): n is a, c, g, or t
tgtgctcaacagatcctcctgcctcagccttcttagtagtagctgggactacaggcatgtgtcaccatgcccagccccatgggtctttgttttctgctagtaacttcaaaaggggacatgcagtgtaactcacctgagtcccaagttaaggctatggtagcagctgagcagacaagacagcttttcctaaataaatgaatgcagaatggggacccctccctcctccccatgggagatgggcagctcagacactcagaaggttgtgtgggagcgagcaaacaaacacccatgcacacctgggtcccgtcagtcagatgcaggggacaggaagtgccctgccatctactggatgccagaagacaagacgtgacccacgagtaagtcacggtttctgtgaggtgctggtggcactggcacagggtcacagtgaaaagcctctacgcagaggacagcagaaaccccccgcagcctcaggaggcagcatcagatttatttattcctactcaacatgacccgggaacacaggagcaactctgtacacttctagaaactcacagctagctccaaaacaatagaaattttaaactacaaaagatgagttgtattcagcaaatataaagggtaattttagactgtgtgaacgtttatcagactatttacagcacccgggagacgggttcagatctcgccggcctccttctcttctgacctccgtgaagccatcttcccgttggagcgctcaagcctccagtccgggggccctcgctcgctccgcccgctctcccaggactcctctctggatgcccgctctctggagaacttgtatttcgcacttcggtcccgggaagcccgacgatgtccccggctgtggctccgggaacggctgcggtggcgccgatgtctatctcgggaccgggaccgggacaatttccgtcgctctcgggaggtagatcttgaccgcctccgacgccgatcccgggagcgtgacctcctgcgatctctggttcttgannnnnnnnnnnnnnnnnnnnnnnnnnnnnnnnnnnnnnnnnnnnnnnnnnnnaagcgatcctgatttctcttctcctgcttttcagcgacagttttcctcaactgatcaagcttctctcggatctgaatgaaccccaagtgtaacttgccaccgaagtggtctgccaggcgacggtcattgtnatggagaccaaggtaggctgaacagacctcgcagacacgcagcttttgctgctgaaaactggatgcaggcatggaatttctgtattcttcctcagcttcttttttcttcgcacgaactttttccacttccataagaatcttctgggattcatccacattaccttcagcccctagctgttcggctttagcaaggagtttncctatttcttcatttaactcatgttcttttnctgcctttgcagaaacttccgncctgaattcctcctgtgtttctgccagcggcntcttggcgagcgcagtctcngataaattnagcannaaggactcaagtatcnat

SEQ ID NO: 318430 - DNA, 1007 bp, Homo Sapiens
tttttttgggaccggggccggggccaatttccctcgcttttgggaggtagattcttgaccgcctcccgacgccgatcccggggagcgggacttcctgcgatttttggtctggatcccgacctcctgctcagacggtcctcccggttccctttccttctttcctcctcaagggatcctgatttcttcttctcctgcttttcagcgacagttttcctcaactgatcaagcttctctcggatctgaatgaaccccaagtgtaacttgccaccgaagtggtctgccaggcgacggtcattgtcatggagaccaaggtaggctgaacagacctcgcagacacgcagcttttgctgctgaaaactggatgcaggcatggaatttctgtattcttcctcagcttcttttttcttcgcacgaactttttccacttccataagaatcttctgggattcatccacattaccttcagcccctagctgttcggctttagcaaggagttttcctatttcttcatttaactcatgtactttttctgcctttgcagaaacttccgcactgatttcctcctgtgtttctgccagccgcttcttggcgagctcagttctccgatcacattcagcaataaaggactccaagtgatccattgcatctaattcaaaaaacaggtctctttctttacttgcaatctcataatctgctcggagggccaagtcgtggattttggtacattctcctaaatccatgcgcgtcccagccaggatgtcatgggggcagcagtccagaaggtgactcttgcagacacggtcatctgtaaacttgaccctctgtctggtttcgtctccgtcccgagccgtgcccatgagctggtccagcagggcccgcatctgcgcctgggcggacatggtagccggcggaggcgacggggtcggccgcgacgacttctctcaggcaggcggtggcagcggcgtcgacaaacgatggtcgcgtgggcctcgagcccactcggctct

SEQ ID NO: 318431 - DNA, 940 bp, Homo Sapiens
  misc_feature (5)..(5): n is a, c, g, or t
  misc_feature (7)..(7): n is a, c, g, or t
  misc_feature (15)..(18): n is a, c, g, or t
  misc_feature (21)..(21): n is a, c, g, or t
  misc_feature (25)..(26): n is a, c, g, or t
  misc_feature (32)..(32): n is a, c, g, or t
  misc_feature (34)..(34): n is a, c, g, or t
  misc_feature (36)..(36): n is a, c, g, or t
  misc_feature (39)..(39): n is a, c, g, or t
  misc_feature (41)..(41): n is a, c, g, or t
  misc_feature (50)..(50): n is a, c, g, or t
  misc_feature (72)..(72): n is a, c, g, or t
  misc_feature (75)..(75): n is a, c, g, or t
  misc_feature (85)..(85): n is a, c, g, or t
  misc_feature (88)..(88): n is a, c, g, or t
  misc_feature (90)..(90): n is a, c, g, or t
  misc_feature (92)..(92): n is a, c, g, or t
  misc_feature (94)..(94): n is a, c, g, or t
  misc_feature (101)..(101): n is a, c, g, or t
  misc_feature (107)..(107): n is a, c, g, or t
  misc_feature (114)..(114): n is a, c, g, or t
  misc_feature (117)..(117): n is a, c, g, or t
  misc_feature (130)..(130): n is a, c, g, or t
  misc_feature (188)..(188): n is a, c, g, or t
  misc_feature (193)..(193): n is a, c, g, or t
ccccngnccaccggnnnnggngtcnnccaccngnancgncnggtgtagtncctccatcccccagggcccccncgntcagggaaanaanancnancgtggcnggtccncctccgnggnaccagcagcgcgntcgccccgcgccgtagcgggaagtccactccactcaggggagccacgcaggggagggncaccngggggccagggtgcaggacctgggaggactctccatggtgcatcagcacaggcggtggtggtgcagcgagctcctcaatggtcacagtagcgctgggctcagagagggcgccttccccatcggtccggtagctgcagctgtagttgccaggctgatggactggaaaggtggcctccacatcctcctgggcctcaggcacctccagaaactcatggtcgccctcccgcctcagcagaaaagtcacaccccgcagcacacctcggcacactgctgttgttttcaggccgggggtgatccaggacactggcgccatcgagagccagggagcaggcaaggactttggccctgtcagctccaggagcttgctcagctgggtccatcctgtggacaagcccgagcggcagcggtagcggccctgggtgtcacccgtcagcaggaactggtgcttgatggcaggtgagtcaaggtgcacaggctcctgggccaccccattcttgaacagctggaagtctggagtctccaggtgggcctggcacgtcagcgtcacattggccaagggtttcagcagtgattcggactctgcccacaggctgggctgcgtctcataaaatatggctgcttctgtcactgggccccaggtgacaccccacagcaagagaaagaccacgagcatggacatgatggtcgcgctcactccggtgcagtgagtgtctggggtgagcgtctgcagcaatgaggatcccggga

SEQ ID NO: 318432 - DNA, 1691 bp, Homo Sapiens
acagagctctcttccatttattaattcctgggaggaatgagggaggcttctccagccccccagagaccccggccttgtgctgcaacaggaggggagggagccagtccagaatccccggcacttctgaggacaccaacagcaccctgggcccgcggctgcatcagctttctgccaccaggagctccacagggtcgctgagctccgattcgaaggtgtggggcacccaggagcggtagcggcacctgtagttgccggcgtgctggggccccacgaagatcagctcgaggttcgccgcggccccgggggtgcggaccgtcttcacggccttcgtctcgccctcgcgcagagctcgaaggtgacgtcggggatgggtccctcgcagcgcaggacggcatctcggcccgccaggaccgccccactccacgtcgcccggagctgaggcctgggagggggtccgtccacgtgcagctccaagcgctcgctgggcgcggagcccccgaaaggcggcttcaggtccacgtagacgcagctgtagttggcggagtcagccacggaaatgttgtgcagctcgaagagcgcctcggtcccagcggggctctggaaacggtgcacgcggcgcccgcccctgtcctcgcgcaccagggcgaagcgcgcgccctccaggggcgccaggcaccgcagccgcaaggccctgccggactccggctccggggagaactccggcgcgggcagcgtctcatcgctcagaatcagctcgaccggcgcgctgtccccggaccagccgttttggttgtcatgcagccggtagcggcaggtgtagtgacctccatcccccagggccaccgcgttcaggtgaaagaagatgcgatctgggctggtgctgctcctgggtaccagcagctctttctccccgcgccgtagctggaagtccactccactcaggggagccacgcaggtgagggtcaccttgttgccagggtgcaggacctgggaggactctccatggtgcatcagcacaggcggtggtggtgcagcgagctcctcaatggtcacagtagcgctgggctcagagagggcgccttccccatcggtccggtagctgcagctgtagttgccaggctgatggactggaaaggtggcctccacatcctcctgggcctcaggcacctccagaaactcatggtcgccctcccgcctcagcagaaaagtcacaccccgcagcacacctcggcacactgctgttgttttcaggccgggggtgatccaggacactggcgccatcgagagccagggagcaggcaaggactttggccctgtcagctccaggagcttgctcagctgggtccatcctgtggacaagcccgagcggcagcggtagcggccctgggtgtcacccgtcagcaggaactggtgcttgatggcaggtgagtcaaggtgcacaggctcctgggccaccccattcttgaacagctggaagtctggagtctccaggcgggcctggcacgtcagcgtcacattggccaagggtttcagcagtgattcggactctgcccacaggctgggctgcgtctcataaaatatggctgcttctgtcactgggccccaggtgacaccccacagcaagagaaagaccacgagcatggacatgatggtcgcgctcactccggtgcagtgagtgtctggggtgagcg

SEQ ID NO: 318433 - DNA, 1592 bp, Homo Sapiens
  misc_feature (541)..(541): n is a, c, g, or t
  misc_feature (554)..(554): n is a, c, g, or t
  misc_feature (559)..(559): n is a, c, g, or t
  misc_feature (573)..(573): n is a, c, g, or t
  misc_feature (640)..(640): n is a, c, g, or t
  misc_feature (643)..(643): n is a, c, g, or t
gggctcttcacatttattaattcctgggaggaatgagggaggcttctccagccccccagagaccccggccttgtgctgcaacaggaggggagggagccagtccagaatccccggcacttctgaggacaccaacagcaccctgggcccgcggctgcatcagctttctgccaccaggagctccacagggtcgctgagctccgattcgaaggtgtggggcacccaggagcggtagcggcacctgtagttgccggcgtgctggggccccacgaagatcagctcgaggttcgccgcggccccgggggtgcggaccgtcttcacggccttcgtctcgccctcgcgcacagctcgaaggtgacgtcggggatgggtccctcgcagcgcaggacggcatctcggcccgccaggaccgccccactccacgtcgcccggagctgaggcctgggagggggtccgtccacgtgcagctccaagcgctcgctgggcgcggagccccgaaaggcggcttcaggtccacgtagacgcagctgtagttggcggagtnagccacggaaatnttgtncagctcgaagagcnctcggtcccagcggggctctggaaacggtgcacgcggcgcccgcccctgtcctcgcgcaccagggcnaangccgcgccctccaggggcgccaggcaccgcagccgcaaggccctggccggactccggctccgggggagaactccggcgcgggcagcgtctcatcgctcagaatcagctcgaccggcgcgctgtccccggaccagccgttttggttgtgatgcagccggtagcggcaggtgttgtgacctccatcccccagggccaccgcgttcaggtgaaagaagatgcgatctgggctggtgctgctcctgggtaccagcagctctttctccccgcgccgtagctggaagtccactccactcaggggagccacgcaggtgagggtcaccttgttgccagggtgcaggacctgggaggactctccatggtgcatcagcacaggcggtggtggtgcagccttccattctttgggcatcctctgcccaaactcctttgcaaccatcagacccaggcaaccgtgtggccagcttcctggacctggtccgagctcctcaatggtcacagtagcgctgggctcagagagggcgccttccccatcggtccggtagctgcagctgtagttgccaggctgatggactggaaaggtggcctccacatcctcctgggcctcaggcacctccagaaactcatggtcgccctcccgcctcagcagaaaagtcacaccccgcagcacacctcggcacactgctgttgttttcaggccgggggtgatccaggacactggcgccatcgagagccagggagcaggcaaggactttggccctgtcagctccaggagcttgctcagctgggtccatcctgtggacaagcccgagcggcagcggtagcggccctgggtgtcacccgtcagcaggaactggtgcttgatggcaggtgagtcaaggtgcacaggctcctgggccaccccattcttgaacagctggaagtctggagtctccaggcgggcctggcacgtcag

SEQ ID NO: 318434 - DNA, 834 bp, Homo Sapiens
  misc_feature (399)..(399): n is a, c, g, or t
  misc_feature (532)..(532): n is a, c, g, or t
  misc_feature (540)..(540): n is a, c, g, or t
ggggagacaggtggtggctacgacggcgaagggagctgagactgtccaggcagccaggttaggccaggaggaccatgtgaatggggccagagggctcccgggctgggcagggaccatgggctgtggctgcagctcacacccggaagatgactggatggaaaacatcgatgtgtgtgagaactgccattatcccatagtcccactggatggcaagggcacgctgctcatccgaaatggctctgaggtgcgggacccactggttacctacgaaggctccaatccgccggcttccccactgcaagacaacctggttatcgctctgcacagctatgagccctctcacgacggagatctgggctttgagaagggggaacagctccgcatcctggagcagagcgncgagtggtggaaggcgcagtccctgaccacgggccaggaaggcttcatccccttcaattttgtggccaaagcgaacagcctggagcccgaaccctggttcttcaagaacctgagccgcaaggacgcggaggcnagctcctnggcgcccgggaacactcacggctccttcctcatccgggagagcgagagcaccgcgggatcgttttcactgtcggtccgggacttcgaccagaaccagggagaggtggtgaacattacaagatccgtaatctggacaacggtggcttctacatctcccctcgaatcacttttcccggcctgcatgaactggtccgccattacaccaatgcttcagatgggctgtgcacacggttgagccgcccctgccagacccagaagcccagaagccgtggtgggaggacgagtgggaggttc

SEQ ID NO: 318435 - DNA, 629 bp, Homo Sapiens
gctgagagggcgtgtggtctgccctccttcactttatatatatggattccaggctacagctaaaaacatttcttttagtttacaccaaagagaaatataaccctttaaaagcaaagtctgtttgtcctcacggcaagttcagaaacaaatggtccctgcctgcagtggagaaggaaaggggttctgggggcccagaaacagggcctactggttctcgtcccgcaatctgttcccatgatgctgaatgaggttctccaggccaaaccacgtagcctctgtctggccccatcatgcacggtggggtcatcccggaagcccttgaaatgtgctgtgtgcaaagtcaatcatgcggacatccaccttgggctgagaggagggacccgcctcggggctggtgttgctggggctggtgctggggccacaggatgacgccacctcagggagcaccatgtccaggtgcttgagacgcatctcagaccggcggtccaggcaggactcagcccggcactccttgccatcatagatgacaagcagggaactggagtagaagcggtaagaggcctgccgctccagcacagctttcaggccgccgcagtttgctcaggataggctcaaacaggtcacgtcgc

SEQ ID NO: 318436 - DNA, 985 bp, Homo Sapiens
  misc_feature (34)..(34): n is a, c, g, or t
  misc_feature (42)..(42): n is a, c, g, or t
  misc_feature (88)..(88): n is a, c, g, or t
catgcggtcctccgctcagccagcagtggccagntcaaggcnaagcggcgttgaacgctgtgctccccctccaggcccagggtcagcngcgccctcctttcctcgagggcctccagcatcggacacaggtatagaggacatgagatctgctgggctcggtccctcagcactgccaggggaccttcaggttggagcacagtgaaggcagggacaccttgcttaaagatgccccctttctgccatgcgatcttctccaccgtatcccccaggaggctggtgtggtcgatgccaagagaggagactccgcacaccacaggcttcctgatgatgttggtgcagtcataagccccgccaatgcccacctccaccactgccaggtccaccttctcttggaggaagacgtggaaggccatgagtgtcaggaagcggaagtaggggggcatggagacacagctgccatccttggtctcctccagccggtggtagaggcgccagaagtacttggtgaagagctcaggactgatgggctgcccattgatgcggatccgctcccgaacctgcaccaggtggggagagctaaagaatcccgtcttcaggccatagcttcggaggatacattccgtgaaggcacaggtggagcccttccccttcgtcccagtgacgtggatgatgttcagccggtccaagtcctccacctgcagcccactccgtgccaggtacagttccatggcttccaactgtgtctgagggtcaccccgctggcgcttcacctgctccaggtagccggcattggtctgcagggtattgagcatgcgcacggcatcctggtactccatgctcggctcctgcggcaccggccacgcgctcaagccccgccgcgccgcgacctgggtcgttacgccgcgcgcagacgccgctgccaggaatagagcggcgcgcaggtggctccgcgcccgcgacatagtcccggcgcccccggcagcgc

SEQ ID NO: 318437 - DNA, 956 bp, Homo Sapiens
  misc_feature (146)..(235): n is a, c, g, or t
  misc_feature (289)..(335): n is a, c, g, or t
ggtaagggcggataaggtagggcgatatggggctcccggtggccgtgtatactagcgcgtttgacgcgcgggcggtcggtatgcttgtgtccgggtaggtagtaccggcggcacggccggtgatgtgtcgcggtgatcccggcgannnnnnnnnnnnnnnnnnnnnnnnnnnnnnnnnnnnnnnnnnnnnnnnnnnnnnnnnnnnnnnnnnnnnnnnnnnnnnnnnnnnnnnnnncgtttagagtggaggacccatggaagggcggggcccccctggtggaaaaattgnnnnnnnnnnnnnnnnnnnnnnnnnnnnnnnnnnnnnnnnnnnnnnngagggtggtggggtcaatgccaagagaggagattccgcacaccacaggcttcctgatgatgttggtgcagtcataagccccgccaatgcccacctccaccactgccaggtccaccttctcttggaggaagacgtggaaggccatgagtgtcaggaagcggaagtaggggggcatggaggctccagctgccatcgttggtttccgtccagccggtgggtagaggcgccaggacttacttggtgaagaggtcaggcctgatggggtgcccattgatgcggatccgctccccgaacctgccccaggtggggagagttaaagaatcccgttttcaggccatagcttcggaggatacattcggtgaaggcacaggtggagcccttccccttcgtcccagtgacgtggatgatgttcagccggtccaagtcctccacctgcagcccactccgtgccaggtacagttccatggcttccaactgtgtctgagggtcaccccgctggcgcttcacctgctccaggtagccggcattggtctgcagggtattgagccctcgtgccgaattcgccacccaggcctggttgtgtgtttgtttatgtgggtgttggtaaacgagtcacccgcgt

SEQ ID NO: 318438 - DNA, 1256 bp, Homo Sapiens
  misc_feature (163)..(163): n is a, c, g, or t
ttcgtgcggcgcgctacgggcgcattggtttcgcctcgaccgctatgattgagcgtaaggacacagcggtggcgggcggcgctgcgaaggatcagactggacacgcactggccgagtcctggctccgctttagcatggatgaggacgaaagacgtggtgcggntatgttgtgttccttaggcgttacctgggggctcgcgctatcgtacggggtgaaggtcgtggtgtgacactgagagcgtgagtcaggaccggaatgagcggatatgagtgtggcacctggctaatgcctgcagtgggaggagggatctaactccggggtgtagtgtatggggttgacagaatgcccgtatcgtgcggcaccgtccggcggccccccctcaagtctcatggtcagaggggggaccccctttcctggagggcctccagcatcggacccaggtatagaggacatgagatctgttgggctcggtccctcagcactgccaggggaccttcaggttggagcacagtgaaggcagggacaccttgcttaaagatgccccctttctgccatgcgatcttctccaccgtatcccccaggaggctggtgtggtcgatgccaagagaggagactccgcacaccacaggcttcctgatgatgttggtgcagtcataagccccgccaatgcccacctccaccactgccaggtccaccttctcttggaggaagacgtggaaggccatgagtgtcaggaagcggaagtaggggggcatggagacacagctgccatccttggtctcctccagccggtggtagaggcgccagaagtacttggtgaagagctcaggactgatgggctgcccattgatgcggatccgctcccgaacctgcaccaggtggggagagctaaagaatcccgtcttcaggccatagcttcggaggatacattccgtgaaggcacaggtggagcccttccccttcgtcccagtgacgtggatgatgttcagccggtccaagtcctccacctgcagcccactccgtgccaggtacagttccatggcttccaactgtgtctgagggtcaccccgctggcgcttcacctgctccaggtagccggcattggtctgcagggtattgagcatgcgcacggcatccctctttccccactctcactgccggttcagactccgggctcgtgccgaattcgccacccaggcctcgctacttaggggggtaggaggaaatagcggacgagcaaggggagaaacgagag

SEQ ID NO: 318439 - DNA, 1953 bp, Homo Sapiens
tatattttgtatttgcaaaagctgaaaatgctcataaaaattaccagcccagagcttggatttccaccggatccaccacgtgagacaaaagagtctgtcacttcttcttgccaggtttgagggccttttctagaccttggatgtgttttcgagggagctgatactcttcaagcaatagccagccgaggtggtggacctggtttccctggatctgcacctgaaggctgtccttggccccaggggcaggattgacggtggtgctagcctggcatcgctgctgaaggatggcagccactgagtatgggtccagaccataggcctccaagttccggaccacggtcacctttttattagacgctctttgtgctagggtgatgtcaattggacagattctccctttcttcacaatgggctcttgtccgggaagggtcacttgataggcaggctgtaatttttccaaacacctggtcagaagactgtcccatggaagcttcatgactgtatgctgttcatttttctctaagatgcagttacataggatgggatccaatctcacaagatttttgttgtctgcatcaaccaggtcatttttcttggcgtagttaatgacgatcgttcggacctcactgccctccagaaagctccccttcttgtggccagactcctggaagagcagggtcatgctggctgggacacagtagaggggttttatatctggagggtgatagggctgttccctgctaccctcctggatagtctgggaggtcggggagggctcgggtatgacgaaagatgtaatcctcgggtgtttccagtccacagccacaatgctctccacccctttgctcagctccttcacctgtataatctgctcctgctgcatttgctgcaggaacttagagagctttttgtagcttgacttctttatgtccagttgtcgtccttcggggcagcaggagaacatgtggctgccaaggaaagtgctggtgagtaaagggaggtcagcctttttgactcggcacttcaaggcatgtaagaagcattgctgtaacagctcatccatttgttcttgaagcgttttgctatctgtggagtcttggttcaggcccctggtgctggtgtcttctggggcttctgagagagacttgtcttcacgtgcctggtgaacctccccattctcctcttccccctccagggtcatgtgcctcatgtctccctgcagggtggagtccatctggacagaccccttctcttcactgagatctgctgaatccagggccagtggagcaatggaaggtggagaggacttgtttccagaccgccacaagtggtcctggtaagtgtggagcacagagaagccccttcccttcaggcctgacgtgagcatctcagctgtggacatggctgcaactccaatggctacaggggctctgttccccaccaaagaaatggcacagaggtcgcccttctgtacctgaggcagaccagcagggggcatcaccagtccaggcagcatcaaatctgctccccctaccagtttctcgagcaccagaggccatgttgtaaaggttggcagaagatcaggataggaccacagcgtgtacactgttggatacagatttttctccagttcaaagaggatggggttaccaccactcacgtacacagtcactgcatcccctttgtgagcatacaacttcacaatgttgagctcctcctttccaggtactaactcagagacttgatcagttccaagggtggggaaagcagttgtcacatcagctcgaagctttctcctgtccgaccccttgatggccgtgttggacttgacccgaaaggccttggcaaacatgtctgctggggtggcctggggaagagagcacagaagccagggaatgtcaagaaagcgagggcgcagcagctgccaggccctcagccgtgggggcagccatg

SEQ ID NO: 318440 - DNA, 1580 bp, Homo Sapiens
  misc_feature (964)..(1017): n is a, c, g, or t
  misc_feature (1325)..(1325): n is a, c, g, or t
ttttataaggataagcaagcttttattccgtcaagagaacaaaggtcaggacttttatcctggtggggggatggggagtccagattccttctctgatgaggcaaaaaaagaatcaagactcctgttcaagtaaagggcagagggtgagagctagtactcttattctagaaaggaagtagatacttttctttgataaaggaatgaacggtagactcctagtttgcagaaaaggtgggaaagatgtgacttgtactttggtaaggagatagggaaggaattaaggctattactctgaagaaagttggggggccagggctcctatttttttgctgaggagatggaagatcagggcttgtattcaataagaatgggaggggccaggggatgcctggcaaaagccttgcactgtgaggtgcaggtagaggcttttattctggtgagaggacatggactctctctctcccctcaggtaactgtgccctgtaccagcggggaggctggtggtaccatgcctgtgcccactccaacctcaacggtgtgtggcaccacggcggccactaccgaagccgctaccaggatggtgtctactgggctgagtttcgtggtggggcatattctctcaggaaggccgccatgctcattcggcccctgaagctgtgactctgtgttcctctgtcccctaggccctagaggacattggtcagcaggagcccaagttgttctggccacaccttctttgtggctcagtgccaatgtgtcccacagaacttcccactgtggatctgtgaccctgggcgctgaaaatgggacccaggaatcccccccgtcaatatcttggcctcagatggctccccaaggtcattcatatctcggtttgagctcatatcttataataacacaaagtagccacagaccgtgtctggtttgtatctgcacctggcaggggtcactccctgggcccgcnnnnnnnnnnnnnnnnnnnnnnnnnnnnnnnnnnnnnnnnnnnnnnnnnnnnnnggatgaggttgtccacggtcttccagggaggccaccctggctcaagcaggtggccacagtggagccactgctaatgtgagggttgctggggtggagcactttgggcaggtggttctgcttccggctcttggggtgagcacaggatgtcccaggcacgtggggctctcgccggttgtagcagtcggcagctgagcaggagtgagtgtgggtgctgcggcgatccgggtcccggtcccagcgcggggggaggatccgtgttggatacacggggaagccgcacccgtagcagggggacggggacccctatntggcccagccccggaagttgtgccgacacttcgggcagtggaactcagccaggccccacatcttgtcagctggcactggctcgtagcgcttccggcatttccggcaccgggatacctccttccgctggggcacgcggcgccaccagacgtggtcgcaggaggagcaggcaaactgccggtccacagcagggataaggtcgtcctgggcacgttgaaacatgcgtaggttggcttctgtcagtggcaggagggagg

SEQ ID NO: 318441 - DNA, 1772 bp, Homo Sapiens
  misc_feature (1536)..(1553): n is a, c, g, or t
  misc_feature (1562)..(1600): n is a, c, g, or t
  misc_feature (1647)..(1719): n is a, c, g, or t
agaagctaggagagggcggggacaactgggtcttttgcggctgcagcgggcttgtaggtgtccggctttgctggcccagcaagcctgataagcatgaagctcttatctttggtggctgtggtcgggtgtttgctggtgcccccagctgaagccaacaagagttctgaagatatccggtgcaaatgcatctgtccaccttatagaaacatcagtgggcacatttacaaccagaatgtatcccagaaggactgcaactgcctgcacgtggtggagcccatgccagtgcctggccatgacgtggaggcctactgcctgctgtgcgagtgcaggtacgaggagcgcagcaccaccaccatcaaggtcatcattgtcatctacctgtccgtggtgggtgccctgttgctctacatggccttcctgatgctggtggaccctctgatccgaaagccggatgcatacactgagcaactgcacaatgaggaggagaatgaggatgctcgctctatggcagcagctgctgcatccctcgggggaccccgagcaaacacagtcctggagcgtgtggaaggtgcccagcagcggtggaagctgcaggtgcaggagcagcggaagacagtcttcgatcggcacaagatgctcagctagatgggctggtgtggttgggtcaaggccccaacaccatggctgccagcttccaggctggacaaagcagggggctacttctcccttccctcggttccagtcttccctttaaaagcctgtggcatttttcctccttctccctaactttagaaatgttgtacttggctattttgattagggaagagggatgtggtctctgatctctgttgtcttcttgggtctttggggttgaagggagggggaaggcaggccagaagggaatggagacattcgaggcggcctcaggagtggatgcgatctgtctctcctggctccactcttgccgccttccagctctgagtcttgggaatgttgttacccttggaagataaagctgggtcttcaggaactcagtgtctgggaggaaagcatggcccagcattcagcatgtgttcctttctgcagtggttcttatcaccacctccctcccagccccagcgcctcagccccagccccagctccagccctgaggacagctctgatgggagagctgggccccctgagcccactgggtcttcagggtgcactggaagctggtgttcgctgtcccctgtgcacttctcgcactggggcatggagtgcccatgcatactctgctgccggtcccctcacctgcacttgaggggtctgggcagtccctcctctccccagtgtccacagtcactgagccagacggtcggttggaacatgagactcgaggctgagcgtggatctgaacaccacagcccctgtacttgggttgcctcttgtccctgaacttcgttgtaccagtgcatggagagaaaattttgtcctcttgtcttagagttgtgtgtaaatcaaggaagccatcattaaattgttttatttctctcnnnnnnnnnnnnnnnnnnctcgaggcnnnnnnnnnnnnnnnnnnnnnnnnnnnnnnnnnnnnnnncatggtcatagctgtttcctgacccagctttcttgtacaaagtggtnnnnnnnnnnnnnnnnnnnnnnnnnnnnnnnnnnnnnnnnnnnnnnnnnnnnnnnnnnnnnnnnnnnnnnnnntgcagtacccgggaatttaacccccctaatgagcgggcttttttttgtggatc

SEQ ID NO: 318442 - DNA, 859 bp, Homo Sapiens
  misc_feature (642)..(643): n is a, c, g, or t
  misc_feature (656)..(656): n is a, c, g, or t
aagaagcgaggcctgggtggcgaattcggcacgagggggcttgtaggtgtccggctttgctggcccagcaagcctgataagcatgaagctcttatctttggtggctgtggtcgggtgtttgctggtgcccccagctgaagccaacaagagttctgaagatatccggtgcaaatgcatctgtccaccttatagaaacatcagtgggcacatttacaaccagaatgtatcccagaaggactgcaactgcctgcacgtggtggagcccatgccagtgcctggccatgacgtggaggcctactgcctgctgtgcgagtgcaggtacgaggagcgcagcaccaccaccatcaaggtcatcattgtcatctacctgtccgtggtgggtgccctgttgctctacatggccttcctgatgctggtggaccctctgatccgaaagccggatgcatacactgagcaactgcacaatgaggaggagaatgaggatgctcgctctatggcagcagctgctgcatccctcgggggaccccgagcaaacacagtcctggagcgtgtggaaggtgcccagcagcggtggaagctgcaggtgcaggagcagcggaagacagtcttcgatcggcacaagatgctcagctaatgggctgnnggtgtggtgtggncaaaggcccccaacaccatggctgcccagcttccagggctggaacaaagcaggggggctaacttctccccttcccctcggtttccagtcttcccttttaaaagccgtggtggcattttttcctcccttctccctaacttttagaaaatgttggtaacttggctatttttgattaaaggaaaaaaggaatgtggttcttctgcc

SEQ ID NO: 318443 - DNA, 500 bp, Homo Sapiens
tttttcagatggttcgggcctctgtttattgacaggcacagaccaaggcctgcgcagcacagggctcagcggtatttttcggtcagcaccacggccacaccagtcaggaacttgtcccacgccgcttgcatttgcacggtgaactcgtcctgcaggtgggaggccagcacgacgtggaaacactggattagcagcggaaagttggctgggtccacgcgcagcacgagcgcgtgcaggtccgccagcgggctcagcgcggcgcgcaggttgtccacgtgctgcaccgccgcgcccacagccgccagcatgcgctgcccgtggctcagcagctgcgtcgcgtcctggcaggcgctcaggtgcgggaagtagaccttggtgctggggtacaccgtgaagagcctgagcagcagctccgccccgaattgcgcctcgtggcccgcaatcaggtcccagacctgcgcgatttgggcgcgctcctgggcgctgagcatggcgccgcc

SEQ ID NO: 318444 - DNA, 1627 bp, Homo Sapiens
  misc_feature (412)..(412): n is a, c, g, or t
  misc_feature (418)..(418): n is a, c, g, or t
  misc_feature (434)..(434): n is a, c, g, or t
  misc_feature (438)..(438): n is a, c, g, or t
  misc_feature (440)..(441): n is a, c, g, or t
  misc_feature (447)..(447): n is a, c, g, or t
  misc_feature (450)..(450): n is a, c, g, or t
  misc_feature (452)..(453): n is a, c, g, or t
  misc_feature (455)..(455): n is a, c, g, or t
  misc_feature (461)..(461): n is a, c, g, or t
  misc_feature (465)..(465): n is a, c, g, or t
  misc_feature (469)..(469): n is a, c, g, or t
  misc_feature (475)..(475): n is a, c, g, or t
  misc_feature (477)..(479): n is a, c, g, or t
  misc_feature (485)..(485): n is a, c, g, or t
  misc_feature (490)..(490): n is a, c, g, or t
  misc_feature (496)..(499): n is a, c, g, or t
  misc_feature (504)..(504): n is a, c, g, or t
  misc_feature (506)..(506): n is a, c, g, or t
  misc_feature (513)..(513): n is a, c, g, or t
  misc_feature (527)..(528): n is a, c, g, or t
  misc_feature (530)..(531): n is a, c, g, or t
  misc_feature (536)..(536): n is a, c, g, or t
  misc_feature (541)..(541): n is a, c, g, or t
  misc_feature (545)..(546): n is a, c, g, or t
  misc_feature (554)..(555): n is a, c, g, or t
  misc_feature (559)..(559): n is a, c, g, or t
  misc_feature (561)..(561): n is a, c, g, or t
  misc_feature (567)..(567): n is a, c, g, or t
  misc_feature (586)..(586): n is a, c, g, or t
  misc_feature (612)..(613): n is a, c, g, or t
  misc_feature (615)..(615): n is a, c, g, or t
  misc_feature (617)..(617): n is a, c, g, or t
  misc_feature (623)..(624): n is a, c, g, or t
  misc_feature (626)..(626): n is a, c, g, or t
  misc_feature (628)..(628): n is a, c, g, or t
  misc_feature (630)..(630): n is a, c, g, or t
  misc_feature (638)..(639): n is a, c, g, or t
  misc_feature (646)..(646): n is a, c, g, or t
  misc_feature (651)..(651): n is a, c, g, or t
  misc_feature (653)..(654): n is a, c, g, or t
  misc_feature (658)..(658): n is a, c, g, or t
  misc_feature (695)..(695): n is a, c, g, or t
  misc_feature (697)..(697): n is a, c, g, or t
  misc_feature (717)..(717): n is a, c, g, or t
  misc_feature (740)..(740): n is a, c, g, or t
  misc_feature (768)..(768): n is a, c, g, or t
  misc_feature (808)..(808): n is a, c, g, or t
  misc_feature (829)..(829): n is a, c, g, or t
  misc_feature (949)..(949): n is a, c, g, or t
  misc_feature (953)..(953): n is a, c, g, or t
  misc_feature (1081)..(1081): n is a, c, g, or t
  misc_feature (1112)..(1112): n is a, c, g, or t
  misc_feature (1125)..(1127): n is a, c, g, or t
gcggtgccaatgttttaatggaaaagtagaaaacagtataacattcagtatcacctatttgtctcacataccagtacagtgagtattaaacaggaatgacaatagagtagcaaaaacagaactgtagatttgcccaaattaactgtttctccgaatttgaggtgtatggcaagttgaatctttgatctctcaggagttgttaattacattatcagcttaacgctttccgacactacgggcggcatttctctgttcacctagacttaagtacacatatactaagctgtaaatagtctgccttccattagtttggtctctaagccctatcactatgtcgacttcctatccgtctatgagacccagtgacccccttttcagaggcatcggtgattcatttggcaaatgtcttganacctgncttgtcaattcccctnggtngnnccttgnttntnngngtcccngatntgtntttttngnnntgttanccttngggccnnnntcttntnctcctcngctctttttcctgnntnngttcngttgnggtnncctctgcnngtcncngctccncctttgcctgctgttctgnccctctttttggctgggctgtggtcnntngnctctgnngntntntctcccgnncctttcntttgntnntcangagtcagctcttctccagcatttatggttcttgtggnanacaatgctattcgggggagncgagtatcgaggttatcaatganaacattgaacacctgaagatttgggtcncagctgtgattcacaagatggagacacattgccgtatcgngccgcatccactgtgaattcntcagactcattgtcccgatcaaagagatacgtgcattcccttgttgtcatagaactgtcctcgtctttcagcttcttcacttgtgattacctctccaacatattccatgacaaaactcantctnttaatcttcacaagggtctttacaccccagccacgtccattgctagttcgaaagatgcaaagcgaatactgtgtgcctttttgtacaatcctattgggacaatcaggaccacactgacaccttgagtngcattcatagatgggagtaccaggtgggatnttaatttgttggnnnttattataagccaaaagaactccagcttcagcaggacaacatttttgaaagaagcaatctgtgcatgaacaaccaaaggtagcttcattgactaagctgattccaggagctggtttgtattcgttaatgtaatagaagtctgaaggtgggccctctaaatcaacagtattttcaacaaatatcattcctttatgattctttcttctgttgagttcatcttgccatctctgcagagctatcctttgtttagccttcttcacaatgtactcagcaatggcaggtttcaaagttttgttattgtcttttggagttattgctttgcctttctttacctgagataaataattatgcttgtcattagagaattgctgaagcagtaacgggcacttcagattttgcaaaggttcccaagtatttgtagaatctggccatcctttccattttacaagataatattccatatcctcctcgcgcctcggccccgaccacccgactggccc

SEQ ID NO: 318445 - DNA, 2041 bp, Homo Sapiens
  misc_feature (11)..(11): n is a, c, g, or t
  misc_feature (13)..(13): n is a, c, g, or t
  misc_feature (38)..(38): n is a, c, g, or t
ttttattaacntnaacacaaaaccaaaatgaaaactgngcttagaatataaaattctcatttttcaaagtgaaagtttgaagatactagctaaagttgataacttaaatagtggtaaaagtaaataacttagaattatggcagcaatcacaagaagaaacagaaaacagggggactagggattcggtggtagacttttactttaaaatagagctatgcagcagattctccatgacttggcttacatgcagtatgtcctatggaagtaaaattttcaaatacctccatcaccttcagtaactcatattaataaagtaaaagccaggtatataaaacaagaacccagtatataaacatatacatcaattggatccccaggtaaaccaaaaggagtttttaaaaatatacccaccataccttttaagacaacttttccgctaccctacagtaggaagtaaccacattcaaattagttaagctataaaaaagtaaaaggggccacaagctttattaaaagtaaatgcaacagttatatgtacagatggcacatggtgccaattttatttgtaaatatagtactccaactcaagtttacaagttacacctttgccacagccttggctaaatcttgaactagtgcagaattcagctgtggtagagtgctgatcttagcatgcttcgatgtggcatacttgttcttgacagtcatgtgctttgtaagtccttgatttaccatgactacattcttagccaggtgctgcataactggaagaagagattcttcagtatatgacaggtaatgttgtagagttggtgtccattcaccattatccagaattttcagtgctaagcaaaaagctcctgctgcaatttgagaaggaggaaagtgcaccatgtcatagtccaacatagttagttccatcaggtatttggccaaagtatgttgctcgacatcaacctctccaatcttagatgctctccgaaggaagtgcaaaggtagaggccgacccagaccaaagtttaaagctcttagaatcttcatttccatctgtctgatttggtgcttagtataagtgttgtcagtcacaaaagcaaagtcaccaatttctggagggtacatttcttcatatttgcttgcaataaacatggcagtgacaccaaccagctgcagcatcttcttgggcacacaattattctgcatgaaccgatcaataatggagacagtcatgtacatggtctcctgcaacaacctgaattttcatttgaacctgtactagccagtcaattaggatggctctcatgtttccagtgacttcccgaccccagtaggtattttggtctgactgcttgctcttcctcaagttgtctcagataagcataaatatctttcacatattcactacaaaggtttggatcagctccatcttctgcatccacatcatttactgcaagaattacatcagagaaagcctgacacaggtcttcttctgcaggggcacatccagatgtttccattgggcttggagaggcagtatcaaccaaaataggctcaggcgaaagtttttcttctttaacaggctcaggttctggctcaggttctggctctggcactggctcagacactggcactggcaccagcataggtaccttttcaagaggttttggtagttttttatcaatgacttttccagtagctgaaggttttgcttccttcttcataggcattttggcctgcagttgttcactgactttgttaccaatgtccccaagagctgttcttggcctcagtccgggcttggaggttgcagcaggggccgtaggaacgcgctttgcgcctgccatgttgatcttcgccttattttcagcattaattttcgagttcctggtgactcggagcgccatggcttcctcttcaccaggcagcagctcagcggggagaagcagaacaccggaggcccgaccagccaaggacctacaaccagcagaaaccaacagccgttccgccgcagcacgccgagaagagccagcctagcctcagattt

SEQ ID NO: 318446 - DNA, 949 bp, Homo Sapiens
gcacaaaaggccaaaggtccaccccattttctgggaggggtacattttctttcatattttgcttggcaataaaacatgggcagtgacacccaaccaggctgcagcatctttttggggcacacaattattctgcatgagccgatcaataatggagacagtcatgtacatggtctcctgcaacaacctgaatttcatttgaacctgtactagccagtcaattaggatggctctcatgtttccagtgacttcccgacccagtaggtattttggtctgactgcttgctcttcctcaagttgtctcagataagcataaatatctttcacatattcactacaaaggtttggatcagctccatcttctgcatccacatcatttactgcaagaattacatcagagaaagcctgacacaggtcttcttctgcaggggcacatccagatgtttccattgggcttggagaggcagtatcaaccaaaataggctcaggcgaaagtttttcttctttaacaggctcaggttctggctcaggttctggctctggcactggctcagacactggcactggcaccagcataggtaccttttcaagaggttttggtagttttttatcaatgacttttccagtagctgaaggttttgcttccttcttcataggcattttggcctgcagttgttcactgactttgttaccaatgtccccaagagctgttcttggcctcagtccgggcttggaggttgcagcaggggccgtaggaacgcgctttgcgcctgccatgttgatcttcgccttattttcagcattaattttcgagttcctggtgactcggagcgccatggcttcctcttcaccaggcagcagctcagcggggagaagcagaacaccggaggcccgaccagccaaggacctacacccagccctcgtgccgaattcgccacccaggcctcgctac

SEQ ID NO: 318447 - DNA, 1093 bp, Homo Sapiens
  misc_feature (16)..(16): n is a, c, g, or t
  misc_feature (348)..(348): n is a, c, g, or t
  misc_feature (368)..(368): n is a, c, g, or t
  misc_feature (375)..(375): n is a, c, g, or t
  misc_feature (402)..(402): n is a, c, g, or t
  misc_feature (405)..(406): n is a, c, g, or t
  misc_feature (432)..(432): n is a, c, g, or t
  misc_feature (437)..(437): n is a, c, g, or t
  misc_feature (466)..(466): n is a, c, g, or t
  misc_feature (477)..(477): n is a, c, g, or t
  misc_feature (491)..(491): n is a, c, g, or t
  misc_feature (506)..(506): n is a, c, g, or t
  misc_feature (568)..(568): n is a, c, g, or t
  misc_feature (593)..(593): n is a, c, g, or t
  misc_feature (595)..(595): n is a, c, g, or t
  misc_feature (601)..(601): n is a, c, g, or t
  misc_feature (611)..(611): n is a, c, g, or t
  misc_feature (614)..(614): n is a, c, g, or t
  misc_feature (633)..(633): n is a, c, g, or t
  misc_feature (670)..(670): n is a, c, g, or t
  misc_feature (674)..(675): n is a, c, g, or t
  misc_feature (678)..(678): n is a, c, g, or t
  misc_feature (690)..(690): n is a, c, g, or t
  misc_feature (697)..(697): n is a, c, g, or t
  misc_feature (717)..(717): n is a, c, g, or t
  misc_feature (723)..(723): n is a, c, g, or t
  misc_feature (732)..(732): n is a, c, g, or t
  misc_feature (735)..(735): n is a, c, g, or t
  misc_feature (746)..(746): n is a, c, g, or t
  misc_feature (750)..(751): n is a, c, g, or t
  misc_feature (770)..(770): n is a, c, g, or t
  misc_feature (818)..(818): n is a, c, g, or t
  misc_feature (820)..(820): n is a, c, g, or t
  misc_feature (822)..(822): n is a, c, g, or t
  misc_feature (824)..(824): n is a, c, g, or t
  misc_feature (878)..(878): n is a, c, g, or t
  misc_feature (917)..(917): n is a, c, g, or t
  misc_feature (958)..(958): n is a, c, g, or t
  misc_feature (981)..(981): n is a, c, g, or t
  misc_feature (1006)..(1006): n is a, c, g, or t
  misc_feature (1014)..(1014): n is a, c, g, or t
  misc_feature (1022)..(1023): n is a, c, g, or t
  misc_feature (1027)..(1028): n is a, c, g, or t
  misc_feature (1030)..(1030): n is a, c, g, or t
  misc_feature (1039)..(1039): n is a, c, g, or t
  misc_feature (1042)..(1043): n is a, c, g, or t
  misc_feature (1046)..(1046): n is a, c, g, or t
  misc_feature (1051)..(1051): n is a, c, g, or t
  misc_feature (1056)..(1056): n is a, c, g, or t
  misc_feature (1063)..(1064): n is a, c, g, or t
  misc_feature (1070)..(1070): n is a, c, g, or t
  misc_feature (1075)..(1075): n is a, c, g, or t
  misc_feature (1084)..(1084): n is a, c, g, or t
tattttatttatttanaatatcattttgtaaacaatcacactgtgcactttttaattcaacaataagaacaatttttttctagggatttatagcaaaccctatataaagtgaatgacttaatacacgagtgaagatgactagggtagaataatttctgaaaatgtcaaattacagcacttgatacaaagactgatgataactatctgtaccataaaaatttacatgccacgaaaacattaatttataattttaaatatacagtaaaacatagctataaaaagagtattacatttattataaaccagtgaattactcagagaaatattttttaaaacctactaaaaacnagtaaatattgcaactgagntaaaaantaataagaaaacaaaactatcatttanaannaccaagaaataaacaaaaggacaganatttncagataaatgtgtctactccttgataatntaaagcagcantacaacaaatgtanactaaataacctganagaacacattactatagcctagggctacaacaagataaaaagaaataaatcaagagtcagtnaaaattgttggatcagccccacttncnaagagnatctttaaanaanacacataatttccaagtanagcaaaaagcagagagtgtaacactccattaccaaanatanncanttacatcaactncacaatnaagcagcattttgaaaatanctgtgnagcctttantanaggccaacganagtnnactttctcgaccttttccnaaaagttggggatcagcaccattctgaagtaggaactctaccacagcnantngnccgtgtgctgcagcccacataagaggagaaaatccttcttcatccgtgtgaatnataacattttcttgttcgatacgagtagccagatagagnatctctccaagagcagccaactggtgcaaagacaaagaatntgctaacagaggtgtggtagagnctcatttcctctgtgtttgtagatnaagtgganactgtttnngggnncnaatgctatntgnnganggggntgacntgccttnntgaatnccggnaagggatgntggtattgc

SEQ ID NO: 318448 - DNA, 988 bp, Homo Sapiens
  misc_feature (888)..(947): n is a, c, g, or t
cccatcttcaactacctcacctaaaccacttccaaacccctaagtagcgaagcctgagtggcgaattcggcacgaggggtgatcctcagtcagctcaggataaagcacggatggataaagaatatttgtccctcatggctgaactgggtgaagcacctgtcccagcatctgtgggctccacctctgggcctgccaccacacccctggccagcgcacctcgtcctgctgctcccgccaacaacccacctccaccgtctctcatgtctaccacccagagccgcccaccctggatgaattctggcccttcagagagtcggccctaccacggcatgcatggaggtggtcctggtgggcccggaggtggcccccacagcttcccacacccattacccagcctgacaggtgggcatggtggacatcccatgcagcacaaccccaatggacccccacccccttggatgcagccaccaccaccaccgatgaaccagggcccccaccctcctgggcaccatggccctcctccaatggatcagtacctgggaagtacgcctgtgggctctggggtctatcgcctgcatcaaggaaaaggtatgatgccgccaccacctatgggcatgatgccgccgccgccgccgcctcccagtgggcagcccccaccccctccctctggtcctcttcccccatggcaacaacagcagcagcagcctccgccaccccctccgcccagcagcagtatggcttccagtacccccttgccatggcagcaaaatacgacgactaccaccacgagcgctggcacagggtccatcccgccatggcaacagcagcaggcggctgccgcagcttctccaggagcccctcagatgcaaggcaaccccactatggtgnnnnnnnnnnnnnnnnnnnnnnnnnnnnnnnnnnnnnnnnnnnnnnnnnnnnnnnnnnnntccaacgcctggttccgcccggaatgaatgatgccccccct

SEQ ID NO: 318449 - DNA, 1418 bp, Homo Sapiens
  misc_feature (306)..(306): n is a, c, g, or t
  misc_feature (348)..(348): n is a, c, g, or t
ggtcgagtgttcatttcgcctgcttggtttcagtcttttctgtgttgcctgctttgttgcctctgtcttcttgtgttttttgttctcgtattctcttggggtgcgcttgcctggctggccctgtttctcgtgtggtggtttttcaagtgtgtgtggtgcccttgggtttctcatggatgcccgcagccacctgtcagctggtaaatgggtttggaactttggggccacctccggggcccaccaggaccacctccatgcatccgtgtagggccgactctctgaaggccagaattcatccaggtgggncgcttctggttggtagacatgagagacggtggagttggtttntggcgggagcagcaggacgaggtgcgctggccaggggttgtggcaggcccagaggtggagcccacagatgctgggacaggtgcttcacccagttcagccatgagggacaaatattctttatccatccgtgctttatcctgagctgactgaggatcaccaggcctttgggattttacagtctgaagcaatgtggccagcccctccacacttggtacacactgtggtgttggtaatgctgcgggtctctgagctctgccagggtcttaagatcctgttatcgtcttcccgaagggtcccatttaagcgagccaactcccgaagctgcatcttccgtagatcattctggtcctctggagtctcgataccctgcttcaggatgtttcttatctgttccactgcctttttgacgttctccattgtattggcagtaaccagggcatgaagtggctcatcttctcctggcaacatctggccatctttgcgcccaaccttcccttctttcacagaccctttcccccggatcataatcttggcattgcactccttctctatgttcttcagggtgttccctctgggcccgatgagcagccccacaaagttgatttctgggtactcatcttgtggaatcatgactttatcactcacacgtgttgctggaggtttgtaatctgcaggtggcttgaaatccggattgagtgcaaccatctctgtgatgaggttgtgccgctcctcttccagctttttgcgggtgcggaactctcgggtgttaagccgcttcccctcgctattgtagatgggctcaggggaaggggacctgtcctcagggttaggggggatgcccaggtctcctgtgcgcagtttacgagtcaggtcttctatctgcagttgcactatataagctctttcttgttctcgagtaagtccagggggaataactgtaggcattcctggaatcactgtcttctgttccattgtgtcttggttccagcggctcctcttccgcttcttacttgggaagtccaacggcgtggcgttcgctccggcctcgtgccgaattcgccacccaggcc

SEQ ID NO: 318450 - DNA, 1543 bp, Homo Sapiens
  misc_feature (62)..(197): n is a, c, g, or t
  misc_feature (222)..(232): n is a, c, g, or t
  misc_feature (257)..(268): n is a, c, g, or t
  misc_feature (279)..(411): n is a, c, g, or t
  misc_feature (1097)..(1142): n is a, c, g, or t
atttccccccctcttcccataattccccgggcggggggaattttaaatttgaacccgctggnnnnnnnnnnnnnnnnnnnnnnnnnnnnnnnnnnnnnnnnnnnnnnnnnnnnnnnnnnnnnnnnnnnnnnnnnnnnnnnnnnnnnnnnnnnnnnnnnnnnnnnnnnnnnnnnnnnnnnnnnnnnnnnnnnnnnnnngccccttttcctttccccttggggnnnnnnnnnnnaaaaaaagttttaaaaaattttttnnnnnnnnnnnngcccccccaannnnnnnnnnnnnnnnnnnnnnnnnnnnnnnnnnnnnnnnnnnnnnnnnnnnnnnnnnnnnnnnnnnnnnnnnnnnnnnnnnnnnnnnnnnnnnnnnnnnnnnnnnnnnnnnnnnnnnnnnnnnnnnnnnnnnaaaaccacactgctcttttattcaatggaacatccccgctttagcgcagtgttgaatctaacaccgaaaaaagcccagagaaatttctgcagataaaccagtgaagagaacgcgcagtatacattattgtcaacagaatcacttcatggagagggaagcgggaggaaaaaggaaggagaatgaacaaggggctcaaacccctacacactgcaaaacattcagacatttgggattaaaacaaaacataaaaggaagccttccaggaaggagaggaccaaatggaatctgaggcagctcaggtgatcaaggagcacaggaagaactccaggctggcaggcgagcccgagggagctcaggctgcccacccactgctggcaggatcgccaggacggatgggaatcccgaaacctggagatgaacctaccctcggcaactttacaagactcccttgacaagggtggcagagattaaaaaaccccacgctttaaacaaacatatttgggggtggctatggcaccttgaaaaacccacaaccagcttgacatgaatggccaaagcccttgcccaaaaccatttgctcccctctccttggtaagggaaggagaactggagagaagggaaaggaatctaaattgcagcagaagaccggggagagcatctccttggacggagtctgaagaaaggannnnnnnnnnnnnnnnnnnnnnnnnnnnnnnnnnnnnnnnnnnnnnttcacgatatggagccagcgtgttccgattccgtccacaaaaataactcaggctgctttgccgaaccatcctgtccaccaggggcgttgctgaggctgtctgcctggaagggtcaccaatgggcgcggaaagtcctcactctcatggctcgggccatcgccgccgcggggagggatctttgctgccatggcaagggggtactggaagccatactgctgctgggcggagggggtggcggaggctgctgctgctgttgttgccatgggggaagaggaccagagggagggggtgggggctgcccactgggaggcggcggcggcggcggcatcatgcccataggtggtggcggcatcataccttttccttgatgcaggcgatagaccccagagcccacaggcgcc

SEQ ID NO: 318451 - DNA, 534 bp, Homo Sapiens
  misc_feature (168)..(180): n is a, c, g, or t
tggcccgagccatgagagtgaggactttccgcgcccattggtgacccttccaggcagacagcctcagcaacgcccctggtggacaggatggttcggcaaagcagcctgagttatttttgtggacggaatcggaacacgctggctccatatcgtgaaatttttattaannnnnnnnnnnnncctttgttacttctttatcttttcctttcttcagactccgtccaaggagatgctctccccggtcttctgctgcaatttagattcctttcccttctctccagttctccttcccttaccaaggagaggggagcaaatggttttggggcaagggctttgggcatttcatgtcaagctgggttgtggggtttttcaaggtgccatagccaccccccaaatatgtttgtttaaagcgtgggggtttttttaatctctggcccacccttgtcaagggagtcttgtaaagttggccgaggggagggttcatctccaggtttcgggaattcccatccgtcctggcgaatcctgcaagcagtg

SEQ ID NO: 318452 - DNA, 1832 bp, Homo Sapiens
ccaaatcaatttattatcctgacagctggcatcattaatactttaacaaaaccacttaaaattagccaaatatctaagacagatacatatacaaaagatatacaaattaaaaccatttaaaaagtaatagataccataatttgtacttggccacaacttctgtattcagaaatgattgtaaaattaaaacctaagttaaaaactgtacaccatatactttgagtgatttacatcttagaaaacaaaggcagtctttcattgttacagatttagtgtctctggtgggttgaggagagaaacaccatgatactttgaatttttgtacttttctcttattgactgttgtgcatgctgtggtgctttgaggtaggtctggtgaaggtccatgagacaaggcttaagactttccagggtatatccagtctttcgtattaatgattcaggccagctttgtcccgtgactgtgtagagtgctaaatgaaaggcagctccagcaataactgatggcaaatacttgaggtatgggtcagcatctatcaaacttaattctcccaaaaacattgctaaactttcaactttgcagtttgcaggctgctgatgcagaaagtattgggtaagaaactgatttactgttggagcagctaagtcaaaagtaaggactttcaaaactagatgctccattctcagaacttgtttcttggtgtaggtatcatctgtaatgtacacaaactctgctacttctggggggtatatttcttcaaactttgaggctaacagcatagcagcagtgcccacaagctgaagttttcctctcagcactgacatggaagacaggaacctatcaatgtagttcacagccaaatgcagggtctcattctgtagtttatattcttctcctacttcaactaaccagtccacgaggatagctctcatactgttagtgatgtctggctgtttcttcatgtaacccactttaggtttacatttaacctccatttccctaaggtatgtgtgaatatcctcatggtagtctggtacttcattaacactcactggcttttcatcttctaatacaattgacatgtccatagtatgtggtgactcaaaactaccatccattggataatcaagagggaccaatggttttctgggtccaggtaaactaatggctgaattaaaagccagggcatcttcacgctctattttttgagattcagctggcttcttctgagcttctttttctgcttcatccacatgaatggtgaacgcaggctgtttactgtttgctttccaaggaggaacggtgacatgctcatcatttacaggaagatccttaaggggtgcaacccgtctcgtcttcggcctctgctctgcgctagaccccgcgggttcccggacttcagtaccgccagcgcggcccgggtccgcggttgttggacgggcgctgccttttccgggttgatattctcctggtcctcttggagcgccgtctgctgcaatgctagcagcgccgagcccgcctcgcgggtcgcaggccccggcgcagagttgcccaacatcactgctcccgggagtggacggcgggatcaggctgcggcgccaagcagcgtgcactctgcccagccgaccactcgcaccgacccggccaaagaatagtcgtagccgccggtcgcagcccaggccagcctaccagcccgcccgctcgctcacccagctcgagaccacgcagggccgaggaggttgcgaaaggcgcaggcaggcactgcccagcgtggcgagccaaagacgcccagagatgcagcgagcaggcgcgccggagcggcggctgttct

SEQ ID NO: 318453 - DNA, 1293 bp, Homo Sapiens
  misc_feature (1207)..(1207): n is a, c, g, or t
cctgtagttgtggtgcgagggatgtgttgaaacaaaaagccggcggggggccttccacatattgggctggacgaatgtggaaccgggagtctgttccttaagcagttgtgccggactccgctggtgccggcggagtttcgttctcagagagaccagaagaagggagtgtagagtccgacaggatttggaaactgggagtttctaaaaatgttttagcatggaagaccatatcgccggcaatggaatgtgaagccatacgtccattatgttggaacggataccccattttagtgtgtaagaaaaaattagttttatagttatactttataactcttcaaagtctcagaatatagctaagtgaggagctctgagtgccagcaaagccattctgtcactccatgacatcaacattaaacattaccttccatccctctaacttgtaaaactttcacattttcttttctcgtatttcttttaaatacattttcctctctgttcatctatattcaccatgagcaaaagtgcattcaagtccctgatctggtcatattttctatttgtggcacccatccccataaggacatataagcaatactcacagtacgaagtctagtttttaaaaagggcttttaaaatgctgggtcttactttgcatgctatctaaagatcaaaacatttcccctttgattggacagtagtttcaattatatattgccttaaaaaatcaatgcaacctcatacaagattaactcactttctagttaccttcattattctaagtcaaactcttcagaaaaggactgaagtgaaaaagttcttattctttcagttccatgaacatgaatattaatgtactgcattatactttcaaattccacttctgtggtctaacatttaatcaagtttgagatcctgtttatattccttttgaaaaacctggcccatgtccatgcaaaagaaagcatatattaagattgcatactgactgtttaacttagaaaaaacttttgagaataataaatgcaagaaactttaaaaaactggaatggaattatttggtcccatgatattccttaattttagattttattatggtatagctttttatctctcaagttttatctgtaacaataaataattttctttgagcaattctgactttggggaaaaaaagaaaggaaatgatttataaataagcaggagcctnactgtccttcattaccatgctgtcacccacactgtcatcagtatcttagctctattttgtttggaccctgaaatacgctgataaat

SEQ ID NO: 318454 - DNA, 996 bp, Homo Sapiens
  misc_feature (779)..(779): n is a, c, g, or t
  misc_feature (823)..(823): n is a, c, g, or t
  misc_feature (863)..(863): n is a, c, g, or t
  misc_feature (893)..(893): n is a, c, g, or t
  misc_feature (911)..(911): n is a, c, g, or t
  misc_feature (920)..(920): n is a, c, g, or t
  misc_feature (923)..(923): n is a, c, g, or t
  misc_feature (931)..(931): n is a, c, g, or t
  misc_feature (940)..(940): n is a, c, g, or t
  misc_feature (944)..(944): n is a, c, g, or t
  misc_feature (946)..(946): n is a, c, g, or t
  misc_feature (955)..(955): n is a, c, g, or t
  misc_feature (965)..(965): n is a, c, g, or t
  misc_feature (969)..(969): n is a, c, g, or t
  misc_feature (971)..(971): n is a, c, g, or t
  misc_feature (975)..(975): n is a, c, g, or t
  misc_feature (986)..(986): n is a, c, g, or t
  misc_feature (990)..(990): n is a, c, g, or t
  misc_feature (992)..(992): n is a, c, g, or t
ttttatgtttttcctttatgtttaatagttctgtgaacattgacaatatattacttttagtggtacacagttcttgagaaaatgtcttgatttttacattgccatttgtgatatttttagcagtccaccacaatatcatttttataataaaaataaaatatactcattgatgatagagaaaatattgttaaagacctcttgggacaggaaaaggctcagtcataaaatcagatgcttattcattttcagctgtgtcattttgactcattactttcaagaataactataatattgctagacagttcattacactgagaagaactttccttgaacttcacatggagattgagtaaagctcttctatttgttttttgaagtactctctcagctcaggtctcttagcttttagtgttggtgtcagcaagccattttgaactgagaacatgtcagaatggatgtgaatggctttaacctgctcaaaagaatggagtccactttcttttcctaacctcaccatatcttccaaaatggctttcttcagatccttatttgtgcagagatctgcatatgttccttcaattcctctcttctgggcccaggagggcataacttcagggtcaggcacaacaatgcctaccaaaaaggcctttaagctgtccccatggacatagatttgcgccacaggttggctccggatgtagatgttctcaatcttctcgggtgcaacatattctccctgagcaagtttaaatatatgctttttccgatcaataattttnagagttcctgccggcagccattttccgatgtctccagtgtgaanccagccatcgctgtccagggcctccttcgtcctgtctggntctttcaagtagcctttgaacacatttggncctctcacacatatctcnccctctccnttncagggccngtagttcanttcncnacatcacgngctttatatnattncngggnagtggggcccnacgngncctg

SEQ ID NO: 318455 - DNA, 1829 bp, Homo Sapiens
  misc_feature (1346)..(1465): n is a, c, g, or t
  misc_feature (1592)..(1643): n is a, c, g, or t
  misc_feature (1727)..(1739): n is a, c, g, or t
  misc_feature (1789)..(1789): n is a, c, g, or t
ccccgggctgtgcagtccgacgccgactgaggcacgagcgggtgacgctgggcctgcagcgcggagcagaaagcagaacccgcagagtcctccctgctgctgtgtggacgacacgtgggcacaggcagaagtgggccctgtgaccagctgcactgttttcgtggaaggaagctccaggactggcgggatgggctcagcctgtatcaaagtcaccaaatactttctcttcctcttcaacttgatcttctttatcctgggcgcagtgatcctgggcttcggggtgtggatcctggccgacaagagcagtttcatctctgtcctgcaaacctcctccagctcgcttaggatgggggcctatgtcttcatcggcgtgggggcagtcactatgctcatgggcttcctgggctgcatcggcgccgtcaacgaggtccgctgcctgctggggctgtactttgctttcctgctcctgatcctcattgcccaggtgacggccggggccctcttctacttcaacatgggcaagctgaagcaggagatgggcggcatcgtgactgagctcattcgagactacaacagcagtcgcgaggacagcctgcaggatgcctgggactacgtgcaggctcaggtgaagtgctgcggctgggtcagcttctacaactggacagacaacgctgagctcatgaatcgccctgaggtcacctacccctgttcctgcgaagtcaagggggaagaggacaacagcctttctgtgaggaagggcttctgcgaggcccccggcaacaggacccagagtggcaaccaccctgaggactggcctgtgtaccaggagggctgcatggagaaggtgcaggcgtggctgcaggagaacctgggcatcatcctcggcgtgggcgtgggtgtggccatcatcgagctcctggggatggtcctgtccatctgcttgtgccggcacgtccattccgaagactacagcaaggtccccaagtactgaggcagctgctatccccatctccctgcctggcccccaacctcagggctcccaggggtctccctggctccctcctccaggcctgcctcccacttcactgcgaagaccctcttgcccaccctgactgaaagtagggggctttctggggcctagcgatctctcctggcctatccgctgccagccttgagccctggctgttctgtggttcctctgctcaccgcccatcagggttctcttagcaactcagagaaaaatgctccccacagcgtccctggcgcaggtgggctggacttctacctgccctcaagggtgtgtatattgtataggggcaactgtatgaaaaattggggaggagggnnnnnnnnnnnnnnnnnnnnnnnnnnnnnnnnnnnnnnnnnnnnnnnnnnnnnnnnnnnnnnnnnnnnnnnnnnnnnnnnnnnnnnnnnnnnnnnnnnnnnnnnnnnnnnnnnnnnnnnntttaggcctccggacgaccgccgcgaccctgtcggccgccctcgcccctcgagaaactttctcaaccctctcgttgcgggcgcgcggcccactaagttacgccgcagttgggccacaccccggctannnnnnnnnnnnnnnnnnnnnnnnnnnnnnnnnnnnnnnnnnnnnnnnnnnnaaaaccaagagacccgcgcccggcacacggaccgcggactcgaatcccaacccccgcgtactcgctgtccgtggtgcaacaagnnnnnnnnnnnnngccttgtgaatgttcccgcgccctcgcgtcgcgtatgcgccgttgtctcncacttcttcgccgcgccccgcgatctcgcctcccgccact

SEQ ID NO: 318456 - DNA, 1840 bp, Homo Sapiens
  misc_feature (118)..(146): n is a, c, g, or t
  misc_feature (149)..(154): n is a, c, g, or t
  misc_feature (156)..(194): n is a, c, g, or t
  misc_feature (1628)..(1628): n is a, c, g, or t
cccggtttttcctagggaaccaagctttggcccatgttcccttttccctatggggcccggcgccccaaacggaaaggttttagaaagcttttcgggggggcgagggcgcccgccaggnnnnnnnnnnnnnnnnnnnnnnnnnnnnnacnnnnnntnnnnnnnnnnnnnnnnnnnnnnnnnnnnnnnnnnnnnnnttttttccacactcacccaggcttgggggtttttaaattttatttcaaaagcttggatagcttcaatatccaggttgtggcaaaatcaggacacgtgtaaaataccttacaatacattagattcccaaaaggtaccaaaaagtacagtaaaattaacacttccgttacaggaaatgtatgacgcaaataatataaaattaaaaggtgaaaaaaaggtgacactggtttcctaagatacaatttactctttacaaccagggtccacaggtccaggctgcagagcggcagcaggaagcagagcctcccacctgcttctgggggacctggtaataaaaatcagcccatgatggcgctatggcctctcagacaccacacgctgcctaaacacctagagctctggaaatagtcaacaggagagtgatttccatgggggaaattttaaataagatgcacatgggacaggcaatagaaagtttgccaagttaaatttggtacataattgtgttcactccatatccaaacaaagcatgtgtgcgatcagttggtcgctcctgctgccgcctcagtatggcttgtagttattctgatggccaccacgtcgctggctcttgccgtagtttgtactaccctgacctccacctccaccaccacctccgctgcctcggttccctcggttgcggtttccacggcccccagagccatactgctgctgctgatagacttctttgggctgggccaccttgatctcacacttgcttccactgacagtatggaactttttctccagaaccttcttcacgggttcttcttctttaaaggtgataaacacaaaacctcgtcttttgttcaactttggatccattggcaattcaatggcctcaatctccccaaactcgccaaagtactccctgatcttttcctcagtggcttcaggattcagacccccaacgaagattttcttcaccgggtccttcttcatagccatggcctttttagggtcaatgacacggccatccagcctgtgctccttctggtctaggaccttctccacactggctgcatctttgaacaggataaacccaaaccctcttgaccgtccagtgttgggatccatttttattgtacagtcaacgacctctccaaatttagtaaaatagtcttttaaatcttttttgctagtatcccagctcaggccaccaacgaacatttttcccgcgtcctcctcgttcttgctggcgttgatctggtcgccctcggcgccgttctgattcccgctcgggggcgccgcggtcgcgcctccagcccccgccgcggcgcccgtgccagccccggccggcgactcgccttcggggacggcctcatgtccgttctcggtggcgcccgtcgtctccatgggctgctcctcgcccgcttccgacatgctaggccgaggcngggcggctcctcgccgccgatgacgccgcggggcccgctcgtccccacccgcaggggaaggcgccgcaggctcggccgcactcaagctcgcgctgctgaggcctcgccccagtcagcccacggagctgctccaactgtgtctcctcctccttggccgccgccgcacgggaacccaccgaccaacagccaagctccgtcccgcgcggatcccg

SEQ ID NO: 318457 - DNA, 462 bp, Homo Sapiens
  misc_feature (17)..(17): n is a, c, g, or t
  misc_feature (40)..(40): n is a, c, g, or t
  misc_feature (47)..(47): n is a, c, g, or t
  misc_feature (75)..(75): n is a, c, g, or t
tgacgccaaaataattntaaaaatttaaaaaggttgaaanaaaaagntgaacactggtttcccctaagaataacnaatttactctttaacaacccagggtcccacaggtccccaggctgccagagcggccagccaggaaagcagagcctcccccacctgccttcctgggggaccctggtaataaaaatccagccccatgaatggcgctatggcctctcagacacccacacgctgccctaaacaccctagagctctggaaatagtcaacaggagagtgatttccatgggggaaattttaaataagatgcacatgggacaggcaatagaaagtttgccaagttaaatttggtacataattgtgttcactccatatccaaacaaagcatgtgtgcgatcagttggtcgctccctgtgccgcctcagtatggcttgtagttattctgatggccaccacgtcgctgg

SEQ ID NO: 318458 - DNA, 502 bp, Homo Sapiens
gtttatcacctttaaagaagaagaacccgtgaagaaggttctggagaaaaagttccatactgtcagtggaagcaaggtaaggtgttcccagctctgcttggcctcctgtgctgctggagagctggcccttagagggatgggttaggggttgggcctcatgcaggagctctccaggttggtcagactttactatttctctgaagcgtatgctgccctgattggggcagtgttccaatccttgaaagacttcccaggctgggaggactgccaataaacaacacaggatgtgaagggaggtaaggagaaggtgggcctctgtgaataagagcaggtttgagtagcctctttagctcctcacttaaagctagaggtgacagttctagattcttgagtccaggggtatgaagcctgcagtttaaggtctcagaagatcctagaacttctgcaactcactgattctcctctgtggtgaagtttttcttattccagagcctttctacct

SEQ ID NO: 318459 - DNA, 925 bp, Homo Sapiens
  misc_feature (640)..(695): n is a, c, g, or t
ccgtgtggaaggaaattctggcgccccttggccagatcccgtttttcagcccagtaacccgttcccctttccgcagccaggccacctttctcccaagagaagcgtgtcccggcaggtaccgtcccttccagtggtcgaggaagacccatgtccagtgtgtcccacatcatacttcttcttcagctggggggatgatgtccctgggacgctccacaccacaaggggtgaccttgtccttcacgccagcgaaatccaccatccgctgggtgatggcggcacagtcggggttgatctcgatggtgatgagcctcgccccttggtgacagcaggcgggccatgcgcacagctgagtagccacagtaggcccccagctccagcagcacggagggctggtgctcctgaatcacggcgtccacgatcttgcctttcttgtcgcccacgttcatggcccactccttctgctcgcagtaggtgtcaatggcctccagcacgctctgtgcgttcccgggctccgcatgctgcagcacgtggttcaggatgcgctgctccttggtgtcacccatgagcaggttgtggatgggctgcaggatgaactcgttccagccgataaggcacaggccccagccccagtgcctcagannnnnnnnnnnnnnnnnnnnnnnnnnnnnnnnnnnnnnnnnnnnnnnnnnnnnnnnaggcggggcctccggcatcttcaaagcacctctgagcaggctccagccctctggctgcgggaggggtctggggtctcctctgagctcggcagcaaagcagatgttatttctctcccgcgacggcccgcccgggactggacccgccccggtccggcgcaggcagcgcggcgggcagccctagctgccccagaagccccacgacatcccgggaatccggaccggtccagcct

SEQ ID NO: 318460 - DNA, 1112 bp, Homo Sapiens
tctaaatatttagattcttaatttctattttatatttttaaaacatgatattagtatataagataatatagctagccagtgttagtaaagaagtcatgattgagtcttaaaaaagaacaatccagtgttgcagttcagagaggttagcatgtcagggcgcaggcctcggccgaggtgtgctttgcatttaggacacagcccggagccgcagaaggtcagcaggagcacgtctggcaccttcagtaccaggctgggtgagagagcccgagaggggggccggggggtgcagtcagggccctgcttcgctgcctgggcccttgtagatggccttctccaggccgtccaccacctccctgtattccaggaacgattggtagtgtgtgcactcaaagcagctgctcccgcgcacgtgtgctaggaagtctggcgcacctgggcagatcacgttgtcagccagtagcactgtccccttccgcagcaggccacattcctccaagagaagcgtgtccggcaggtaccggtccttccagtggtcgaggaagaccatgtccagtgtgtccacatcatacttcttcttcagctgggggatgatgtcctgggacgctccaaccacaagggtgaccttgtccttcatgccagcgaaatccaccatccgctgggtgatggcggcacagtcggggttgatctcgatggtgatgagcctcgcccctggtgacagcaggcgggccatgcgcacagctgagtagccacagtaggcccccagctccagcagcacggagggctggtgctcctgaatcacggcgtccacgatcttgcctttcttgtcgcccacgttcatggcccactccttctgctcgcagtaggtgtcaatggcctccagcacgctctgtgcgttcccgggctccgcatgctgcagcacatggttcaggatgcgctgctccttggtgtcacccatgagcaggttgtggatgggctgcaggatgaactcgttccagccgataaggcacaggccccagccccagtgcctcagaagcagcagcagcaccaccagcagcaccaggcccagcaacacagctgccaacagcagaggcggggcctccggcatctgcccc

SEQ ID NO: 318461 - DNA, 798 bp, Homo Sapiens
gaaatgtgaggtatttattttgcagccattcagttcagctgtccagtatcaggttaccaaagacaaattttcaagctcccggttaatccccaccaaagtttctactgttcggctacttcaggatggctaacatttggagagaagaggatcccccaggtagtctgtacataattcagagagaggacatcagaattttccatggttctatttcaggtattaaggtaccacagtgaagcatgtcatttgactgtggtggcaaagggacggcactgagcatgcctaacctattccccggcatttcagtccaatcagcgcatgctcgcaatgatcatccatgggtgaaaaggaagagctgaaagacacatgtgctgagcaacatttaatttctgcttgttaaacgggtgattaggcgccagtgtggcaccatccagacactgggaatttgtgccactccatcagttctgctggctctgctcattctgctttcctgcagtggatgccacttcccaaagaaccatgctccaaaaaacaaaagagaatttcctcattagctggacttggctgcagcaactatttggtttggagtagctgtagttgttgggagatggtccatctctggtgcatcaaaaaagtatgccaagcagcccacagaaagcagcatatggagcaacacaattgtcacaattgtggccaatgcaacgcgtcggttatcctcacgaacagctggccaaaatgtcattgccaagagagatcctgagatgcccagggcaatcagactagaatccaacgaacagcttt

SEQ ID NO: 318462 - DNA, 1006 bp, Homo Sapiens
  misc_feature (11)..(11): n is a, c, g, or t
  misc_feature (19)..(19): n is a, c, g, or t
  misc_feature (29)..(29): n is a, c, g, or t
  misc_feature (36)..(36): n is a, c, g, or t
  misc_feature (40)..(40): n is a, c, g, or t
  misc_feature (43)..(44): n is a, c, g, or t
  misc_feature (56)..(56): n is a, c, g, or t
acatattgcgngggatatnatgaagaggnatatccntaancanncatctccagaangaatagagacgatgtcataacttgctgtttctccacatgagaaaccccagagtgcaagaggaaccagccaggcataggcatagatgatggtagctgctatggacacttttcggaattcgggcacataatggtacgtcttctctcccagatggatcaagaagttggaaagattcccactaattgctatggcaaagaccaacgtggcacatatccaaaaggggccatagagatctggattgctgcggatatataacctcacaaagtttttccccgggtattggcaaaagagatcctttaattctgtcaaagacctggtaggtgtccacatcaaagaatgtttggtagtattcaaatgtccagaagggggagcttttcttctgtccagcaagtaactcagttttgtcagagtcatcatttcccagtaactcatcatcttcttctcttcctgagcctcttggggatcctggctgatgttttggggtttcaccaggatcctcaatgtttactgtggtggcatctgggtttgctgtcagagaagtggctgcattgccaaattcttcaaattgcaagtcatctactgctgccattcggccagtgagtcttctcccaattatgaggaagaaaatttgcaggggttgtgtgaatgtttagagaccaggtgcagcctagagatgtaacgatgaggaaggagaggctgaggtttgaaagaggtgatggggacagtgaagaacaaaggcagttcagcctagccagtggttaagggcacaggctctggggtcagacagagctgggtttgattcccgattctgctgcttctctgctgtgtgcgcgctcctcgcggcctcagtttcctcatctcgcggggttaggcgtcccccgggtcccgagaaggctcgggcctcagttgtccgcgccggtttcggtccagcccagatcccgggaattccgga

SEQ ID NO: 318463 - DNA, 1355 bp, Homo Sapiens
  misc_feature (8)..(8): n is a, c, g, or t
  misc_feature (12)..(12): n is a, c, g, or t
  misc_feature (19)..(19): n is a, c, g, or t
  misc_feature (21)..(21): n is a, c, g, or t
  misc_feature (27)..(27): n is a, c, g, or t
  misc_feature (34)..(34): n is a, c, g, or t
  misc_feature (51)..(51): n is a, c, g, or t
  misc_feature (64)..(64): n is a, c, g, or t
  misc_feature (71)..(73): n is a, c, g, or t
  misc_feature (81)..(81): n is a, c, g, or t
  misc_feature (89)..(89): n is a, c, g, or t
  misc_feature (104)..(104): n is a, c, g, or t
  misc_feature (121)..(121): n is a, c, g, or t
aaaacaanaaanaaaaccntnttaacntaaaaantaaccccccactcattntttacgtttaaantctaatnnncacaaagntgttatanaaaaatatcttttangaaatagctgaaaaatntaagagataaggtataaaaagtttaaaaaatatatcttaagacaaaatactgcccaaaacatgtaaaactgaattgtaaaaattcacctatctaaaggtaaaaggaggttgatgcagctgcggctcaccgtcctctacagtgggggacacaaagagacacgaggggcccagggctgtggggacgtcagaagacaagaagccttccagaacagcctctgcctggcgctccacaggggggaggtgagtgggacgggcctagggctgcagccccactggtaatgggctgttctgggatttctcagaatcagcagacagggcagcaaggctgggccgctggcggcaggcgcaccctccgtgggagccagtgctcacgtgtcaatgcgtcagaggcggctgtgagcactcagggctcctgctcaggtctccaccaggatctccaccacgtggtccagctcgcccaggtcggacttgcagctggagctagggcctggggtggccggagccaagccctcgagcccttcgcaggggcccggcctggcaccccccatcatgcctgtcagtactgtgtccaggtcgtagtaggggctgtccacgtctgagaacagctcttccatgcagctggggtttttagtctccagcgtttcaaatatctgatcaagtgacttgtgaaagcttcctctgttttctcgagggccatccatctcccaggcgctgctctgcaggtgccttggtgcctgtgctgaggtgactgggcaaaggtcagaaactggaccctgtgtgtggccgtcccccaagccaggagcaggatgtgccccctcttgcccccacgctgcacggcacaggatctccgtggagaccaagcggtcgagcggcgcccgctctgcagcctggggtgccactgtgcgccacgtcccatcctgcgtcatctcctcttggatctgccggaccgtgttggcaatgaggactgagcggcacaggttgggctccacaagcatgtggcaaagctgcaacttcaccagagacatgtccaggagcgactgccgctgcaggctgtatgaggacactgtcttcaagccggccagggctccctccacgtcttcctcgtggccaacacatttcctcttcagtcctcgtgcaaacattgtgtcctgacccgcgaggccgcccgccgggtcctctgctcagccaccgccaccgccgctgccgccagcttcccgccgctgaggaaggagcg

SEQ ID NO: 318464 - DNA, 1131 bp, Homo Sapiens
  misc_feature (699)..(750): n is a, c, g, or t
  misc_feature (839)..(897): n is a, c, g, or t
  misc_feature (996)..(996): n is a, c, g, or t
  misc_feature (1001)..(1001): n is a, c, g, or t
  misc_feature (1005)..(1005): n is a, c, g, or t
  misc_feature (1010)..(1010): n is a, c, g, or t
  misc_feature (1021)..(1021): n is a, c, g, or t
  misc_feature (1033)..(1033): n is a, c, g, or t
  misc_feature (1038)..(1038): n is a, c, g, or t
  misc_feature (1043)..(1043): n is a, c, g, or t
  misc_feature (1046)..(1046): n is a, c, g, or t
  misc_feature (1048)..(1048): n is a, c, g, or t
  misc_feature (1051)..(1051): n is a, c, g, or t
  misc_feature (1054)..(1054): n is a, c, g, or t
  misc_feature (1061)..(1061): n is a, c, g, or t
  misc_feature (1063)..(1063): n is a, c, g, or t
  misc_feature (1068)..(1068): n is a, c, g, or t
  misc_feature (1074)..(1074): n is a, c, g, or t
  misc_feature (1083)..(1084): n is a, c, g, or t
  misc_feature (1086)..(1086): n is a, c, g, or t
  misc_feature (1104)..(1104): n is a, c, g, or t
  misc_feature (1108)..(1108): n is a, c, g, or t
  misc_feature (1121)..(1121): n is a, c, g, or t
  misc_feature (1125)..(1125): n is a, c, g, or t
ttttgctggataattttttaataaagtgaggtttacatcactgatatttaagaatggctatatgcacaaaagaaaacacacctttttggttaaggggtgaggaagttagagaaagcatgagaaacagggagcatgtggggtgaggcggggcaggagtggaaggctgcaggcacccccagctcactccctgcctgcggcagcacccatgacactacagatcaaggggttatgaatgacatggattcagatttctttcattctagacttcaacctagccttaaccttttgtttcagcaccagtctaacagagcagcgcaggcgtttctcatccagcagcaatgctacttcctcacccagggcaggtgcatgggctgaccctgacgggagcctccaggaacactgccttgagaaggcaccaccgaggggctatgaggtccctgaagaccaactggtgcctgtgatctacaaacagacaaatatttgacctttgtcttcaatgacatttacatataaatagacataaataaaatcctccataatttactcttaggtctaggaagatgtggctgtgtgcggctcctgattttcacccaggtctcactgcagcgcaggacataatgaagaagtatcacacacacatttaaagtaaaacatgatacattcacactgttgactgagactgtagtgatgctcactgcnnnnnnnnnnnnnnnnnnnnnnnnnnnnnnnnnnnnnnnnnnnnnnnnnnnnacaccaactgcaattgtttaggctataaaagttctaatgtagcagcaaaggatgtttatagaaaaaatatacttttaagaaaatagctnnnnnnnnnnnnnnnnnnnnnnnnnnnnnnnnnnnnnnnnnnnnnnnnnnnnnnnnnnnctgcccaaaacatgtaaaactgaattgtaaaaattcacctatctaaaggtaaaaggaggttgatgcagctgcggctcaccgtcctctacagtggggggnaaaanaganacganggggccagggntgtgggggcgtnaaaanaaaanccntncanaanagctctncntgcgntcccangggggaggnngntgggcgggctagggtgcncccnctggtaatgggtntctnggattt

SEQ ID NO: 318465 - DNA, 1010 bp, Homo Sapiens
  misc_feature (67)..(67): n is a, c, g, or t
caagcacctggctaaagtcttcttatttttccatctggaaatgttttctctaaatccgggtggtgtncctggaaaaatatctttcggtataatttttattgaagaaatgactttgttcataagctgcattgaatttcaaagtgcctttctcttgcttctcatgggtatagtattccatctcagttctcttttcttgtcgggttttgctgtgactcgtgagaatgttatgttgtgacacatctgaagttggtaaaatactgcttaggagttgggaaccggtgacattagcttccccatttatgattgcgttataagcattctctgtttttctcttctttatgtgatccatcttcttattagtttttgcttttcttttcttatcaaaattctgctgttttctctctccttccttcaccataaactctgtctctttgtaagtaccactctttaccaaactgctaaaggaatcgaaaccttctccagaggtcaaatggtcaggaattcgagtaaggcacactctcaaatccttagtaaggccaaatatctttttaaattcagcatcactcttcagatgtaatgccttattacttcttccttgagaatctttcttgtcatttcttccttgggcacctttatctgatgttgatgccatctcattatggatcaacgcgaggcgttgcctgaattttcctctgcgggtttcaggaagaccctccgtaggttatttgacattttagtggggagaaaggggacacctcatccagaaaagtgggaagcgtggggccgagtttcccaatggggcgagaaccagagcgagggaatgttgggctggagttgcccacagcaactgtgaggggttcgaccttaacggagggcgacagcgggctctcgagagggtgtatccccaggcttcgggacgaggtcgcgcaccgcgcagaaaccggaaggctcctggcggtggactgcgccctcacagccctacgctgagagagaatcggcgtgagtctccc

SEQ ID NO: 318466 - DNA, 917 bp, Homo Sapiens
tcttcatattcttcttctggtttcagctgagggccagggatcatcaccgtcttaaggatgggctgcttagggggtgcccatgggggaacgatcttggtatgcattctccagcttccataggggtttgtcaactgcttttcgaatacaacatactccaggacatccttgggtacatcttcctgtccatacatcaaccggccaaaccggtcatagatggccagagtctgccgggtgtgcatgcgtacggtgatctggccgtacacgttgccctggttcatcatacttgaacagcgaacttgaacaacatgagagggctctaaagattccacaaagctccagcggacggtcttatatttgatgtcccaagtcatgtctggaaaacagtgttcagttaccaaggtatgaagtcggtcatggtctgagttatttagacaaaggtgagcttcaataaagatatccttagctttttcagggaagtcctttattttaaagttggcatcatagtcttttatcctccggattgacacttgtgatgccatagtcttcttcattcgttcagttctctctatcagtccctcctttgaaagagatgatatgcgtgcatcaccctcaggaggaacataggcatcaaatataccagctgtacaggccagatgtatggaacggtccgatttttctggaggaataaccaatcctgctttccgggcatgttgcataaactccttttctgttttaaatttaggttgataaataggaggtgtgaaacgttttttagttcttactggaactatagctgcggactgagtcaccagaactggctgccgaaaccaccagcccaaaaacctcgataaacaagagaacccttgaggtatgggggctgccatcttgttcccgcaaaggccgccgggaagggagct

SEQ ID NO: 318467 - DNA, 553 bp, Homo Sapiens
  misc_feature (31)..(31): n is a, c, g, or t
  misc_feature (304)..(304): n is a, c, g, or t
  misc_feature (542)..(542): n is a, c, g, or t
tgcccaacaattcaatttatttgtgtttgtnacaaatagtcttatgtatgttcaaaatcacatttattgttagagctaaaaccataaagctgtaaaaagtataaaaagaagacaggagataatctttgtaactgtgggtttggtaaagatttattagacatgataccaaaagcacaatatatagaagaaaaaatcaataaaatgtacttcaaaattcaaaccttttgcacttcaaaagacaccattgagaaaaacaaaccacagattggtagataatatttccaaatcatatatctgataaagnacttatatcaaaaacatatgcaacccaatagtaagaagacaaacaaataagtcaacttaaaaatgggcaaaagatttgatacacatttcactaaaaatatatgaatggttaataaacacaagacaggacactcagcatggttagtatctagggaaatgcaaattaaggccataataaaataccatattaaatccatagaatggctatattaaaatacagttacgggcctggcgcggtngctcacacctg

SEQ ID NO: 318468 - DNA, 1811 bp, Homo Sapiens
  misc_feature (216)..(216): n is a, c, g, or t
cgtccggcggaggcagctgctgacccagctgtggactgtgccgggggcgggggacggaggggcaggagccctgggctccccgtggcgggggctgtatcatggaccacctcggggcgtccctctggccccaggtcggctccctttgtctcctgctcgctggggccgcctgggcgcccccgcctaacctcccggaccccaagttcgagagcaaagcgnccttgctggcggcccgggggcccgaagagcttctgtgcttcaccgagcggttggaggacttggtgtgtttctgggaggaagcggcgagcgctggggtgggcccgggcaactacagcttctcctaccagctcgaggatgagccatggaagctgtgtcgcctgcaccaggctcccacggctcgtggtgcggtgcgcttctggtgttcgctgcctacagccgacacgtcgagcttcgtgcccctagagttgcgcgtcacagcagcctccggcgctccgcgatatcaccgtgtcatccacatcaatgaagtagtgctcctagacgcccccgtggggctggtgtgcgcggttggctgacgagagcggccacgtagtttgcgctggctcccgccgcctgagacacccatgacgtctcacatccgctacgaggtggacgtctcggccggcaacggcgcagtggagcgtacagagggtggagatcctggagggccgcaccgagtgtgtgctgagcaacctgcggggccggacgcgctacaccttcgccgtccgcgcgcgtatggctgagccgagcttcggcggcttctggagcgcctggtcggagcctgtgtcgctgctgacgcctagcgacctggaccccctcatcctgacgctctccctcatcctcgtggtcatcctggtgctgctgaccgtgctcgcgctgctctcccaccgccgggctctgaagcagaagatctggcctggcatcccgagcccagagagcgagtttgaaggcctcttcaccacccacaagggtaacttccagctgtggctgtaccagaatgatggctgcctgtggtggagcccctgcacccccttcacggaggacccacctgcttccctggaagtcctctcagagcgctgctgggggacgatgcaggcagtggagccggggacagatgatgagggccccctgctggagccagtgggcagtgagcatgcccaggatacctatctggtgctggacaaatggttgctgccccggaacccgcccagtgaggacctcccagggcctggtggcagtgtggacatagtggccatggatgaaggctcagaagcatcctcctgctcatctgctttggcctcgaagcccagcccagagggagcctctgctgccagctttgagtacactatcctgggaccccagctcccagctcttgcgtccatggacactgtgccctgagctgccccctaccccaccccacctaaagtacctgtaccttgtggtatctgactctggcatctcaactgactacagctcaggggactcccagggagcccaagggggcttatccgatggcccctactccaacccttatgagaacagccttatcccagccgctgagcctctgccccccagctatgtggcttgctcttaggacaccaggctgcagatgatcagggatccaatatgactcagagaaccagtgcagactcaagacttatggaacagggatggcgaggcctctctcaggagcaggggcattgctgattttgtctgcccaatccatcctgctcaggaaaccacaaccttgcagtatttttaaatatgtatagtttttt

SEQ ID NO: 318469 - DNA, 1072 bp, Homo Sapiens
  misc_feature (9)..(9): n is a, c, g, or t
  misc_feature (15)..(15): n is a, c, g, or t
  misc_feature (17)..(17): n is a, c, g, or t
  misc_feature (23)..(23): n is a, c, g, or t
  misc_feature (28)..(28): n is a, c, g, or t
  misc_feature (30)..(30): n is a, c, g, or t
  misc_feature (34)..(34): n is a, c, g, or t
  misc_feature (36)..(36): n is a, c, g, or t
  misc_feature (41)..(41): n is a, c, g, or t
  misc_feature (46)..(47): n is a, c, g, or t
  misc_feature (55)..(55): n is a, c, g, or t
  misc_feature (62)..(62): n is a, c, g, or t
  misc_feature (73)..(73): n is a, c, g, or t
  misc_feature (83)..(83): n is a, c, g, or t
  misc_feature (93)..(93): n is a, c, g, or t
  misc_feature (151)..(151): n is a, c, g, or t
ctttttganctcctnanaccttntctcntnccanancgtcntttcnnctcctctntcctctntcccctccganacccttccgnttcctccatncttctccacaacagccagagacgggggcatggccagtagtcggtttcgattttggctngctggttggggtctgggggctgggctgcaggaaacttggatgactcgatgatgagatcctcgatgaggtgcttggtctgagggctgcctcccacggactctctctgcttatagatgggaggcttcttgtagatgttggaatctgggcgggaggtctcagggtggtggaaatggggcaggctggtccggggggttccagtggttctggggccgaggcctgagagatgattccaggcgaccggctgtccgcccacacctctggggatggtgggggggatgtggatttgggtgacagcgagcgctcgcggctgcgaggcagctccacgtgttccaggagggaataagtgaagtgaggctcgtagatcatgaggtcgggccgctcgatgtccaggatggccttgtccttggggatggcagccaggtccttgtagcccagcacctgattgtccatcttggccacgatgctggagggagagccaggcacactggaatctcgggaggggctcacgctcccgggggaggtaagtggttgcttctgcagccgttccatgcagcacggagctcgcccgccgggtcactcgcagagccctgtgcgcgaggggagaggacagcgtgtcaggctcggcgcggctgctgggcactgcgcgcttggggccgcgaaagcagtggcgcgttcccccggggtggcgcgtcctcatccctcggcggtgactctccaggcttagacagtggagccacccagagtcctgctcgttgatggcatctgtagaagagcagctgggagtgtgggggcctctggctccgggccacacaggcagcagggtccagccaggctggaggccggccagctctggaggccttccctgggctccccattcccacagcccaactgccttccttgtcttggacctgtccctgctcc

SEQ ID NO: 318470 - DNA, 1001 bp, Homo Sapiens
ttccccccggaagcccctttccgcttcctcccatttcgttctccccaccagcccgagacggggggcatggccagtagtcggttttgattttggctggctggttggggtctgggggctgggctgccaggaaaccttggatgactcgatgatgagatcctcgatgaggtgcttggtctgagggctgcctccccacggactctctctgcttatagatgggaggcttcttgtagatgttggaatctgggcgggaggtctcagggtggtggaaatggggcaggctggtccggggggttccagtggttctgggggccgaggcctgagagatgattccaggcgacccggctgtccgccccacacctctggggatggtgggggggatgtggatttgggtgacagcgagcgctcgcggctgcgaggcagctccacgtgttccaggagggaataagtaaagtgaggctcgtagatcatgaggtcgggccgctcgatgtccaggatggccttgtccttggggatggcagccaggtccttgtagcccagcacctgattgtccatcttggccacgatgctggagggagagccaggcacactggaatctcgggaggggctcacgctcccgggggaggtaagtggttgcttctgcagccgttccatgcagcacggagctcgcccgccgggtcactcgcagagccctgtgcgcgaggggagaggacagcgtgtcaggctcggcgcggctgctgggcactgcgcgcttggggccgcgaaagcagctggcgcgttcccccgggctggcgcgtcctcatccctcggcggtgactctccaggctttggaagttcaggagttctcaggaccttgaggatgggcgcttgtgtccacaacacggggccaggattcctgtatctctcaggcaggggggtcccaggccccccgacgccccgttcttggctcctttccccacaaggtcaccctcgtgccgaattcgccacccaggcctcgctacctt

SEQ ID NO: 318471 - DNA, 1004 bp, Homo Sapiens
  misc_feature (54)..(112): n is a, c, g, or t
ttctcactaaacacgccccaagagaaacggggggggccaagggcccaggtaatnnnnnnnnnnnnnnnnnnnnnnnnnnnnnnnnnnnnnnnnnnnnnnnnnnnnnnnnnnncccagggaacctttggaagacctccgatgattgagatccctcggattagggtgcttggtctgaggggattgcctcccacgggactctcttctgctttatagatgggagggcttcttgtagatgttggaatctgggcgggaggtctcaggggtggtggaaatggggcaggctggtccggggggtttccagtggttttgggggccgaggcctgagagatgattccaggcgaccggctgtccgcccacacctctggggatggtgggggggatgtggatttgggtgacagcgagcgctcgcggctgcgaggcagctccacgtgttccaggagggaataagtaaagtgaggctcgtagatcatgaggtcgggccgctcgatgtccaggatggccttgtccttggggatggcagccaggtccttgtagcccagcacctgattgtccatcttggccacgatgctggagggagagccaggcacactggaatctcgggaggggctcacgctcccgggggaggtaagtggttgcttctgcagccgttccatgcagcacggagctcgcccgccgggtcactcgcagagccctgtgcgcgaggggagaggacagcgtgtcaggctcggcgcggctgctgggcactgcgcgcttggggccgcgaaagcagctggcgcgttcccccgggctggcgcgtcctcatccctcggcggtgactctccaggctttggaagttcaggagttctcaggaccttgaggatgggcgcttgtgtccacaacacggggccaggattcctgtatctctcaggcaggggggtcccaggccccccgacgccccgttcttggctcctttccccacaaggtcaccctcgtgccgaattcgccacccaggcctcgttacgtag

SEQ ID NO: 318472 - DNA, 394 bp, Homo Sapiens
  misc_feature (329)..(329): n is a, c, g, or t
  misc_feature (355)..(355): n is a, c, g, or t
ccaagaggcgagtttattgggggaggggctggtcaaggaaacttggatgactcgatgatgagatcctcgatgaggtgcttggtctgagggctgcctcccacggactctctctgcttatagatgggaggcttcttgtagatgttggaatctgggcgggaggtctcagggtggtggaaatggggcaggctggtccggggggttccagtggttctgggggccgaggcctgagagatgattccaggcgaccggctgtccgcccacacctctggggatggtgggggggatgtggatttgggtgacagcgagcgctcgcggcttgcaagcaactnccacgtgttccaagagggaataagtnaagtgaggctcgtagatcatgaggtcgggccgctcgatg

SEQ ID NO: 318473 - DNA, 1100 bp, Homo Sapiens
  misc_feature (19)..(19): n is a, c, g, or t
  misc_feature (24)..(24): n is a, c, g, or t
  misc_feature (46)..(46): n is a, c, g, or t
  misc_feature (52)..(52): n is a, c, g, or t
  misc_feature (58)..(59): n is a, c, g, or t
  misc_feature (73)..(73): n is a, c, g, or t
  misc_feature (75)..(75): n is a, c, g, or t
  misc_feature (111)..(112): n is a, c, g, or t
  misc_feature (116)..(116): n is a, c, g, or t
  misc_feature (131)..(131): n is a, c, g, or t
gggatcacaaaaccccagnagganagctccggtaagtttaaaattntcccantgtgtnncagcagtggcagtngntattctccagcccaccgcagtacaccagctgccatnncacntgatctccgctgtgnaccgagcaaaggctgaagtgccgacatagctgaggcctccaagctttcgcgggcctcctgccaagaggcggatgaagtgcagtcggtgcagcttgaactccagggagctgttgagttccagcagcgctgcctgtgggagacggcccattccaacgcaggacccaggtcttgttcgtgcagggcttccaggattcgattcaactctaggaaaggctgcttgaaatccaagtccacattcagcgttgattcctggcacagctcctcggccacgctgagcatgccctgctgatacaggtgttccacgatggccatctgcaggatctgctgctgctgttcccgcgcgtcccacaccgcatctgacacatcaccacagatctcagagtcgaagttcctgtcaatggctttgcccactcgggatacactgctgtgaatgtccttatggtccgaagccagtttctgcaccgtatctttgatcttccggcagcactgtgacatcaccagagagagggtggctgagagaggggtcccctggagggctgcgctggccagctcagcccgcagctggcccacgtagtgcagcagctcctccaggctccgctcacagtgctgcccgtaggtcaggaacttctgcaggaccttgtccagctctctctccacgcacgcacactgctccatggtggcctcagcctgctcacttccgacccagcgcggtcgcacgaggactggacgtttgagtccgagcaactccccccggctgaggcggctcttcgggggctgggccgggacctatgagtctgggactccagctcccggcccagggccgacaactgcgaagagaacaagcccaagggcagattgttcggggcttagtcgtgggtagcaggggttctggagaaggctggggcccgggaggccggccgagctttccccgccgcgcgcctcagtccgccggccgctgtgcccgccatc

SEQ ID NO: 318474 - DNA, 1916 bp, Homo Sapiens
  misc_feature (1879)..(1879): n is a, c, g, or t
tttttgccatttctgtagcgcactttatagaccaaagcttagacaaggtggaggctaaagacctgaggagccgagtcagggaagacagattccagccctccctcaaggcaagcctctttgaacacaccttggaacttccaaacacttgttgccattgtcatcctcttctggtctagagaactcagctccttctgggactcagggttggggagtacctttatcagaagggaatgaaggaaatcccatcagcagttccacccctctgggccagctcagtctgtggcctccatcttggtcccccggggcacaaggaagatggtcccatcggcagcctgttgcagcgcgtactcttcaggagagtagctgttgcctgattcatcccgaaggtgctggaaaatgtcacggtacagctctgtcagctgttggcgcatgacctccagggtccggtctgcctccccgcgggccctgagaagccgctcccgttcattggtcagccgctccagctcccgctccagctgcacaatggtttccagcttcctcttgcggcagttctgggctgccaccttgtttttgccccgtcgtcggatgtcccggactagcgctagctggctctctgtcagcgggtaccttgccaatagctcattaaagtcatctaccggcaagttgacaatcttgtccgtagaaaaggaatcttcatggccaaggcccgacgttcatcccgactccctgcctccccccgtgcagtgggcttagcccgcacagggcctgaggagggctctaaggccaagggggtctcagcagctggcaaggtatagttggagtgggccaaggagttgggcatgagtgagtaggggtactccactgggtacatctctacatattcgctgcgccgccgaccagcctctgtcccctccagctcaagagattcagcatcgctatagttgagggataatcctgagtcggattctgggtcttcttggggcttaggtggccctgctggcagcccaatgtccaggagggctaaggggtcttggagcggctcactgagcaggcctgagaggctcagtggcttggagactggtatggccatgttgccataggagtatgggggatctgggacatgggatgtggatgctgggagctcataaggtggtggaggaagtgggaagccagaatctgggtggattgagcaggggcagtaagttgtgggtggtggaggtccaaggtatggagctggggcttggggctcaaatgatggctcacttggagcattcagaccctgcagctcggtgatggacatgatctcctgccaagtcagttccatctctcctagctctgaagtggacagctgtatcaccctgttcctgctctgctggggaggacacggggacatcctactgggccagagtctggtccaggttcccggaaagcccagatggctctagaaaccttttttccaggcaaaatgcccactcttttccctaatactttttactcccccaaactgttttcctggctaaaggcagagtcagatcttctgtttttctgttttgctgtgttttgttttccattttctagggcaacatcaggggtcaccctgctttcctcctctgtcctcagttttacgttctcagccttttctttccaagatgatgacagtatatgcttgaggatccccaagaacaagttgtggaaagaggcaagcagacagcccctcctcctctccaagatatggcccaggcctggtggttgatagcagctctgccctctcctcctatcctggccctgggctcccctgcctgggccagataagaggtttatcagttgcaggcagcagaggcacagaaggaatgggctctggagacactggacctctgtnctgtgtcctcacagggtcatttgggccatacctttaa

SEQ ID NO: 318475 - DNA, 512 bp, Homo Sapiens
  misc_feature (429)..(429): n is a, c, g, or t
  misc_feature (446)..(446): n is a, c, g, or t
ttcggcacgagaaaggctgagaacgtaaaactgaggacagaggaggaaagcagggtgacccctgatgttgccctagaaaatggaaaacaaaacacagcaaaacagaaaaacagaagatctgactctgcctttagccaggaaaacagtttgggggagtaaaaagtattagggaaaagagtgggcattttgcctgggaaaaaaggtttctagagccatctgggctttccgggaacctggaccagactctggcccagtaggatgtccccgtgtcctccccagcagagcaggaacagggtgatacagctgtccacttcagagctaggagagatggaactgacttgggcagggagatcatgtccatcaccgagcttgcagggtcttgaatggctccaagttgagccatcattttgaggccccaagccccagctnccttaccttgggacctncaccaccccacaatttattggccctggttcaattcacccagatttttggtttcccatttcttccat

SEQ ID NO: 318476 - DNA, 468 bp, Homo Sapiens
aatttaaccagccctaaaaagcttcaattgctttggaaaacttgttatggcccattttgcccataggaattttgggggattctgggaacattggattttggaatgcctgggaacctccataaggttgttgaaggaagtgggaaacccagaatctgggtggattgaagcaggggcagtaagttgtgggtggtggaggtccaaggtatggagctggggcttggggctcaaatgatggctcacttggagcattcagaccctgcagctcggtgatggacatgatctcctgccaagtcagttccatctctcctagctctgaagtggacagctgtatcaccctgttcctgctctgctggggaggacacggggacatcctactgggccagagtctggtccaggttcccggaaagcccagatggctctagaaacctgtggtggagtcacagcagggtgaggagagagatgaggctc

SEQ ID NO: 318477 - DNA, 441 bp, Homo Sapiens
actgaacaaaactgttacccgtgaccattttcccaagccaccttcgggaatgaaatccaggcaaacagcctactctccctgaaagaagtaacgcgcctgcaaacaggctgcccgatgggacccatccttcccttgtggccccgggggacccaagatggaggcccacagactgagctggccccagaggggtggaactgctgatgggatttccttcattcccttctgataaaggtactccccaaccctgagtcccagaaggagctgagttctctagaccagaagaggatgacaatggcaacaagtgtttggaagttccaaggtgtgttcaaagaggcttgccttgagggagggctggaatctgtcttccctgactcggctcctcaggtctttagcctccaccttgtctaagctttggtctataaagtgcgctacagaaatggc

SEQ ID NO: 318478 - DNA, 2124 bp, Homo Sapiens
  misc_feature (3)..(3): n is a, c, g, or t
tgnggtcagtagacagcagtgcccaagctggcatccgtcaggaagtgtgggcctttgtgttttgatgctacacatgtctatggagggccacttcttttgtaagtctgtggggcctcagcatacccaataggcagcaagtttcagtatttcccagttgtatgtcctcatggtggggctatgtctcccccaccacttcccctctcatcaggctagactttaacatccatcaatcatgtcttgagtcttgctccttcctcttggcttagtcatgtgactacagatcagatgcgtggcctagtgttttaggtgtgcaggtaccatggccccaaatgctgttgtatctgactgaggacaatgccctgtcctccggcgtcccagggccggtaggtgtagctgcatggcatatgtcttccactctgttcagtgtggcaccactgccaccaatatgggaaggccgaggaagaggccctgtcccgggataggttcagggaggcgtggcttgtgtgttcggtttcatgggggtccctttttgggcctgttgtagtctgtatttcttgatcttccgctggcggttatagaggtacgtgctgaggcctgcagtgcccattatgactgcggctgctaccacagtgatgatgacaatctcataccggggggagagcacattcacggtcaccttgcgggtgacctccccttgagtgctcctggcccgacagaggtaggtgccctcaagatctcgagtgacagtcactgattccccgatgggcagtgggaaagtgccatcctttagacacttgagctcgggcaatgggttcccccaagcctggcacattggagtctgctgggaattttctggccacgtccagtttcccggacaatccctctcgtccagtcgggggccatacaggacacgaagctcccgggtctggttcttgtgtataagctggccggccacctccagggttgcagagcaggagaagctgcgcccgttgtcctctggggtggccttcagcaggagctggtgcctcgggcccagtggctgggctggaaccccattcagcgtcaccttggctctagggtgggcctcacacttcactgtcacctcggtcccttctgagacctctggcttcgtcagaatcacgttgggcgccggaaagctgtagatggtcactgtctgcagtgtctcctggctctggttccccagtattactgcacacgtcagccgctgggtgccctcgtcctctgcggtcacactgactgaggccttggccgagaaggagtcgttgccataggtgactgtggggttcaacctctggtccccccagtgccaggtggacctgggcctccgagactgggaacagcccgtccagggaacagaccacggtcccctgcgtgtccacctctaggacccgggggctgacaagttgtgggggagtcgctggcaggacaaaggtctggagctggtagggggccgaggtgttctcaaacagctccagcccttggggccgcaggtccagttcagtgcggcacgagaaattggctccatggtgatctctcctcaccagcaccgtggtcgtgacctcagcgggctcccccacagctggctcccgtttcagctccttctccccacggagcagcaccacggtgaggttggcccggggtgccccaccctccacctggcagcgtagggtaaggttcttgcccactggctgccaagaggggaggggtgccagttccacccgttctggagtccagtacacggtgaggaaggttttagctgttgactgcccatcagggcagtttgaatagcacattggttggctatcttcttgcacattgctcagttcatacaccttccggttgttcccaggcaggagcaactcctttttaggcaacggggtctctatgcccaacaacttgggctggtcacaggaggtgctgcatgtcaccagcacggagcctccccggggcaggatgacttttgagggggacacagatgtctgggcattgccaggtcctgggaacagagccccgagcaggaccaggagtgcgggcagcgcgggccgggggctgctgggagccatagcgaggctgaggttgcaactctgagtagcagaggagctc

SEQ ID NO: 318479 - DNA, 1034 bp, Homo Sapiens
gctccgcctaccaggctgggggtgtcgcgcaccaccctctggcgaccggcgacgccaaatcacttctttttaatccctccacaccctgcccccagatcccggctcgcctggggccccaccaggccttcccccgtggaggagacccacgccgggtgggcagggcgtagccccaccagggttgccagtccggcccgcccaagataggatctgctcccgcccccggtaaggctcctccccagtctatggccctgctggtgttggggctcccggggggcctcaagttcctccccaggggaagttgagcgtgagaatgtggtcccaataggcacagagttggttcaccccccccaggggggcccgcagcttcccacgggccagctttgcgtgcagcagcagggccaagtagctgaagacgaaggtgtccaaggaggcaggggcatctccaaagaagaacttttgagagcccaggcgctgagagagcagggtcagacactcccgagcctctcggtacagctccttctccagctcttcctcgtcctcaggcctgtgctccccagtcagcagctgtagccgttccatgtactgccgctgcatgcggccaggcaggaagaagttgaggggaaagggcatagcctctgcataccacttccgggtcacttccacgtagttcttggtgtctatccaaaaagtatgtaccagcaccgggagcaacttctcctccaggagagacatgaaggccagggtgtctgccccttgccgagctgacagatcataatcagcattgtacttctcttttcgaaggtgggtgatgatcttgtgtggaactgagatgacctctccatgactggtccgaagggcaggcagagttcctgaagggctctgccaggggttgctgatcttgtgtaccttcagtggagcaccagtaaatctggcataggtcagcacggccaggctgtccaggtccactgacggcagcccccagccccctgaccagcagaacagctccatgggcgccgccatcttgcccaccctct

SEQ ID NO: 318480 - DNA, 1036 bp, Homo Sapiens
ttttaaatgtttgagcccagtcagtgtgagtggctttattctgggtggcagcaccccgtgtccggctgtaccaacaacgaggaggcacgggggcctctggaatgcatgagagtagaaaaaccagtcttgggagcgtgaggacaaatcattcctcttcatcctcctcagccatgcccagggtccgggtgcctggggcccgagcaggcgttgcccgctggatggagacaatgccgctgagcaaggcgtagcccaccatggctgccagtcctgccagcacagataggatctggttccggcgccggtatggctcctcctcagtctctgggcctgctggtgtctggcgttgcggtggtacctcagctccatcccaggggaagtagagactgagaatgtgggtacaataggcacagaggttgtgcagcccacgcaggtggacctgcagcttcccactgggcagctttgcctgcagcagcagggccaagtagctgaagacgaaggcgtccaaggaggcaggggcatctccaaagaagaacttttgagagcccaggcgctgagagagcagggtcagacactcccgagcctctcggtacagctccttctccagctcttcctcgtcctcaggcctgtgctccccagtcagcagctgtagccgttccatgtactgccgctgcatgcggccaggcaggaagaagttgaggggaaagggcatagcctctgcataccacttccgggtcacttccacgtagttcttggtgtctatccaaaaagtatgtacctcttttcgaaggtgggtgatgatcttgtgtggaactgagatgacctctccatgactggtccgaagggcaggcagagttcctgaagggctctgccaggggttgctgatcttgtgtaccttcagtggagcaccagtaaatctggcataggtcagcacggccaggctgtccaggtccactgacggcagcccccagccccctgaccagcagaacagctccatgggcgccgccatcttcctcgtgccgaattcgccacccaggcc

SEQ ID NO: 318481 - DNA, 1551 bp, Homo Sapiens
  misc_feature (451)..(461): n is a, c, g, or t
  misc_feature (517)..(517): n is a, c, g, or t
  misc_feature (520)..(587): n is a, c, g, or t
  misc_feature (589)..(594): n is a, c, g, or t
  misc_feature (597)..(604): n is a, c, g, or t
  misc_feature (606)..(606): n is a, c, g, or t
  misc_feature (608)..(610): n is a, c, g, or t
  misc_feature (612)..(614): n is a, c, g, or t
  misc_feature (1139)..(1139): n is a, c, g, or t
  misc_feature (1203)..(1203): n is a, c, g, or t
atcatcgagcgccacggcgtggtcgtattatcaccccggctctgttcgatgcggcggcgccgctgtgccggagagaggcttagcccccgcacttcggaagggcggacacctttgtcgagggaggggtggtcgaccccacggcatcacgagggggtggcatggaggcccgtgccgcggcccataagtactccacagggcggagccaggggggggcggcgccggccgctttcaaaagttccccatagacgccccgcgccaaggcgagggtgggttttgttataaacaccgcccacgtccctcactgcgggtgttttttctcgggggggaagacccccacgacggtccttttggggtgggtttctctcggggccgatctccccccccagtgtttttttcaaccggtaggccccgggcccgggagaacaaggggcttaataagctcttttgcgcnnnnnnnnnnncgttcggaaattttttcttcggggctgcggggggggcgacggagggggtcggcgcnccnnnnnnnnnnnnnnnnnnnnnnnnnnnnnnnnnnnnnnnnnnnnnnnnnnnnnnnnnnnnnnnnnnnncnnnnnncgnnnnnnnncncnnncnnntaaaaatatgtttatctttaatgatccaagattctgcaagacacactgatatacccagaattgggtggaaatacagcatctcagcagtgctactgccagcctgggggtggggagctggatgctggctgaaggacccccatggtgaagtcgattccaacctcacgggagcctcagtgccctatctccatggaaaccagcctggcactgggatggggccctagggagcctgcatgaacatctctgagaggtatttcccattaaaaacaaccacaggtgcccacccccaccccaagctactgcccagctccccctcctctctgtgttgtcggccaagataaaggaaatgggagtgaccacttaacgacaaacaaaagcagattgtacctcctattagggaagaaaaaggaagggaaagggtagtaagggagctgcacttcaagctcagaattctgccaagaccctagagcggctatggcagacagcggtgcatgactgccagagggcagcgctacccaaacccctggnggtaccctttgttactgctggggcccctgctgctgtgggggaaagacgggtcttcaaggctgcntcctgccatctagcgctgcccaatgtttggaccaaaaggggatggcacctaggatggctctacaactccatactcagtacgaaaagagggctcccaggatctcaatgtggtatcagggatgagagtttgcccaaactccctccttcccaccctgctggactgtcagagctctgggctaggaagaactccagggaaggccaggatgagtgggggaaggagacaagaaaatggtctccaatttggcatcaaaacagagtaagttcaaagaaacaaaaccttgatttttttatagcaggttctcctggccagctcatgacagcaggtctccacccactcagggatggccca

SEQ ID NO: 318482 - DNA, 1729 bp, Homo Sapiens
  misc_feature (151)..(151): n is a, c, g, or t
  misc_feature (1482)..(1482): n is a, c, g, or t
  misc_feature (1672)..(1672): n is a, c, g, or t
  misc_feature (1703)..(1703): n is a, c, g, or t
gggaccaaaggggccccgggggcgccccgataaaatcttgggggatatttcggaagatctcccgcctcctgggggtctttcccctgtgtggaaattagatctcccgccagttatagagggggccctccggaaacacctcccccattcctgnggattgtggttttcagagaaaacggcttccgggtttggccccgccccggggcgtgttttttataatttggtggaggaaattccccaaggccatttagttccatgggccccagggattcttcctttagggaaaaaccaggcttatgggccccatggtttcacctttacccttactggggagccccggcgcggcccaaaaggaaattggttctagaaaagtcttccttgaaggggccggaggcggcccaaccaagtttgaaaagtgggtgggtgtgacggtgtggtagcttttccaactttatttagaaaaacaaatccaggtcccagtgccccctgtaccctccccgaccccagccataatttaaataacttagagacagagttggagggaggggacaggagaggttggggtcacggtggaaggaggaagagagcccactacagccgccgcagcgcccgcttcttgtccgtctttttcttggccgccagcttcttatcgcgctcgccagcatgcttcttggccatgggaccctcagcccctcccgggccccctggggccccagggtcggtggaggaagcttcagtgccactggccagggcccgaccggcttcggccctgccgctgggcccgccggcgcccccgtggatctctgtgagcagacgggcccgagctgcatactcctcgtagttctccaagagcaggcggcccgcctcctcgttgagtgcagactcggggttagggtggatcagcaggcacttgatggtcagcagtacgtgtcggatgcccagctcagccgtccagtccctcttgagcacgttgacgcagatctcgccattggcgcccacgttcgggtggaagatcttggtcaggaagtagcccttgggtggggaggcagggaagtccttccccagcaggagtttcatgcggaacagacctccagcatatggggtcccctcagggccctcgatggtgacctggaggtcggtgaggtcctcctcgttgggaaagaccttgatgccatcgggtgggtctgcggtcagtgtcgtcacctccttgtacaccaggcggatgatgtgcgggggtaggttctccacgttggagttcatggctgcggccggccgggggcgggtccccccggcccccttcctgcgttcttcggtccgccggccggggcggggggcccaactgctgccgctgcggccctggagaggccccggcggccccgctccgctccccgctgcctccgacgtccgccgcgcacagcgtagaccaacccgccgccccggtgcccggcagcactgagccggccgcgcgcgcaccactgcctcttnataaccgcccgcaggccacgccctccgcggcccctcagctccgagcctcaaccgtgacgtcagcgcgcacgttccttggttttcgacgcgctcgctcccttccccgcaaactatggtcagaagcgagggaagtggcggagagggctgggtagcgggccggccaatgggggcccgcgggggtcgggagggntctcaaagaacggaggggctgaaaaggggangaagagaggaagggggagcccgggaa

SEQ ID NO: 318483 - DNA, 1324 bp, Homo Sapiens
  misc_feature (379)..(379): n is a, c, g, or t
agtctttaattttttaatatcaaatctgtctctgaccttgtttcattatacataaggagactttgctgtcatgagcgtttctcacgtacaaatgcaggcaacagtgagaggaagttgtcttgtttttgaacaggccttgtttttcttggatgcttttgcttaaaatccaacagccaaatgaggaaacttccagaaaacttggtcatcaaaatatttagccacatgaggtgctttccatattttgagatttaggagcaaacctgtcaggagaccagacgtgagagctatcacgatggccaagctgagttccccaaatgctgaggaggacctggaagccaatccggcaggcacttggctcccccgatggagatcagcctangccacaagacccagcaccatggcaagccacggagaagggatcaggtgacacgaggtacccacagccacgcctcctgccaacaccgcactgtgcacataagtcatgctgatcttcctttgggggtgagccaaggatgaccctgagatggctgtcaccacactgactgctagagcatagtaggtgttgaacatggcattcttcctttggattggacttctcagcagagcagagttgacacttggccagaacatccacaagaagagggcgcccagcatggcagacaaactgggtatcgttgctctctgatcattatcctccgttcccttgggtagaggctttggcaggcacccaggccacagtcagcccaaaataggctgcgaacacgtagaagtgcctcaggttcatgtggtagtctgtgttgaagatattactgatgaccatcctcagggtgcctaaagctgtcacctccaccagcaccatcaccaccaactgcgccaagttgaccttccccaagacagcacccgctgagatcagcaccgacatagcactcatggtggccagccgaatactgaacagtgtgatgaccaccttcccagaagggaactggctcaggaagccgtccagcaggattgcccactgcacaccaagcgccagcatgaagaggttgaaggccacactgctccagctgtgtctccggaaactcgaggtgaggaagcccaagccaatggccgccatcacggtcagatcttggccaacttgataggatgccacgagccccttttgatcctctaaggaagcgtcatagtgggtaaaaaaatagaagaggagaatgagagctgcttccagtgttagggcgcagaggggcaggcagcgccggacagaccgcgggtacttagagctcatcctgtgtccgtctctgtgcagggttccaccaatcccgggaat

SEQ ID NO: 318484 - DNA, 917 bp, Homo Sapiens
  misc_feature (425)..(425): n is a, c, g, or t
  misc_feature (431)..(431): n is a, c, g, or t
  misc_feature (441)..(442): n is a, c, g, or t
  misc_feature (457)..(457): n is a, c, g, or t
  misc_feature (460)..(460): n is a, c, g, or t
  misc_feature (462)..(462): n is a, c, g, or t
  misc_feature (468)..(468): n is a, c, g, or t
  misc_feature (478)..(478): n is a, c, g, or t
  misc_feature (520)..(520): n is a, c, g, or t
  misc_feature (551)..(551): n is a, c, g, or t
  misc_feature (564)..(564): n is a, c, g, or t
  misc_feature (567)..(567): n is a, c, g, or t
  misc_feature (570)..(570): n is a, c, g, or t
  misc_feature (572)..(572): n is a, c, g, or t
  misc_feature (578)..(578): n is a, c, g, or t
  misc_feature (587)..(587): n is a, c, g, or t
  misc_feature (596)..(596): n is a, c, g, or t
  misc_feature (603)..(603): n is a, c, g, or t
  misc_feature (631)..(631): n is a, c, g, or t
  misc_feature (715)..(715): n is a, c, g, or t
  misc_feature (816)..(816): n is a, c, g, or t
  misc_feature (819)..(819): n is a, c, g, or t
  misc_feature (881)..(881): n is a, c, g, or t
  misc_feature (884)..(884): n is a, c, g, or t
  misc_feature (891)..(891): n is a, c, g, or t
  misc_feature (904)..(904): n is a, c, g, or t
  misc_feature (908)..(908): n is a, c, g, or t
  misc_feature (915)..(915): n is a, c, g, or t
atatcaaatctgtctctgaccttgtttcattatacataaggagacttttctgtcatgagcgtttctcacgtacaaatgcaggcaacagtgagaggaagttgtcttgtttttgaacaggccttgtttttcttggatgcttttgcttaaaatccaacagccaaatgaggaaacttccagaaaacttggtcatcaaaatatttagccacatgaggtgctttccatattttgagatttaggagcaaacctgtcaggagaccagacgtgagagctatcacggatggccaagctgaggttccccaatgctgaggaggacctggggagcccaatcatgccattgccgttccagacagtatgaagcaccagcagcacaatgtaggtgatctctccaagcagacccagcaagctgaagatagaataaataaaangaaatntaagtaaatnnccaacactcggttanaananaccggnaagaaaattngatcccccgatggagattagcccagccacaagacccagcacnatggcaagccacggagaagggatcaggtganacgaggtacccanagncangnttctgncaacaccgnactgtgcanataagtnatgctgattttcctttgggggtgaagcnaaggatgaccctgagatggctgtcaccacactgactgctagagcatagtaggtgttgaacatggcattcttcctttggattggncttctcagcagaggagagttgacacttggccagaacatccacaagaagagggcgcccagcatggcagacaaactgggtatcgttgctctctgatcattatnctncgttcccttgggtagaggtttggcagcaccaggccacagtcagcccaaaatagggtgcgcanacngtgagantgcctcaggttcntgtngtagtcngt

SEQ ID NO: 318485 - DNA, 973 bp, Homo Sapiens
  misc_feature (12)..(12): n is a, c, g, or t
  misc_feature (23)..(23): n is a, c, g, or t
  misc_feature (50)..(50): n is a, c, g, or t
  misc_feature (53)..(53): n is a, c, g, or t
  misc_feature (56)..(56): n is a, c, g, or t
  misc_feature (64)..(64): n is a, c, g, or t
  misc_feature (69)..(69): n is a, c, g, or t
  misc_feature (83)..(83): n is a, c, g, or t
  misc_feature (86)..(86): n is a, c, g, or t
  misc_feature (92)..(92): n is a, c, g, or t
cggggagcgaantgcggaagacntgcccagccccagcggtattgcgcgcnatnttntatagccntgaanttgcggtggtccgncgncaccgnaatgctgctcaggtcgggctgccggatgttcgtgaccgcgctgccgtaggaggcgatggcctgggccgtctcctcgtgcccgcagtcctggctaacgatgatggggaagagctcagccgagggccgataatgcagcagcttgtccaggcagcgccgaacagtgctgcggtcacaggcgatgaccaggatgggaatcaccgccggcgcgggggtcacaggcacacgcggctgggcgggaggggccgcggtgggcaccctcccccgctggctcgacagggcatccccgatctgctgcagcagcccacgctgccgctccagctccacctcggcgtcttgggccaggcgaatcacttcccgggtgaggctggcggggtcgccatcgagagcgctgactgagggtggcctgccaggtgctgggcgcgtccagaagaagaggagcagcagggcattccaggccacaaagaggatagcgccccacagcacaagccctgcagactgcttcttcagcatcctggcccccaccggggagggcaggccaggggacggttcaaggctgccctgggcttgcccggctcccttgcccgcagtcctagggatgcctcctctggactatgggattaggaggcagccatgcacctgtcgctgagccaggagtaaagtctggccgggaggaggacagacgcagaagaccaggggctccagcgcacagagccagtttcgccagcgatcaggtctgaggcctggattccaagaggccggtgcaagccaggagccagccccactccctcgcccagctccctccggcctggccctctgcagaagcctgatgcccacccagctgtctcaccatgggaccccaggcggtgagggtgggtagccga

SEQ ID NO: 318486 - DNA, 1801 bp, Homo Sapiens
tttcatttaattcagcctttattttagaaaataattctgtagcttccactttctttcatgaaactgaggtcaggcaagaaacaaaaatccaccaagtcctctccatcctgccatggcgtcctggcctgtgaggacatggggcgcctgggagcgggcggggaggctgggcagcactgggccagaggcgtcctggtcactgctccacctggtcactgctccacctcatgctgagaggagcctgtgtgtcaaaccccaggggaaaaagggacaggcagatcgaattctgtcttctaccaagccagcaggagcctcctagagcaacagggagggcactgattttcagaaaggaggggtcagggcatagtccctctctgaggtaaggcaagagagaggttgtcccagcacaaggccttcctccctgcacctctctcctgacagctgggcatgggctgaggagaggtcttgcttgcccccttcaactttccatctcagaactataaactgctaggctgcaaggagagaagggctaagtgggggtcagacaggagagaagggcaggaggcagtgagccccgatgacccaccaactccaccaggccctgacaaggaagcccctttggttagtatcattttggccacaaatatgtccccttctcccataactcagtccccactgggggaaggggagcaggtatagaaggagggctcgtgccctggctggaagagccaggtcagggagaaggggtctggtcaagagagcgaacgttgccaaactctctgcacatgctccaggagaaagctcaggacgtggacatttctggccccaacaagcccagtgccccccaccacacagtggtttcctgcttaataccccgcaacataccctagaatagttcccctgatctgactcccttgagaacgggagaataatcctcttgttatcatttgtgcacttaaatgccactcggaaaaatcaaaaagataaatgcacctaagagggaaacacaggcaggccgatgcagcctggggactgtggtcccacctcagctcatgatgtggcaaggaggggcccaggaaggacaggcaggtgctaattccagctaggatcatagccctcccacgtcggtgggggcgccaggtggacacggcggccccggaactggaaggtgacaataccccggtagccagctctcggaacccccgacttaaggtcatccatgacacccagagccttggcgaaagccttgaagctgtccctgcccgtatactgcacccgaacctcccccaactccttccggtcattggtcctcactttctccacctgcagctggggagcaccgtagacgcgggcgaggaaatctcggtcataggcctcccgctgcaggtaagacaggtccagctgggtgaagtgcacaaactgctggttcagcttgataaacttgaggtgctggtcaaagaactgcccgtggctcacacccttgcggccaaaggtcatcgttcttgagatctcagggcgtatgcaggcccgcccctgccgctgctccggccgccgcatccagtcgtcccagaaggcctttggccacttgggctccagctcagcccagagctcggccaacagcagccagcccaggccagggaaaaagtcggtgcggtagagcagctcaggcctgctggcgtccaccatctgctccttgccgttgtcattccaggccgagacgcaccacagggaggggtcggccttcagcagcggataggtggcctgaaagtaccctcgtgccgaattcgccacccaggcctcgctc

SEQ ID NO: 318487 - DNA, 1029 bp, Homo Sapiens
  misc_feature (9)..(9): n is a, c, g, or t
  misc_feature (20)..(21): n is a, c, g, or t
  misc_feature (26)..(26): n is a, c, g, or t
  misc_feature (42)..(42): n is a, c, g, or t
  misc_feature (50)..(50): n is a, c, g, or t
  misc_feature (53)..(53): n is a, c, g, or t
  misc_feature (57)..(57): n is a, c, g, or t
  misc_feature (69)..(69): n is a, c, g, or t
  misc_feature (95)..(95): n is a, c, g, or t
  misc_feature (102)..(102): n is a, c, g, or t
  misc_feature (107)..(107): n is a, c, g, or t
  misc_feature (141)..(141): n is a, c, g, or t
  misc_feature (158)..(158): n is a, c, g, or t
ttgatgggncttttcaaacnntcatnttctgagatccagatntccatcantgntgangcgggactgcanatatcttcatagcccttggcaaaganttcatangcatnagtggaggacggttctggcttaagtattcccagntattggaggtagaacanaactccttctctgagtggtggttggtgcctgtgatgatgaactgcacctccaacttgaggagccggaagatgagcctctggtgcatcttagaaagaccaggaaatcccttcttattggttcaggaaaatgctagtggggagaatggctgctttgatgggctcccccaagccagcgatcaatgacatgattagatgggaggtcagccccaatttcaagagccactgcaatcctcttactatagtcacacaaagtccggaagttgtgccaccacatccacgttttctcctccccactgtactcctctgtgtgtgtagttggtgcattctcaattatatcatctctcaggtcctctggtgccaccaagggtacccgcatccagaacatggaagagtgatggccagtgtggatgtggttggtcaaaactctggccaggttggtgttatcttcctgattaaggggcagcaggaaagctggaagacccaaatatgcaccaaaattcagctcctgtaacatggccgcctcggagttcctgcgaatcttctccacttttgagtctggacgaatccatggagaaagctttcccacaattagcgtattccagtcccttcctgacagcagtaggtctgatcgtgtctggggaccgggccgattcttagcaggttcctgaatgaactccctcttgaaacgcggatggaagacaggcatgcagaggaaatcaaacccctgcttggccacagcccctagtgtgtcagctatttcggggacgcaattcaggtccctcccgctggacacgcggctcccaccagcacccccgaccgccatcgccgccatctttctcctcgcgctgtccacgccgggattccttatact

SEQ ID NO: 318488 - DNA, 2773 bp, Homo Sapiens
  misc_feature (109)..(109): n is a, c, g, or t
  misc_feature (487)..(504): n is a, c, g, or t
aggcgatttcgtcgcagagaggacgacagtgtgtcatctttgtggagagaaaagagggaggtgggggggagtattgtgggatgcccggacaaagaacaaaaaaccaccncccgtggggtgggcggggtggtgttttcttttgtttgtggcaaaacaaggcggggtattcttcgcgcggagaaaaaaaagggagttttcgggggaaggtttcctttgtggttcccacaaagaaaaaagggcccgcgtccatttagggcgggggttaaaatttcccgggggtaccgccacgcccaattccgttagatgccgggttaaagcgtggggtgtttggaaaattaaattccgacctcccctataggggaaacccgggcaggttcttcccccctttgttacaagaaaaaggtgggttcggggaagacagtttatggcccatgggcccatttcatttacttttttttgccgcccccggacataggatgcctggagnnnnnnnnnnnnnnnnnngcagtaaagggctataactttatttgtatttcctcttacacaaaaccatcaaaacaagaacagaaaaaggctgaaaatccgttcaaaccccatgttctcagggatattccagggagttcttgaggctgagtgcgtagcttcaaatccagcactaattcctcaccccctggcctgaggtcttcatagattggtggcttgagccctgcaattaattataatcccttgcccaccttgatgtaaggcaggaaagcagattgaaatgctcctctctgatgggcaaggggaatcacagcccatagatgtactgcaccttctgtactacaggagcagaacctgaagctgcttccaaggctctggacacttggcacgcagggctagaggccaatggtatatgagcggcctgtggggttatgaatagcagaacagactggtgctgtcacagcccactcataccacaccttcttggaattgctgcatcgccagaaacgcacacagatggtttggccttcacgtaccgttatgggctgcttaatagggaagaggatgggaaaccatgagaacatcccaggagagtgagtctctggacggatactcagagtgatgtcctgataaagcacagtctcaaagtagccggcaaagccatgtagtactgtgttcacctccacaggaaattccaaggtgcaatagcggttgttgtcaatcataggatctctgttgggatggctgaaggtgaaacagggctggggtgcagagagctggtggaagttgtgcagccgtaccacataaggcatctcaaactgggcctcagggtcacggtccttctccctacaggctcggacctcattgtacagcttggaggaagagatgggagccagaaaggaagtgtactccccggggatgctcacaccatcatcttttaggaagtgctgggctccatccaggcactcaggcgacaattcattgtcagcaaatgagcccagaagctcactgacaatgatgtctgctttctctggagccacccattccctcatgtctgatgagactacggtcacttggcttccccattcttcaaactgccagttctctagcgtcaccacggcatttgggtttttctccacagcatacagctttatccgccggtcggcctgcttggctgcccgcagggaagcgttcaccaggggtccccgtcctgctcccagcaccatcagtacctggacattggtatccttctcctcttctggtactcggtctagcagacatttatagatggcctgctggtactgagagtatttgatggggtccttttcaaacacttcatatgtctgagattccagattgtccatcagtggctgaagcggggactgcagatagtcttcatagcccttggcaaagagttcataggcattaggtggaggacggttctggcttaagtattccaggtattggaggtaggagcagaactccttctctgagtggtggttggtgcctgtgatgatgaactgcacctccaacttgaggagccggaagatgagcctctggtgcatcttagaaagaacaggaaatcccttcttattggtcaggaaaatgctagtggggagaatggctgctttgatgggctccccaagccagcgatcaatgacatgattagatgggaggtcagccccaatttcaagagccactgcaatcctcttactatagtcacacaaagtccggaagttgtgccaccacatccacgttttctcctccccactgtactcctctgtgtgtgtagttggtgcattctcaattatatcatctctcaggtcctctggtgccaccaagggtacccgcatccagaacatggaagagtgatggccagtgtggatgtggttggtcaaaactctggccaggttggtgttatcttcctgattaaggggcagcaggaaagctggaagacccaaatatgcaccaaaattcagctcctgtaacatggccgcctcggagttcctgcgaatcttctccacttttgagtctggacgaatccatggagaaagctttcccacaattagcgtattccagtcccttcctgacagcagtaggtctgatcgtgtctggggaccgggccgattcttagcaggttcctgaatgaactccctcttgaaacgcggatggaagacaggcatgcagaggaaatcaaacccctgcttggccacagcccctagtgtgtcagctatttcggggacgcaattcaggcctcgtgccgaattcgccacccaggcctcgctaccta

SEQ ID NO: 318489 - DNA, 1286 bp, Homo Sapiens
  misc_feature (1262)..(1262): n is a, c, g, or t
tccgaaaacacctttattgggcacgtcccccgaaaagcagcctaaggcgtcctggtagtagttgttgaagttgatgcccaaaaaaaagtcctccagggggggctggtagccggggttaaccagcttggtcaccactttgaaaaaaaagggggagtagtacttgaaggggttgtaggactgctgcatgagtgcaaagttggggtgctttgcaccccgcgggcccccagggggcccccaggcctgggaaatgagctggctgcggaacttgaccacaaggctgaaaatgctggggatgacgttaatgacgggcgccgccttttccgtgagcaggcccctgaagacggccttgggcaggtactttgggtgcgcacgctgggtttcctccagggtcgcccacgggggccaacctggccctgaactcgcaccaggtgacgtgcaggatctggttggcgatgtagccctggatgaccttcacgaaatgctgcatctcgtgcttgaacagctgcagctgacggaactgcacagagccggccatgtggctcagcagggctgtgcgcttgaggtggaagcagacgtccttgagcgcccacatcatgagcttcagctgcagcaggaaggagaagacgccgctgtacttgctcaggcagccctcggtgatgacaatgttgagaggccagtccaccttgtacctgagctccaggcagctcagcacatccggggcgttgggggcaaacacctcgggcaggtacttgagagcgagggagaggttggaggcgtgcggggtgtccccatgcaggctgcactgcagggccttgctcagcacagagttcagcaccagcgggttgagcagctctccgggcgtttgcccagctccaagcttctcaaagagcaggtcgctgagggactgggcgaactcgccgtcctccatcagcaggaagtgccgcagtgcctcatagtgcgcctccaggtgcagctccacgaagaagtagtcgacagcggccttgttcaccaaggagatgtgggcggccagcggtgccgtgatggagcgcttcatgagcacgggcagcgtcagcaactcgctcagctgcacagcagtctcatcagcggcagactggacctgggggtccacggggaaggcgaaggcccggggaagcacggggcgcaaaagatgagcaatgggcggctcggacatggactcgtaactgtccgggtaccgctccaagtggtactgccctgccaggcctgccaggtaggccctgctnccccaccctgagctccccgccgcc

SEQ ID NO: 318490 - DNA, 1464 bp, Homo Sapiens
  misc_feature (147)..(147): n is a, c, g, or t
  misc_feature (152)..(152): n is a, c, g, or t
  misc_feature (177)..(177): n is a, c, g, or t
  misc_feature (273)..(273): n is a, c, g, or t
atgcctcaggcatcttcccaaagatttttataaaaaagtattttcttaaacttagtttataaaaaagagggatcccataggcacgaggacccccagtgaaccaagtttgggaagtgctgctccaccggtggccccataagagtctgntaaangatagaaaagtaggcccccaaaaancaaactcttttcccacccagccatcagttactatcttcaaaactgcagtgtgggctcaatgttgtcattctgtactctcctgtcttcagcagggtntatggtattttttccacttgctggtcaaatctcctggaagaataccctgcctggaaaaagttcactggagtcagaagatatttgagtgctagacccctgaattcagtagctagaagaggggtgcccttgctgctgtgggacaggggagaaccatggcccatccaggcactctgattccctgtggcttctggacctccatcatcatctcccatgggtaccaagggggaccctaaaccaatttcctccctggttttttgagaaataaactcctcatctgtagaccttaagtgcactgaaaattcccagtggggccgtcaacatagtcaccctcttttgagactcacagaaagggcactgccttgttccattctttgctatagagatctgggaacaactgcttcttgatccgcaaaggatggtggaaggctgcttttcaaggtccgcaggccagggagaaagtttctctttcttggccttctttgagtctctgtcagcttgagattgatcagcactttcctcaggggattcaaacacaacaccttgggttctcggcctctttagcctcctttctaacagccagagaaggcttggttttctagaggaagaactcatgtattgctgtacagagtccggaatcaggggcacggagatcctggggctcagactgtcctgaaagcctccacagggccgccgacttacaatgggcaccacctggcaaggcttcagtgctgcgacaaaggcacgaagctcggagtaagaggaatggtcagagtaagggatgacgtggatatcagggtgggagctgtggatttttcggcttgtgggaaggatagcaatcgtagggtgggtctggttccaacgcagcatgttggaatggcagatctccatatggtctactgcatggatgcggccagccttctcctccactgtgaacacatctgccaggcccagtagctgtaccaactccaggcgccgaggactcaataccacccaggtctgaaactccagggccagctgctccagcagtgattcctttcccaggctgtagagtccaatctttatgttatgttgtgggtgttttcgaatgagctggacaatctggtgggcagcttcttgtcgggaaggaagaaccagggctggattgcaattggtgttgtctaggtataaagtaggatcgtttccccagtgcag

SEQ ID NO: 318491 - DNA, 1464 bp, Homo Sapiens
  misc_feature (24)..(24): n is a, c, g, or t
  misc_feature (1333)..(1333): n is a, c, g, or t
  misc_feature (1410)..(1412): n is a, c, g, or t
  misc_feature (1428)..(1428): n is a, c, g, or t
gctgaaccgggtggctgtgaccanatggcgggtgggggcgcgcagctagacgtggcctgtgagctggcgcgccccgagtgcctctttctgctggtgggccacggtgcctcgcccggttctgcgggacggtggcggcctcacgcctctcgagctgctgctgcgccagctgggccgcgacgccggggccactccctccgccgccggagcccccgcctcagctcccggggagccgcgccagcgccgcctgctgctgctggacctcctggcgctgtacacccccgtgggtgccgccggctcggcccgccaggagctgctgggcgaccggccgcgctggcagcggctgctgtgtgaggacaagttccagtggctggcgggcctggcgccgccctcgctcttcgcgcgcgccatgcaggtgctggtcaccgccatctctccaggccgcttgcccgaggccctggacgagctgtcgctgcccccattcctgcagccgttggacctcactggcaaaggctaggcccggagcaccctaggcgctggattttgggacaaaactatttttcagagcgttgtaccggcactttatatatattgatctctgtacggcacaatctctgcctcatctgtcgcatgcactgggggctgggcttggatggtcaggtgagttccaagtggcaggttttctgggtgcagctgggctcgggccttcagctcgctgtccagcccctgaagggagtgaggactaacctcccaccttgatctagagcctcggacaggtgtgcgtcccagatgggtgacagctgagtgccgcaggagcttggtaggtgcaggggtggggactggcatgttcaagcagcaggacagcgtataaaaagggctgggagccaagagaacgagctctgcagcgtagggttcttacgggagggtcctgtgcggtcaggccttttgcaccctgtggacctccgggccagggagggcacacagggctggcaggcccgcggtggctggtgttgaggcatgaacaaattgtaccgggtatcccccaccccactctgaccaccagttcctccttggatatcactccccctgacaggcagcccacccaggcctggatttgtccctgtctcccccttttgcttttcccccatgactaatgggcaccaggtcttgctgctcctgcttctcacctctgcagtggcagcaggcccctggccccaggtgcatgccggtcagtggggttggatgtgccttccttcaggcctgccctctgtccaagcccggagtgggcttggtgggctccctgggtggccccagtgggtgccaggtggtgcccggngttattgagggggtggttgtatcactgtagggacaggcttcttgccccagcctggagagctgtttcttcaggaggtnnnctgagatgagacttgnttgcgaattcaccacacttcaggctgggaagctggg

SEQ ID NO: 318492 - DNA, 1036 bp, Homo Sapiens
  misc_feature (6)..(6): n is a, c, g, or t
  misc_feature (17)..(17): n is a, c, g, or t
  misc_feature (29)..(30): n is a, c, g, or t
  misc_feature (39)..(39): n is a, c, g, or t
  misc_feature (42)..(42): n is a, c, g, or t
  misc_feature (44)..(44): n is a, c, g, or t
  misc_feature (52)..(52): n is a, c, g, or t
  misc_feature (55)..(55): n is a, c, g, or t
  misc_feature (72)..(72): n is a, c, g, or t
  misc_feature (140)..(140): n is a, c, g, or t
aaaatntttttccaaanccaccctaggtnnccgcctacnttncnatgagtcnacngctgcagaatggggcancgcagctcgtccaggcctcggggaggcgcctggagagatggcgtgaccagcacctgcatggcgcgcgncgaagagcgaggccgcgccaggcccgccagccactggaacttgtcctcacccagcagccgctgccagcgcggccggtcgcccagcagctcctggcgggccgagccggcggcacccacgggggtgtacagcgccaggaggtccagcagcagcaggcggcgctggcgcggctccccgggagctgaggcgggggctccggcggcggagggagtggccccggcgtcgcggccccagctggcgcagcagcagctcgagaggcgtgaggccgccgccgtcccgcagaccgggcgaggcgccgtggcccagcagcaggaagaggcactcggggcgcgccagctcacaggccacgtgcagcgacgtgccaccgccctccacgcggctgcagccacgccggtccagcacgcgcgcccgctcctcggccgggaagtcgcgcaaggtgcgcaggatgcggcgcagaatgcccacgcggttgtagcgcactgccagcgccacgtgcggcccgggagccgcgcagcagcggaagccggcactgggcggtgcgagcgcgcgccgcgggaacgtggccagcaggtaatgcgcgtacgcttggtggtcgtgcacgagcgcgtagagcagcgcctcagagggcgagtaggcggcggcgcgcccgcgctcgtcccagtggaaggccctctggcgcgcatatcctccagcagccacacgggtagcaggtcgcgcaccgcctggtagaaggcgaacgacgacttgcggcactgcttctgcgctcgcgagcgcgccgcgcccgaggcctcgggcccgccgtccgcgccacccccaggccgccgcgcgtcccacggcatgctggcggcggggcgttcctgggcctcaaggcatggatcccgcgaaggcacatcccggg

SEQ ID NO: 318493 - DNA, 1850 bp, Homo Sapiens
  misc_feature (44)..(57): n is a, c, g, or t
  misc_feature (67)..(228): n is a, c, g, or t
  misc_feature (1381)..(1408): n is a, c, g, or t
cttgtgggggccgccccccaaaaaaggtttttaaaaaatttttnnnnnnnnnnnnnnggccccaaannnnnnnnnnnnnnnnnnnnnnnnnnnnnnnnnnnnnnnnnnnnnnnnnnnnnnnnnnnnnnnnnnnnnnnnnnnnnnnnnnnnnnnnnnnnnnnnnnnnnnnnnnnnnnnnnnnnnnnnnnnnnnnnnnnnnnnnnnnnnnnnnnnnnnnnnnnnnnnnnncttaattttggggctttattataatttttcttttcaagatgctacatagtgaaacagaactgggttggtcttttatggcataaaattaattcacagtcaaactctcaactagtactagaaggattcgctgaagagtttctctcttcccttgctccccacccacaactgctggtgccctcgcttctaaccctctgcagcccgatccatttgtcctgactccaggctaggtccccaaggggaggtcaggctcagacttggacctgggcgctggaagtgtgagtaatggttgagaggtggtataagaacaatctagaagactgactactcttcattaaaaaaggtaacctagagttgactgtcactactgagaatttccctccctatgacagttgttatttactgacccagaaaaaacacttcctggcagctcttctccagcatcccaataaaccccacctccacatgaccagactctccagagacagaggagcccacagccctccagcagcaataccagttcacccaacagagttcagcagcacgcagcattaactgtactcttgtgacaataagaaaacatgagatgaaatacattaaataagttaaatatgcattaaacatctctgaataacagtttgacttcactacatgaaccaatacaaatttagcttggtccctttaagtgaacaaagcactgccatttatttccaaagcgctgggtcaatcagtcaacacacgcctctcacttatgacgagtacgtctgatgctgccacagtgcaattcctttgggcttctgactctgttcatcagtcccaaggagctgatggcttggacagaactgaagacacggaaagcagcctggggccgggagtgggccacgtggggactactgtgtggagctgaccgcacttccccagcatgctgggctcccagctccccaagggccagcaccaacaggcgaggaagggtgtcattttaagagaggtaatccagcatcatgtaccaaggcctaccaatgtttaaaatgacatttacaatatgccattgtggcattactcatggtttcccttgtcattaataaagatcattcttttccccctcaatcagttactatacatttttaactttctaaaagatcgttacattatattnnnnnnnnnnnnnnnnnnnnnnnnnnnncagggaggggtaatttaaaggcaagacctgtgagatgtcatcatacattaatttctttttacacatggttatgataaatttaaatcccatgatatggtggatccaccaatccaatttaccatcctgtgcatgctacctctacaaggcaatcttcccaataattacaccaacgataaagaacaaaaccaccagagccaagagccgggtgctaaggccttcttccttcccagttggggctaatgctgaaatggggctgttgctctgcactgtcttcctcatccgcagtccatcttcttccttgaactgcttgttctcctcccgtagcctctgaacttcaccttgcagcctcttacattcttccataaccttcttaacttcggtgtcatccaaagaagaactcagagacttagacactattggtgtttctgtctttgatgcagtt

SEQ ID NO: 318494 - DNA, 1081 bp, Homo Sapiens
  misc_feature (967)..(980): n is a, c, g, or t
  misc_feature (1022)..(1022): n is a, c, g, or t
  misc_feature (1031)..(1031): n is a, c, g, or t
  misc_feature (1040)..(1040): n is a, c, g, or t
  misc_feature (1050)..(1050): n is a, c, g, or t
  misc_feature (1055)..(1055): n is a, c, g, or t
  misc_feature (1071)..(1071): n is a, c, g, or t
aatgcttaacgcatttctttatgtgatatgaatagaaagattatccatacaaagttagaaaaattaagataaattatatattagtacaccttccaaccacattttatataaaaattcagaagtgtactattatttcaatctacaccataaaaatgcctggacttagcagataatcttctatctgtgatgtattttctcagtagaaggtttatttgttgcagtcactttttaagagtttaattttcattgttaaccttactgaatcatcagtaaacccagctgattgggacccactgtggttccattctcagtttctctatggcagtttgcagtttttcaaaggctttgtctagattatcatttatgatgatcaaatcaaaatagtggttgtatgctctctgaatccgtgcactttcatccactgttttcttcaagtcagagtcggtcagaagcttggtagtgattcctgcatccaccacagccttgtgcatggcacgtaacgtctctagctccggagccgcaataaataccacatagggcataaactctgatgtcctcaatactttcagtgcttgtgggttgacatccagaatgcaagtgcgtccagtttggacaacctcaagaatagaatcaattttggttccatagagatttccttcatattccccatgttccaaatactttccagctttaatatctgcttccatctcagatcgtgacacaaacttatatgcctggccatctttttcatcttcccttggtttccgtgaagtaaatggcaccgtagttccaaatctagtgggattcaatactatgaacctgtttttcaagcttcttcggcctacaccttgagctcctatcaatactaatgtttttctctggaagggaggcattttggctacctcctcatatatctggatttcatgacgatcaaattctgcatttctggttgtgagatacatcatcnnnnnnnnnnnnnngctacttatagttccacaaaaaggtcctgaattgtcccagtntcttctaanaatgccttnttcttctctnccagnactggcttggaatganacagcgcttc

SEQ ID NO: 318495 - DNA, 859 bp, Homo Sapiens
  misc_feature (5)..(5): n is a, c, g, or t
  misc_feature (7)..(7): n is a, c, g, or t
  misc_feature (17)..(17): n is a, c, g, or t
  misc_feature (20)..(20): n is a, c, g, or t
  misc_feature (22)..(22): n is a, c, g, or t
  misc_feature (31)..(31): n is a, c, g, or t
  misc_feature (39)..(40): n is a, c, g, or t
  misc_feature (45)..(45): n is a, c, g, or t
  misc_feature (48)..(48): n is a, c, g, or t
  misc_feature (53)..(53): n is a, c, g, or t
  misc_feature (58)..(58): n is a, c, g, or t
  misc_feature (61)..(61): n is a, c, g, or t
  misc_feature (70)..(70): n is a, c, g, or t
  misc_feature (72)..(72): n is a, c, g, or t
  misc_feature (83)..(83): n is a, c, g, or t
  misc_feature (92)..(92): n is a, c, g, or t
  misc_feature (99)..(99): n is a, c, g, or t
  misc_feature (106)..(106): n is a, c, g, or t
  misc_feature (116)..(116): n is a, c, g, or t
  misc_feature (120)..(120): n is a, c, g, or t
  misc_feature (122)..(122): n is a, c, g, or t
  misc_feature (125)..(125): n is a, c, g, or t
  misc_feature (128)..(128): n is a, c, g, or t
  misc_feature (133)..(133): n is a, c, g, or t
  misc_feature (140)..(140): n is a, c, g, or t
  misc_feature (149)..(149): n is a, c, g, or t
  misc_feature (178)..(178): n is a, c, g, or t
  misc_feature (775)..(775): n is a, c, g, or t
  misc_feature (817)..(818): n is a, c, g, or t
  misc_feature (842)..(842): n is a, c, g, or t
  misc_feature (848)..(848): n is a, c, g, or t
  misc_feature (850)..(850): n is a, c, g, or t
aaacncntccccctcancantncccaacaanaattagtnngcccntcntcacntttcnttntttcccctncnaatgctctctnccaaaactnaagtttnatctgtnttaaataatngtgngnttntanatganaaaaatnactataaanctgtgtccctactttattttttaaaaatnacagaacttttgttcagatgtaaaagacaaaattgcactttaatgttttttgttacttgaaaacatatctgggatccctttttttggtcctctgctgatatttataaaacaagaaatgcttcttggactaccttcactggcatttccatagtcctggaatccagagccaagtggcctatctaaaattcacagcccttttattctcctgtgtgatggttaatacaacacagttgaagcctggaaacactaccattatttttggtgtattgctttttctaattgactgtttttaatgattttgatacattttaatgttgaaattaatattgaatgttagctatgaaattttagtattgaattttataatggaacagaacattggtaggtaacaagatgcaagaggatgtcaatacaagattgtctgcctgtttttctttgtaatttgtaattacagtttttgtaacttgtgattatgtttttaactaaatttaccaccagatacaaacactacttcttacacagagttatcctttatttatatcattaagacgtgaatgaaacatcatcctaacttacttccccaagatattgagaggncatatctgtttttctttatcattcatttctttttctaaaagnngttactgatatgcttttgatttcntataantntaatatatt

SEQ ID NO: 318496 - DNA, 719 bp, Homo Sapiens
  misc_feature (12)..(12): n is a, c, g, or t
  misc_feature (22)..(22): n is a, c, g, or t
  misc_feature (63)..(63): n is a, c, g, or t
  misc_feature (107)..(107): n is a, c, g, or t
  misc_feature (144)..(144): n is a, c, g, or t
  misc_feature (151)..(151): n is a, c, g, or t
  misc_feature (183)..(184): n is a, c, g, or t
  misc_feature (190)..(190): n is a, c, g, or t
  misc_feature (193)..(193): n is a, c, g, or t
  misc_feature (196)..(196): n is a, c, g, or t
  misc_feature (200)..(200): n is a, c, g, or t
  misc_feature (249)..(249): n is a, c, g, or t
  misc_feature (537)..(537): n is a, c, g, or t
  misc_feature (540)..(540): n is a, c, g, or t
  misc_feature (697)..(697): n is a, c, g, or t
aggaccttgccnttcttgttgnctctctcgccaatgagccagtcagggtccatgccaggcagnctgtagacagtgatgagctcatcagccagcagggccagctcacntgatgtcggctgcctcgtagtcatagagcacccgagntttgcgngtcccactggcagggggggccacctcttccanncagagngangcntccncggagggccaggctggccacagagggcccccacaggcatagtggccgcnagcagtggtgggtgaggtgctgctcaggggtggggaggcgggctctgtggtgcccacgaaggtgccgggaaatctgcccagctgcttctgcaagtccagcatgtggcggtagcactgtgcgtagtaggttgtctgagacttgacgaactcgtggaggcagcgcaggtggttcacgtgagtgctactgattccctcccagcaagagacgggtcacttctgcttgcccggtcaaactctgtctgggccacgcggagctcctgctcggccttgtccacttcatcattcccnagnagcggaggcgctggccgagagaatgtaattacgaggtctagtctcctgaaagtcaggcaccgtcgtggctttggcttctgcagccttggccttcttcacctcgctttgcaggcatccaagtccagacgccggttttggaggagccgcctctccttgnagatggtcttccagtccccctc

SEQ ID NO: 318497 - DNA, 1341 bp, Homo Sapiens
  misc_feature (119)..(202): n is a, c, g, or t
  misc_feature (1154)..(1154): n is a, c, g, or t
acatgtgtggagctggagatctttttggaaaaaaagcaaaaacacaaattcctttcagtcagcaggccccggcagagcagcaaaggccctcgccccgcggctgccgcgcgctcgctcgnnnnnnnnnnnnnnnnnnnnnnnnnnnnnnnnnnnnnnnnnnnnnnnnnnnnnnnnnnnnnnnnnnnnnnnnnnnnnnnnnnnncccctatcttgctgccacaggcccccagtacctggtgggcaggggcaggatgggggctcaccggggctggggctgatttctgggcaatggcaggaccaccctccagtccactgaggctgggggagctcggggcaggctgaggcccaaggtccgtgcgggaggggtcccagggtcccgagacaggcaggaaggggctcagaagttgctgaagatttcacgcttcctgttccagtccatctgtggcgcgcgcttgttgactcgcatggctcgagccttctccttggcctcggccgccgtggggctcaggtggaggccgctctcctggaagggatcttgcttccaggcactgccatcctcagtgtccttgtcggaaccaggcaggtcacttcgggacgagcacgcagagccaccattgagctgggcagggctggttccattggtgacgggtgacggcagaggaccttccacgtgctcctcggtgggtgtgacccgaagccgcttgaagtgttcatctgtctcggggtccacgaccagcagccgggcctcgtcctcccgtgccttgatgctggccaccacctcagcatggcgcagtccctccacattctgcccgttcacctcaatgagccggtcctgggcgcggaggccagagcgggcggcaggtgagcccgggtccacagagcggatgtactggccgggccgggacttgtcactatgcaggttgaacccatagccctgaggtccttttcgcaggtggcagagccgagggcgcagctccctcaggggcccactgacatcctgcaggcccaacggacagggtcagtctcttgctccagcctcccgcctccagaggccactccccgggtggtgccgccactgcccaaactcggtaccgtgccccccacgggcaggcccagttctcagtgggcaacacttcgggcacccaggctgcctntgacagagctttagctgtgggaacttgggcaaagcctgttttcaaacccagaagcctccccgacgggcccagccgccttcccgggttgctgggagaattcctttggctcgaggccagcgtggcgcacaggcagggtgggaggaagcaccaggtgggatgaactgtcgccgttggcctcctggggcgg

SEQ ID NO: 318498 - DNA, 991 bp, Homo Sapiens
gccaggatggggcttccccgggggctggggctgttttttggggcaatggcagggccccccctcccagttcccattaggttgggggagctcggggcagggctgaggcccaagggtccggtggggaaggggtcccagggtcccggagaccggccggaagggggctcagaagttgctgaagatttcacggttcctgttccagtccatctgtggcgcgcgcttgttgactcgcatggctcgagctttttccttggcttcggccgccgtggggctcaggtggaggccgctctcctggaagggatcttgtttccaggcactgccaatcctcagtgtccttgtcggaaccaggcaggtcacttcgggacgagcacgcagagccaccattgagctgggcagggctggttccattggtgacgggtgacggcagaggaccttccacgtgctcctcggtgggtgtgacccgaagccgcttgaagtgttcatctgtctcggggtccacgaccagcagccgggcctcgtcctcccgtgccttgatgctggccaccacctcagcatggcgcagtccctccacattctgcccgttcacctcaatgagccggtcctgggcgcggaggccagagcgggcggcaggtgagcccgggtccacagagcggatgtactggccgggccgggacttgtcactatgcaggttgaacccatagccctgaggtccctttcgcaggtggcagagccgagggcgcagctccctcaggggcccactgacatccttcttgccagcttcggagctgtggctgccggtgtgtgcccagtctggcttcggctcccaggggtcgtgggcgggtgggagccctcgctgggccatctcctcggtacaggtcagctgccgccggcggagctcctcatctgtctcctggtccaccaccagcagccgagtctgcccctccacagccttatccttgcaccacctggggtgccctcgtccgaattgccaccc

SEQ ID NO: 318499 - DNA, 1117 bp, Homo Sapiens
  misc_feature (420)..(423): n is a, c, g, or t
cttctttttaagggtaaagggaattttttattaatggggcaaggtaatttaatgggggaaggggaaatttctttcaataaaccgtgtttccaagagaggggacctggttaggggggaaaaaaagaaccctgatccattaattcacaacattcatatcaattcaagggtagatctcaaatataaaaatataaagtttatataatagaggcagaatatctgagatcttggggttaaattggagagaaaaaatatcaaccaaaagaaagaaataaatttggcgttgtcaaaatttaaaacttctattcatcaaaagacataaagaaaacagtcaagccacagactaggtgtaatatctcaatacgtatatcggacaagagacttgcatctagaatgtataaagaatttctatgacccaattannnntagctatcagggatatacaaattaaaacccaaaatgaaacctccactacaccccgattggaatggttaaaaaggaaaaatactgacaacgccaatatttgtaaagacaggaggtaccagaactctcattcattatattcataaattgacaaatataaaaactgctatagtagggcagtcttccttagaaagggattgtgggcatgacagagaacaatattaatctgtccattatattccttaactgtaaaatggagaccatatgttccaccagcttcacttggtaattatgatacatggctattaagagactcaaatgactccatttcatcaactaatatgccctgtcaattctacttctaaagtatcccatgttctatccaatgtcataccactatcataatttgagtgttcataactctctataatatctcaataatctaactggtctcaatgcctgtagtagagattgcagattggctcacccaatgtctgttccctaggaaggctgagaagcttttaaaaaagaccttcatttccctaactcccttgcagctggagttccacctgcaagcagccagaacttggaagtgaggttagtttggttctggcacgtagatgcacttccacaagatttggaaggcgagagtgatgtagaggccagcctcttgtcccttctgttgcttctgtttacc

SEQ ID NO: 318500 - DNA, 2330 bp, Homo Sapiens
catcgaaatccctcttaacatgctactgtatgttccattaacgaagaaagcaaagtgaccaagtagaagtgtataggacaagatagtacctcagcctgggccaaggggagattcaagtaatttatttttttgcagcccagtggcagagagtctcttactcaggttgctaaagggagaatgtaacaagagaattgacatcactcccttcttcaaagcaacaaggcatcttgaaaactcaacttcctggtgaagctctgttgttggtagcaggaattatttcatccatgtgaaaagacagctgagtctgggatgaaaactcttcaaaggaaaacctcccctcaacagtcagaatgaagaacttcagccaacacataatcaaattcacttttggtctatcccagaaatttgcagtgggaagagaggtaggtacagtttcccagcccacagtcattgcttcattccttgtctgatcagatggtagttagaaaagaagctctcctacatccatcttctataccaggaaagaggaagagtggcaaaagcagagtcttgtgccttcaaagattcattctggttctgttgtgggctaaggcatcctgttcccagtatacgcattttgagatcagatagagttgctcttccaggagtcagcacccacgctcatgtccgtctttcagttaaatctccttggtttagtaactcttgtggatttactgcagttaagacagaaacttcatatgattgcctccctgactgcatggtcaccaggtgatgtgtcacatcaggcactgaagacagggaacgtggggatccttcagcaagcacctcatcatcaactcccaggatagaattggtatttggtaggttcaaggactctccaccaaggctgggctgggaattcatagacaccaggtttttactgggtactgaagcctcttcaagcaaactactgcccattagtggctcagcagtttgctcctgctcttgactcccagctgctcccagctgcaggtgatgctttctcatatgcacattcctgcttccactctgagagaaggtcttcccacagacttggcactgatgaggcttctctcctgagtgaaccaccagatgttttcggaggctagaatactcagcaaaggaacggccacatccttgggcttcacaaaggaaaggtttctctcctgtgtggatgcgccggtggttcttcaggtttccagctgtagtaaactgcttaccacagccagactcatggcacataaagggcttctctccattgtgggtcctcatgtgcaccttcagcctctgcagtacatagaagcttttcccacaaccttctgcaggacagatgaaggagcggtcatttcgatgagtcttgaggtggtatttaaagtgagctggccatacaaatgtccggtcacaaccttcaactgtacacttgagcttcttttccacttgaggaaggggcccagaatcttttgactgcccatcaccagaaccaaggtggacattttctccattgctgctggtttttgcattctttgccagttgtgcacgagtagcagcaatcaaactgtcatgggccaactcctgaacccggaggaaccatggaatgctactgtctgtgctctcactggagaggaaatcattccctgaatcttctgcctcatcctgtacaaacactaagtgctcagctgaagagcccagacctgctcttgttaggttaagaagaataaaagaagtgctatcacttggctgtagatcttgcaacaagctagaagactctgaagtggacaaaaactccggggatttctgtacagtctgagctctcgtctcctctccgtctggacccacattcacccgaaggcttctcaaaacagctgaggaagggacctccttggaggagttagaatgatttgtagtatcatctggtaacattagccgactgcattctgaggcttcagtcacgggaaggagggacaagcaagtaatatctttagcttctgattctacaagcccctgtcccaatgggatggacgtattctgaacaaactgtaccaggagctctggtttggattctaactcatctgataacattgattcagcttccaaaacctgtagctattcaggggacaagttcaaatttaattcagagccaatgataccttcctgttatgttcatattcctctaggaaatactatgctcttcccgtaagatgttgtactaggtgggtaatcaatgtaaccttccagttccgggaagccggccggccgtcagtcggtcccgaattccgtccacacacccagtaggccaacagtgattccctata

SEQ ID NO: 318501 - DNA, 2272 bp, Homo Sapiens
  misc_feature (72)..(95): n is a, c, g, or t
ggaagaaaccactaagagagaaacacagggaaatacctacaaaccaccaaaaacagaaacatcgaggaaccnnnnnnnnnnnnnnnnnnnnnnnnaatcgacaaacaaatacgacagcgcccctcaggaagcacaattttcttaaacaaccttcggcaacaatagggcgctaccgtcgatgagactcattcattatgcagatcaaatgggcggtctactgagtgaaacaatcacccaagatctcttgccataatacaagggcttctttttacaacgcggggaagagcggaacgcaagtcctcgtcagtgtggtttggctagtccagtcaaaggcgggggctgacaatctcatttagcacagtcctagattgactcatggcgattctaggacaaggaattagaacccaacacacaaaacttaagttacttatttggtcatagaacctgggatctgaccctgtacagagctgacactaggggcccactcatagagcctggctgcccaccacccctgtctgtaccagcaaggtacagagtagcagacacgggccaagttcagtgacaacttcctgtgaccttcgatttctggctctggggtgtgccacaggcggggatctgtgggaaaaccccattccggtctatcgaggacagcaggccacacgcattctcaggtccccactggtggggagggtgtgtgcactgccatctcagcctttgttctctggcagggaaggcagctggcagaggccgagtcgaggtgggggtcagagagaacttcgggccgtctcatctcctccatatccggaggcatttgtccttcccaccacttgccactctctggccatctggactccagtcaacagcatatacctcatccgcgtggccgggcaggtccatggccagcttctgggccttcacatcccacaccttcagtgtgctgtcactgctgccgctgaccaggagccgactgtcagctgaccacgcaatctggtacacggcagccacgtggccgcgtagggaagccaggtacttgccccgtcctgccatccccacagcttgatggacttgtcaaaggaggcactagccacgatgcgggagtcaggagagaagagcacctggttgatgagagcttggtgtcctgtcatccgagtgagaggctttttgtcctctgctggggaccacaggaataaggtgaagtcgtcggagccagacaccagcctctctggaccctggccccgcacgaggttgtatcggctcagagccctctccttcaactcctgcaaggatccttggaggtcttggggattaactgaggcctcagcaggttcaaaggccccagtgcgcagggcatagtcagtgctgagggccatggtgttcacccagtggccgtggccttgcagagtccggcacagcacaccgtcatgagctctccagactttgatggtgcggtcctgggaggcagagtagagaagcccgtcccctccccaccggagacaggtgaccgactgggtgtgcccggtgaggatgcgctcacagcggcctgcagttgtgtcccagatccgcacactgccatccttggagctgctggccacatagcggcactcagggttcgcatggaggggctcccagctcaggcctgtgatccacttgctgtggccagcgagggtcctgcccacctgcttccctgtgcttgggtcccagaggagaatctggccattcttgcagcctgaggccagcttcttgccatctggagaccaggatatactaaggacccagtgtctgtgtcccttgcatgtgaaatgtggtgtctctgtgctgagatcccagaagcgcacggtggtgtctccagagccactggccaggtactttcccgtagggctgaaggccacagaaatgactgcctcactgtgaccctccaaggagctggtgcagcgagtcacagcccggactctgaagatagcctgtggctggtagatgatgtctaggaccttctctgtctccactgcctgggactccaacgtcttccccagtgaggagacgatctcagcatcgtggacaaagaaagccagtggcaggggatcctcctgggccagtagcgcgttgcacacgagctgcagcctgtccggggtgatgtccacgggcacgtcgaacggggaacccagcagctgcccgccctcatcctggaactgcactagcaaccgctgcacatcgcgcgccaccgcctcgtccgccactgctgccgccatcctgcgtccccacgtggaggagaaag

SEQ ID NO: 318502 - DNA, 602 bp, Homo Sapiens
  misc_feature (520)..(539): n is a, c, g, or t
tcctccacttcaaccacaatcaccccttttttgtcaaaagagtgacgagctcctacagccatcactcctccattcttattcatatgttacctacgatgaatcacatcagtgtcggggccgggaaggtactgcaacatattggcacctcacgggaggctctcaaaatgatccaaagttttttgttgcagcaaaagctcattcagaagtctttgggccatttggctcagcggaggctgtcatgtgccaaggctccgtgggcattcttagctctgcttctggagataagagttcattcctccatcccaacttgttcttccctgcccattcttcctcttcctgccttcactgcacattccgggatcgccatgttctagaacattcatgtctgccttttagccagcagaatgctattctcacatccacaatgggacagctaacagcccccatttatcaaatccctgtcatatgctgtgtcaggcactttatatccctcatccaggaggatgcaaaaacctggtgnnnnnnnnnnnnnnnnnnnngcattttccagacgagccaagggatggctcagaagggtgaaggaactcacccgaattgcacag

SEQ ID NO: 318503 - DNA, 1467 bp, Homo Sapiens
gcagcaaccaataatcaccgttattattaagagcggtttctagtacagagcgcctcagggcacttacaatccccacagaggccagctacccaacatcagagtctgaccagctgggtggtcctgccctgcatccgagagggtgtcgggacactcatccagatggctctgagacagcagcagagctgacaaggaggccccacaagtgagattcctttggcttcaaggtcgcaagtcctgtccttgggcctcctggcctgctgagcctcccaccggctttaccctcagagattgctgcagaagcctgtgtgctggaatgggctgccacatttctaggaaggaacccggggcacatgtagcctggttattcaatgttatcatagacgtgaatcacatcctcgtggttgctgagagcctgaatgagatgtgcggcctgttccaggtcgggctcagccagctgcacctttgagttggggatgaactctagtgcacaggacacagaacacaggcccagggagtccagcttcttcctcacttggtgcagtgaagaggcatcacaaataaatttaaaaacgttcctttcttcttcatcttcagtttccttgacatcctcagctcctgcttcgattgccatctccagggcacgctctaggttcacagccttcttctctctgtcctccacttcaaccacaatcaccccctttttgtcaaaagagtgacgagctcctacagccatcactcctccattcttattcaggatatgtctaatgtctgcttggcacttgtggctactgttagataatgcctcgatgagcagagaagagccaccagggcctcgaccctcatacagcaaataagtgtccttggatttctccattttcagtgctgtctcaatcgttgacttgggcatatgtttgctgcgacacacctctaagatattggccaggttgctgttgtgctcagggttggggcctccttctttcactgccaggcggatgttcaaacagagtttggagaagatgcgactcctttcgacgtccttcggacccttgatgtgcctgactttggaccacttgttgtgcccggcggggacagccgcggtaaagtgcagcgtcctgcccggagcggcaccgcagccccggggctcggggtgggagggccgggggtcgcgcggaggagccgccctgaccccggggcctcgtgccagcaagcatcgggcagcggccctgcttaggctggcagcagcccaagccgacatcggtcccgaccctggggttcaagctgctagcagcagcggccaacgccggcgcgtctcttccactgccggaacaagcagttccggaccccgcggccgcctgtgccggtcacctgagatccaaaggcttgggcccgcccggggcggctcaacagctaatgaccctacactgtccccgcggcacccgggactgggggcccttgatggcgtagcac

SEQ ID NO: 318504 - DNA, 991 bp, Homo Sapiens
  misc_feature (17)..(17): n is a, c, g, or t
  misc_feature (24)..(24): n is a, c, g, or t
  misc_feature (972)..(972): n is a, c, g, or t
ccattacttactttatnccagagngctcccagaatccacagttctggaagagaggggctctaagtctttattggggagaatacccacccaccttccctcactgcagacgatagacacactgagtgtcagggtagggtggcaggttcagctggtacttctttttccagagcagttggcacaaaacgaccccccaggtaatggtagcgaccggtaaactgggttgcagattttttgggggctgtgagggagatgagcaagtctggctggatccctccagcatttcccttctccacgtcccatcctgagggaatgtcgatgctggcaatgggcacagtgagtcccttcaggacactcaggatgctgtggaacggttcccgaacatcgcccttgaagctgaagccaaagatggcatccaccaccagctcatacagttcatcaatcgtcatgggctctgcgggcatttccccaaggaaagggatgtccattttctgacactgggtcaccaatgcagtgaagaggggcttgttaggccttttggggtaatagatggttggctcgtagccaaagagtttgaggtgtcgagcacagaccagaccatctcctccattattccccgggccacagatgaccaggacagtaggggggctcctggacatggacgtggggggatatgccttggcgatggctgtagcacagctcagcccggccagttccataagttggtccacgctgaactggtattcgttaaatagctcctggtccacggcctgggcctcctcctggctcaggtacttcaccaccgtgctcgccatgacctctgagtcccagcggccacccgagttcagccgctgcggtccccaccaggtgggtcccgagcgacaggcgatggtctggcttttgatccgcggcaggcgcgagcccgcaaccagcagcccgaggcccagcagcgcccgcagcctggacatccagctncagagcgcgcgcatcccgg

SEQ ID NO: 318505 - DNA, 478 bp, Homo Sapiens
ttttttttggcatctaacagtccattttcattgtttccaaataccatagcaacctcttgccctttgtgttacccctagagagatggcacccaatccccagggttgctctctgacttccaccattcactgacttttattgccagaggagctcccaggaatccacagttctggaagagaggggctctaagtctttattggggagaatacccacccaccttccctcactgcagacgatagacacactcagtgtcagggtagggtggcaggttcagctggtacttcttttccagagcaggtggcacaaaacgaccccccaggtaatggtagcgaccggtaaactgggttgcagattttttgggggctgtgagggagatgagcaagtctggctggatccctccagcatttcccttctccacgtcccatccttctggatcccagcacctgagggaatgtcgatgctggcaatgggcacagtgcc

SEQ ID NO: 318506 - DNA, 1781 bp, Homo Sapiens
  misc_feature (4)..(7): n is a, c, g, or t
  misc_feature (13)..(13): n is a, c, g, or t
  misc_feature (15)..(16): n is a, c, g, or t
  misc_feature (23)..(23): n is a, c, g, or t
  misc_feature (52)..(57): n is a, c, g, or t
  misc_feature (90)..(323): n is a, c, g, or t
  misc_feature (373)..(503): n is a, c, g, or t
  misc_feature (512)..(513): n is a, c, g, or t
  misc_feature (657)..(657): n is a, c, g, or t
  misc_feature (1779)..(1779): n is a, c, g, or t
gtannnnggaggngnnggagttnaatagaagttcttaaaacaaacttaaggnnnnnnatttgaatacaaccctggatcagaagctaccannnnnnnnnnnnnnnnnnnnnnnnnnnnnnnnnnnnnnnnnnnnnnnnnnnnnnnnnnnnnnnnnnnnnnnnnnnnnnnnnnnnnnnnnnnnnnnnnnnnnnnnnnnnnnnnnnnnnnnnnnnnnnnnnnnnnnnnnnnnnnnnnnnnnnnnnnnnnnnnnnnnnnnnnnnnnnnnnnnnnnnnnnnnnnnnnnnnnnnnnnnnnnnnnnnnnnnnnnnnnnnnnnnnnnnnnntgaatgcagcaccacactgaagcctgagtaacagagtaaaatcctttctnnnnnnnnnnnnnnnnnnnnnnnnnnnnnnnnnnnnnnnnnnnnnnnnnnnnnnnnnnnnnnnnnnnnnnnnnnnnnnnnnnnnnnnnnnnnnnnnnnnnnnnnnnnnnnnnnnnnnnnnnnnnnnnnnnntgctactanngcttctcctgaaagactatttacatataatacttttcaactcacatcaggattgagatttgtgacgagtagaacagaatttcctggtataccactagccccaggaatggccatccttccagtgacagcagaagaggtgattgtnagaggaccaagagctccaggaacagctggaactgatagacctgtagcttgaggaaatccaatggctggggcaaatcccagcagcccctgcatatggtgaagaaattatacccggtgcaccaaaagcagcagctatagggggttcaagggatggctggccatcaccagtaggaaggtctaagcgagtgaagtctctgcttttgtcattattatatttcacattaaggctggtgagcttggagaagtcaatgcgcagagtgcagcatgcattatagatattctggccatccagagccattttggcataatgtgcatttactgggtcagcatactgaagcaaggcttgaaactgattattctttgtaaaggtgataatcttcaagactgtgccaaatttagaaaatatctgatgaagaacttccagggtaacagggtaaaagaggttttcaataattattcgaagcacaggctctgcccaggtaggactgtgccttcattggaaggacctccagaaagggccaggcttcctgattggacggcactgacagcctgcagtgcagcttgggctcgagcttgattaggtagattgtcagtcttaagttctctgtgattggaatactgaatataaacaggctggcttcgaaggtgaggagtaataggagtgtaataattcaccatagtaacggcagcttcctcagaagccatttctaagaaagcctggctttttcctttcaacatcaaaagattagttactttgccaaatggtagacctaatgatatgatctctgcttcggtgacatcacatggaatttttcgaagatggagaacacgggaaggcgaacagggaggtctatctcgtttaaatttcttgctgtcattcccattagctgtagaaggagtagaactattcatggtaaaaggtccgttaatgatgccagaagaaagaagctcatcagatccccgccatccatggcccagatggaggcgcgcacagagcagggactgacgggctaaccgcgagcagaggaagcaggcggcggcagcagggcggttccggggacaagcgagctttggctctgcggagccccggccggtccgaggtggaaggagagtgggaacaggngc

SEQ ID NO: 318507 - DNA, 866 bp, Homo Sapiens
  misc_feature (328)..(328): n is a, c, g, or t
  misc_feature (736)..(736): n is a, c, g, or t
  misc_feature (739)..(739): n is a, c, g, or t
  misc_feature (777)..(779): n is a, c, g, or t
  misc_feature (791)..(791): n is a, c, g, or t
  misc_feature (803)..(803): n is a, c, g, or t
  misc_feature (805)..(805): n is a, c, g, or t
  misc_feature (809)..(809): n is a, c, g, or t
  misc_feature (811)..(811): n is a, c, g, or t
  misc_feature (818)..(818): n is a, c, g, or t
  misc_feature (820)..(821): n is a, c, g, or t
  misc_feature (825)..(825): n is a, c, g, or t
  misc_feature (845)..(845): n is a, c, g, or t
  misc_feature (849)..(849): n is a, c, g, or t
  misc_feature (855)..(855): n is a, c, g, or t
  misc_feature (858)..(858): n is a, c, g, or t
  misc_feature (861)..(861): n is a, c, g, or t
aggtatgtgaggagcagcgctgtgaggaggaagtcttccccctggccatgaactacctggatcgctacctgtcttgcgtccccacccgaaaggcgcagttgcagctcctgggtgcggtctgcatgctgctggcctccaagctgcgcgagaccacgcccctgaccatcgaaaaactgtgcatctacaccgaccacgctgtctctccccgccagttgcgggactgggaggtgctggtcctagggaagctcaagtgggacctggctgctgtgtattgcacatgatttcctggccttcattctgcaccggctctctctgccccgtgaccganaggccttggtcaaaaagcatgctcagacctttttggccctctgttctacagattatacctttgccatgtacccgccatccatgatcgccacgggcagcattggggctgcagtgcaaggcctgggtgcctgctccatgtccggggatgagctcacagagctgctggcagggatcactggcactgaagtgtgtgagtgctgggtagctgggcagcagcctctccattcataaagtagtgctatgccctgagcctccagtagagggaaacctccaaccccaacctggtcccaagtcctggttttcacaaccttggggctttgtggctttttatctcctgccttggtcttggggaagagcaagtatcttgggtggggtgaagggcactggccctagggggtcttttcttgcnaantggtgtctggagtgggggtggggggtttggtgtaaaannngggctgctctanactcccttgcananctcntnctagttntnnaacnaaaacaattctggggcgggngtgncaaccnccnaanttccc

SEQ ID NO: 318508 - DNA, 947 bp, Homo Sapiens
  misc_feature (929)..(929): n is a, c, g, or t
gctggagctggtctgagaggcttccctgaggctctccctgagtgcagcttcgatctgctcctgacaggcccgcaggcagtccacttcagtgccagtgatccctgccagcagctctgtgagctcatccccggacatggagcaggcacccaggccttgcactgcagccccaatgctgcccgtggcgatcatggatggcgggtacatggcaaaggtataatctgtagcacagagggccaaaaaggtctgggcatgctttttgaccaaggcctgtcggtcacggggcagagagagccggtgcagaatgaaggccaggaaatcatgtgcaatcacagcagccaggtcccatttgagcttccctaggaccagcacctcccagtcccgcaactggcggggagagacagcgtggtcggtgtagatgcacagtttttcgatggtcaggggcgtggtctcgcgcagcttggaggccagcagcatgcagaccgcacccaggagctgcaactgcgcctttcgggtggggacgcaagacaggtagcgatccaggtagttcatggccagggggaagacttcctcctcacagcgctgctcctcacatacctccagcatccagtaagccagcatcttccgcatgtgcggcttgatctcccgctgcacgcactggaagtaggaggcgcggggtacgtagcgctcctccaggcggagcaggctctgcaggacacgctggtcccccagcagccgcgggtccggcccggcccggggcgcgtgccgggtgccttcgcaacacagcagctccatactcgggcagcgaacaggcagggcgggagtgcgggctcgcgagtcccaaggcaggcgacgggccggagagcgcggggcgcgggtctggcgcgtggcgctggcactgcgcggcggatccccagcccgcccgccgcacngcgcgcgcgccgaatccc

SEQ ID NO: 318509 - DNA, 996 bp, Homo Sapiens
  misc_feature (15)..(15): n is a, c, g, or t
  misc_feature (642)..(650): n is a, c, g, or t
  misc_feature (980)..(980): n is a, c, g, or t
  misc_feature (989)..(989): n is a, c, g, or t
cagtaggatgatggncctgggccaccagcctaaaccttgcagccttaggaaagacctgtgtcaacaggcttgcctccctctctagacaggggctcagccacctccagggcatccctgctgcattttccctgctggaggatggggcagagggacaatgggagaggagggcatgaccccaccccaggctatagcagctccttggccacaaagatccttttgccagtagcagaagggaggaaaacagcaaccaccagggttaccaccacttgtgggatggccaggaccccattacgtcctcttaaagttgtgctcaaagcaattaataaattaaaatgagccttcagcagcaaagctgtcaatcacacaggagaagctgagcagaaagcaaagcaaagaggaatttatagcttctctggctgaggcctaggcccctccctctaggagcagctgtcagcacggactacataggggcctccaaagtactgagaggagccatctagactattccccctcatatgtgtctatcatgcattaaattttagagggaccccaatccaaatgcaataaccctagaagggacaacacctttagaaggcactagagcattttggcagttgaaaacatgagagcccccagggtgcnnnnnnnnncgttcaaaaggaatgctggtgtatgtatccaattctgtcccatcagcctggcccacccccagctagagttgggaaaggcgctgctggtcagatgcagggaggaggagcttgactagccaccgaaatgcagacatggctggccgggccccttagtgcacactgcggggatgggtaggaccagatcccttgggctttgtgaagggggaacagacgccccttcaggcttagatgtggtgtggttcctggaggcaggaggtgggtggcagcggccctcctctgcttagtggcactccagagggctctccagggctacaggtgtatggctgtganactgttggngtgctgg

SEQ ID NO: 318510 - DNA, 807 bp, Homo Sapiens
gaatgctggtggtatgtatccaattctgtcccatcaagcctgcaccacccccagctagagttggaaaggcgctgctggtcagattcagggaggaggagcttgactagccaccgaaatgcagacatgcctggccggccccttagtgcacaacctggcggggatgggttaggaccagatcccttggcttttgtgaaaaggggggaacccaggaccgcccccttccagggcttaggatttggtggtggttcctggaggcaggggaggtgggtggcagcggcccctcctctgcttagtggccactccagagggcctctccagggctacaggtgtatggctgtgacatctgtaggagtgctggtctggctgggcccttggctgctggagccccggggggctttgggcgctgggctggagctggtctgagaggcttccctgaggctctccctgagtgcagcttcgatctgctcctgacaggcccgcaggcagtccacttcagtgccagtgatccctgccagcagctctgtgagctcatccccggacatggagcaggcacccaggccttgcactgcagccccaatgctgcccgtggcgatcatggatggcgggtacatggcaaaggtataatctgtagcacagagggccaaaaaggtctgggcatgctttttgaccaaggcctgtcggtcacggggcagagagagccggtgcagaatgaaggccaggaaatcatgtgcaatcacagcagccaggtcccaccctcgtgccgaattcgccacccagcctcgctaccttataccgtagggtactgcg

SEQ ID NO: 318511 - DNA, 801 bp, Homo Sapiens
  misc_feature (121)..(131): n is a, c, g, or t
  misc_feature (599)..(613): n is a, c, g, or t
aagaaccaggggggtttaaaggccccacttttccagggggaattcccttggttgccatttttcccccttcctggaagaaatggcgccagaaggggccaaagggaggagggagggccatggnnnnnnnnnnnagggttataggcagctccctgggccaccaaaagatccttttgcccagtaagcaggaaggggaggaaaaacagcaaccacccgggtttaccaccacttgtgggatggccagggaccccattacgtcctcttaaagttgtgctcaaagcaattaataaattaaaatgagccttccagcagcaaagctgtcaatcacacaggagaagctgagcagaaagcaaagcaaagaggaatttatagcttctctggctgaggcctaggcccctccctctaggagcagctgtcagcacgggactacataggggcctccaaagtactgagaggagccatctagactattccccctcatatgtgtctatcatgcattaaattttagagggaccccaatccaaatgcaataaccctagaagggacaacacctttagaaggcactagagcattttggcagttgaaaacatgagagcccccannnnnnnnnnnnnnncgttcaaaaggaatgctggtgtatgtatccaattctgtcccatcagcctggcccacccccagctagagttgggaaaggcgctgctggtcagatgcagggaggaggagcttgactagccaccgaaatgcagacatggctggccgggccccttagtgcacactgcggggatgggtaggaccagatccccc

SEQ ID NO: 318512 - DNA, 1587 bp, Homo Sapiens
  misc_feature (82)..(83): n is a, c, g, or t
  misc_feature (95)..(95): n is a, c, g, or t
  misc_feature (102)..(102): n is a, c, g, or t
  misc_feature (112)..(112): n is a, c, g, or t
  misc_feature (127)..(127): n is a, c, g, or t
  misc_feature (134)..(134): n is a, c, g, or t
  misc_feature (136)..(136): n is a, c, g, or t
  misc_feature (181)..(181): n is a, c, g, or t
  misc_feature (198)..(199): n is a, c, g, or t
  misc_feature (240)..(240): n is a, c, g, or t
  misc_feature (245)..(245): n is a, c, g, or t
  misc_feature (257)..(258): n is a, c, g, or t
  misc_feature (265)..(265): n is a, c, g, or t
  misc_feature (269)..(269): n is a, c, g, or t
  misc_feature (294)..(294): n is a, c, g, or t
  misc_feature (296)..(298): n is a, c, g, or t
  misc_feature (302)..(302): n is a, c, g, or t
  misc_feature (318)..(318): n is a, c, g, or t
  misc_feature (327)..(327): n is a, c, g, or t
  misc_feature (335)..(335): n is a, c, g, or t
  misc_feature (410)..(411): n is a, c, g, or t
  misc_feature (417)..(418): n is a, c, g, or t
  misc_feature (420)..(420): n is a, c, g, or t
  misc_feature (531)..(531): n is a, c, g, or t
  misc_feature (662)..(662): n is a, c, g, or t
  misc_feature (668)..(668): n is a, c, g, or t
  misc_feature (1335)..(1335): n is a, c, g, or t
  misc_feature (1409)..(1411): n is a, c, g, or t
  misc_feature (1413)..(1413): n is a, c, g, or t
  misc_feature (1521)..(1521): n is a, c, g, or t
cagcggcggagtagccaagtggctccgggagcacctgggcttccgcggggggggcggcggcggagggggcagcaagccgggnntcccccagcccnactaccncccccctgcnccctctccggccgcnccccccncnccgcccccggacatcctggccgcctacaggctgcagcgggacgcngacttcgaagacccctnntccggggggtcgtccggctccgccccctcaccacccctttnttttntttacccacgcnncccctcncacnttttttttatttcctttattcgggncnnncccngggcccccgcgccgcngctgatganggatctcngacccccgccaacagcgataggctagctatcctagaagactatgcggacccgtttgatgttcaggagactggcgnncgctcnncnggagcttcaggagccccagagaaggtccctgaaaatgatggctacatggagccctatgaggctcaaaagatgatggccgagatccggggctccaaggagacagcaactcancccttgcctctgtatgacacacccctatgagccagaggaggatgggggcaccccggaaggtgagggggcccctggccccgggagtccgcctgccagaggatgatgagaggccccctgaggagtatgaccanccctgnggagtggaagaaggagcggatttccaaagcctttgcaggagcagccagggattcatgcacatgaagctgtcccgaaccaaggaacacaaatatgtgctgggccagaacagcccgcccttcagcagcgtccctgaaattgtgcaccactatgccagccgcaagctacccattaagggagccgaacacatgtccctgctctaccctgtggccatccggactctttagatgtgaagccagggcactgtgatagacctgtacccagccctgtgcccatcacctggctgagggctgtggctcttgccagggacgtgatctttcaaacctttcttctcctgggatccagtagaagctggagattccttaatttattctaaagggaaagggctcctggggccttggagtaaggggttgtctggagctggggaaagaggaatccctggagagaaaggatagcccctggaggaagggggttccagagctactgggatggtagggagtttcagactggcagctccggctcctttccgaccttagggcagaggtggtgacctccaccaccgcgaccctctccccactgggtccgtgcgaggtagtgcagaattcggccccttggggcgccttaccacctttctgcctccgtccccgacttccaccccagaccgtcggnagctccgcccagagtctggtaagaggtttggggaagacaggcccctgggaagcagccggctttggggggtgggnnnanaaggggaggggctcgggcagagggaactgtgcagtccccaggccgccccggctccgggctagaggcaataaataaacccgatcctgccgggcacagccgcgggcccgngccggcgccgtccccgggctgacgggggagggagcggagaagcgagcgcagattctgcgtataaat

SEQ ID NO: 318513 - DNA, 1038 bp, Homo Sapiens
  misc_feature (171)..(182): n is a, c, g, or t
  misc_feature (832)..(832): n is a, c, g, or t
  misc_feature (861)..(861): n is a, c, g, or t
  misc_feature (863)..(863): n is a, c, g, or t
  misc_feature (894)..(894): n is a, c, g, or t
  misc_feature (945)..(945): n is a, c, g, or t
  misc_feature (952)..(952): n is a, c, g, or t
  misc_feature (968)..(968): n is a, c, g, or t
  misc_feature (973)..(973): n is a, c, g, or t
  misc_feature (976)..(976): n is a, c, g, or t
  misc_feature (979)..(979): n is a, c, g, or t
  misc_feature (981)..(982): n is a, c, g, or t
  misc_feature (984)..(984): n is a, c, g, or t
  misc_feature (989)..(989): n is a, c, g, or t
  misc_feature (1006)..(1006): n is a, c, g, or t
  misc_feature (1018)..(1018): n is a, c, g, or t
  misc_feature (1023)..(1023): n is a, c, g, or t
  misc_feature (1025)..(1026): n is a, c, g, or t
aatcaatacatatttattgagtgcctactgtgtgccaggtgcaccacactagatgcaacggatactaacagtaaataagatacggtccctgccctcagagcttacatttcaacagtttaaagtgcatctcaggtatttcagataacagaagtaattctaccactctcaaannnnnnnnnnnnaatgcaagacacaacacaatcataggccagagttataaaatacaatgttagaaagaaacgtttggtatcattcgtccagatcccattttacagaaaagaaactacaggagtggccatttgcacctatgttctgatttcaagtttggtgttttacccattgccaggcctctcataaaacaatattcagatttgccatgtatatatcaatatccaaacgctggtagtatacctgtgcagttgtctcctgctagacaaggaccatataatttatagcttatttaagtgtccactttctttatcccatcctattctttgtgataaaccagagggatcaggcttaaccaagtgctgaactttggggcaacttcatgccctaggattcaagatggccagcggctacatgccgggtctgcctgccagggccttacttcccattttttgcagttttcctggactgccgggaggcgcggtacaagctttataagcctcaggctgtaagtgaacttgctttctgcattttccagccatgtgccattgaccaggagtgaactcaagtataaattgcaaagggctacttgtcaagatgacaaatatctatcctactgtttcaactatgaacatattctgaaatgccatatgccaggcgccanaccagatactagggacataaatatgaaanantctttgcccctcaggagttatattggttgtnctggaacatttgtagctgaaggaaaatctccaaaaaagatttcaaagaganttaagtnggaatgggtgctgggnatganaanaangnngnaaatncaagggtgagggggaancacagaaattantttancnngggatgaaataa

SEQ ID NO: 318514 - DNA, 897 bp, Homo Sapiens
  misc_feature (8)..(8): n is a, c, g, or t
  misc_feature (19)..(19): n is a, c, g, or t
  misc_feature (44)..(45): n is a, c, g, or t
  misc_feature (55)..(55): n is a, c, g, or t
  misc_feature (842)..(842): n is a, c, g, or t
  misc_feature (844)..(844): n is a, c, g, or t
gcttccangattcacattnaaagagggactggggtccctgatcnnactaatatgncccacctgtgcccagccacgtgaaaggcctgcacttgaacatggctttggttttaagcaacttctctaccctgaccctcctcctgggacagcgtttcgggaggtttcttggcctcactgagagggatgtggcgctgctgtaccctgtcaaggagaaggtattctacagcctgatgagggagagcggctacatgcacatccagtgcaccaagcctgacaccgtaggctctgctctgaatgactctcctgtgggtctggctgcctatattctagagaagttttccacctggaccaatacggaattccgatacctggaggatggaggcctggaaaggaagttctccctggacgacctgctgaccaacgtcatgctctactggacaacaggcaccatcatctcctcccagcgcttctacaaggagaacctgggacagggctggatgacccagaagcatgagcggatgaaggtctatgtgcccactggctttctctgccttcccttttgagctattgcacacgcctgaaaagtgggtgaggttcaagtacccaaagctcatctcctattcctacatggttcgtgggggccactttgcggcctttgaggagccggagctgctcgcccagggacatccgcaagttcctgttcggtgctgggagcgggcaatgacccacccctctccccccgcctgccacctccccccacaagtgccctccaggcttttcttggggaagataccccttttctgaggaatgagtttgcctccgtcccctgcccatgctgggtgccnangctcaccccctcacccctccaggctcactccccaacccccgactccgtgtggt

SEQ ID NO: 318515 - DNA, 1331 bp, Homo Sapiens
  misc_feature (78)..(78): n is a, c, g, or t
  misc_feature (82)..(82): n is a, c, g, or t
  misc_feature (102)..(102): n is a, c, g, or t
  misc_feature (122)..(122): n is a, c, g, or t
  misc_feature (146)..(146): n is a, c, g, or t
  misc_feature (181)..(181): n is a, c, g, or t
  misc_feature (186)..(186): n is a, c, g, or t
  misc_feature (234)..(234): n is a, c, g, or t
  misc_feature (244)..(244): n is a, c, g, or t
  misc_feature (247)..(247): n is a, c, g, or t
gcaattagcttcaaaaaggggaagggcaagagaaagcccaggtgggccaccatagacccttccatcccggttcatggntttntgggtcaatccaagcccctngttccccaggtttctccctngtagaagcgctggggaggagatgnaatgggtgccctgttgtcccagtagagcccatgancgttnggtcagcaggggtcgtccccaggggagaactttccttttccaggggcntccatcctcncanggtatcggaattccgtattggtccagggtggaaaacttctctagaattataggcagccagacccaccagggagaggtcattcagagcagagcctacggtgtcaggcttggtgcactggatgtgcatgtagccgctctccctcatcaggctgtagaataccttctccttgacggggtacagcagctccacatccctctcagtgaggccaagaaacctcccgaaacgctgtcccaggaggagggtcagggtagagaagttgcttaaaaccaaagccatgttcaagtgcaggcctttcacgtggctgggcaccagctgggccatattagtgcagatcagggacccccagtcccctccttgaatgtagaattcctggaagcccagccgcagcatcagcttgtaaaagatcctggcggtggccaccgagttgaaccccttcttggaggatgcctctgagaagccatagccagggatggaagggcagatgacttcaaaaacgtgctcatcgctcaggccatggttcttggggtcagtcaggagtgggatgatcttataaaactcgtagaaagagccgggccagccgtgcaccatcagcaagggcttcggggtatggcctgcgggcagctgggggggcttcacgtggatgaagtggatgtccagcccttcaatcttagtcttgaagtgagggtatctgttgagaatctccacctgcttcttccagtcaaattcattccgccagtaggagatgactttcttcaggtagttggagttgaagccatagtggaagcagctgtcctccaaaggtggggtgaaacggaacttatcgatcctctggtgtaagtcgtggatctcctcatctgacgtttccaccttgaaagggcggatgctgtcgtcctccctggctgcggacctcgtgcctggcccccaccacccatcttcaagtggcaaagtttcctctttgtcccgggagatgaaccagtagatggcaaagcccagcactgaagtgaggaggatttctagccacatggctcggtctcggctcgcaggctccggcggaggcaggcgcgcgatctctcatccctggaat

SEQ ID NO: 318516 - DNA, 2113 bp, Homo Sapiens
  misc_feature (1957)..(1957): n is a, c, g, or t
  misc_feature (2059)..(2059): n is a, c, g, or t
  misc_feature (2088)..(2088): n is a, c, g, or t
tacggtccggaagtttcgggatatcgtcgacccacgcgtcggagagcgggagtgggagtgggaaaggccaggattaagaggccgccgggacgccgcaaggaggcggggaatcggctcggcccgcgccctgccgctgcccggccggctgcaggtggagttcgcggaggtggccatttccacagccgccgccgacgccatcctctccgtggagccgccttccccccggcccgagggcggtgtgtgtggggcgccgggtgcaggcgttctggggctgccggggcctgcagctcgctggcatcccgcggctgcgccccgcgcctcgcccatggctgagggccggctggcgggaggacgacggaggaagagctacgcgagcgccgcgaacttggtggccagacgccgtgcccggggccgtgcggctctcgggccactcggccgcagatcgcaatcgaaccgaaataaaccagaacatcgttcttcaagccaaggacccttgtcatccattagagcggtaatcaagagatcttctcggacttctattcagaagtgaacttcatcgagatagaaggcgcccagagatcaccattgtggcagctgagccactgaggccagcctcgtggtttccaggaaccccagccccaggactgggattttctacatcaatctgcagcagggtcttggaggcctaattgagctgggttcctgctgagctcccaccatcttatgaacaagttataaaagaaatcaaccaagttcaagttaatactacaaataataataatgctgctgctactccaaggcacactattacttctgcaactcagactgacttttcagaagaaatagacaacgatctgcctcaaagttttgttttggtctcgtcagcactacaggcacctctcaagcctcttcagcctttctcagcagtctcgtctggcaatcttccaacaaatgtggcacctttaatcgtctttgatatttctgaagaaccgaattgtccagaaaaccccagtgctacaagatgtccagtgccaaaaccaagatcaaaaagcaacctcagaccaatacccagagattctcacattaaagagcaaagtcaacagaaaatcagcccagcagccgtaggagaggagtcatccccaggccggccccagtctctgctggacaacgctagcacctcagacagtcaggcagtgatgaacattatgaacacagaacaaagccaaaatagtattgtttccagaattaaagtgtttgagggtcagacaaacatagaaacctcaggactgcccaagaaaccagaaattactccacgttcacttcctccaaagcctactgtttcctcagggaaaccttctgtagctcccaaaccagctgctaacagagcttcttggagagtgggactctgggactgagaacagactcaaggtgacctccaaggaaggactcaccccataccctcccctgcaagaagcgggaagcatcccagtaaccaaacctgaattgccaaagaaaccaaaccctggccttatacgaagtgttaatcctgagattccgggaagagggcccctggctgagagctctgatagtgggaagaaagtgccaactcctgccccgcggcctttgctgctgaagaaatctgtttcctcagaaaaccccacctacccttcagctccactgaaacctgtcactgttcctccccgactcgcaggggcatcacaagccaaagcatacaagtcactgggagaagggcccccagccaaccccccagttccagttctgcagagcaagcccttggtggacatcgatctcatcagctttgatgatgatgttttgcccaccccatcggggaacctggctgaagaatctgttggttcagagatggttctagatccctttcagctccctggcaaaacagaacccataaaagaacgagcagttcaaccagcacccaccnagaagcccactggtaattcgaaatccagcccaaccagggaaatgtttacatgagggatccacaaagtccaccttcctctccctggctgaaaaacctattggnaaacacttttcagttacagtaatctgggnaaagctcagttaatggtggaggaat

SEQ ID NO: 318517 - DNA, 889 bp, Homo Sapiens
  misc_feature (46)..(63): n is a, c, g, or t
  misc_feature (409)..(409): n is a, c, g, or t
  misc_feature (414)..(414): n is a, c, g, or t
  misc_feature (422)..(422): n is a, c, g, or t
  misc_feature (448)..(448): n is a, c, g, or t
  misc_feature (450)..(450): n is a, c, g, or t
  misc_feature (471)..(471): n is a, c, g, or t
  misc_feature (477)..(479): n is a, c, g, or t
  misc_feature (485)..(486): n is a, c, g, or t
  misc_feature (490)..(490): n is a, c, g, or t
  misc_feature (492)..(492): n is a, c, g, or t
  misc_feature (494)..(494): n is a, c, g, or t
  misc_feature (497)..(498): n is a, c, g, or t
  misc_feature (502)..(502): n is a, c, g, or t
  misc_feature (505)..(505): n is a, c, g, or t
  misc_feature (512)..(512): n is a, c, g, or t
  misc_feature (525)..(525): n is a, c, g, or t
  misc_feature (529)..(530): n is a, c, g, or t
  misc_feature (533)..(537): n is a, c, g, or t
  misc_feature (540)..(542): n is a, c, g, or t
  misc_feature (545)..(546): n is a, c, g, or t
  misc_feature (550)..(552): n is a, c, g, or t
  misc_feature (554)..(555): n is a, c, g, or t
  misc_feature (557)..(558): n is a, c, g, or t
  misc_feature (562)..(562): n is a, c, g, or t
  misc_feature (564)..(567): n is a, c, g, or t
  misc_feature (569)..(572): n is a, c, g, or t
  misc_feature (576)..(579): n is a, c, g, or t
  misc_feature (583)..(585): n is a, c, g, or t
  misc_feature (587)..(591): n is a, c, g, or t
  misc_feature (595)..(595): n is a, c, g, or t
  misc_feature (600)..(600): n is a, c, g, or t
  misc_feature (604)..(606): n is a, c, g, or t
  misc_feature (608)..(608): n is a, c, g, or t
  misc_feature (613)..(615): n is a, c, g, or t
  misc_feature (619)..(620): n is a, c, g, or t
  misc_feature (622)..(622): n is a, c, g, or t
  misc_feature (636)..(638): n is a, c, g, or t
  misc_feature (654)..(710): n is a, c, g, or t
  misc_feature (725)..(725): n is a, c, g, or t
  misc_feature (728)..(728): n is a, c, g, or t
  misc_feature (732)..(732): n is a, c, g, or t
  misc_feature (741)..(741): n is a, c, g, or t
  misc_feature (746)..(746): n is a, c, g, or t
  misc_feature (749)..(750): n is a, c, g, or t
  misc_feature (756)..(756): n is a, c, g, or t
  misc_feature (761)..(761): n is a, c, g, or t
  misc_feature (763)..(764): n is a, c, g, or t
  misc_feature (768)..(768): n is a, c, g, or t
  misc_feature (782)..(782): n is a, c, g, or t
  misc_feature (784)..(784): n is a, c, g, or t
  misc_feature (786)..(786): n is a, c, g, or t
  misc_feature (789)..(789): n is a, c, g, or t
  misc_feature (805)..(805): n is a, c, g, or t
  misc_feature (811)..(811): n is a, c, g, or t
  misc_feature (813)..(814): n is a, c, g, or t
  misc_feature (825)..(825): n is a, c, g, or t
  misc_feature (827)..(827): n is a, c, g, or t
  misc_feature (833)..(834): n is a, c, g, or t
  misc_feature (840)..(840): n is a, c, g, or t
  misc_feature (842)..(842): n is a, c, g, or t
  misc_feature (852)..(852): n is a, c, g, or t
  misc_feature (865)..(865): n is a, c, g, or t
  misc_feature (871)..(871): n is a, c, g, or t
  misc_feature (883)..(883): n is a, c, g, or t
caaaaaaaacccatctttcggtttattgaaggagcagaagggagcnnnnnnnnnnnnnnnnnnaattaaatgcttttgcctcgtttataaagagcgagttttcaggaggtcccttctcaaggaggaggggggcacctctcccccaactacaagcagcagcaaagccaagccaaggaggacagagggaaactggaggggccaagggaccccaaacaccccctcggacaggagccacaagctttctccccccacccacaatgcatctaccccaggggacccatctgggtggaagaagggagtatgtacacagatagaggtggcactgggctgggtcggggagggaataatttatccgcggcagcggtgggtggcaaaggggcagagggcagtagcctggaggcagtggtancctangggtcccnttctttcttaactttgatgtctccancnaggatggtggcgatctcgccntgcatnnnggcccnnggcncngnggnnccgnccngcgggcncttttctccgctngggnngtnnnnntcnnnggnngggnnntnngnntttntnnnntnnnngggnnnngggnnngnnnnnattntgttngggnnngnggggnnntggnngngtgggtgttttttnnngctccctgctccgggnnnnnnnnnnnnnnnnnnnnnnnnnnnnnnnnnnnnnnnnnnnnnnnnnnnnnnnnnttcggccccgctgtnggnctgncttctgctnggcgntgnngggccnccggngnnctgngttggcgctgggcntngnggngctccgggctggcgcncctgcngnncgggcccggcncngcgggnncttggngnttggcccggntcggcccttttcnggcggnctggggggggcncccggg

SEQ ID NO: 318518 - DNA, 2138 bp, Homo Sapiens
  misc_feature (67)..(102): n is a, c, g, or t
  misc_feature (371)..(371): n is a, c, g, or t
  misc_feature (1432)..(1432): n is a, c, g, or t
  misc_feature (1454)..(1455): n is a, c, g, or t
  misc_feature (1493)..(1493): n is a, c, g, or t
  misc_feature (1499)..(1499): n is a, c, g, or t
  misc_feature (1502)..(1502): n is a, c, g, or t
  misc_feature (1504)..(1504): n is a, c, g, or t
  misc_feature (1507)..(1507): n is a, c, g, or t
  misc_feature (1540)..(1540): n is a, c, g, or t
  misc_feature (1556)..(1556): n is a, c, g, or t
  misc_feature (1559)..(1559): n is a, c, g, or t
  misc_feature (1562)..(1563): n is a, c, g, or t
  misc_feature (1565)..(1565): n is a, c, g, or t
  misc_feature (1578)..(1578): n is a, c, g, or t
  misc_feature (1717)..(1717): n is a, c, g, or t
  misc_feature (1737)..(1737): n is a, c, g, or t
  misc_feature (1741)..(1741): n is a, c, g, or t
  misc_feature (1746)..(1746): n is a, c, g, or t
  misc_feature (1792)..(1792): n is a, c, g, or t
  misc_feature (1817)..(1817): n is a, c, g, or t
  misc_feature (1861)..(1861): n is a, c, g, or t
  misc_feature (1934)..(1934): n is a, c, g, or t
  misc_feature (2050)..(2050): n is a, c, g, or t
agtatgcgtctgtggggcgggctgggtggttggcagcggttcacgagcgccgcgtacctctcgaatnnnnnnnnnnnnnnnnnnnnnnnnnnnnnnnnnnnnacgcttgcgtggtatcgcggccccgccggtttgagggcccttccagaagaaggcccactccgggggggccacaggccttttgcagccctggcattgcggcccagccttccatctcagggggatgtgcagggtgagacaggaatgcagggacgttctgcccctaggtcagcctcttcatccgcctgtggtgcttgtcgatggtcaaggttgccctgtccacagttgctgcaacgccatccagggtttggtcttgtctctccagctcactntcggccttcagggccagccccttaatcatcttcaggcatgtgacccatctggtgggaataagcgtctatgtgcgcagacagagttgtctgcgggttcagtcggggagcgtataagttatccgcggcagcgttgggtggcaaaggggcagaggtcagtaccgaggaggcagtggtagcctaggggttccgttctgtgttagctgagatgtctccagcaaggatggtggcgatctcgccttgcataaagccccagggcacggaggagccgaccagcgggcacttgtctccgctcgggcagtacacctccccggccggggccttggccttgatgacttcccgggagcagggaaagcagaacttgtgtccgggcccggaggggcactggacgaagtgggtgtcttccagccgctcccctgcacagggtacagcacaggggggccccaggggtcgccccagtgccgctgccacccccgctgacagcttcggcccccgctgtgggactgacttctgcttcgccgttgcgggccacaaggcgatgctgggttggcggctgggccgtggaggaggctgcagggctggcgccccctgcacgcacaggccccccgcctccgccagggtccttgggtgagtggcccagggcttcggccacattcttcagggcggcaatgggcgagggcacaccaggggtctcagcggagtacgggccgccgggtgccacccagtgccgttgctgctgctcctcggtggtcatcttcccagccgcctcgccctccggctcgggggatgccttgcgacggcgcggcgtgggcgccaggttccgggatggggctcgcgggggtgggccacagagagccgcaggggccggctctgggtactgctggggcagggcctccgcgggagctggctcgcggaagctgcggacgccgtcggtaagcagctcgccccgctgccgccattctcctgatccatgccggcgttcatattcgaggtacttgaagcccgaagaagccagtgccttgcccggctcccgcagagcatcggggaacatctggcgagccacngccaggacgccggcgtacacanngccggaaccacaggggtattcggtgaagagcttcagcncgaacncgnanccnggaggacgggcagtagcatcgaaggcgaacacncgccccaccagcccgnganccnncnggaagcgcacatngaacggggcgcaggcggacagcgccagtagctgttcccgcactgctttggggcgcccgtgccattcctctgcccggcctcgcatggcctcgttcagttctgccagacagtccgcattcctctgctgcttctctttctcnaaatcggagccgaagagggnacgngcagnactcaagccgggtgccagcgtcaggcctcggcttcccaggccaganactgcagctgccagcagcccagggngcatcaagccaggcatggagccaagcaaggcccttcgcgccccntcagccacggcctcctcacggcccagcccattggccaggcgggaccccagagtgtactccagggcgggcgagngcagggggaggcggcctgatgatgtggccctgtcatagcggtcctggcccgacacgccgccgccggtccctgacggctggggctgggcctgcgggggcggcagctggggcccctgntcgctgccgccgccaggtccttggtggccgggtgcttaagggccgggggccctggcgagcggccctcggggagcacgtgggcgcttga

SEQ ID NO: 318519 - DNA, 1108 bp, Homo Sapiens
  misc_feature (385)..(385): n is a, c, g, or t
tcttggtcttcttgggggtggcctccgggtgccagggtacgggcccattcagccccagatgttgcattgccagacctgagcagtttttcctttgcgggggaaggaggttcttgcgccttcggaggcaccaatgcatttttctaccagcctccatcttcttggctgaacttccacttctaaaatgggggataacctctggcatcttggcagatatcaaacgataggccatgtctggctttccaataaaccgctggcggatgctaatttcgtaaggtgagtggaccttgatgtcgtccacgtcttctctttcaaacctgtgcatgagcaaagaactggagtcatgtatttccaacccagacacaaggacgggtgagcctcctggttntaacgtgagactctgttctgtgggaaataacagcaggaatttttatcagtatcccttctttcccaaagggttcacaactggtcatggagacatcttccctgggctttgtttccggtggtgtcttccaaagcttggagctaaagggccaccaagcaggagattccagttctgtcagcaatctgtccgccacctccaggtctgactccatcttgtccaggcctctcatgacgctgtccagctgctggccctggtggtgcaggaccctcgccgtgtcctccaggcgtttctgggatccagccatgagtcccgtcagctcctcgccccgggtccttgggacagatgcgtctgccacggctccaggctgagacagcagcagctccctccagaaatgctcgatgatgctgaagaccacatttcgacttggccgcagggagctgaaccagtgcttggcatggcccttctccaggatggtgatggagctgaagataaaatgtgaagcctccttcttgatctcaactatgctggagagggggaagctgaccagaatctctccagtgctgtcagtcatgaacctgagcgacagcgatgttaatgacagctgtccagtaacccatcgcctcttgggctccaggtagtaggtgcacggccaggtgtggatgcagacatccctgctcatctgttcctgggtctgtgtgcgccaaggtccaggcctcttctgcctct

SEQ ID NO: 318520 - DNA, 1470 bp, Homo Sapiens
  misc_feature (233)..(233): n is a, c, g, or t
acttggggtccccgcccatggtcccccctttttgagcgccatccgcaggaaccatggggccggggttctgtccccagcagccagggacagccaagtggggagccaggcagggtgcaccccttggggaggccccctggtgcaggagccagcccccacagttagcagccccatcccggaggaaaggcccctccggaggggccacaggcttctgcagccctggcactgccgccagnccctccattctcagcgggatgtgcagggtgagaccaggaatgcagggacgttctgccccttaggtcagcctcttcatccgccctgttgtgcttgtcgatggtcaaggttgccctgtccacagctgctgcaacgccatcccagggcttcgtcttgtctctccagctcactctcggcctccagggccagccccttcatcctcctcaggatctgggttagttcctgggtatctgcctcagaaagggctggcaggcttgtctgcaggtgcagtgctgtgccctcctggtctcctgcgggtggctccacggtgcagggtacggcccatcagcccaagatgctgcatgccagactgagcagctcttctctgcgggggaagaggttcttgcgcttttgagcaccaatgcatcttctaacagctccatcttcttgctgaactgcacttctaaaatggggataacctctggcatcttggcagatatcaaaccgataggccatgtctggctttcccaataaaccgctggcggatgctaatttcgtaaggtgagtggaccttgatgtcgtccacgtcttctctttcaaacctgtgcatgagcaaagaactggagtcatgtatttccaacccagacacaaggacggtgagcctccctggtttaacgtgagactctgttctgtgggaaataacagcaggaatttttatcagtatcccttctttcccaaagggttcacaactggtcatggagacatcttccctgggctttgtttccggtggtgtcttccaaagcttggagctaaagggccaccaagcaggagattccagttctgtcagcaatctgtccgccacctccaggtctgactccatcttgtccaggcctctcatgacgctgtccagctgctggccctggtggtgcaggaccctcgccgtgtcctccaggcgtttctgggatccagccatgagtcccgtcagctcctcgccccgggtccttgggacagatgcgtctgccacggctccaggctgagacagcagcagctccctccagaaatgctcgatgatgctgaagaccacatttcgacttggccgcagggagctgaaccagtgcttggcatggcccttctccaggatggtgatggagctgaagataaaatgtgaagcctccttcttgatctcaactatgctggagagggggaagctgaccagaatctctccctcgtgccgaattcgccacccaggcctcgctcctt

SEQ ID NO: 318521 - DNA, 1082 bp, Homo Sapiens
  misc_feature (266)..(543): n is a, c, g, or t
  misc_feature (564)..(564): n is a, c, g, or t
  misc_feature (622)..(623): n is a, c, g, or t
  misc_feature (886)..(1010): n is a, c, g, or t
  misc_feature (1024)..(1024): n is a, c, g, or t
  misc_feature (1029)..(1029): n is a, c, g, or t
  misc_feature (1033)..(1033): n is a, c, g, or t
  misc_feature (1037)..(1037): n is a, c, g, or t
  misc_feature (1039)..(1039): n is a, c, g, or t
  misc_feature (1043)..(1043): n is a, c, g, or t
  misc_feature (1057)..(1057): n is a, c, g, or t
  misc_feature (1059)..(1059): n is a, c, g, or t
  misc_feature (1062)..(1062): n is a, c, g, or t
  misc_feature (1071)..(1071): n is a, c, g, or t
  misc_feature (1073)..(1073): n is a, c, g, or t
tatcctaagtagccccagggtatcccagatggcgtcatggcttcccaaccccacccctgctttcccttttctttttcctaattaattattaatagaatcaagaaaggacaatacaatcaatgaaaaaggataggcccttcccttttccaaagccagtttgggagccatgacagagcagctttgccatggcctccctagcgcaggggatcatctgacgagaggagagagccggccagtgagtcactgtcaacaatgataaatcagannnnnnnnnnnnnnnnnnnnnnnnnnnnnnnnnnnnnnnnnnnnnnnnnnnnnnnnnnnnnnnnnnnnnnnnnnnnnnnnnnnnnnnnnnnnnnnnnnnnnnnnnnnnnnnnnnnnnnnnnnnnnnnnnnnnnnnnnnnnnnnnnnnnnnnnnnnnnnnnnnnnnnnnnnnnnnnnnnnnnnnnnnnnnnnnnnnnnnnnnnnnnnnnnnnnnnnnnnnnnnnnnnnnnnnnnnnnnnnnnnnnnnnnnnnnnnnnnnnnnnnnnnnnnnnnnnnnnnatttaaattaaaaaaattaanaacagtgataaatcctgaggagtctacactgagctagaggacacctagtgtccttccnncacctgtgagaccatagcacagtgtgatcagtgcacaacagaggcacacacaggtgctgctatgaccacagagtagtaaccttctaatcaggaagatgtcttgaactcttccttaaggacatgaggaaaacctgcctgtgctgagctagaggccacaagatgccgctttatacctcatgatcggtgacagcatctctgagcaggtggcctgtaaaacgagggtggatcagtggcaggggttctacatctgggaccgttgaccnnnnnnnnnnnnnnnnnnnnnnnnnnnnnnnnnnnnnnnnnnnnnnnnnnnnnnnnnnnnnnnnnnnnnnnnnnnnnnnnnnnnnnnnnnnnnnnnnnnnnnnnnnnnnnnnnnnnnnnnnnnnntggggccttccaancccanaccnacananattntttgttcaagtgtngnggngcaaggttnangaagctgaa

SEQ ID NO: 318522 - DNA, 1598 bp, Homo Sapiens
  misc_feature (30)..(30): n is a, c, g, or t
ttttttacaaataaagtgttttatttacanggagttgtctctccaggtcccagctccctgccacccccaccccagccccagggagaagagggcggatgccagaggagctggcagaggctgggcaggtcctgagtgggccaggctaggccaagagagaaggcacgaggccctgggcgccccagtcccagggcagaggccaggcctgcctggagaaggcagcacggggtcagctctcaggggtcaggctgggttccacgccgccgcagctctgcttcataagacggtggggcctcataggggtagccccaagaactgtactctggaggaagaatcaaggtgctggtagtgggcactggccccccggagccctctgcaaagtaggggacagtggcacctgttgaaatgcacaagggagggtgcagcgggtgtgaggcagggctgccatcctgagggcagggctccggcgcaccaggcacagaactcaaggtggccagcaggggctgccgctgcgaatggctcttggtggagaggaagacggggtccaagaagtgggggccgccagccgcagcctcagcctcagcctcctcctggggtggtgcggaaggcaccaccaggggtggggccccaggaggcagccccaggcctggccgggggctcactggggcatggttcacagcaatattgccaatgaagaccgggagggtcacagtagcttccggcgccttcagagagacctgtaagtagtagtcgatgtggatgaggctgcagcccggcagggccgactggggcaaggcaggcaccaggatctgctcgtgccactgcgcccgccgccaggctttgacgcccgcaccctccacctccgcaatggtccgtacgtcgtggatccagcgcttggccttataggacactttctgcagcagactggccaccacagggctggtgtccttgcctgactggttctcaacgtcggcatgcagctgcagtgcctgccccaccacatagccgcggagatcagtgctggctgtgaggaccacgctgcccgtcttcaccagcttgtaggagaacttcttggtggcagaggccacgttgggttgctcaatgtctgggatgttgttcaggttcaaggggctcaagatatagaacacgaggctgcacttgtgatccttggaaaaccgtggcgtgtggatggcggccctcacctggtgcacgatcttcccgaaaggaccctcaaaggacgtgggtgcagtggcaggaagcaggaactggaaggggaagctgtgctctccagcgggcaggctccccttgtctgccagcgacagggtactgttgaagtaaccctcctccactacccacgctgtgtcattagccttgttggagaccccgcaggaacctatgcaggtcacccggatggctcggaacggcagcggtgcccccaggcgcacgcgcacggtcccagccaacggctccccggggctgtagacgacgcggccgtggctcaggctgatcttgaagagctgcactcgccccatgccgcggcctcaccggccagccgcgcagcgacgcccccgcccgccgcccgcgagtcccggctccgaggc

SEQ ID NO: 318523 - DNA, 971 bp, Homo Sapiens
gtgtcgtgcgttcttttgccgtagcgtaaacaattcaaatggagttggttggggagggccgtgtttaaatttcttttttgtctgcaaaggagggtggttttatttacagggagtttcctttgccggtccccagtttccttgccccctcccaccccaggccccaggaagaagagggcggatgccagaggagctggcagaggctggccaggtcctgagtggcccaggctagcccaagagagaaggcacgaggccctgggcgccccagtcccagggcagaggccaggcttgcctggagaaggcagcacggggtcagctctcaaggggtcaggctggggttccacgccgccgcagctctgttcataaggcggtggggtttctgggggaagaaagcggggtcataggggtagccccaagaactgtactttggaggaagaatcaagttgctggtagtgggctctggccccccggagccctctgcaaagtaggggacagtggcacttgttgaaatgcacaagggagggtgcagcgggtgtgaggcagggctgccatcctgagggcagggctccggcgcaccaggcacagaactcaaggtggccagcaggggctgccgctgcgaatggctcttggtggagaggaagacggggtccaagaagtgggggccgccagccgcagcctcagcctcagcctcctcctggggtggtgcggaaggcaccaccaggggtggggccccaggaggcagccccaggcctggccgggggctcactggggcatggttcacagcaatattgccaatgaagaccgggagggtcacagtagcttccggcgccttcagagagacctgtaagtagtagtcgatgtggatgaggctgcagcccggcagggccgactggggcaaggcaggcaccaggatctgctcgtgccactgcgcccgccgccctcgtgccgaattcgccacccaggcctcgctacct

SEQ ID NO: 318524 - DNA, 2036 bp, Homo Sapiens
  misc_feature (2001)..(2001): n is a, c, g, or t
ggccttgtccataattattactataatgatttacaaaagtttttttcaggcaaccgtgttaaattattgtacatatctgagagagggaggtggggccctggccacagcaaaagtgacgacctctttcttgggtgaggtaagaaaatgtcccccacccccttttaggtctgactccttattaagtggcttcccctcaataaatgatgagcatcaaccctttcccacccagggtgccgagggtagagggaggagcaagtggatgaagtgctctgaaaaggatagtgcagcggctctagccaccgtgcgtcctctgccctggctctgaagggcctgaccctgggctgcacccccttgctggggatggaagaccattcagtactcagccctacaccagggcatctacccaggaagataggaggacagagtgtgaaaggggctgtgtcaccctgtcaggtcacgaacaggaggtggcaatggatgcagtgacacaccagtgggagctgctggctgccccttgcagcccactccccaaactggctacccaggcatccaggcattctggccctggagctcagggaggcagccctgagagtcggagcagggaaccacaggcctagctggccctgccagggggatacccacaacagcctgacatggcgctcaattcccacacgccagctcaaggctcctgtccatgcagctcaatgttacttgtgtgtgcatgtcctgtgtagaggggaaggctgcaggggggcactgctgtgccacccacccaggggttcagggcatgcaggggaccctaagcctagtatacgagccaagaccaaaaagggttaaaggctctgtctcccctccctccccttcgtcccaacatgccccgccctccttgggcactagaaagttttgcgatgaatagcacgggagccatcctcttcatactcctttttggacacccacatcttcttaaaagtgtccagcgaggccaggatggagccgccaatccatgtggagtacagccgttcctgcggggctgagatcttgattttgatatcctttggggcaagcttcttcacttcactgagtaatcggtctccgaagcctttgaaaagcgttgagccacctgagagcacgatgttggcgaacagcgtccggcgcaggtccatgtcggacttgtgtatggcgaaggccaccacctcatggagcccctcactctcatcccccacaaggtccggctggaacagcagctcgggggcccggaatcgtgcaggccccacatcaagcgtgctgccgtctggcaacgtgtactgcaccttctccgtctccagagcctcatccttctgtgggttgatggacaggtagcacgctcgctctttgattgtccggacaacctcaaactcagccgaggtatggaagtcaaccccttccttgcgcagcaggagtcggaggtagcgggagacgtcgcggccggcaatgtccacccgcatgatggagtgaggcatggcaaagccctcatagatgggcacagcatgagtgaccccgtcccctgagtctagaaccactcctgtcgtgtgtcctgttgcgtacagactgagcacagcctgcatggagatgaacagggccggcacgttgaaggtctcaaagaacacctctgccgccttctcccggttcttactcgggttgagcggggcctccgtgaggagcacaggatgctcctccgagaaggtctgcagctgatccttggagtagacgtactgccagatgcgttccatgtcgttccagtctcgcaccacgccgtgctccatggggtagcggatggtcagcagcccccggtgctcctctgcttttggtccgatgaagaggtccccctccagggctccagccatcacccgcatgtgcttcggccgcccgacatagtttgggaaacagtatttgggaatctggtctcctgcaaagccagctttaatcacccccgaaccgttgtcgatgaccacaggctggttngcgatgatgtcgtaggactccatggccgggccgcg

SEQ ID NO: 318525 - DNA, 777 bp, Homo Sapiens
  misc_feature (623)..(623): n is a, c, g, or t
  misc_feature (754)..(754): n is a, c, g, or t
ccagtccttcaataacttcatgctgcgcataggcatgaacaaaggcggggttctggctggggtcatcggagcccggaaaccacactacgacatctggggcaatacagtcaatgtagccagcaggatggagtccacgggggtcatgggcaacattcaggtggtagaagaaacccaagtcatcctccgagagtacggcttccgctttgtgaggcgaggccccatctttgtgaaggggaagggggagctgctgaccttcttcttgaaggggcgggataagctagccaccttccccaatggcccctctgtcacactgccccaccaggtggtggacaactcctgaatggcctcgagcctgcaacagtccaaaccggaagggagaatttattttttgaaactgaaggaagtcccgaccttcctggattgaagtgcacactcatggactttaggtttagaaacctcctcagccttcatttgttcgtggatgtgtgagctctgagggtggccctgctattcctgtgtgtgcctgtagtgtccccagcataggggtcttaggcatagggctgaacagtccttccagagccctcgttccaatccctgccgtccttgcccctgaggggccctgnaccactgtgaggcagggagggtgggcagagctggggacaaagctgccttttgccgctgggcttttccggggactgtgggaggggagcacagggcgggggaagcttccactttcaggacaggggctttggtngggggcagggacatgggttcccc

SEQ ID NO: 318526 - DNA, 1511 bp, Homo Sapiens
ggggggaccggttggtttggttttgaagacgtggatggcgggaattctcgcttctggcctgggtgttttagctcacttggaaaggctagagacccaagtgagcagatcccgtaaacagtctgaagagctgcagagcgtgcaggcccaggaaggtgctcttggaaccaagattcataaactaaggcgtctgcgagatgagctgagggctgtggtgcggcaccggcgagccagccgtgaaagcatgtattgccaatgtagaacccaaccaaacagtggagatcaatgagcaagaagcattggaagagaaattggaaaatgtgaaagccattctgcaggcatatcattttacaggcctcagtggtaaactgaccagccgaggagtttgtgtctgcatcagtactgctttttgaggggaacctattgggattcctattttgtggaccttgtcatacagaaaccactccggatacatcaccattcagtcccagtcttcattcccctggaagagatagctgcaaaatatttacagaccaacatccagcacttcctgttcagtctctgcgagtacctgaatgcttactctgggaggaagtaccaggcagaccggcttcagagtgactttgcagccctcctgactgggcccttgcagagaaacccactgtgtaacttgctgtcatttacttacaaactggatccagggggtcagtccttcccgttctgtgctagattgctgtataaggacctcacagcaactcttcccactgacgtcaccgtgacatgtcaaggagtggaagtattatccacttcatgggaggagcaacgagcatctcatgaaactctgttctgtacgaagcccttgcatcaagtgtttgcctcatttacaagaaaaggagaaaagttggatatgagtctggtctcctaatagattgttttcactgcactgggagcacatcagagaaataaatcccccctcccctgccaggtgaaaggaaatattgcactttctgttctcatgactaaggggacaggagttccagaagaacctttcaagatgatcaggaacaccaggacgagggccgtctcacctcactcggaccacatggagacctcccttcaaaatgggagccatgtcctgccccaccaagccctgtctgaagtggagcttccccgcctgtgctccctccacagtcccggaaagcccagcggcaaaggcagctttgtcccagctctgccaccctcctgctcacagtggtcagggcccctcaggggcaaggacggcagggattggaacgagggctctggaaggactgttcagccctatgcctaagacccctatgctggggacactacaggcacacacaggaatagcagggccaccctcagagctcacacatccacgaacaaatgaaggctgaggaggtttctaaacctaaagtccatgagtgtgcacttcaatccaggaaggtcgggacttccttcagtttcaaaaaataaattctccttccggtttg

SEQ ID NO: 318527 - DNA, 475 bp, Homo Sapiens
  misc_feature (369)..(369): n is a, c, g, or t
  misc_feature (397)..(397): n is a, c, g, or t
  misc_feature (407)..(407): n is a, c, g, or t
  misc_feature (430)..(430): n is a, c, g, or t
  misc_feature (446)..(446): n is a, c, g, or t
  misc_feature (452)..(452): n is a, c, g, or t
ttcaagttgaataaagcttttaataaaacagtcttgttctttatcaatacctgtaaattctcttaaagcagtagcaaaggcgactgtagcaagagctcaaaaggcaaggcaatatcggaaagtgtatttaacagaagattaaaaatataaatgtagaagatctgtttatatatttttctttcagaaataaatcccccctcccctgccaggtgaaaggaaatattgcactttctgttctcatgactaaggggacaggagttccagaagaacctttcaagatgatcaggacaccaggacgagggccgtctcacctcactcggaccacatggagacctcccttcaaaatgggagccatgtcctgccccaccnagccctgtctgaagtggagcttccccgnctgtgctccntccacagtcccggaaagcccagnggcaaaggcagctttntcccanctctgccaacctcctgctcacag

SEQ ID NO: 318528 - DNA, 477 bp, Homo Sapiens
  misc_feature (414)..(414): n is a, c, g, or t
  misc_feature (456)..(456): n is a, c, g, or t
ggcacgagagaaaagttggatatgagtctggtctcctaatagattgttttcactgcactgggagcacatcagagaaataaatcccccctcccctgccaggtgaaaggaaatattgcactttctgttctcatgactaaggggacaggagttccagaagaacctttcaagatgatcaggaacaccaggacgagggccgtctcacctcactcggaccacatggagacctcccttcaaaatgggagccatgtcctgccccaccaagccctgtctgaagtgggagcttccccgcctgtgctccctccacagtcccggaaagcccagcggcaaaggcagcttttgtcccagctttgccaccctcctggttcacagtggttcaggggcccttcaggggaaaaggggacgggcaggggtttnggaacggaggggttttgggaagggatttttcaggccttttgnctaaggacccttatggttggg

SEQ ID NO: 318529 - DNA, 990 bp, Homo Sapiens
  misc_feature (27)..(27): n is a, c, g, or t
  misc_feature (327)..(327): n is a, c, g, or t
  misc_feature (419)..(419): n is a, c, g, or t
  misc_feature (742)..(742): n is a, c, g, or t
  misc_feature (745)..(745): n is a, c, g, or t
  misc_feature (749)..(749): n is a, c, g, or t
  misc_feature (767)..(767): n is a, c, g, or t
  misc_feature (777)..(777): n is a, c, g, or t
  misc_feature (920)..(920): n is a, c, g, or t
aaattatggaaccggatgagcaattgnaacccttcatgaagcactgaaactactgccacctgctcactgcgaaaccctccggtacctcatggcacatctaaagagagtgaccctccacgaaaaggagaatcttatgaatgcagagaaccttggaatcgtctttggacccacccttatgagatctccagaactagacgccatggctgcattgaatgatatacggtatcagagactggtggtggagctgcttatcaaaaacgaagacattttattttaaatttttaatttgaggggaaaagaaatgtttcacagatgaaggaatgtctnatagtaatttaatttgctcctgtagctgcattatttcttgattagaggtttgggcatataaccagattaaagtgaaggaactttctgttgtntttgtagcaccgctcagctgtcttgtaaaacagtgaacacacgctttctggttctagtaatcctgggtgtttatcacgttcagagaaactcaagctattgcatgattagccccctatctggcaaggaaaccccatacagaagaaacaacaaacctgcgcctgcaccgcctctgcgtcctgggtagtctgtgcttgtaatccagcatgtttcacagagtaagcctgttgtgactttgcttttggggtctatgtcattggtttctgatgcttgtacaaacacgcacacacaaatggataaaacagcacctctggctgtcccattnccntaanccatatcacatgcctacntttcacaaangatctctggtttctcttagttcttctctaacatagtactttctttccagcaaaagcaaaatgtgttttcagatttgttactttaataaaggttatccataccaataaaaagtgtacaacacagcattttctgttaaattattnattggttttcagttgtaatttggtattttttctggcatgcgtttattaatttattaaattggcttttaga

SEQ ID NO: 318530 - DNA, 498 bp, Homo Sapiens
  misc_feature (6)..(6): n is a, c, g, or t
ctctgnctttatgtttgtctttatgcttttctgagcttccatctttgtgtttggtcttctccttctctttgtgtttcttttcagaatctttatgttcactgttgctatgcttggacttttcccggtccttctccttcttgtgttctttgtgccggtgttctcgatctttgtgtttatctttgtgtttatgagaatcattcaatcggaaatccgcttcgatctgggaatcgttgtggaggtggtccccactcatgtcggcccggagggacgagcgcggcggcaggcgaggcggcgtgggggagacgcagacggcgaaccggcctgtgcgggcggacggggactccggaggctcgaggaggcgcaggtaagcggcggtgactgtgggcccgagactccagaaacggctgaggctgctaccacggcggcgacgctgcctgactgccgggcgggcggcgagaacagaccccagcagttgtgtaacagcctaagttcgcattt

SEQ ID NO: 318531 - DNA, 940 bp, Homo Sapiens
ttcatggccttttcttctactttatttcatattcccaccacgataacgactcctttaatttaaactaaaaaccatacagggttcctgaaagggtggcaaaaaagaaaggaaaagacaaagactgcaggacaggtgggggagggaatcagcgaatcgtcttgactgggctcttgaagttgctggcggcttggagctgcagctggtaggccatcggatggatcttgaaaccgtagagcctgggcacaaactggttggcaggtctcttgggccggtactcgggatgcaccatgaagagcatgtgagggaaaccagtgccgaagtaggcgccatccgtgtgatggtgtcttgatgacttgggtgtgtacacatccatgcacttggggcagtagagcttcaccatggcttcacctgggatgtctgaaaggccaatgggaagcattggctggttctcacagtacacacgaggacagtaaccaaagtctccttgctggtacttttccaacatctgggcgatgccacggttggtaaggatgtagcgggcgtggatcaatccataaagcatctcggctgcctgctcaatcaggtcactctggttggggttgtcttccagttcttcatcaggctccaggtccaagatcatgtctagagcttgtcgatagtgagggacctgctcattgagtccagtaagattaaatttgtcctggatgtagtcttcatccacttcacagaagaattcattgccacggagcccacagaaccaggaaatccaggacacctcctctgagctgctcatcttcacgtcagcggctggacggggaccaggactggggtggggtagggaagttgctacttccagggaacggcggcgaccgctacagcgcaggccgcggacccgaccgcggcaggcgaagtggggtggggggagtggaccagtaggcca

SEQ ID NO: 318532 - DNA, 1022 bp, Homo Sapiens
  misc_feature (445)..(456): n is a, c, g, or t
  misc_feature (493)..(503): n is a, c, g, or t
  misc_feature (529)..(540): n is a, c, g, or t
  misc_feature (680)..(690): n is a, c, g, or t
  misc_feature (696)..(797): n is a, c, g, or t
gggagaggagggcgtgcccccggcttgtttagttgcataaagcgccggcgatcataaagaggagagtctgttctttgtttcgcgcgctcgtttcttcccaccgcgtgggggggagtattttattccacccgatgtgacccactaggtggggatgaagggcgccgggcggggtatccagtgtttattatcacgaccctctgtgggagtagagttttttcttgggtggggcgggaaagattgtttatataatgtatatcaccctcctccttgttctgcgataaaaggcgaccagagcgcggggggggatatgatacttattatttaggcgctcgcgcgatgggggtccccccttgtgagaaagctcccgggtagaagcccgcgccaaagccccccgtgggggagtgttttgtgtatgaccgcttgggtttcccgccccggcgctggnnnnnnnnnnnnggggagaggaacaaacacgcattgtttatagcggggnnnnnnnnnnngggagaaagccaatggatccccgtgnnnnnnnnnnnnctgtgggggggccgcccgccccaacgaaaagtctgttggaaaaattttttttggggggcgaaggggcccgccccccacaacattactgggtgcggggcggttcgatcaggaagggggtgtggtttgttatttgtgggttnnnnnnnnnnntgggcnnnnnnnnnnnnnnnnnnnnnnnnnnnnnnnnnnnnnnnnnnnnnnnnnnnnnnnnnnnnnnnnnnnnnnnnnnnnnnnnnnnnnnnnnnnnnnnnnnnnnngccttttcttctactttatttcatattcccaccacgataacgactcctttaatttaaactaaaaaccatacagggttcctgaaagggtggcaaaaaagaaaggaaaagacaaagactgcaggacaggtgggggagggaatcagcgaatcgtcttgactgggctcttgaagttgctggcggcttggagctgcagctggtaggccatcggatggatcttgaaacccc

SEQ ID NO: 318533 - DNA, 1536 bp, Homo Sapiens
  misc_feature (825)..(825): n is a, c, g, or t
  misc_feature (830)..(830): n is a, c, g, or t
  misc_feature (832)..(832): n is a, c, g, or t
  misc_feature (835)..(835): n is a, c, g, or t
  misc_feature (837)..(837): n is a, c, g, or t
  misc_feature (840)..(841): n is a, c, g, or t
  misc_feature (844)..(844): n is a, c, g, or t
  misc_feature (850)..(851): n is a, c, g, or t
  misc_feature (853)..(854): n is a, c, g, or t
  misc_feature (859)..(859): n is a, c, g, or t
  misc_feature (862)..(863): n is a, c, g, or t
  misc_feature (873)..(873): n is a, c, g, or t
  misc_feature (881)..(881): n is a, c, g, or t
ccgggttagtggtagaacgggatcttggcctccgtgggcgcgggaccattcgcaggaggaaatttcagttcaagtgctacccggggtctaagctctgtacgtaacactaaaatatgcaggtaaatgttggagttgcccccggtgctgtaggacaaaacttgcatggtcctggtagcctgctctacctacaagagctcctgcttcttcgtgcgcaccggtaatgctcaagggcttctgactagagtgtgtgttcaaactcagtttgcccacaccatctccctgggttagagactgcacagtgtcctcgccctggattgccacggggactcggtaggctggagagccatcagggttcgtcacgaacaccatgaggtcaaagggcattcctggtttgaagtacttgggtgtcttggtgaagtggatctggtagggagaggtcacgatggggatcccgctgcgctctgcctggtccatgtcactgcctgagtgcaagatgacggtggcagacacgtacaaagacttccccaccaggtcttcttctcgggggttctgcaccccgtccagcagtacctttcggctcagcacaaccttccccgagccatcctcaatcggaatgcgcttgagggattcaggcagggaaatcctctgttcgccatcctggatcccgaagatgacaaaggcagttccctccactttcttcccgtagaggaacctggcggtgatggtgacctccaggcccttctcgttatagatgtagtagaatttctctgtaggctccactatgacctcgaaactgggcagcacgtactccttctcttcaaactnagggnanatntnttnngtnccgcanntnncagangannctcgcatctnctcactgncccatgttgacgagttccggaatgtctccaagacaagggcaagatgccaatctggttctgagaagacaaggagtcctgcttgaccgggatgccttccgggttctcaatgttgaccatgaccgtccggcccacgggtagcagcttgtggttaacggtgaagatccgatagagaactgtggagccaggggtgtagatggtcttgtctgtctggatgaagaggtacccgctctgcaggctgaccagcaccaccttctccaccacttgggtcccgaaggtggcctgcacggtcacgaacttgttgcgccccttttctgacttgaactccctgttggctggcgatcgtgaaggtgacgttgcccatgtggttggtggcaggggtcagcacagtcttctcactggacagcactagttttttgcctgggaagtcgtggacagtaacagtgactggaacatccccttgcgcgtcgtgggcctccagcaccatggtctcctcgctctccagccgcaagatgttcggggtgatgatagagtacatgggactccccagagccagggggaggtgggttagtagcaggagcagcaggctgggacctgaggtgggtcccatggtgctgggacagtgcagggtcagagggacagagggacagagggagag

SEQ ID NO: 318534 - DNA, 1044 bp, Homo Sapiens
  misc_feature (3)..(3): n is a, c, g, or t
  misc_feature (17)..(17): n is a, c, g, or t
  misc_feature (20)..(20): n is a, c, g, or t
  misc_feature (27)..(27): n is a, c, g, or t
  misc_feature (63)..(63): n is a, c, g, or t
ctnagtgaagatgacgntgnagacacntacaagacttccccaccaggtttttgctcggggttntcaccccgtccagcattactttcggctcagcacaacctcccccgagccatcctcaatcggaatgcgcttgagggattcaggcagggaaatcctctgttcgccatcctggatcccgaagatgacaaaggcagttccctccactttcttcccgtagaggaaactggcggtgatggtgacctccaggcccttctcgttatagatgtagtagaatttctctgtaggctccactatgacctcgaaactgggcagcacgtactccttcacctcaaactcagtggagaagacctgctgtggtgagttttcatagtaggctcggatcttccactggcccatgttgacgagttccggaatgtcccaagacaagggcaagacgccaagctggttctgagaagacaaggagtcctgcttgaccgggatgccttccgggttctcaatgttgaccatgaccgtccggcccacgggtagcagcttgtggttgacggtgaagatccgatagagaactgtggagccaggggtgtagatggtcttgtctgtctggatgaagaggtacccgctctgcaggctgaccagcaccaccttctccaccacttgggtcccgaaggtggcctgcacggtcacgaacttgttgcgccccttttctgacttgaactccctgttggctgggatcgtgaaggtgacgttgcccatgtggttggtggcaggggtcagcacagtcttctcactggacagcactagttttttgcctgggaagtcgtggacagtaacagtgactggaacatccccttgcgcgtcgtgggcctccagcaccatggtctcctcgctctccagccgcaagatgttgggggtgatgatagagtacatgggactccccagagccagggggaggtgggttagtagcaggagcagcaggctgggacctgaggtgggtcccatggtgctgggacagtgcagggtcagagggacagagggacagagggagag

SEQ ID NO: 318535 - DNA, 1489 bp, Homo Sapiens
  misc_feature (1140)..(1446): n is a, c, g, or t
tagaagcaaaagagcagagctaccatgtcctcttggagcagacagcgaccaaaaagcccagggggcattcaaccccatgtttctagaactctgttcctgctgctgctgttggcagcctcagcctggggggtcaccctgagccccaaagactgccaggtgttccgctcagaccatggcagctccatctcctgtcaaccacctgccgaaatccccggctacctgccagccgacaccgtgcacctggccgtggaattcttcaacctgacccacctgccagccaacctcctccagggcgcctctaagctccaagaattgcacctctccagcaatgggctggaaagcctctcgcccgaattcctgcggccagtgccgcagctgagggtgctggatctaacccgaaacgccctgaccgggctgccctcgggcctcttccaggcctcagccaccctggacaccctggtattgaaagaaaaccagctggaggtcctggaggtctcgtggctacacggcctgaaagctctggggcatctggacctgtctgggaaccgcctccggaaactgccccccgggctgctggccaacttcaccctcctgcgcacccttgaccttggggagaaccagttggagaccttgccacctgacctcctgaggggtccgctgcaattagaacggctacatctagaaggcaacaaattgcaagtactgggaaaagatctcctcttgccgcagccggacctgcgctacctcttcctgaacggcaacaagctggccagggtggcagccggtgccttccagggcctgcggcagctggacatgctggacctctccaataactcactggccagcgtgcccgagggtctctgggcatccctagggcagccaaactgggacatgcgggatggcttcgacatctccggcaacccctggatctgtgaccagaacctgagcgacctctatcgttggcttcaggcccaaaaagacaagatgttttcccagaatgacacgcgctgtgctgggcctgaagccgtgaagggccagacgctcctggcagtggccaagtcccagtgagaccaggggcttgggttgagggtggggggtctggtagaacactgcaacccgcttaacaaataatcctgcctnnnnnnnnnnnnnnnnnnnnnnnnnnnnnnnnnnnnnnnnnnnnnnnnnnnnnnnnnnnnnnnnnnnnnnnnnnnnnnnnnnnnnnnnnnnnnnnnnnnnnnnnnnnnnnnnnnnnnnnnnnnnnnnnnnnnnnnnnnnnnnnnnnnnnnnnnnnnnnnnnnnnnnnnnnnnnnnnnnnnnnnnnnnnnnnnnnnnnnnnnnnnnnnnnnnnnnnnnnnnnnnnnnnnnnnnnnnnnnnnnnnnnnnnnnnnnnnnnnnnnnnnnnnnnnnnnnnnnnnnnnnnnnnnnnnnnnnnnnnnnnnnnnncaaataatcctgccttttacaggtgaaactcggggctgtccat

SEQ ID NO: 318536 - DNA, 1096 bp, Homo Sapiens
  misc_feature (29)..(29): n is a, c, g, or t
  misc_feature (110)..(110): n is a, c, g, or t
aaaagcaaaaaaaagcaagattatgaagnaaactcccaccccttcccaaaactggggctgggcccctggcgaaggtcaacaccctctgaataatgggggtggtgctgggngccccctctggggtcttcgatggcaaagacagggcttccctccgtaggacggcaggacccaccttctggagcatcttggagtttctcttctcctccaccgagttcatgcacttgatcaatctgtagcaccgccacacgcacttgaacatgtagaccttgaagataaggacagtgatgaaggcgatggaaaagatgatcatcatcttgatgaactggttatgaggcatatcctcctggctggggaggtaattcatgtggttcatggacttgaagttgagataggtgggcacttccatgtaggagctgcagagggtcaggatgctcaggcagaagtccagcagctgcagcgtcatcagggggaacttggaggagctagcacggctccgggaggccaacttgaggtaggcgggcagctcaatgtaggagcccagcagggtgagcaggcacaggagatagtccatgatttgcagggacaggaagggcagcaggtacttctcccggttcttgactacgccgatcagtaggctcaggctgatgatgaagagcatggtgatgagcaggaagctggagatcaggtcagcgatcctgaggtagcccatctgggagagcttgcaggacgccttgccatgggccacctctactgagtgctcgatgaacaacaagacgctcatgatatgtcctgtgtcacgtggcccggctggggtgtgaaccctgttgcctctctcctggggtcagggctccccacaaggttgaacttgctcccctgaggctccaggatctctctagccatctgcccacccttccctggcaaccaagccccagccccagccactcagagctcaggagacaagagctggggagcaggaggcctcctccactgcctcactgctgtgtggccctggccaggttctggcttctccctggcctcagctttcgattctggtcaatgagaagagaccctcatttttccctggggccattgggat

SEQ ID NO: 318537 - DNA, 2342 bp, Homo Sapiens
  misc_feature (603)..(612): n is a, c, g, or t
  misc_feature (1061)..(1061): n is a, c, g, or t
ctgactcttttaaattgtatttattcactccccaccaatttgaaaaatcttgtaaattacagagggtttcctagtcattaacatgaattagtaatgctataacttaattcaaaagcaattacttcttaaaaatagggcgcataccaggaaagcttagcatcagccaaagctactagcacaccacgggcaaaaggccaactctgcagggatatgtaaaggtcattttatggataatccatataaaaactgctctcaagatattttgcccattagaatttgtttacaaatggaaatctaatttgatgattttaggcctttgtgctagaatctcacaaccagaaagaataacacctttaatatgaattcttatgatattgtcagaaagtttaacaggagttcattttaactcctgttaaaataatagatgacagtgaaaagaaattcaaagggaaagaaaccatatacgaaaaagctatggggtaacagatgttgagcctacaattaaaaactatttattttaaatgttttcctatgtataagacagaaataccaagcactttctacttttgtgttgtcagaaatcccaggaaaatccagaaatgnnnnnnnnnngtgaaggatagacatgcatcacatgcatctagctggttgactgagaaaacctgagaaatagcactaaaaaggataagatagcattattgcatactaaagaaatatgacaaatacctgcaaacactttttttattgaagctcttgaaataatacaccctgactgtctaacaaaaccagtgctgaaagctgataaatattgacggtggcacctggtgatttccttccagctcagccacagcaatgactctggatgccatcagcactgcccccacaggcatatgctctcctctgggtatgtgggaagttgtgcgactggggaccagattgctgcaggtgctctcaacatcactgggaagagctgccagccaaaggaaaaaaatgaaaaaggagaatgccttcctatgcttttccacagatataatcactatttcatgcctgcaaaacctagnaaaaaaaagaagctcctttgttccagataacctgtcaattcggaattccaaataccattttccttacaggagtagaatatactatatatccatatccatcttcttattgaagccttgatgagattttagcttaaaaggagaatcaggatccagatgctgaatggtgcttcagcaacctcacatgaagtgacttttgggtttgccacatagtctgagtttcttcgttgtgagcagctgggccaggccattgaggaacaccaaaaagatggtcatggacatgacaatcacatagtggctgatgcttgtcccaatatcaagccagctgccataatccttgaccaagaagaaaaaatgcaaagccataatgtctgatatgacgagaacaatgagaaaaaggctttttgacgataactgagtagtcaactgaactgcttcaaaagcacacataacaagaacaaaggggattaaaatcttccacatcatcagggctcccatcataaaaggactgaacacagtcagaaagcaatagacagaggcaagatcaaagctgttaatagaagctatatttccagttccaaaaaatgctgtcactaagaagaaaacaaggaaaaaggccctacggatgtcatccagatatagctgtcgaaactgagttatatcagtattataagagaactggatactggtgagcttttgtttacagcaaacaccagattgttgtagagtttcttgttctatgtttatccagacaaacatcaaacaagacaacactagtggaaagagagcttcataccctgtgcttagaagtaggtaggttgacatcaatgaaagaagtatgctgaacaatcgctgaaagagaactggagaactcagtagtggcacaaccaaggaagaggctaatgttgcccagctaataatttgattcatgagaggcagtccttgcttcctgagtagactactctgagtgctatacacaacatacatggagagcactgtgctcagcacctgtaacagatgtaccaatagctcttcctttataaagctatcttttcttttcatgagagatgttacaacacacagggataacagaagaaccagcaagcctgcacccatcactagagagatgtctggctttcgacctacaaccggcatcagtgggaacactgccaggagcaaagagaagaaagtccaactcagtgaggtcatctttgctcgagtccacagccgagtgagaaatggccaagctgcaaaggcagtaagtccagcggtaagcatatagcg

SEQ ID NO: 318538 - DNA, 1112 bp, Homo Sapiens
  misc_feature (10)..(10): n is a, c, g, or t
  misc_feature (14)..(14): n is a, c, g, or t
  misc_feature (1002)..(1002): n is a, c, g, or t
  misc_feature (1065)..(1065): n is a, c, g, or t
  misc_feature (1073)..(1073): n is a, c, g, or t
  misc_feature (1076)..(1076): n is a, c, g, or t
  misc_feature (1085)..(1085): n is a, c, g, or t
  misc_feature (1097)..(1097): n is a, c, g, or t
  misc_feature (1106)..(1106): n is a, c, g, or t
  misc_feature (1110)..(1110): n is a, c, g, or t
  misc_feature (1112)..(1112): n is a, c, g, or t
tctattatantttnttcccttttccattcatatggtcaaatggtcttcttgcttgttttttttctaaaagacagttttataaatactctgcagctcttttttctttaacttttaaacatataattaatttaataactttgtaaaaggaacttctctcttttaaataaagggctatataaccacacaaataggtcatgtaaacagtgacacgggacccatcgcagggcacactggacccaccctcacgttaagcgcacaaccagcgatttggtcttgttcagtgcaacgggtcaggcctgagtgcacagcccctgggcccagctgcacgcccccagcaccactgcgcccaggctggtggtccacccatcagggccttcaagcccgccctactctcagagcagagcccatctcttcatgctggggtaagctgagctgctcccctggggctaaagagagtgaatccttcccagcccgcgagcctgtggccactcgggagtggagggaacactgggagcgcgtcactggtcggggagacgcgaggcccagcgtgcctgctccttctctctccggctactctctctagtttgttccccacagcaccaactctggactccaagcctgcatggccctgggtacaaaaggggttggggcgacccacgtcaccgccgaactgaccaatcccaacatacaaaacacacgacgacaattacgagatcaaaggggctcagcccggcgcccctggggtacaggttgtgctttgcagggaagagagaagggtggggaagagagggaggaaagagaagagaaggaaacagagggacagggcagccaaattcgccatgtgcctagtggccccgcaaagacccgcctgggcagacgcgcgtccctacgatcgggcatccgtcttggactttactattgtgatgacgctggtggcggccaccttgcctgggacgaggggcccaggccggcggaagggggcccgggctggctgcacggggntgcgggccacgtccgggcgaaggtctgcagccctcgtacttggagcgcgggttcgagctccancttcatgnggngtctctgangcagctttcacntctgctgcncccncn

SEQ ID NO: 318539 - DNA, 993 bp, Homo Sapiens
  misc_feature (413)..(413): n is a, c, g, or t
  misc_feature (729)..(729): n is a, c, g, or t
  misc_feature (757)..(757): n is a, c, g, or t
  misc_feature (905)..(905): n is a, c, g, or t
  misc_feature (953)..(953): n is a, c, g, or t
  misc_feature (959)..(959): n is a, c, g, or t
  misc_feature (975)..(975): n is a, c, g, or t
  misc_feature (979)..(979): n is a, c, g, or t
  misc_feature (987)..(987): n is a, c, g, or t
  misc_feature (991)..(991): n is a, c, g, or t
gggtcaatgattgtttattgaataaatttactactggagtaagaagtggcttagagtccagtgtaacatggtggctgggagtgtgagtggatgaatggggggcccgatataggaactggggcctcggggatgaggccgagttccatcctgccttcttccacgaccatccttaccttcccacccccaccgctcccattctgcagatgagaaaaccgaggctccgaaaggaaaaaccactgcctggattcccacgcctcttctttaactcatttgcaggtgagggcagggaaggaaaatcctagggtcagcattggggagggggggactctcctaaatttattgggcaacaggctgcaggtgagggggctgacaggaggagggtcggggtgtaataacttaaaaaccgtagtgancagcggcacgtcctcaagagacctttgcagaggggagggtgtggggtatttacaaggatttgtacaaagtgccccgcgccacctggggcaggaagtgggggtttgagcgtgaggggacgggaggggaaggaatctgcctctctgacccccactcccagtcccccagattctccagtctttaggctcagcagctctccctgcccctgcccaaggcctaattttgagctgttgggaggaatggaagatttcctcagtttccctccctgcccctgccctgtccccaaagtctcctcaggtgccctcttggtagggcganggaggacaggactggctggaggctccangaaggtgccagctccccccgctgagccccctcatccttcttctgtgctgagcggccccagagaacagcagaggggacaatctttgccccaaatataattcaaggaaactgaggtgatgataaagggagaatccctccctgggcccttnccctcctgtagagtgaaggcgacaagggagaggaaaataagagccctnggacgntgtggctcagagctcnaagncgtttganatgngg

SEQ ID NO: 318540 - DNA, 1077 bp, Homo Sapiens
  misc_feature (1039)..(1039): n is a, c, g, or t
  misc_feature (1054)..(1055): n is a, c, g, or t
  misc_feature (1061)..(1061): n is a, c, g, or t
  misc_feature (1071)..(1071): n is a, c, g, or t
ttaagagtccaagcatttattttattaccaaaaacaatttgttaataaacacgctcaatgcctccaatcctgtccctgaggataatcatgaaagtccttggggttgtagaggaaaccttaagaggaaaatggctacttggttatcaatgccttggctggtgacaaagaaaggacccttgcagggaccagtcacatgccatccttgggcctaaggagcccgaaagatgggaatggatgtgagctaaggatttaatcactgtcaagcagatcttgagggttatggttaagcctgataacagcctctttaacaagaacacacacatccagggatccccttcaaagaaatccagagtcctcaggctccccacaaaatgtagtctggcagaaaagggaagtctttagagtctgcagaatgatgcaaacccaggccagagtggaccacactgctctcggcaccactcctaaaggcatccattggcaacggctgcccactaggggcactgccacttgcctggctcaaacttcaggacctggggaagaaatggtctggctctgcggccttcaaaccatctggatctctggctcctaagctattccttgaagcttttccatgatgccccctgaaggtggctcaggggctgggggaggctcccctggggcttcagacagcacatagtagacaatctcttgctggccttgggcattggtctgattcaccacgtggatgacagaactggggttgtcctgagaggctgagagggctgtcccttcgctacccttgccctcctcttcctcttccttacgtcctggctcccctggcactgtttctagaataatgccctgcaggctgctctcgttcagcgacgttcccaggcccgatccctcttgtggttgccgcagcagttgctgtgtcagctctacactctcgtagcgaaccagctgcagccgcatatagccatcttcatgttccttgtaccgaaaacggggatgccctgagggcacttgaactggtgctcttgcgaagtgcacggtgaggttnttgcccgtgtgaagnnttttanacacatgaanttgtac

SEQ ID NO: 318541 - DNA, 1388 bp, Homo Sapiens
  misc_feature (987)..(1000): n is a, c, g, or t
  misc_feature (1003)..(1299): n is a, c, g, or t
ggcagcacgcccggaccttgtggtacgacaggcccagctgcaagaatgccgatggagtggagttgtacaatgagattgagttctatgccaaagtgaactccaaggactcccaggataagcgctcttcccgctctattacttgttttgtgagaaaatggaaggaaaaggtggcctggccgcggcttaccaaggaggatatcaagccagtgtggctgtctgtggactttgataactggagagactgggaaggggatgaagagatggagctggctcatgtggaacattatgcagagcttttgaagaaggtcagcaccaagagacctccacctgccatggatgatttggatgatgattctgacagtgctgatgatgcaacaagtaattaactttctgtgacgcaaagctgggaaggcagctgtggctattttccagttgttctagaaagctagcgcctaggcctttgtcagcgctttggctgtgcaccaagttcttctgagatctctgaactttcctagaagctctttattaagggtcgtccttcaagcttgtcttcctcctaggcacttgactatggctccacatcagatgcagggtcggggaggggtagactggtagggcttctgatttcttactgattggtttctaatctctgtgtttaggccacttgattatttgagtatgtgtgtgtatgtggcaaaacaaaagccaaagaagaatgcagattatagaaatctctactatgtgtgcatatggggcaaagcaaaaagccaaagaagaaacagattataataaatctctaggaactgttctctgtctgttccccccttggacttatcccccctggtggcaagcctcctccccccctagtaaccaagctggggtgcttcctcttgcccagatttgggctctgatttctcacagctaattctgtcatctctagaaccagccacttcagcttcctgcacactctagaaatctctttatacnnnnnnnnnnnnnnccnnnnnnnnnnnnnnnnnnnnnnnnnnnnnnnnnnnnnnnnnnnnnnnnnnnnnnnnnnnnnnnnnnnnnnnnnnnnnnnnnnnnnnnnnnnnnnnnnnnnnnnnnnnnnnnnnnnnnnnnnnnnnnnnnnnnnnnnnnnnnnnnnnnnnnnnnnnnnnnnnnnnnnnnnnnnnnnnnnnnnnnnnnnnnnnnnnnnnnnnnnnnnnnnnnnnnnnnnnnnnnnnnnnnnnnnnnnnnnnnnnnnnnnnnnnnnnnnnnnnnnnnnnnnnnnnnnnnnnnnnnnnnnnnnnnnnnnnnaaactgattgttactctagttaatgtctatgtttatttgtccaacagctattctatttgtccataaacttttttgagtgcctaatatgt

SEQ ID NO: 318542 - DNA, 1947 bp, Homo Sapiens
  misc_feature (1760)..(1760): n is a, c, g, or t
tttctctatacaaggctgtttatttctgtacaaaaccatgtttctattttacacaaagaacaccccaccctttcccctcacaccagcaccctaaccctggggagcatccccaggaggagggggctgaaggaggccccaccccccaggccctagcttctgcctgccctggctgggccagcctgagtgccactgtaaagaaaataaataaggaggctcaggcagaatctgtgttggaccaggcagaatctgtgttggaccagccagactccagcccagcccagtggccaggcagcttggccctcagagggtgggcaggatgtggaatgtcagttcatgaaccgtgtagttatatggagaccccgccctggaggccttagctgccagggttacaagtaggtgtcctcactctcttgggacgtcaagctctcctgggagcggtggtgggctgagacctggggagccaaatcctgaggggctgagtccttgggggctgagtccttcgggggcacatgctgtgggggacatgcatctcctgcagcggccaccaccatggcttgatttggggctgggggcttctccagctgccctctccccttcatctgtttccgctgctccttctgggcctgcttgggtggcttgggcttggctttggagccagggaggggggcatctaggggcaggcggatggatggtgaaggttgtagggcaggccggggaccaggttctgcatccaagatagccttggcaccatgcagcctgggcggggagcggcactgcagctcaccccgggtctcctgccagcgccgcagctgaatgaggtgttcgcgctcaatctggcgctctgtcatgggcaactccaccacctcctggaccagaaaggcctcctgcatgatcttggggctgaggctccgcagtcgctcgatggtctcgtactggccctggcaggctttgaccttctcaggggagcccagcgcgtgcttcagcagcaccagccccacccggaagatgatcttgaccccttcacagaagaacatgtcccagacacgcagcacagagctccagggcaaggttcgggagaaggcgcacatgaaccattctgtcatataaaggagcgggtcgatcttctgacggctgaggtgcctgtgggccaccggcgacaccttctgcaacagcgagaaaaggatctccccgtccagctggatcgcctccagtttctcgctgtagtagccgggcaggtacttctcacagatctgtaccaggcaccagaaggcttgctcagcaggcatatgcatgagcaagacagcggcaatgggcgcctgggcctggtagtagccctcctcgggccggtacagcgtgtaggccttcagcacacggaataggtcctgctggccgtggcccccccgggacacaaacatctcatggaatgggaactgccggtgcaggtcacgctcaatcacgtccagccacttggggtccccaggggacatgtccagctcgtcaaactttccagggttctgctgtaacttcaccttgcctcctgacaggtactgccaagcacggccccgcagagaaggcgggatgcccttttggcaccgcagacgaatctttttgtgcttcttggccatccatttgtcccagttgttgagcatgtccagccacttggactccctctgcctcagcacctccaggggtacttcctccagcgcgccctcggcgccctgcgagcccacgatgaagccgaacttgtcgatgcggcgctngcgaagccgttggcctccgagtcagacccgagagagctgagttcgtcggtggttgcggcgtcggggccctgggccaggctctcccgggttcccgacaggctttccccggccgcgggcgcgcgcggcccattctctccgttgctcttcgccatcccagccgcgcccgccgcctgagctccagcggcca

SEQ ID NO: 318543 - DNA, 1500 bp, Homo Sapiens
  misc_feature (26)..(26): n is a, c, g, or t
  misc_feature (122)..(122): n is a, c, g, or t
ccgcaagccagttccccttccattcncgcacaatccgtagggggccttcactgatccgcagcagcatcgatgtaccggatgtcaatcttttactttaccatggtctccttcaaggcacatcncgggtcttacaatgttcttggacacaacctgggggtgctctctcggtgccggatgatgctgtgcaggctcttggtgacgtgggtgtccaggctgcgcgtcaggttccagggcttgcagatccagtggttgtcctcgccccacctttcccgctgctggaagtagctgacaatctggggcagctcagtgcgcaggttgaaggttcggggcagccagggtgggccctcggggccacctgcccggcgcgcgatggaggccaggcagtccttgacagtcagcaggttctcgcaggggaactggttcagcagcacgcctggcctctcctggctgagtttcctgtagtccttgaagtgtgagaagttgaagaggatgtcggcgtccgcctcactctgggtgagggtgaagcgcgggtgggtgaggctgctggccacctgctgcacgtccgtgtagaccttgaagatgtggccgtgggggtgcaccacggggttgatgtcaagtggcagcttctccttgttttcctccagaatggcctggtagtgctcggcgggcggctcgggtgtgcaagagctgaggtccagcatgtcggtgggggcccagggcagcagcatgcacttccggatcagggggtccgtctctccgtaggcaaagtctcgggtcacctcctcgccagtgtccaggtccctcaggggccacagcagcgtgtaggccacctgctgcggcatgtagaagaagggtgccgtggcgaagctgggcacgtccgcgtgctggatccgcgaaccgaactcgtccatgatataccacaccggcatcttctcctcagctgtcccatgggccagctggtaggtctggttgaacttccacatctcctccagcaccagggccacagcctctgtactgggcagctcaccgtggaactcaatgcccatcaggttggccatgcggtgcagcagcccgggcacctgctgcagctgtggcgcgcatgctccacacggcacgtccaggcgtggtcgatgaggaagatgctgttggggtgggctgcctggagcccgctctccctggtcacgatgaccttgtagcacagctcgttccccgggttgggctgctgcttccgcacctcccgggctgcctcgtcctcctcctcttctacctcctccacttgcatgatcccaaacacttccccagcgtcgaaaacctcgtgctccagcttgtgcaggaggcggccccagtaacgttcggggacccccgaagcgcgcagcgccgggccgtgcagcgccgcgaactcggccaaggcctgcgcgccctcctccggcgtctggcccgggctgtacgtccgcaggccggcgctcgggaccccgctcggcctccatggcgccagcaccc

SEQ ID NO: 318544 - DNA, 1525 bp, Homo Sapiens
  misc_feature (34)..(34): n is a, c, g, or t
  misc_feature (495)..(495): n is a, c, g, or t
  misc_feature (600)..(600): n is a, c, g, or t
  misc_feature (1469)..(1469): n is a, c, g, or t
gggatgttgggcaccctcaaattaggggaaaatnggggagtacgctctccttccccagggtggaggttactacaatcataagcggggagccggtgcccctgaggaaggagaccctgagggagataagatggaggggctcgggattccggggagccccaagtcccagcttgaaacggtggagtccgggcaaatgagctctgaggacggcttctgggcctggccgtgacccagattgcagtgagagttcccgcagccccgcctctttctgggcctcgtgtctcccagccgccgggccgggtgcgaggccttacccctctgatctgctgcaggatgggcctctccgctgcggccccgttgtggggtcccccggggctgctcctggccatcgccctgcacccagcgctgtcggtgcccccgcgccgggactactgcgtgctgggcgctgggcccgcgggcctgcagatggcctacttcctgcagcgcgctggacgcgantacgcagtgttcgagcgggccccgcggcccggcagcttcttcacacgctacccgcggcaccgcaagctcatcagcatcaacaagcggtacacgggcaaggctaangccgagttcaacctccgcccgactggaactctctgctcagccacgacccccggctgctcttcagacactactcgcgtgcctacttccccgacgcccgcgacatggtgcgctacctgggtgacttcgcggacacgctggggctccgtgtccagtacaacaccaccatcgcccacgtcactctggacaaggaccgacaggcctggaatggccactacttcatcctaactgaccagaagggccaggtgcatcagtgcagcgtcctctttgtagccactggtttatcagtccccaaccaggttgacttccctggctccgaatatgcagagggttacgagtccgtgtccgtggaccctgaggactttgtaggccagaatgtgctgatcctgggtcgtgggaactcggcctttgagacagcagagaacatcttgggtgtcacaaactttatccatatgctcagccgctcccgggtccgtctgtcctgggccacccactacgttggagacctcaggtccctcagacttaactcgggaaatgcattcggcaagaagtacccgctgattcgagctagctacgaatccaaaggaagccggggtctgtttatcctgggtactgccagccactcggtggactaccggaaatctgctgggggcttcatccacggattccgatacacagtgcgtgctgttcaccggctcctggagcaccgccaccacagcgtcacctggcccgccactgagctccccatcacacagctgaccagctccatcgtgcggcgcgtgaatgaggcttctgggctctaccagatgttcggtgtgctggccgatgtcatcctgttgaaaggagaattccacggcctttgagtacctggnaggaggtcccccatacagatgctggcccaactggagacatcacagggagggaagca

SEQ ID NO: 318545 - DNA, 1663 bp, Homo Sapiens
  misc_feature (174)..(174): n is a, c, g, or t
  misc_feature (183)..(183): n is a, c, g, or t
agaagaccaagccccggggctgcaaactgttcccaaccctcccttggggtgcgtctagggttttcacagcttggctcaagccagcttagagtggcacattcacagaatgagatggctgcaccacccaaggctgcggcccaggatcagcgagtccctggccgggcgggccctccnccccgtccnccccgactgacgcccagggtgattttcaggttcttcgtagaccacgtagctgatgctcacagctgggatgaccttcatgaagttgggggccagccccctgtacagcccgaaggccccctcggtccgcaggatatgtttgaagaggctgctcatggtcacctccggagcgccctcaatagaggcttgcgcctgcatccgggtcctgactagggccagggggtagctggccagctggccacaggtactggacatggtgccacaggccaggagcacaaacacgccggggtccgcgctgttcactgcatagtgctgcagccaggcattcttgagcgtctcgtagactgcaaggtcgatgccggcataggggatgatgcccagcatgttggggacatagcctttgtagaaggcggccaccccctctctggccaggatcctcctggcgcagtccagcattcctgagtactggcctgtcttccgcagcgccatccgggtcttcaggacctccattgggtagatgctgctctgggcgatggcccctgccaaggaccctgccacaagcctctcgtgaatcctcagagtctcctggtcactaccaacaaggcgcttgatctgctcataggccatgaatttgatggctgattcgggggcaattttgaggacgttgatgccattgccccgccagagtgacctggcccctccttctcgaatcatctgagtgaagccaccaacgatgcccatgttgttgctgcgggaggcatggacctgcatgagcaccttgagcctgtccaggggggccgtgcaggttctggatacgggcccttggccccacttcctgccaccaggtgtctccacccacatcccggtctgcgtctcttccactgtgaactcatccgggaccgttagattctcacccacatcaaagatcgtggaatgcttccagtagaggatgatctcggggatgttttccacggggtggaggaggtggtagtctctccactcgttccagtcgatggtcatcgtgccgtttttatccatgctcttgagaattttttctgcctgctgttcagatattttgactcccaagtcccgcagggactgcatgatctcctgcgcgtcaatgcgtccatcattttttttgtccaaacttttaaacaccagcctcagcttcttctcatgatcttggagataatggacaaattcttcaaagtctagctgcccatcaaggtccttatctccagcttgtacaattttctagaaaagaaaggtaacattttgtcttttggctcctggaccagcctttccttgtcccttgtggggccccatccccaggcaatgacttcactaattgcgagcagagctggccccaaggacccaagatgcttctgctccactctcagagccaccatggcaatcgacttacatgccagagccaccacctagaaccccaggtgctggccagaacccaggcaagggccaatct

SEQ ID NO: 318546 - DNA, 1001 bp, Homo Sapiens
  misc_feature (50)..(74): n is a, c, g, or t
  misc_feature (172)..(172): n is a, c, g, or t
  misc_feature (387)..(449): n is a, c, g, or t
  misc_feature (559)..(591): n is a, c, g, or t
  misc_feature (665)..(682): n is a, c, g, or t
  misc_feature (713)..(726): n is a, c, g, or t
  misc_feature (950)..(950): n is a, c, g, or t
  misc_feature (981)..(981): n is a, c, g, or t
gcttgtgtttttccttcatataaaaccctgtagaaaataacttctcttannnnnnnnnnnnnnnnnnnnnnnnnccaaagggttatttttctttggcttcaagccccctcccatgacgtgcagggcagggggtgggcatgaggtgaggaggacgcaggaagcctccaccccncgcccctgcctggcaggtcccagattacatgatgctgcagttctgggggctctgggttcgggggctggaagtggccagaagtaagagcggtgaacagattggtcccgagctgcaccccactgcccccaactggggagctggaaggaccgggcactggggccaaaaaccaaggaaggggtccccccccgggtctctaaccccttgcaaaccctttnnnnnnnnnnnnnnnnnnnnnnnnnnnnnnnnnnnnnnnnnnnnnnnnnnnnnnnnnnnnnnnccccccccacctctttcttaagaaccccccgggggggtttagaaaaaagggttttccccccttccctctcgggggccccacaccaccattattgtgggcgccccattttnnnnnnnnnnnnnnnnnnnnnnnnnnnnnnnnnaagagagaacacccccctgtgttttctctccccccaccacaagggtgttttttcctccccacccccaccaggtnnnnnnnnnnnnnnnnnnccggggcctttctttcccccaaaataaacannnnnnnnnnnnnnttcccactttcttttttgttgtgccgtcgccagaaagaagaaaacacttttctttcccttgggtgtcggcaccccgcgccctcaccgccctgtttttgatgtgtatagcaggatacaaaaatttatttttactactaactttatcaccactccctttttctgtgtgcggtgagaggtaaaacattcttacttatccacttctccgtggctttacccaccactgngttccgttacattctggagcgctcagtccangtttatatcactcccgcaat

SEQ ID NO: 318547 - DNA, 1510 bp, Homo Sapiens
ccgaaatttgggtattgctttattttgagacaaagaacattgtataaaaaaactccagttgtagaaatcaggacagacacacagcaacttatatacagatactatacacgtgggccctgccctttaggctacactctaggcagaatgtacacatgggcactgcccttacagctacactctaagaacaggttggcacagcccccctgctggcacagctctggggagtgctgccccaggatgggagagaatgcagtacctggctacaaacttctctgtggcagctccacagatgaggtcttgctgggagatgctgggtcagcccaagcatgctgcctctcctgtacctggcttccaagcaagaaactgtttcttgcttttccttcagtcagttcatctgggcatcctggctctctcctggagggggcatctttgacaagctttgcccatccacgtggccccttccagctcagctcccactgtgccttaagggaccatgcctgcacagcttgtttctttggcttaaaggcaggaatggtgggaaaggactgtctccacttctttctccatccctccgaggtgaaggtggggatggcactgtcgggctggttggcctccttccggttgaaaaccttaatattgacccgttttgaggctgctaggtgatagcttatgcctgtggtgggagtggttcccagggctgggggctctgaaagtggccccaagacaggtttggagtgcctgtccctctcttcagcctgtccctctttaaggccaggtgtggcacacaccttcacggggtttgcagcagcagaagtggaaggagcagcacagtccaggcaagtgggaagaggcgtggggcagcactgtgaccgatgctatgtagaacccgcacctctgggtcatctgctgcaagtctcttctcctgtggattgtcatgggcctgaggactgtgagtgattttgccactgacagtcaccttcaacctcaagcagcggtcttcatgctggtggatgggtttggagatgtagtagtagctgtgtccttctttgaactccttgcccagggtgaaaggtgtgaagcgctggaacttctcagacagcttctccgggccatgcttggcactgggccggttgcactgccagcggacttggtccttggactggggctggcacagctggtactcctcatgctccaccaggtacagtatgtactgctccatggcagcgtctgccacagagtgatcttcatagtgcggacagatgatgtccacgtagtcattcagctgcacatgtatggtgtagtcctcattccggaacttgggatttgaactgttccagaagacggtgtggcgatcagcagcggccagactgcagcacagacccaagagaggggcccagaggaactccatagcgcggggcctggccaggccgagcggggacgcgggtctcctatgggtctgggttcccactggctttctccgcggcgcagtcagcgctgggctcacagatct

SEQ ID NO: 318548 - DNA, 420 bp, Homo Sapiens
tgtaaaaacacattgctttattttgagacaaagaacattgtataaaaaaactccagttgtagaaatcaggacagacacacagcaacttatatacagatactatacacgtgggccctgcctttaggctacactctaggcagaatgtacacatgggcactgcctttacagctacactctaagaacaggttggcacagccccctgctggcacattctggggagtgctgccccagggatgggagagaatgcagtacctgggctacaaacttctctgtgggcagctccacagatgaggtctttgctggggagatgctggggtcagcccaagcatgctgcctctcctgtacctgggggttcccaagcaaggaaactgtttctttgctttttccttccagtcagtttcatctggggcatctgggggt

SEQ ID NO: 318549 - DNA, 691 bp, Homo Sapiens
  misc_feature (635)..(635): n is a, c, g, or t
  misc_feature (657)..(657): n is a, c, g, or t
  misc_feature (670)..(670): n is a, c, g, or t
ttttttttggagtaaatacattttattcagaacaagataataaaatagcgtgcactttatttaaaaccaaccaagcactgataaaaaatatatatcactgcagctgtgattccacatcaaacctgaacagtaagaattgggcatttattcttcacatcatgtgccaagcctggcagagaaggacatccacctccactagagcctcaaaggaaaagtggcccctaaccaccaagacagggtaccctggtggagaggggcagctggcagctcaccctgctctctgcagaccacgtgaagggaaaggagctgcctgtgttcctcccgggctgccggggtgggcactggtcagcaactccttctcggtttcaggttgtggagcgatggggagagaagtgcatgcagttgtgcagacaaggaggcgggtcctccctcctctttcagggtctctgaaacccccacagggcatataatgcccagcaaggtcccacttgcaggcacatgcctacaaagcagcagccatcttttgctttggctgatggggaatcaagattctgagagtgactgctcttttcttgacacaaagcagccacagaacactttcctacatacagtatggcagcaggcaagcagaaggncctgctggctcggattaaaggncttgaaagaggancaaggtaatcctcttccctgg

SEQ ID NO: 318550 - DNA, 1527 bp, Homo Sapiens
gggtggggatggcagtgggaatgaagcacctgtaactgggcccttcctgccctaatgttcagggggccctacccctcgtgagcttgtcttattaagaaccctcaaaaggcctaagttaaccagcaggtccaaaggtcccaaggaacaaggtcagagacgccagggaaaagaggtgagctgtgcaggactagcactgggaaaactggcaatttgtgttgtcaagtgtgtgcctgtgcaagtgctccaactgctgctttgggtgaacttcaggccttgcctcttccctatcaccatcgtctccatcaacaccctctttcttttccagcctctcctggtgccttaggaatcagacgccaataaaccacagagcccagcatgtccaccttcgcttttattgagtagttagtgttctcaagctggctcacacccatgcggtcagctggggcctagggtggctctttgcaaagctgaggggcaagctaaggaagccaggcaggtcaggggccctttcggccttctcaagcctccacctgagttctcgtcaatgccagtctccctggtatgattggggacattatcagagaaacatctaatagcgcacatctgggcacccacactctgcttcagttgcatccatcctcccaccccaaattcaactcctgacccaatacaaaagacttttttaaccaggatttcttcttgcaggaaagctgacttggaaacacggggaggtggcagggaggggcaaaaaggactctggcaagcagatccacttgtctgggtccctgcagtgaagaacccaagatccaggtacctcagcctggaagaaaccgtgcactgcaggtcttcccttctatcaaaactaaaagcaaggaacagaagtcaattgaaaccccaggtcatcctacccaccttctggcagtctctggataatgatctaaggaaataagcttacatttataattagaggataatttggagaatttatactatttacacggaccaccctgcaaagatcagggaaggtaagagactgctgggcagagaatggaaacaggctggggggttcctaatctcttttcaccattgcctttgttgttcccacccttcagctcctggcagggacagcagaggaatcagatactcttggggaacacaaggtcccagcagtggctagggtgtgactgctacttttgcataatcaggcagcagggagctatgaggagcagaacagtccctgcctgctgtcctcactcagaggcttggggtgcactgagccttggagtgcccgggatggtggacagcttgagcacaggggcaagggcagggctctactgtagctcaggaataaactgggaccagttgatgttgtcagggcccagtgggtcctcgtccaggccaggaaagctgatgtccagcaggatcttgctgaggctgtcattcattgtgtccaggaccaggccttctgtcagagaacgattggctgcaaggccagaaacctgtggctccggggagcctggcttgggg

SEQ ID NO: 318551 - DNA, 1505 bp, Homo Sapiens
  misc_feature (1301)..(1301): n is a, c, g, or t
tggtacaggccggagtgtaggatatcgtcgacccccgcgtccgctactcttacatggccatgatacaattcgccatcaacagcactgagaaggaagcgcatgactttgaaagacatctatacgtggattgaggaccactttccctactttaagcacattgccaagccaggctggaagaactccatccgccacaacctttccctgcacgacatgtttgtccgggagacgtctgccaatggcaaggtctccttctggaccattcaccccagtgccaaccgctacttgacattggaccaggtgtttaagccactggacccagggtctccacaattgcccgagcacttggaatcacagcagcagaaacgaccgaatccagagctccgccggaacatgaccatcaaaaccgaactccccctgggcgcacggcggaagatgaagccactgctaccacgggtcagctcatacctggtacctatccagttcccggtgaaccagtcactggtgttgcagccctcggtgaaggtgccattgcccctggcggcttccctcatgagctcagagcttgcccgccatagcaagcgagtccgcattgcccccaaggtgctgctagctgaggaggggatagctcctctttcttctgcaggaccagggaaagaggagaaactcctgtttggagaagggttttctcctttgcttccagttcagactatcaaggaggaagaaatccagcctggggaggaaatgccacacttagcgagacccatcaaagtggagagccctcccttggaagagtggccctccccggccccatctttcaaagaggaatcatctcactcctgggaggattcgtcccaatctcccaccccaagacccaagaagtcctacagtgggcttaggtccccaacccggtgtgtctcggaaatgcttgtgattcaacacagggagaggagggagaggagccggtctcggaggaaacagcatctactgcctccctgtgtggatgagccggagctgctcttctcagaggggcccagtacttcccgctgggccgcagagctcccgttcccagcagactcctctgaccctgcctcccagctcagctactcccaggaagtgggaggaccttttaagacacccattaaggaaacgctgcccatctcctccaccccgagcaaatctgtcctccccagaacccctgaaatcctggaggctcacgcccccagccaaagtaagggggactggatttcagcccagtacaaaccccccagggtgcctctgaccccttgcctgacccccctggnggctgatggatctcagcaccactcccttgcaaagtgctccccccccttgaatcaccgcaaagggctcctcagttcagaacccttagacctcatctccgtccccttttggcaactctttctccctccagatataggacgttccccaagcccgggctccccgggagcccaccgggttttctgggcccttggcagcccaattcgttt

SEQ ID NO: 318552 - DNA, 410 bp, Homo Sapiens
  misc_feature (392)..(392): n is a, c, g, or t
ttttcgtattctcatatttaatagattttaagacttcaaaacgacacaaagaggatcagaacccgtatgtgatatttttgtgcgtcctgtctggtgaccgttggttcaccttatctctgtttccctttcaggtgctgctagctgaggaggggatagctcctctttcttctgcaggaccagggaaagaggagaaactcctgtttggagaagggttttctcctttgcttccagttcagactatcaaggaggaagaaatccagccttccctgatctttgcagggtggtccgtgtaaatagtataaattctccaaattatcctctaattataaatgtaagcttatttccttagatcattatccagagactgccagaaggtgggtaggatgacctgnggtttcaattgacttctg

SEQ ID NO: 318553 - DNA, 2016 bp, Homo Sapiens
ggaagtaaagagaagttgactttattaacagcaaaggtttgggggtggggaacaaacaagtgaaaggctcacaaacagaccactagaaaagtgctttgctgctcacaataatggtgtctgaaccagccctgaatgccctgggactcagtcactgtcactatcagcttcactggaatcagaagctgcagcttcactgccatcctcctgggcggagtgctcgctgccactggggaagggactggcgctgcggctgtggctccggctccgctggccacccccattgctgccgctgtctgaatcattgtcactgccaccttgggcctgtcctctgtcctcatcatcagagtcggcatggtcctcagaatcagcatcactgccaaagatttcctctttgtcacgggcaggccgggcctcatcctcgctgctctggtcctcaccactgccactcttgtcactggcctcgtccctgtcactttcctcccgttcactctcgctgccggagtgctcatcttcactgccctctttctcactgctgctgcccttctcctgctcctcatctgagcccccagcttctttctcttctgtctccatctcctcttcctcttcctcctccggttcgtggttttctagctgggccttccgtgtttcctgagcttccagttccttctcattcatgtcccgatgtttgaccacaagcagggcgttggtgcctgactgaaccccagccttggcccggcgcttactaaggcggaccctggtttccaactcattgtagtaaaccccgtcaccctctcggaagatgaagaagtagttttcctcatagcccttgctagctttgttcttcacgttccagttgtactcccgagcaattttgtagtcatacacatcatctggtgcatagtccatctcctcctcctggtcccgctttcgtttcttcaacgtctcttctacaggcaggaaataggccacaaactggttcccttcctcatccatcatgcccttaatcatggcctgagacatcatctccaacgcagctgcaccactcgtgtccttgggggctgggtctgagtcaaagatcacctgagcacatggattgatccacatcttaaagtcttggaagacaggcatgacctccaccggtgtgactcggggtttgctgtaatgctgtgagattgattttctgggcatcctcaaaagtcttctcaatggctgtgatctggctatccctgtctttgtatatttcttcctcggtaaactgctgcttcacagaaaccccaatcttgacctcaggcttctcattggagatgccataacggttgaactcagtggagatgtactctgtctttcgcatccatggcaccaccttcgcgtgctgctgggatctcttggagctggtgggggcctgaatctcctcttccaaaagtttctcatcagctggatctagaagaacattggggtcgatgcggtaggtgtcaggattgatgagatcgatggtgacccccaggtctggctcagtcaggaggtcatgtttgtgctgtttctccaaggaagtggctttgtactggacgaacctgttctggtcgaaggggtaggtgatgaacttggggtcgaaggggatatcagggaggctattgcagtacttgactcggcagaccactccagacctctcaggcagagtccggtgggaattgggcctgtggccatcctcccgctgggcctgggtctggatggtgggcgccatagcgacgaggcgacggcagcccggacggggtcctagcgggaccgaagggggacgcagaggggcgtgccgacttcaggggacgcctgatccgaggaaggcccagcttggcgccgctccccgcggaaagtgggttgagatgaggtgggcgggcgagaagagctccagcgagactcaggtgaacgcgcaggcagcaccggggacggactcgaagctccggttccaccaactgccgccaagacgctgaggacccctcgtgccgaattcgccacccaggc

SEQ ID NO: 318554 - DNA, 1650 bp, Homo Sapiens
  misc_feature (71)..(71): n is a, c, g, or t
  misc_feature (797)..(797): n is a, c, g, or t
  misc_feature (842)..(842): n is a, c, g, or t
  misc_feature (850)..(850): n is a, c, g, or t
  misc_feature (856)..(856): n is a, c, g, or t
  misc_feature (865)..(865): n is a, c, g, or t
  misc_feature (869)..(869): n is a, c, g, or t
  misc_feature (871)..(871): n is a, c, g, or t
  misc_feature (873)..(874): n is a, c, g, or t
  misc_feature (876)..(878): n is a, c, g, or t
  misc_feature (881)..(881): n is a, c, g, or t
  misc_feature (885)..(885): n is a, c, g, or t
  misc_feature (890)..(890): n is a, c, g, or t
  misc_feature (956)..(956): n is a, c, g, or t
  misc_feature (1055)..(1055): n is a, c, g, or t
  misc_feature (1057)..(1057): n is a, c, g, or t
  misc_feature (1456)..(1456): n is a, c, g, or t
  misc_feature (1488)..(1488): n is a, c, g, or t
  misc_feature (1525)..(1525): n is a, c, g, or t
  misc_feature (1582)..(1582): n is a, c, g, or t
  misc_feature (1589)..(1589): n is a, c, g, or t
  misc_feature (1594)..(1594): n is a, c, g, or t
  misc_feature (1605)..(1605): n is a, c, g, or t
  misc_feature (1640)..(1640): n is a, c, g, or t
aggactgggaaatgacttcccaagctttgcccacttaattagcccacataacaaggcaaaatcacattctntaattctcattttaaaaataaaagatgcctcaaggagattattttgacaatccttagcagatcaaagttctaaaaagctaaaaataactgatttaagttaccctctaaatcaaatatgactaatgctaacaacaacaaaccaaaaccaagaatttccttttaacatgattggtttaacaagcctttgaagaaaaatatttaaaacttgtcttcaagtctactaattgtacggcaatcatttaaaatagtaaaactatttaaatctaaaaaaaatgtagtgtgtggaggtggggagaaaagggatcattaaatgcaatgcaagaacaccaagcagaattaaaataaagaaataatgtaaacaggataagatagcaaaagctttttctaaggaaaactgtttcaaagcatgcagtgtgaaattttgcaatctatcccaaacaatatactgcataggcatcgtctttaaatacacacattttctgtttccaagtactacagataactcataattcctataaaaaattacacaatttaatcaagatggtagtacgtggagattatttccttttagtttattgtttaaatacatgtcttgccaatcacatattttctttttgtagccaaagacataagaaatccctgtatgaatcaaaaagtgcccttcttgcagctttctgtcacaaggctgctgagaaatgtactgtaacagtttaggaaacacaagantgtctcaattttaagtttcaatcattaatcctcttcagaactggnatcacccncttggncagacagtncggncncnngnnngcngagnatggnagctaccccagtcaactggctgagctgttccccagaaacgtgaagactagagaatatcctaacggngcctgcgttctctttcacactgtccaccagcctcacataccggctccgtgtggctacatcctgatgcctgaagagctcatcgctgatgagcaatgtgtngnttgccatggcttcattggccttctccacctgcttgagtccatagaaagctcgatccggttcatgctgtaacattttatagaagtcatccaaggctttgacttccccagcagctttagtgtctgaaaggcggctagccacagtagggtcacaaagggcctctttcagggagtacttgtgtccggaggaggcatgtacctgaagaaatttggaccggttttccaggagcagtttgttgtcggtcttcactgcttgttgaaacaggtagtcgcagaactgctccctcacaaatcctgggctggccaccaggatgcactttacaacatcaaagtgtatgtggcgctggatagcctgggaccactgttcatagaaccgctccaaggcccggtcatgctgagagnattgcctttccttttcctagggatgttcactnccaccttggcccgagtgagggtcatgctgggagtgantaagcagatatgggcgaggcttcctgcatgaccacagcggcacatcagggtccaggngggtcanaggcngctcatgggtncagtacaaatatccatggttttaggcaggtgaatngggttggctc

SEQ ID NO: 318555 - DNA, 1190 bp, Homo Sapiens
  misc_feature (15)..(15): n is a, c, g, or t
  misc_feature (23)..(23): n is a, c, g, or t
  misc_feature (25)..(25): n is a, c, g, or t
  misc_feature (36)..(36): n is a, c, g, or t
  misc_feature (47)..(47): n is a, c, g, or t
  misc_feature (58)..(58): n is a, c, g, or t
  misc_feature (63)..(63): n is a, c, g, or t
  misc_feature (68)..(68): n is a, c, g, or t
  misc_feature (75)..(76): n is a, c, g, or t
  misc_feature (78)..(78): n is a, c, g, or t
  misc_feature (92)..(93): n is a, c, g, or t
  misc_feature (95)..(95): n is a, c, g, or t
  misc_feature (97)..(97): n is a, c, g, or t
  misc_feature (100)..(100): n is a, c, g, or t
  misc_feature (104)..(104): n is a, c, g, or t
  misc_feature (113)..(113): n is a, c, g, or t
  misc_feature (138)..(138): n is a, c, g, or t
  misc_feature (142)..(143): n is a, c, g, or t
  misc_feature (156)..(156): n is a, c, g, or t
  misc_feature (159)..(159): n is a, c, g, or t
  misc_feature (165)..(165): n is a, c, g, or t
  misc_feature (190)..(190): n is a, c, g, or t
  misc_feature (193)..(193): n is a, c, g, or t
  misc_feature (210)..(210): n is a, c, g, or t
  misc_feature (212)..(212): n is a, c, g, or t
  misc_feature (226)..(227): n is a, c, g, or t
  misc_feature (234)..(234): n is a, c, g, or t
catgctcatggctcncccctgtngntccaaaaagcncgaccgggtcngtttaaatttnaaaancatcnaggtttnntnccccagcagtttanntntnaangcgntagccacantaggtcaaaaaggccttttcagganactnngtccgaggagcangtnctgaanaaatttgaccggtttccaggagcanttnttgtcggtcttcactgntnttgaaacaggtagnncagaacnctccctcacaaatcctgggctggccaccaggatgcactttacaacatcaaagtgtatgtggcgctggatagcctggacccacctgtttcatagaaccgctcccaagggcccggtcatgctgagagccaattgccttttcccttttcctagggatgttcaccttccaccttggcccgagtgagggtcatgctgggagtgactaagcagatatgggcgaggccttcctgcatgaccacagccgccacatcagcgctccaggctgggtcacaggcctgctcgatgcgctccagtaccacactatcccactgcttcttggccagggtgaactggcggttgggctccagctcgatggtgtggtaagcccccatcttgacatactcattctcttggatgttggtccccttaacccgcagctggcaggcttgagagtcgaagtcgatggcctccacgcagagagtgagggtagtgcggacccggttgctgcccacgctgcccgtggaggactctgtctgtaccttgcggatggtggaggcgcgcaggctgtcgcccacctgcacgaggttgtaagtgtgccacatgtcctcaggctcctcggggaccagggtcacctggcccgcattgtccttctcgatgttcttcctcacgagcttcatggccaaggaaggggctcactgacagaaccaaaggaaccaaggaggtcctcacctccgccccgggagaggggatgggaatgcaggccaggaagggggcggggcccggtttctaagggcacttgcctggcgggaaggaaacacgcttgcttcgactcatgcagcctagggcagcacttcctctatcctttcctctctcagtctcccggcgcgctgcgtctaacaggctcggggaacactgcagcgaaaatctacccctacacagttcccgctggcagcacgcaacagcgggctgacgaaatgaag

SEQ ID NO: 318556 - DNA, 1739 bp, Homo Sapiens
  misc_feature (71)..(81): n is a, c, g, or t
  misc_feature (428)..(428): n is a, c, g, or t
  misc_feature (458)..(458): n is a, c, g, or t
  misc_feature (886)..(886): n is a, c, g, or t
  misc_feature (1450)..(1450): n is a, c, g, or t
ttcagaccgtctgttagaagacgcgatccccccaaattagggtgggtgtcccggttccacggcgtgttttnnnnnnnnnnngagattaagaggtgtgattttaagaggccccttggtttgggttccagaatatggaaaagccagtaaggtagtcccaaaacctttctgtgttttaaaatctcgccaagggcccaaacaaggggttcccaaatatgtttccaggacccaaaaacctttaaggtgccattttgttctttacaatttaacacaaaatttctgtcctttatacaaaataaggtagggccacagccttaaaggtcattttctcatctaaaacccccccaatttattacccaagatcaatcttcagttttggcagaaagcccttgggcggggaaaactactgaacagtgatgaatggccatacntaattcattgtttggacaatgatgtggagnactgtgtttcaccaaggaagaaaggaccctcccagaggctccgaggctgcaggtcttcagccaggtgacagcactgcacctgctgtgtgcaccctgatggcaacagcagggaagtccacagtcacgatgatagagacagccacagctgccaatcagaagactcgctctttctggttttcatggactgcgttttgcacatcgagctcactgtttagagctgtcctagcactcttctttttttgagacttttgactcattttctttgcgtaactttctctgttgatagatgcgtatggctatggcagtgatgcaaagcaaaataaatatcaccactgctatcacacctccgatgacagcagagtctcttctgtctgcattaaccaagggctctccttcatccgctggtccagaacgacctgcgccccccngcgagtcggggaggccagttcccaagccggggagccagacgccgcaccccgccgtgcagcgggccataggggccacgtggccgcggacgtgtacccgggaggggccgctggggcgcagcgccgccttcaggggagcagcgcggccgaggcgcaccgccgagaggcagccagtgaagccactagtcgccgcccgccttgtgtccgggtccgcgccggcagcctctgaggacagaaggggaacacacagttagggcgcagcggcggagatgggggcgcagggacaccccgcatcttcaagacagcgaccctcgttccttcactccaggagaggtccctccgaacccctcgttccttcactccaggagaggtcaccctgaatctttacctgtttggcaactatttccattgtcagggttatgaaaggcaggtttttaacagatttgttcaagtgcagatggctggctctctgcaagtaacagagcttcataggaaagcagttacatggcataaatttaagaaatcctctgccatttaatttttacaatatagcattaaaataaaatnttaatggcactcacagccaataatccggaggattacagaaaagcgactcttggagatgagggcagagctctggaaatccttcatcctatagttgctattttgtatgatgactttcatattatcttaaataaactgtatcttttgtcatcagataatatccctctttatctcatttaagattcgattatattccagtcttaaattcaatcttatctgaaagtagtgctgcatttcttaaatttatcagctgttgcctgctagttcttggcatgccccttcatttttcaat

SEQ ID NO: 318557 - DNA, 1145 bp, Homo Sapiens
tggtaccggtccggaattccgggatatcgtcgacccacgcgtccggtcaacttgacatagagtggagactttttcaaaatggcttttacatcctaatgaaagtttgggaagtatatcctctctgccttttcatcagtgctttgtggtccagctggcaccctttctgaggtttgtgttttgtgctaaatggttttgtccttaaataggagaggctcaaaaacatcaagatttcaggaaaatggcgacagcgtgcataatggaacccccctgcttctattttgttcttttaattactatttatagccccagttaccttctgaattctgaagtgtatatacctccatgttcctgaaaacaagaaaactcttacttcctgatattccatagactgccttcccaggtgattgagaacatagagaatgttacacatttattttactctaaatgatcttttacccctgttagctaatctttgtgttttcctcaactttattaattacagtgattgcatttttagcatccagttgtaagatgaatatattaaacagctaccagtgttggtgatacctcatccttgaaaggcttagttcatttgtgttttatacttcagtttttccagcatagcagaaaatgccgcttataatttttgtgcacacaaaccttggattcccctgtaaagttgctattgtttcatagcatgcggcactggccttttttcatcctactcattacaggcaaaactcatgtcttatttatgaggattttatagatcattttctgtaacaggtgacaaaagcagaaaagaatgaagaggctgaagtatgaactacccttggagcccatatacatgatataggcaatttcttttgtattttaattcggtcaaaaatactacccacttgatgttttctaatctgatgtgagctcatgttacacagacttttagtaagtaacccgtgactagaaaataaactggatgcttaggagagagtgtcagatgtataagatgctaataaaacctgtttaatattattgttagctgtaagtttttgggaaatactgaacaaattagtccacaatcaagtgtctacttttcccttcactgtagggcctctcccggcacagagcagtctgtttagctgtga

SEQ ID NO: 318558 - DNA, 1568 bp, Homo Sapiens
agggacccaatgcaaccttttaattccaagcagagtccccctcccccagcatggtcacacacacagtggaaagggatgtcagggtctgggcaggagcaatacccagacctgggcaaaaatatagatatcattatatacacacgtggactggaaagaagtcaagctgggggtgtaaggtagggcaggggcaggtgaggaaagcagctgggggggccccaataaattacattcttgagagagcatagtgtgtgggggggtgcgtgggtgtaggtgagagctggtagccaggacactccaaaatgtgccaggcctggcctcttgaccccatccaagggaggcggaaggcccagcttctgcccggtgcctggcttagtgctggaattcccatttcgtggcctggaggcaggtggagggccaggatcgtgtgtaggcggcatctccaccctaagcccaggcttctggggaagccgcaggctggagcaaaaggcttggaagctcggggtttgcgagcggaggtcagggcaagctgaagtggaggggtgacctccctgccggaggtgagctggggcctgttcccactagagtcagaggagcaggaagctgcagtgcaggaaagctgtcaggagtgagtatgggagggctgggtgggcgacacaagagcctggagctctttctgcctggccgcttcccacccctgcatcttccctccagctgttcaagacagccaaccggcctaaccaccaatgcccctcattcctcctcaccctctggggtgaggggcagggagagggcgcaaacatgaactctgtgtgccagagcccagactggctttgccctgtgcagggagggccagggacgagagcaggaggcccccagccttgtgagggggaagaaagtccatagctcactgccggggactgcagaggttttggccccccactctacctgaggaaaggagcccaccctatttccaccccacctcctgcccctcccaacccgccggggaaaaaccctgaagcagcaggggtaagggggccgtcccggagcaggtgggggccatcagaagagagaggccttcttcttgagctcattccgcttccacagagccagcttgccaaactcttcaggggacatggcaaatacccttgagaagtcctcggcagacagatgcctctcaagccgcatccgatccacccccggtggcagcttggttcgccccttgttggtcaccactagcatttcatagggatagatcttctgctccagcacacagggcagggagttcccccggtccatcctccccctctggccctctccgttctgcaggcctgggcttccagtctcactccctgatgggctgaactctgtggactgtagccggctcagggtggtcctgccataggcggggagagaggaagatttagacgttccctggtgcaaggaggtatggaagggtgtccggtcaggcagagagcgggttttccttcggatcggcaatgacttttccatctcttctttcaagatcatctttcccaagttggcctcgtgccgaattcgccacccaggcc

SEQ ID NO: 318559 - DNA, 1842 bp, Homo Sapiens
  misc_feature (382)..(382): n is a, c, g, or t
  misc_feature (805)..(805): n is a, c, g, or t
cgggtaaacaaacagggaaagttcatcttcccatgtgctattgccacctcagaacagactcctgtgtggatggctggaacaacagttggcaacaaatgctctgtataaataattcattaagttacacaatgtttcctttctatacagagaagaactgggcttacattttaagttttgatatagtgcaacaactatgaaacaagactacatccttaggagctatttcttaatagaatacaaagcagtttagtagctttatgttatttcagataatgtaatttttttaatgaaaaattcagaaaggacattctaactttcccaattagttaatttgtactgttgagttttttctctctaaagatttctcagaatcagttcagtnactatactttaaaaagatgagttgctcatctacagtgataactgacaacttagttttgtgattttgcaaatcaagatgcctgggtcatccccacttttgctgattctgaaagatttcttatagaaaaaccctgattcagagtgcatgtgataggagataccaaaatagctgcatctggacagggaggttggctattgagcacagctgattctcagattcctggttcccctctatggtccttttacttactgtagtgatggaaggagagaaggagcgcccgagaatctgttcagattgtgactccagagagctctctgcactgtctccatctcttgcaaagtcctgggacctggaaagaggctggtccatcaatcttcactgtagatgtctcccgcaaagggcaggtgcatgtggctgccagtnacattgggcaatcgagataagtctggcaggctctggatccgggacctgagttctttgcgcaccagggaaactctggctagcttgcgcttgtactcttccaatttatgctctttctctgcaagggcttccttttgataacgaagaaaatctgctaacattcgagtgagttgctttctatcatctatttctgccgccaatctgccattgtaatctgccagcaacatacacgcatcctctaccattttggaaagcctttctccagattctttatctgttattttatctaatagagatacttcttgtacttcaacaggtaaagaagctatcctctgatgaactgctgcatcacctgaggctgcattttccagatcttgtaatgctctaacgagatctagagtctgtggtggttcacttggagatcccagagaggaacagttttcattttcatccacctttatctgttcataagttcgcttcctaggcttcttatcaccatacagagcttgtttaagttgttctaatacatcattttcataaacagacctttcttcccaaatagataacactcttccaaggtgcttcttacaactttcatcagtttcacttgaaacatgcttaaaagcctccactataactggtgcaaaatcttttgtaaactctggccccttcctcttgctgttctgtatgacatcattggctaggtagagaaaagtaagcttcctgtttggtttggctttccgcagctcccgctcccacacggtgacgatgggccgcgagtgtttacggtggtgaatgagccacagggacaaggtctgcacgctctgctgcgagttgctcaactccgacagcttcttctctagcgccgcctcagagaaggctgacatccctccgacaccacgttcacgccgtcccacgcggtggggccgaggggaggagagtttcgccgctcctagctgcggcctcgccccctcaccccacccttccccacgctctcaccacggccgccgcttcatccaagaccggccgcatcccgggaa

SEQ ID NO: 318560 - DNA, 877 bp, Homo Sapiens
  misc_feature (792)..(792): n is a, c, g, or t
  misc_feature (799)..(799): n is a, c, g, or t
  misc_feature (802)..(802): n is a, c, g, or t
  misc_feature (804)..(804): n is a, c, g, or t
  misc_feature (811)..(812): n is a, c, g, or t
  misc_feature (819)..(820): n is a, c, g, or t
  misc_feature (822)..(822): n is a, c, g, or t
  misc_feature (848)..(848): n is a, c, g, or t
  misc_feature (858)..(858): n is a, c, g, or t
  misc_feature (860)..(860): n is a, c, g, or t
  misc_feature (862)..(863): n is a, c, g, or t
  misc_feature (865)..(865): n is a, c, g, or t
  misc_feature (867)..(867): n is a, c, g, or t
  misc_feature (873)..(873): n is a, c, g, or t
ttcaaaaagaacataaaactttattaagaacatcttatactgtcatcagatacagccaaagaagaacgggtaaacaaacagggaaagttcatcttcccatgtgctattgccacctcagaacagactcctgtgtggatggctggaacaacagttggcaacaaatgctctgtataaataattcattaagtaacacaatgtttcctttctatacagagaagaactgggcttacattttaagttttgatatagtgcaacaactatgaaacaagactacatccttaggagctatttcttaatagaatacaaagcagtttagtagctttatgttatttcagataatgtaatttttttaatgaaaaattcagaaaggacattctaactttcccaattagttaatttgtactgttgagttttttctctctaaagatttctcagaatcagttcagtaactatactttaaaaagatgagttgctcatctacagtgataactgacaacttagttttgtgattttggcaaatcaagatgccctgggtcatccccacttttgctgaattctgaaagatttcttatagaaaaaccctgattcagagtgcctgtgataggagataccaaaatagctgcatctggacagggaggttggctatttgagcacagctgattctcagattcctggttcccctctatggtccttttactttctgtagtgatggaaggagagaaggagcgcccgataatctgttcagattgtgactccagacagctctctgcactgtatgtggagaaaagagtnagggctncanancaaaccnnagcagcnntncggctccatgcttttctcttgagggntaaaacaaantncnntnanagatgnatga

SEQ ID NO: 318561 - DNA, 1287 bp, Homo Sapiens
  misc_feature (17)..(24): n is a, c, g, or t
  misc_feature (36)..(37): n is a, c, g, or t
  misc_feature (39)..(39): n is a, c, g, or t
  misc_feature (44)..(45): n is a, c, g, or t
  misc_feature (142)..(142): n is a, c, g, or t
  misc_feature (236)..(245): n is a, c, g, or t
  misc_feature (330)..(330): n is a, c, g, or t
  misc_feature (375)..(375): n is a, c, g, or t
actttacacatcataannnnnnnnttttcccttagnntngtgtnnagcggacacaaaaaaatcccaaggcaggaaaatacaaactggcatatttaatcaaaacaagatcatatgaaataacaagcaaagtgaaatgtctgtnaatggttttaattacagtacaaacaatataaataaagcatcattgagttattgtgaaacataaagttgctgaatgaggtaatagaaaacatccnnnnnnnnnncctaaacccatctgtggatacacccacgctgcccttccatctctatacactgctatttacagaaacagaaaactggctgcaaggngggtgggccttccctgcccctgcctagaaatgcatctcagttgtnacctttgagctgctccggctgccttttaggaaacgcacccctgtggcaggatgagaaccaaattccaagctggcagaagggaagagccagtgcaggagacctgcccccgggacccgtgcgaccctcccctctccaggctgagctcaataagggcctccccagcgctcaggtgctcggggctgagaggggctgcagtttggagaattagatgtatttcagacacaaaaacccagccgtgggagggaaactgatgcttttcaagtctgcaagaaggaattatttctaacgttacagtgctggtccctctccccccgttcttaacgccacgaagcagcttctaaatgcacactttgccacccaccatgcaactgccccacccctctccagccacctgtgtaccctcaaaacagccatgctgagagccctgctgggacccttggggctgggttgggatgggggaggtccctcgtgccaacctgagcagtgcgtgagacccactccccagaccagcccctggctcactcccaacacccttggagccttctctgttctcctaccctgagaacccaggcaggaaatgcatttgcccagggacctccaggaatgtcaggggacaccccagggctgtggtattgggcagggggctgggctgcttccagtgtctgcatgaggcccattaggattccatgcacctggactgtccttcctcaagtccaaaggcccctgacatcctcatgcccagctgctgaccgagtgggcttccagtgtcttctgtttaccaaagctctccaagcggctcagacgttagcttcctgggccagtgtagactgttcagcaccagggagatgagggtttaatggatttaggggcagctgttcccaacagctggtgtgttaagggggtttgctccac

SEQ ID NO: 318562 - DNA, 1084 bp, Homo Sapiens
  misc_feature (19)..(19): n is a, c, g, or t
  misc_feature (357)..(357): n is a, c, g, or t
  misc_feature (364)..(367): n is a, c, g, or t
  misc_feature (371)..(373): n is a, c, g, or t
  misc_feature (375)..(376): n is a, c, g, or t
  misc_feature (388)..(388): n is a, c, g, or t
  misc_feature (391)..(391): n is a, c, g, or t
  misc_feature (399)..(399): n is a, c, g, or t
  misc_feature (401)..(401): n is a, c, g, or t
  misc_feature (405)..(405): n is a, c, g, or t
  misc_feature (409)..(411): n is a, c, g, or t
  misc_feature (420)..(420): n is a, c, g, or t
  misc_feature (435)..(435): n is a, c, g, or t
  misc_feature (1009)..(1009): n is a, c, g, or t
  misc_feature (1045)..(1046): n is a, c, g, or t
  misc_feature (1069)..(1069): n is a, c, g, or t
atgtttttcggaaagggcnctttcccttaccatagctagcaccataccccaagaccaggatgaaataagccagggaaaggagacacatcttattcccttctgggttagtctttgagagggaagtggccaaacttttgtcaccgttccatggtctgaggcttagtgtcttcagaggtttcttcctgtccctgctgcagctgccacatgtcagcatacaccccacctcgggacaacagagcctcgtgtcgtcccctctccacgatgcagccatccttgatgacgaggatctggtcagcattgaccacagttgagagcctgtgtgccactacgatggtggtgcggttggcacagactttnggcagannnncctnnntnnccctctcattanatntatccagngntgangttnnntcatccagnagaatgatgcccggngccttgaggatggtgcgggcaatggcgacgcgctgcttctccccgccgctcagcttcagtccccgctcgcccacctgtgtcctgtacccttcagggaaagccataatggcatcatggatgcctgcagcctgagcagcagcctccacctcatcattcccagctgtgacacggccgtaacggatattgtcggcgatggtgtcattaaaagaggacagtgtcttggggcacaactcccaatgtgagaccggagagaggccctgggtcacctgtgaaatgtcctgcccatctattcggatgcagccagagctgatgtcgtagaagcgaaacagcaggcgcaaaattgtgctcttccctgccccagatgggcccaccagggcaagtgtctgtccaggcatcacagtgaaagacacgtcctgcagagtctcccgcccatcggcatagctgaagtgcacgttctcaaactcaatacggcccttctgaaagcgaaggggcgctgctccaggaaggttcttcacttctgtctctctttcagcaagtcaacatgttctccatgtcaatgaagttggtctggatntcctgtagtaggtgccaaccaattgaggggatgtcnnctggatatgtaggtgcaaagagncatagtcccacctgt

SEQ ID NO: 318563 - DNA, 1143 bp, Homo Sapiens
  misc_feature (299)..(299): n is a, c, g, or t
  misc_feature (357)..(357): n is a, c, g, or t
ccggaattcccgggatgcagttggcagaagggtcccgggcccagagccagcggggccgtgctgagacggcgtacgtgccctgcgtgagtgcgtggcggcggcgcgtgcgctaggggagtgggcggtgaggcctggtccacgtgcgttccttcccgggacccccgcagcttggcgcccagcggctacgtgagccaaggcacccggatgtccgcgcccctctccgagtgaccagtcccggcctccggtcccgcagtgcccgcagcctcggccggcgtccacgcattgccatggtgactgtnggcaactactgcgaggccgaaggcccgtgggtccggcctggatgcaggatggcctgantccctgcttcttcttcacgctcgttccctcgacgcggattgctctggggactctggccttggtgctggctcttccctgcagacgccgggagcggcccgctggtgctgattcgctgtcttggggggccggccctcgcatctctccctacgttctgcagctgcttctggccacacttcaggcggcgctgcccctggccggcctggctggccgggtgggcactgcccggggggccccactgccaagctatctacttctggcctccgtgctggagagtctggccggcgcctgtggcctgtggctgcttgtcgtggagcggagccaggcacggcagcgtctggcaatgggcatctggatcactgttcaggcacagccctggtctcctgctcctctggactgtggcgtttgcagctgagaacttggccctggtgtcttggaacagcccacagtggtggtgggcaagggcagacttgggccagcaggttcagtttagcctgttggttctgcggtatgtggtctctggagggctgtttgtcctgggtctctgggcccctggacttcgtccccagtcctatacattgcaggttcatgaagaggaccaagatgtggaaaggagccaggttcggtcagcagcccaacagtctacctggcgagattttggcaggaagctccgcctcctgagtggctacctgtggcctcgagggagtccagctctgcagctggtggtgctcatctgcctggggctcatgggtttggaacgggcactcaatgtgtggtcctattttatag

SEQ ID NO: 318564 - DNA, 629 bp, Homo Sapiens
cggcagagtgcacgaacactagcttcccgtccttgatgggcagcaggtcatccacgaccacgtccacccactccccaaattgccacagctggaaatggaagatgccggcatagccattctggaagctctggccgtgcggaaccactcggtgcaggagggtgtcgttgagagtgagggaggcgatggccgccaagagccagcagtcccccagtgctccctggcagatgtctgtgcgggtagctccatccacaatgaactgggggtttgacagcagttccgtgggacgcttccacttgatgccataggtcttggaggaattgggacccaggtccttgtaacccaggctctggggtaccggggggaaggcctcatcacggaagagggtcccactctgcaggcatcgcacccgcagctgctcataatcctggcccaggtacttgatggcattctcatggcggcccaggcccagctccctggcccgctgcttctgcacttgggctgacaccccagtgcagtacaccggcgtgatgatctcctccgacatcctgggggaggggtgtttgggggtcgctgcagtccctgaggctggcttcccggtggcagctcagggcagggcccaaccaggaaga

SEQ ID NO: 318565 - DNA, 2463 bp, Homo Sapiens
cacagacagatgtggggccttttattatttggggttcctctatatggaacacgggacctccccaccccaagcctagtgcctctggcactccccataaccagtacacaagtccctgaagagtcccctttaaaatcactaatataaaaaaggagcgaaggagggaaggccgaccgcccacaggctgggcagctcctggtcggcagcagggccagggaaggacagagggggcgttggcttcggcgcaggaaggcacaggcgttcccagccccggggcctccccgagccgggaggcgtctccacacgcctggactgcagactgtgtcgagctagtggttatagtttatagtctgcaggcaaggccaggccggtggtgctgagtgggtggcctctgaagtggggagaggggacacatcaggatgctggggaaacccggggctgtcccgaggcaggaacaagcgaaagctgccttcctggcttggcaatgggtggggcccagggagtccatcccgagccccatggctggcacaggcaggggccacacagttctgcccggagcagatgaacgatggtggctgggaggagaggggacaggaggacgaggctgcctctctgctccaaggaaggcacttgcagctggggtggcctggtgtggtgtggtaggaggcgaggcttggcagacgaggagggaggggagcacggcaagggggaccgagtccctgcctcatgcaaacatggtcagctgcaaccacttaaacaagtcaaaggtcacaactccatccagatctgtgtccagagttttgaaaaatcggaacatggtctctagccgcaccaggcagcaaacgaaattgtcaaagtcgaccgccaggtcgggctccgagtagcgggtgatgatgagctcgtacagcttcttgttgagcttgaagcctgccgactcaatggccatccgcatctcgtaggcactcatgctgcccgacttgtccaggtcaaacttccggaagatggacaggtaattccggatgcggttccacaggatgttgaactccaccaggcccagcttcccattgccatcacgatccatgaggttcaccatgctgcggcacgactctaggctgaagcccttggtccgcaggtctttgtgtttgctgatgatcctattgaggattgtccgcaactccttcacgctgatctccatgtcctcccctgccagctgcctgaagagggccttgaagttctcgtcaatctcctcttctgagagcacttgctcatcggggagattggcctggatctggtcatccagctccacagtcccagcactcttctctgagaagaagcgcagcacgaagtcgccctccttgttgggctcgaaggtggagggcaccaccacatactccccgggtggcaggcggaagcgggtgctgacctctcgcaggttgatgaactgctctgagcgcgcccgagacgcattggccaggaagaagtcacgcttcaagtgtacggccggctggcccaccagctccggagggacctcgtagaccgcgaagccaatagtctccatgtcgcggccgaagcggcgctcgcggcgacggtgcttctgcataagggcgagcacgaagctgcagcctgactcgcggtccccgtagtcgtccgggtcatccgtctcatccagccctcgtgccgaattgtccacccagaaggtggctgggtagtttcggcagccccccgcggtgctcccccgccgccaggtgccttcgtagagtgtggtgttccatttgcggatggtccggctcttgagggcgtcgggtgtgaggttgcagatctccaggcgggtgaactcccgcatgaagtctcggaatgacatccagaactccccgtcctccatcttgacccggagctggtcccgttcatatgggtccacgttgttccactctgaggagctgtcgctccaggctcccgtccactccacctcgccccaggggttccgcatccggatcaggctcaccacctggcctcggtagttcacctgcttggccccggtcacagagtaggcatggcccttcaccaacttcttgaaagtgatggcctccatgtctagaacgctggagatgtctatggagcagcccagcagggagccccgctccagcgccttgaggatgatctggtagaggtcactgggagccttgcgcaactcgtaccactcggtaaccccgcctgtgaagtcctcaaagccctctgaggtgctgccccctgacagggcctcgtagctgccatttaccttggcataggccttctcaagcagggcgctccagaactcgttgccttcggcagagtgcacgaacactagcttcccgtccttgatgggcagcaggtcatccacgaccacgtccacccactccccaaattgccacagcggaaatggaagatgccggcataccatctatcccgggaatccggccggtccagccg

SEQ ID NO: 318566 - DNA, 923 bp, Homo Sapiens
agaaaggggggcctttttatatttgggggtccctttaaaaggaaccgggggccttcccccaccccccagcctagtccttgtggcacccccataaacccagtacacaagtccctgaagagtcccctttaaaatcactaatataaaaaaggagcgaaggagggaaggccgaccgcccacaggctgggcagctcctggtcggcagcagggccagggaaggacagagggggcgttggtttcggcgcaggaaggcacaggcgttcccagccccggggcctccccgagccgggaggcggctccacacgcctggactgcagactgtgtcgagctagtggttatagtttatagtctgcaggcaaggccaggccggtggtgctgagtgggtggcctctgaagtggggagaggggacacatcaggatgctggggaaacccggggctgtcccgaggcaggaacaagcgaaagctgccttcctggcttggcaatgggtggggcccagggagtccatcccgagcccatggctggcacaggcaggggccacacagttctgcccggagcagatgaacgatggtggctgggaggagaggggacaggaggacgaggctgcctctctgctccaaggaaggcacttgcagctggggtggcctggtgtggtgtggtaggaggcgaggcttggcagacgaggagggaggggagcacggcaagggggaccgagtccctgcctcatgcaaacatggtcagctgcaaccacttaaacaagtcaaaggtcacaactccatccagatctgtgtccagagttttgaaaaatcggaacatggtctctagccgcaccaggcagcaaacgaaattgtcaaagtcgaccgccaggtcgggctccgagtagcgggtgatcctcgtgccgaattcgccacccaggcctcgctacat

SEQ ID NO: 318567 - DNA, 592 bp, Homo Sapiens
  misc_feature (175)..(185): n is a, c, g, or t
  misc_feature (466)..(500): n is a, c, g, or t
  misc_feature (537)..(537): n is a, c, g, or t
  misc_feature (546)..(546): n is a, c, g, or t
  misc_feature (568)..(568): n is a, c, g, or t
taaactccaaagccaaggttttttattactggtcaaaaggtgctcgctaacaaaacagtgttggggagaggtacattccacagctctgtaggagccctagtggggcatcctgccccaccccgccccgcctctccagtgggcattgtaaggcatttcacacattggtgttttcacnnnnnnnnnnnatatatataaaaacaaaaccagtcctggagtagaaagaaagaccctgtgatgaacttttaggactaaactgaaatggaaaggattggagtgtgggattctgaggggctgggtcagtggccatggtggtccagccccccatggttggcagaagccgctggaagggggcatgaggagagggaagggcacagctcacatgagggccaaactcagacaggtgcacccgtcttcatcattttttcacttttacatactgtagaaatttaagcaaaatagctatttnnnnnnnnnnnnnnnnnnnnnnnnnnnnnnnnnnnaataagggcaaataaagagttcagggggacactgagntgggggcanccctagggggccttcctagggntgagggaggggatgcaagggtctc

SEQ ID NO: 318568 - DNA, 603 bp, Homo Sapiens
aaaaatgatctccatttctttccagccatgatgtttagtaaatatttttagtaccgcacttagcagacagctttccaagtgtgctttcttgccacaaaagtgtcctggcaagagccccttatttttaagacatcaggaagccagaccgctttgagttgggagaattttgtagctcaacatatcaagtcctcgatggtatctgagctgcccacacccccacctgccaaggccccacagagcccaaaacagaagggggctgccccagccaggcagagcacagagtttctggagctcccatccacagatgcaggagggggtactgatggtaacccccatgtggatttgagggcagcagtccctggcctcaccctagccagcctgggtggctccctagccccaagaggccaggaagggctgggaagcagggcctgcaggtgctccccgccctgagacccaggccccaaatcagcaataatgaacaaacccttgggccagcctgggctggtgaccctgggcaccagagaccttgcatccctcctcatcctaggagggccctaggggtgccccatctcagtgtcccctgaactctttatttgccttttt

SEQ ID NO: 318569 - DNA, 1065 bp, Homo Sapiens
gggacatgaagaaagagcttcctgcaattcaaggactgtacaaagctgaaacgcagagattttcatattatttgggagactcagaaatgagcttttaaggttgttccttgacttgcgggtcaataagcgcacaatggtgaagaaaaggctgccttctagtgacacggtgttccggtttgagactccgggcagcccaaggaaggccaacgtggaggcctcacgcagctccacagacagccccagctcggtgttcctcagctcagaggctgagaatggtgtggaggagaaaaagaaagcctgcaggtcgccaacagcccaatcccctaccccatctgtggaggcggactccccagaccagaagaaaatcattagcctatggtcaaaatccagttttgatggtgcctctttagcaagtgataagaacgactgtgaaacagaaagcaaaaatgaccctaagactgaaagaaaaaagtcttcatcttccagccagtacaaggccaatatgcactttcacaagttgtttcttagtgtcccaacggaggaaccactgaagcgaagctttacctgtgctctacagaaagaaatactataccaaggaaagctctttgtatcagaaaactggatttgttttcattccaaagtctttggaaaagacacaaagatctctattccagctttctcggtaaccctaataaagaaaaccaaaactgctcttctagtgccaaacgccctgatcatagcaacagtcacagacaggtacatatttgtctccttactctccagagattcaacttacaaactactaaaatctgtgtgtggacacttagaaaatacaagtgttggtaacagtcccaatccatcttctgctgaaaacagtttccgagcagaccgcccttcatctctgcctctggatttcaatgatgaattctcagatctggatggagtggttcaacaaagaaggcaagacatggaaggatatagcagttctggttctcaaactcctgaatctgagaactctcgaggtttgggaaattgttgtattttgactaaaatttaattcccctc

SEQ ID NO: 318570 - DNA, 273 bp, Homo Sapiens
  misc_feature (68)..(68): n is a, c, g, or t
aaatcaccctgtgaaagggaaacagcactacatgaaatgtcctacaggccaataatttttaaaattantccttatggaattttccctgattcacccacaggagatgatattttatggtttggagtcttggtccttggcaagagaccccttaggcagcagagcccagagcaggaggacaaagcaaagatgcccttcgctcggctgcatactcaccctgtctgtgactgttgctatgatcagggcgtttggcactagaagagcagttttggtttt

SEQ ID NO: 318571 - DNA, 956 bp, Homo Sapiens
  misc_feature (22)..(22): n is a, c, g, or t
  misc_feature (27)..(27): n is a, c, g, or t
  misc_feature (38)..(38): n is a, c, g, or t
  misc_feature (63)..(63): n is a, c, g, or t
  misc_feature (849)..(849): n is a, c, g, or t
ctcagggcacatccgctctgancagancaatcgcaatntgcgtatcatcgtaaacttcatctnactattactgcctttgcagattctgatttatgatcctgtcctcttcatcatctgaatgcctgtgttcttcatctgaggcctgtggccttccatcatcaggattttgccttttctcttccatcagacagctgtggttgttcttcatcatcagaattctgtttctcatcatcattatcagaagctaccggccgttcatcatcagaattagccttttcctcctcagatagctgttgtctctcatcatcggaaagctgaggcctctcctcatcatctgtgttctgcattttctcatcatcgtcagaattctgcagcttatcttcatcagatccttgtgccctctcctcatcatcagaattttgtatcttttcatcatctgactggtcacttttatcttctctgccccatttttcatcatctgaatgtgctttttcagaaccttctgcttctgaatgatggctccctccatccgatctatgaccttcgtcttcatcatcattaggggcttctgatccactgtgctgatctacatctgaggggtcattgtcctcatggtcagaacgctcagaagcttctgatctattgtctgatctttcagagtgattatcactaccactatgatgtgaagctccctcgtcctcactgtcatctccaaacagttccttattacttggttgtcctgaatcacctctttcatcctgatcactttcacttccagaggcattactgccagaggcagcattctcttgatcagaatctgagtcagatccagaatcagaatctttacgncttagcttcgctgtcggcgtcgctcccgaagagatcctccatatccgccattatcgctcacgtccgctgcatcccgggaattccggaccggtaccagcctgcttttt

SEQ ID NO: 318572 - DNA, 587 bp, Homo Sapiens
  misc_feature (528)..(528): n is a, c, g, or t
  misc_feature (544)..(545): n is a, c, g, or t
  misc_feature (547)..(547): n is a, c, g, or t
  misc_feature (562)..(562): n is a, c, g, or t
  misc_feature (568)..(568): n is a, c, g, or t
agagagccagcatacaaaaaacatatgccagtcctgaaagagacacatgatgagagagattctacaggccaggatggggtgtcagagaaaaggttgacatcccttgttagaagagcaactctgaaagaaaacgagcaaattccaaaatatgaaaagattcacaatttcaaggtgcatacattcagagggccacactggtgtgaatactgtgccaactttatgtggggtctcattgctcagggagtgaaatgtgcagattgtggtttgaatgttcataagcagtgttccaagatggtcccaaatgactgtaagccagacttgaagcatgtcaaaaaggtgtacagctgtgaccttacgacgctcgtgaaagcacataccactaagcggccaatggtggtagacatgtgcatcagggagattgagtctagaggtcttaattctgaaggactataccgagtatcaggatttagtgacctaattgaagatgtcaggatggctttcgacagagatggtgagaaggagatattntgtgacatgtatgagnnanaacataacactgggncctaantgtactcagggtttgcaat

SEQ ID NO: 318573 - DNA, 720 bp, Homo Sapiens
gccgggcccaattacccccattagcctccgggggcgattgggtaagttccccaggcagtcccttaggctttttcctcctggctctaggggcatcccaggggagtccagcttttttattcccggcctttatttttcaggacgcggttatgggccctagggtcaagcagcgtggtggggataggcaaatagggagggggaagctcctgaggttcagacattgcttgcttctcccttctccccattcccttcccttcccagcagaacctggctggccctgggcagagctgaggcccaggagcagctgaaaggaggtggatggggacagagcaccaaggggaaggggccctcggcccaaggggggaggaacctagcccccaccccgctacagctccccactgaattcacagcacagagaacacctctcgcccaacaactccacatggaggtataccaagtcccaggggtcaaaggagcaggtgggtgacagatgggcaggggcagtgaagatgacagcaggctcaggaggggaggtggcagaaacttcctcctacccatgggaggagacgatggggcgactgatattgctgttggtggtcatggcattcagctcccacctgatatcatgaggcaaacaggactggtctaggttatactgaatcacggccagtttgcacagagtcttcacctcgtgccgaattcgccacccaggcctcgctactt

SEQ ID NO: 318574 - DNA, 939 bp, Homo Sapiens
gctcccttcttagagattttaattaatttttataaaatctgagctggctgaacttcagagtacagcgacagctcaaaggaagggtgggatttatctgctggtccccacctccccaagacggggagaaggaggtctcatgccaacagctgcaactcctttcagctcccagtcaaggctcaaggctcaagcagaggggaggggataggcaaagggggagggggaagctcctgaggctcagacactgcttgcttctcccttctccccattcccttcccttcccagcagaacctggctggccctgggcagagctgaggcccaggagcagctgaaaggaggtggatggggacagagcaccaaggggaaggggccctcggcccaaggggggaggaacctagcccccaccccgctacagctccccactgaattcacagcacagagaacacctctcgcccaacaactccacatggaggtataccaagtccaggggtcaaaggagcaggtgggtgacagatgggcaggggcagtgaagatgacagcaggctcaggaggggaggtggcagaaacttcctcctacccatgggaggagacgatggggcgactgatattgctgttggtggtcatggcattcagctcccacctgatatcatgaggcaaacaggactggtctaggttatactgaatcacggccagtttgcacagagtcttcagactagggctaaagtccaaaatgtgtaagtcagaatgatctataaggtcaaattcatctcccaggccttcctcaggagatggactggtacccccaaagaggacaatcttgtcaccaacaatacagcagcactggcgccggcggggacatggccccttccccttcggttcaattttttccaggtaaaggacacaggattaacttcccctcgtgccgaattcgccacccaggcc

SEQ ID NO: 318575 - DNA, 333 bp, Homo Sapiens
  misc_feature (22)..(22): n is a, c, g, or t
cttcagagtacagcgacatcanaggaagggtgggatttatctgctggtccccacctccccaagacggggagaaaggaggtctcatgccaacagctgcaactcctttcagctcccagtcaaggctcaaggctcaagcagaggggaggggataggcaaagggggagggggaagctcctgaggctcagacactgcttgcttctcccttctccccattcccttcccttcccagcagaacctgggctggccctggggcaggagctgaggcccagggaggcagctgaaagggaggtgggatgggggacagaggcaccaaggggaaaggggccctcgcaa

SEQ ID NO: 318576 - DNA, 668 bp, Homo Sapiens
  misc_feature (312)..(312): n is a, c, g, or t
  misc_feature (582)..(582): n is a, c, g, or t
  misc_feature (584)..(586): n is a, c, g, or t
  misc_feature (588)..(590): n is a, c, g, or t
  misc_feature (628)..(628): n is a, c, g, or t
catataatttattctgctgacagttttatatgatggctgtcaattcacctccttccatctcatttcccacaagtacactacatctccagcagaacaaaaatgtctgtctcctccatactgaaaccaagctaatcaggtcacacctgtgctgctcactcaccctcactcaatccctcccttccaaccactcgctgtacctgatatcatgaggcaaacaggactggtctaggttatactgaatcacggccagtttgcaccagagtcttcagactagggcctttaagggagaagtttgtggaaaggagatggtcnaaaggtgaggaaaggatccagtcctggatatcaccacccaaagacagggaccttgatggcaggagcaatttcaggaataactatacttactaaagtcccaaatgtgtaagtcagaatgatctataaggtcaaattcatctcccaggccttcctcaagagatggactgtcgggatcaaaagagagatgaaagtaggacaaaaactacccacgaaacccccttttcaaatacctcccactctcccattagtgacttccctgagccccttccntnnnannntctaacctggtacccccaaagaggacaatcttgtcacnaacaatacagcagcactggcgcaggtgctggacatgcctg

SEQ ID NO: 318577 - DNA, 1074 bp, Homo Sapiens
  misc_feature (14)..(15): n is a, c, g, or t
  misc_feature (21)..(22): n is a, c, g, or t
  misc_feature (24)..(24): n is a, c, g, or t
  misc_feature (30)..(30): n is a, c, g, or t
  misc_feature (34)..(35): n is a, c, g, or t
  misc_feature (42)..(43): n is a, c, g, or t
  misc_feature (55)..(55): n is a, c, g, or t
  misc_feature (78)..(78): n is a, c, g, or t
  misc_feature (82)..(82): n is a, c, g, or t
  misc_feature (95)..(95): n is a, c, g, or t
  misc_feature (100)..(100): n is a, c, g, or t
  misc_feature (115)..(116): n is a, c, g, or t
  misc_feature (141)..(141): n is a, c, g, or t
  misc_feature (149)..(149): n is a, c, g, or t
  misc_feature (158)..(158): n is a, c, g, or t
  misc_feature (226)..(226): n is a, c, g, or t
tatatgcagtattnntattannangacttnattnnccttgcnntggttcttggtnaaagggccttggctttggtcagnaggntggacggtcttgnaaaantcacagagccagganncccacatcctccagcatgtccagtnccctatantctctatgnccacaggaaataagccatgaaatgggacaggattctgttctgtacaaggtcaaccagctcctatcaangaacacacggagggatacgtctgtgaggagccattctgtgttcttccggctttcagtcttccatatcagtgaattttctcttcttgtaattctgaacgaggttggaagctgtgatctgagaagcctgccccttctcccaacactgaaagtcattcagtcctttctgccctgtttgaaataagcccctctccatctcgtctagcctggctaccagggctgaagtgtcttcgttgtaagcattctgtgaggagtccatgatgcggcgaaaacgtccgataaaagtctgcagcagagactgggaaatgtctgcattctcggaactgtcaaaatgcaggagctgggagccaaacccgtagaaatggggccccattttgtggaggtccaccacattgggatgtgcactgatctcagtccttcaagcctcttgttagatcttggggagttccgcggaaaggatccgtggcttgttgtcaaaaagtccttttgccagccacaagggtagttcaagcttggaaccttgtggggccgcgttgtcggtgtcggcgcgtgcggtccggtgcaggaagaaagcgccaaggcgaggcatggcggtctccgtgcgcgccggcagcttctcgtgggacatcaggatgtcgtccaaagaaagaaagttctcctcaggccccagcgcacctgactccactgggaaataagcctctgacatggcggccacttgagcttgtccgcttccactcgcgtgattcggaggagcctcaggagttaggggtgtacaagacggggaagcggagagtgggcaggatggttggggtcaggaaagtggattgaaactcgtttcccgcatcccggga

SEQ ID NO: 318578 - DNA, 972 bp, Homo Sapiens
  misc_feature (469)..(470): n is a, c, g, or t
  misc_feature (473)..(473): n is a, c, g, or t
  misc_feature (479)..(480): n is a, c, g, or t
  misc_feature (485)..(485): n is a, c, g, or t
  misc_feature (489)..(489): n is a, c, g, or t
  misc_feature (491)..(491): n is a, c, g, or t
  misc_feature (493)..(494): n is a, c, g, or t
  misc_feature (496)..(496): n is a, c, g, or t
  misc_feature (498)..(499): n is a, c, g, or t
  misc_feature (501)..(501): n is a, c, g, or t
  misc_feature (503)..(503): n is a, c, g, or t
cacgagacttcggcggagaataggtactcgcggctaatctcgcggagtcgtgtatctcccgggggggtgagcgtgttgtttaatcggaaaaaggatcactcagggtgggttatcggggatccgcgcagcgtcgaaagttggggacctaggcgccctgggggttgagaggcctgcatatttgtatcaggggacccgggggcccgggccttgtgaaccctgatcctcggattcgtggaggcaggtgaattgggtagcttgtaaggggaactttcgcagggaatccaggggttgctgtggccccccgggctgcaggggggattctcttgcttcgacagtgaatggagtggccggctggggggggcacagatgcagatgaccaccggggtttggaaaggatcattcgtcttcatgtcatcaagcagggaggacagagagtcggtctccaagtcgctcctgctcgccgtctccnnggncgcggnnggggncggnangnngncnncngnccctccctcctcctccggaggaggcggcggggaagggaagatctcctcctccagaggcgcagggggaaatgattcctcgatcgggggagggggcggcgggaaggcacctcccagagcaccctctgcatcgtcgccatccccagcaaggggaggtggaggcaggggaaagtcttccgggggcggcgggggaatctcgcccacccggcccatctgtgcgcgctgggccccgggtgccgggggaggctcgctgtccccgggccggaagggattcactttgggctttggggccaccacagggccgaacttcttctgcggggcgtaaaaagccggagccgagaccgaaacggagatcgcgggagacgggcggggggccgccatggccgggccgggctgcgcaggccggagcgtgcgcgccgcgtctcgggtggccgcctcggcgccgggtccgcagactctgcgtcccggtccg

SEQ ID NO: 318579 - DNA, 871 bp, Homo Sapiens
  misc_feature (36)..(36): n is a, c, g, or t
gcgtttattgggtgcccaccgctggctgggcacgangcttgggcgtttgcaggacacgcagtcacacaacacctcacaacagccctgtgaggtagggatgagtcccatggaacggtccagaaaacgcaggctcccaggcgccctgcctgctcccacagctaggcaggcggtacagcggggactgaagcagttctttttgactccaggttccatccagctcttggtcccattgttttagagattacagaaggtttggtcccagagtccactgagcccattcacaacgtttacaggttttgtttcctatcccccacgctcatcgtcctttttgaagtttggaaaaatacaatttaaaaatgaatatgagtgtacagtttggagttcggaaaattagcacacgttctgtttggttcagggtccctctccacctgggtcactggcgcagcagtaagagttctaacgggcaactcagcggcctccctctgtccccgtcactcctgagcatgtctgaggccgccagtgaggctgggactcataggttcgagcagaggaagaggagctggtggcagtgaaatgggcaacgggaaagtggaggcgggtaaccctccacaatggctgctcagcaaacacagaaatcctcttcattcttctcgaccaagaatctgcagtcctcctccctcctctagggggcacagcttagccctgacccaggcaagcacagggcttcccgtggtctgcagggaacgcacctagccagccctgccagggccacccaagggggagtgtgggccgagggtcacaggacgtccgaggcctcctctgcaactgcctcatcttacagtgcgggaagcgaggctgagcgagggagaca

SEQ ID NO: 318580 - DNA, 1696 bp, Homo Sapiens
aaccagtgatcagctgtgagtgatgtggctgttacctatagctggtgcttggcgattacaaacacccaccagctggtggagcaggcgcctccctgccaggatgatgcttcaggaactttctgggcacaaagtgcttcttggtggacaatttttaaaaacacacagagccacgtgggtcacctattgtcaccaagagaaaaaagaacctcaaaatcagtgacgcgacaggaagaattcggacctgttctttctgaggaagttcttatttttcctgtaactgtatgacggcatcacaccttcctcctgaacgtgggggccatagtcactgactccgccagcctcccaccagtgtgctggtgtaggaggagctgcagacgtcctcaagcagaagtcacttctgcgtcctcagtggtaactcctgtccctgctcaagtcctccgccctcccccgcagctgtcttttcccttcgaaaagcaggatgcttgccgccatggccgagttgaggctgtccacaccaggcacaacggggatcagcagcctcttgccaccagtgctctcggccagctgcagggactccaggctcacgccgtaggtctccccgccaatcaccacagctgccggcgcctctgtccagtccgagtcgtaactctgaacctcaacatgaggcagccaatcttgactggctccggtttctacatcttcctcttcctcatacttgtgaaacttcatcactcgttgatcacacacccagccatggtcactagctttattagacatctcagcctgggcataaaggccacagttgtcagccacatagacccgagtgtcagggggcaggtaattgggcacggtttcccattccagattattgataatgggcatccggaaatgtgcgcccatacccgcccggagcactttgggctccccaggcatccacacagcctttggtgagtaacactttgctgcagcctgccccagctgcagatctcagaattgtccccaggttcccagggtcacggagattgtcacaaatcaataataaaggcagtgaatgctgaagctgagtctttggatatgtcatcttaacatggtcaggcttggcaaaaatccccattattccttgtggcgttacgaggtcggaccaatccttgatatcctcaaatttcaccttaatgaggctgacacctttcagcttatcgactggcaactcctttaggtattctagacggctaaagaagaacatttttggcacagctccagccttgagagcgtctgaaatgagcctgcgaccttccagcaggatcttcccttgtttttcccgaaatggcctggactttactattgtcattacactgctcagcctcctgtccccgggataagctttatcgtagcgaagcccagactcttcccaggtgctgggagcgcgggatgcggactcctcgagcggttgtttctctcgttgctcctgggcactggcctcagatggtgccttgcggggctgcttcccaggagcgcgcttctgttccaccacctctccggaaggaaacaccactttcactgggctccgccgcagcgcccggacccagcgcctcgcgtcaaggtcccaagcctggaccacctgcagcaacggtcgcacgacaaacctcgcgggtctcaccagcgccgccatgttccctgagacccgggctgcgtcacg

SEQ ID NO: 318581 - DNA, 1923 bp, Homo Sapiens
  misc_feature (1899)..(1899): n is a, c, g, or t
ttggttggagccttgtgtaaaagtaggccaaggtttactttgtgttgtctatctgctcataaatgactctgaaaaagccaatacgcaagaggctaacacaactgtagtctaaaggcaacgtcgaggtcactgatatgtccctcagacaagaggcactgctcagaatccccctgtgctgggggtgagggaaggaggggacggtttaggacagaggaataaatacatgtggttgtgggagttctgccatcagggatggtggccccagcccaggaccccaaaaccctgaggcggtgcagtgggctgccaaccccccagctcggggttccccaaggctgcctcagtgtttggatgggctggaaggaaatgctgaggttctgggagggccccatggccagccccctcttcccactctagccagaggagagccaagctcccggctggccagggccctggggtagggagcagtgcccccaagagggctttctggtgtcaatgtctcatgcagcgtcaggtggtgaggcctgggcctggccctgaggcgggagtgggggtgacaggcgaggctggggtgggccctggcacctgcagctttgggctgcccatgtgtgtctgctgacatcccgactatggtccacggccgggaatggtgggcagacggggctgctggcagccctcagccttatagtgtgtgtggggggtggacgaggggtcatgaggacagggatggggctgggcgtctctggtaaggaccagtaagtgccaggcaggacgtactctgaaggctcagccgtggcccatctgggacacagccctgctcccgaaggggctccaggggaactgctcagccaggtgattcaccagggcacgggcaggccaggctgaacccggggccccagtgtgcgatgtggggaggtgaccgggtgagcgtgaacagggcgtggggtgcgcggggcgggtggccgtgtgaccgtgcccggccctcagaagacgaagcagcgctccgtggggtggcccacgtggtccaggttgggaaggcaggcgtactggatcatgggtggggggccacacatcagcaccagcggctcctcctctgggggtggaaggtggtcccggatcatctcctcattcacgaagccctggccgtagtcccaggcttcaggggctctgtccagcgtgtaccagagcttgaagcgtgcagaatgtttgttcctgagttcctccagctcaggtcgcagcaggatgtccttctcggtctggttggcaaagagcaggtggcacacagtgtggtcatcagggtccttcatgatggcgcggatcacctgcagcatcggggtgatgcctgtccctcccgcgatcatgcccacagacttcactgtcctgatgatagggttggactttttgtcaggtcggatggcgaacttccctttgccctggtagaccagcagcccactggggccccggaactcaatggtgtctccaatctgcatgctctccaggtactgagacatcttccctccagcgggaaacttgggatgggtgtccttgaagtaaaccttgatgaccaggtccacgaagcccttgtcatcatcgctggagatgggtgtatagggccggacgaccaggtttccatcaattcgagccgagaggtagatgtgctggccgacagggaggcccaggatgtgctggggtgacggcagggcaaagcggaagcgccgggtgtcatggctgatgatctcccggtcgatgagccgcagcgggtacttgatgtccgggctctcgagggtgatggctggcgtggagcgctggaacagcttcatgagcagactgtacaggaaccagactgggaagagcaccatatggcccaacgtgctgagctgggcccccatggtggccccgcgnccgcgctcgctctgtcgccgccgc

SEQ ID NO: 318582 - DNA, 1372 bp, Homo Sapiens
  misc_feature (151)..(151): n is a, c, g, or t
catttttagggctttttatgtggccttcaaagcacgttgcaaacaaatccctttcactcctcagaggaggagccattaggaaggtagggggcgacaggcacagcctacagcctctcctcaggaggacagagggggtcattggcatttgagnccccctgcagtcatctcgggggctcctgagggtccaggtccacatgttcgagggtctgcagcacatccacggcgctgtaggacttccaggcctgcatgttacagctcttcaggatggctcccagctgcctgccagggcctacttcgaaagtttgggggaaccccctgccctttttcctttcgtatatggcatgcatcgtctgctcccacttcactggggagaccagctgctgggccagcagcttgtggatgtgcccgggatccctgtatctatgcccgtggacgttggagtagacagaaaccagaggcttcttaatgtcgactgcctttaaagcttgcgtcaggggctccacggctggctccatgaggcgggtgtggaatgcgccactaaccggcaacatcctggtgcgtctgaaatgaaacttagaggaattcttctggagaaaccgtagagcctcttggtgtcctgaaatcacccctgcaatctggaaagaggtagttggacacttcacatacggggttctctatgcctaaagacttgcagtgttcccgggcttccaaacaggcgaagttgaacttggactgaggctggccgaggacagacagcatcccactggggacagcttctgaagcttcctgcatggcctcagctcggattttcactgcatacaaaccttcagcaaattccatggctccggcaaacactagggctgcaaactctcccacactgaatccagcagcagcaacacagttctcaatcaccgagggctgcaggtgatgtagtttctcgacagcggccagcgatgccacgaagatcgcgggctgacagtgcacggtgcggtccagggtctcctgcggcccgtgcaggctcagttccagcaggtcgtagcccagcacgcggcgggcggcggcgtagagttcgcggacgcgcgggtagttgagcagaccgcggcccatgcccaccacctggctgccctggcccgggaagagcagcacggagcactggcccggcattcgccgctccgtcgccgcccagggcgcctcctcctccgccccggtcgcatctcgcagcagctccgctacaccctgggcgcccggcggaggcaccgggaagctcgaggcgccgcggcggtagctggcgcccaagcccctgacccacgctacccgtgcgacccggacgctcatggtcggacacctgcccgcgcgcgttaccgtggcgacc

SEQ ID NO: 318583 - DNA, 1137 bp, Homo Sapiens
tggcggaatggcggcttccatctctgaggcgagcgacgctatggatcccacagtggtttgctaagaaggccattttcaactctccactggaggctgctatggcgttccctcacctgcagcagcccagctttctactggctagcctgaaagctgactctataaataagccctttgcacagcagtgccaagacttggttaaagtcattgaggactttccagcaaaggagctgcacaccatcttcccatggctggtagaaagcatttttggcagcctagatggtgtcctcgttggctggaacctccgctgcttacaggggcgcgtgaatcctgtggagtacagcatcgtgatggaatttctcgaccctggtggcccaatgatgaagttggtttataagcttcaagctgaagactataagttcgactttcctgtctcctacttgcctggtcctgtgaaggcgtccatccaggagtgcatcctccctgacagtcctctgtaccacaacaaggtccagttcacccctactgggggccttggtctgaacttggccctgaatccgttcgagtattacatattcttctttgccttgagcctcatcactcagaagccacttcctgtgtccctccacgtccgtacttcagactgtgcctatttcatcctggtggacaggtacctgtcatggttcctgcccaccgaaggcagtgtgcccccaccactctcctccagcccaggggggaccagcccctcaccacctcccaggacaccagccataccctttgcttcctatggcctccaccacactagcctcctaaagcgacacatctctcatcagacgtctgtgaatgcagaccccgcctcccacgagatctggaggtcagaaactctgctccaggtttttgttgaaatgtggcttcatcactattccttggagatgtatcaaaaaatgcagtcccctcatgccaagctggaggttctgcactaccgactcagtgtctccagcgccctctacagccccgcccaacccagcctccaggccctccacgcctaccaagagtcgttcacgcctactgaggagcatgtgttggtggtgcgcctgctgctgaagcacctgcacgcctttgccaacagcctgaagccag

SEQ ID NO: 318584 - DNA, 1184 bp, Homo Sapiens
accaaggtggggagtactcaaaaaccttcggaatgggcttcaacttccgggggtcccccctgggtatctcaatttataaaactttggcaacccccatagatgatgtggtacccgccccagggggcgttaaggaatagttcgtgcctcaccccaaaattccagtcggggaggtggcttttttccatttccatccctgggtggggcccaaggcgaaggggaacttgcgtgagcctgcgctttcgctgagcccggaatatcttggcgccaggtactcccagggcccttcctcccaggtattcatctgtcttccgggacactgtctgcccccatctcgttccaggtcgttggctgtgtaggagccattggtgtccatggagctaaagcccagccatgagaggaaggagtggccagccgggctctccgcacactggtcggagatggacttggctgtgtgtttggcctgtgtgatgagctgagcgaggcgcaggaccagggtgcgggcctcgggcccaaacatcggggtgtacttgcagtcctggccctccaggctgtagacgtggctcttcaccttgaaggaggcatcagtgaccgctggtggccagggtgacaggaagctcccagtgaatgtgggggccgtgaagagtcggtgctggcggtgggggatgaccagctctggctccaggaatagctgctcacctttctgaatcatctcagccaggttgggctgggcaaagactttggccactcggaacaccatgagcgcgtgcttggggctgaccaggtctgtgcggagcgcgcggttcagaaagcccacaaacaacttggtgtacatcagcaggttctcctggacaaagggtgcccatttctccgacacacaccggggctgggagtcgctgcccggagcctgcttgtcaggcgcgtaccgccacggctgcaggtagctcagccacatctccaggacagctctgaacgatgcgtccaggggccagtggccaaagcaatgctgcaagaagaggtagagtttctgctggacgaacctcgggacagcagcccgtttgaactcctccagggggctggtggcgtgggagtgggcggagggtgaggcctgctctggcttcaggctgttcctcgtgccgaattcgccacccaggcctcgctaccttaaaccgttgtagttactgtcc

SEQ ID NO: 318585 - DNA, 994 bp, Homo Sapiens
  misc_feature (219)..(219): n is a, c, g, or t
cctaaaaggaggtgggggggacccaagcttggggattttacataggttcccggaatggggttgcaagcttccggggtccccccttgggttcttcaaattttcaaaacttttcgcaagccccattgaatgatctgggtacccgcccccagggggcgtaaggatgagttccgtcctcacccccacgatgcagtcggggagttgcttttttccattctcatncctgggtggtgcccaaggcgagtgtgaactgcctgagctgcgcttcgctgagccggaatatctggcgcaggtactccagggccttctccaggtattcatctgtcttccggacactgtcttgccccatctcgtccaggtcgttggctgtgtaggagccattggtgtccatggagctaaagcccagccatgagaggaaggagtggccagccgggctctccgcacactggtcggagatggacttggctgtgtgtttggcctgtgtgatgagctgagcgaggcgcaggaccagggtgcgggcctcgggcccaaacatcggggtgtacttgcagtcctggccctccaggctgtagacgtggctcttcaccttgaaggaggcatcagtgaccgctggtggccagggtgacaggaagctcccagtgaatgtgggggccgtgaagagtcggtgctggcggtgggggatgaccagctctggctccaggaatagctgctcacctttctgaatcatctcagccaggttgggctgggcaaagactttggccactcggaacaccatgagcgcgtgcttggggctgaccaggtctgtgcggagcgcgcggttcagaaagcccacaaacaacttggtgtacatcagcaggttctcctggacaaagggtgcccatttctccgacacacaccggggctgggagtcgctgcccggagcctgcttgtcaggcgcgtaccgccacggctgcaggtagccctcgtgccgaattcgccacccaggcctcgcgtccgt

SEQ ID NO: 318586 - DNA, 3276 bp, Homo Sapiens
  misc_feature (56)..(105): n is a, c, g, or t
  misc_feature (130)..(151): n is a, c, g, or t
  misc_feature (263)..(311): n is a, c, g, or t
  misc_feature (328)..(384): n is a, c, g, or t
  misc_feature (419)..(434): n is a, c, g, or t
  misc_feature (445)..(612): n is a, c, g, or t
  misc_feature (1320)..(1320): n is a, c, g, or t
tttttatttaaaggggggccaaaaaaaggacgtttttttgccgcgcttttcgtgcnnnnnnnnnnnnnnnnnnnnnnnnnnnnnnnnnnnnnnnnnnnnnnnnnntttaagtatattttccgcggtggtnnnnnnnnnnnnnnnnnnnnnntggttaatatgttcaccctctttccccaagtttggccgcggggggggataatttaataaaggcgaccggggggcccctcttggtggagacccaaaatcccccccgcctcccnnnnnnnnnnnnnnnnnnnnnnnnnnnnnnnnnnnnnnnnnnnnnnnnngggggaatgacacctcnnnnnnnnnnnnnnnnnnnnnnnnnnnnnnnnnnnnnnnnnnnnnnnnnnnnnnnnncccgggcccccaaaaagagtttttaaaaatttttnnnnnnnnnnnnnnnnccccaaaaagnnnnnnnnnnnnnnnnnnnnnnnnnnnnnnnnnnnnnnnnnnnnnnnnnnnnnnnnnnnnnnnnnnnnnnnnnnnnnnnnnnnnnnnnnnnnnnnnnnnnnnnnnnnnnnnnnnnnnnnnnnnnnnnnnnnnnnnnnnnnnnnnnnnnnnnnnnnnnnnnnnnnnnnncagaagcaaggacatgtttattcagatccatggtcgttacaagcttcatttttggtcacaggccctaaaatgccattattctcagtttacatcaaaatacaaagcccaacatttacaatttcaaaaacattaaagcaaacccccaaaaccccacaccgaaaacaaaggcttggtttggaaatcaccactgagatgctgttctccctcgcatgtcgcctgtggggtgaatgaaggtgaagaccccgtgctggtttctgtcagagaatctgtagttgtatattttgaatacttaagtaccactgaacggttgccatgtctttgagcacttgatgttactgaagtgacaatgcttctgaccatctttggctgcagagcagaaactggcagaatccgaccccatcgacccagcagtgtccccaacgcctgaggaccagcacccatctgtgacaaggcacaggggtccgcgatgttggccactgctttgggtgatgtgctcaatggcttggggtctgcggtgaagcccctgggctctgggagggtcttaggctcctgaaacatggaattctacggcccagtcttggaacagctggggagaacatgaagaacgcccctcacagtgaagaatcaggacagccactctctggttttctcacaactctagaaactttgattctttcctggagtggagacttaagccactgtcctggntcccacacagagagaggaagcgccacaacccactctggcaacctcaaggccagccagtggggaggccaggcccaggtggctgttggcaggctggctcccaagcttggtgcagcagagtagccaaatgggcagtggaaaaaaggccccggagagctggcttggccgtgagtccttggcggagggagggaaagggccggcgctgagctctgcgctgtcacagagcgtagctgttgagcccctggcagctactcctttgctggggcccacctgccttcctttcttggttgcgtttcctccagatgcctctgcggctgcaggaaccccgctccagaagcccgaggatgaccgtgttcccttcctggaggggcttcccaggtcctctcagcccaagggtggggctgtgtggcaaatccctccagcctgctctgaaggcagctgacaccttcagggctggtgcagcttcccccgctcggtcagcagtgtcatggcagaggcgtagaggacatagcccagggtgagcagcagcgtgcatgggaggggcccgacgcagaacagagaggccacgaagaaggccagcagcagcgagaccagcgtccggtaactgcccaggaagcgcaggctgagcctggggccgcgggtgtggccggccacctgcctccgccccacagggctcagcaggtgcctgctggccagcccaggttctgtgaggtggtagcgacagaagctgccgaggaagtcatcccgggaacacagagccgccatctgtcctgcaaatctgtggttgatggcagacgacagcctaaagagtgtgcggaccaagctggcgatctcatagctccggatgggctgcagctccgggtccccctggtactcaatttcaaaccttcgcagcccattgatgatctggtaccgccccaggggcgtaaggatgagtccgtcctcacccacgatgcagtcggggagttgcttttttccattctcatcctgggtggtgcccaaggcgagtgtgaactgcctgagctgcgcttcgctgagccggaatatctggcgcaggtactccagggccttctccaggtattcatctgtcttccggacactgtcttgccccatctcgtccaggtcgttggctgtgtaggagccattggtgtccatggagctaaagcccagccatgagaggaaggagtggccagccgggctctccgcacactggtcggagatggacttggctgtgtgtttggcctgtgtgatgagctgagcgaggcgcaggaccagggtgcgggcctcgggcccaaacatcggggtgtacttgcagtcctggccctccaggctgtagacgtggctcttcaccttgaaggaggcatcagtgaccgctggtggccagggtgacaggaagctcccagtgaatgtgggggccgtgaagagtcggtgctggcggtgggggatgaccagctctggctccaggaatagctgctcacctttctgaatcatctcagccaggttgggctgggcaaagactttggccactcggaacaccatgagcgcgtgcttggggctgaccaggtctgtgcggagcgcgcggttcagaaagcccacaaacaacttggtgtacatcagcaggttctcctggacaaagggtgcccatttctccgacacacaccggggctgggagtcgctgcccggagcctgcttgtcaggcgcgtaccgccacggctgcaggtagctcagccacatctctatgcacactgggactggtagtcgcagggcggagcgtgcttatcagtggcgcaagaagaggtagacaggtagctgacgcacatctccagagcagctcctgatcgattcgtccagggggcagtgggcgtaggagtgggccaagaagaagtagagttttggctggacgatgctcgggacagcagcccgtttgatctcctccagggggctggtggcgtgggagtg

SEQ ID NO: 318587 - DNA, 550 bp, Homo Sapiens
gcctccaccacactagcctcctaaagcgacacatctctcatcagacgtctgtgaatgcagaccccgcctcccacgagatctggaggtgtgtacctctcatccgggtctttgagagaaacatgctctcatcactattcctgtgagacggatcaaaaaatgccgccagatctggacatgagagagtttgctccaggttgttgcagaaatgcgcagttgcatcactatatccttggagcagtacaaaaaacagcagttccatcattcccaggagtcgttcacgcctactgaggagcatgtgttggtggtgcgcctgctgctgaagcacctgcacgcctttgccaacagcctgaagccagagcaggcctcaccctccgcccactcccacgccaccagccccctggaggagttcaaacgggctgttgtcccgaggttcgtgcagcagaaactctatctcttcttgcagcattgctttggccactggcccctggacgcatcgttcggagctgtcctggagatgtggctgagctacctgcagccgtggcggtacgcg

SEQ ID NO: 318588 - DNA, 2321 bp, Homo Sapiens
  misc_feature (835)..(835): n is a, c, g, or t
  misc_feature (878)..(878): n is a, c, g, or t
  misc_feature (1264)..(1264): n is a, c, g, or t
  misc_feature (1747)..(1747): n is a, c, g, or t
  misc_feature (1990)..(1990): n is a, c, g, or t
  misc_feature (1997)..(1997): n is a, c, g, or t
  misc_feature (2009)..(2009): n is a, c, g, or t
  misc_feature (2012)..(2012): n is a, c, g, or t
  misc_feature (2014)..(2014): n is a, c, g, or t
  misc_feature (2017)..(2020): n is a, c, g, or t
  misc_feature (2026)..(2030): n is a, c, g, or t
  misc_feature (2232)..(2232): n is a, c, g, or t
  misc_feature (2246)..(2246): n is a, c, g, or t
  misc_feature (2285)..(2285): n is a, c, g, or t
  misc_feature (2294)..(2294): n is a, c, g, or t
  misc_feature (2312)..(2312): n is a, c, g, or t
tgctccggacatgtcgggccctcgcgccggcttctaccggcaggagctgaacaagaccgtgtgggaggtgccgcagcggctgcaggggctgcgcccggtgggctccggcgcctacggctccgtctgttcggcctacgacgcccggctgcgccagaaggtggcggtgaagaagctgtcgcgccccttccagtcgctgatccacgcgcgcagaacgtaccgggagctgcggctgctcaagcacctgaagcacgagaacgtcatcgggcttctggacgtcttcacgccggccacgtccatcgaggacttcagcgaagtgtacttggtgaccaccctgatgggcgccgacctgaacaacatcgtcaagtgccaggcgctgagcgacgagcacgttcaattcctggtttaccagctgctgcgcgggctgaagtacatccactcggccgggatcatccaccgggacctgaagcccagcaacgtggctgtgaacgaggactgtgagctcaggatcctggatttcgggctggcgcgccaggcggacgaggagatgaccggctatgtggccacgcgctggtaccgggcacctgagatcatgctcaactggatgcattacaaccaaacagtggatatctggtccgtgggctgcatcatggctgagctgctccagggcaaggccctcttcccgggaagcgactacattgaccagctgaagcgcatcatggaagtggtgggcacacccagccctgaggttctggcaaaaatctcctcagaacacgcccggacatatatccagtccctgccccccatgccccagaaggacctgagcagcatcttccgntggagccaaccccctggccatagacctccttggaaggatgctnggtgctggacagtgaccagagggtcagtgcagctgaggcactggcccacggctacttcagccagtaccacgaccccgaggatgagccagaggccgagccatatgatgagagcgttgaggccaaggagcgcacgctggaggagtggaaggagctcacttaccaggaagtcctcagcttcaagcccccagagccaccgaagccacctggcagcctggagattgagcagtgaggtgctgcccagcagcccctgagagcctgtggaggggcttgggcctgcacccttccacagctggcctggtttcctcgagaggcacctcccacactcctatggtcacagacttctggcctaggacccctcgccttcaggagaatctacacgcatgtantgcatgcacaaacatgtgtgtacatgtgcttgccatgtgtaggagtctgggcacaagtgtccctgggcctaccttggtcctcctgtcctcttctggctactgcactctccactgggacctgactgtggggtcctagatgccaaaggggttcccctgcggagttcccctgtctgtcccaggccgacccaagggagtgtcagccttgggctctcttctgtcccagggctttctggaggacgcgctggggccgggaccccgggagactcaaagggagaggtctcagtggttagagctgctcagcctggaggtagggggctgtcttggttcactgcttgagacccacaggtctaagaggagaggcagagccagtgtgccaccaggctgggcagggacaaccaccaggtgtcaaatgagaaaagctgcctggagtcttgtgttcacccgtgggtgtgtgtgggcacgtgtggatgagcgtgcactccncgtgttcatatgtcagggcacatgtgatgtggtgcgtgtgaatctgtgggcgcccaaggccagcagccatatctggcaagaagctggagccggggtgggtgtgctgttgccttccctctcctcggttcctgatgccttgaggggtgtttcagactggcggctccagtgggccaaagggcaaccacatgagcatgggcaggggctttctccttggatgtgggacccacagcagcttcctgaggntgggggngggtgggtgggnggntnggnnnngaggannnnnggggagggagcagacctggatgtggacttggactcggacacttctgccctgcaccctggcccgctctctacctctgcccaccgttgtggccctgcagccggagatctgaggggctctggtctgtgggtcagtcctctttccttgtcccaggatggagctgatccagtaacctcggagacgggaccctgcccagagctgagangggggtgtggctcngccctggaaagggggtgacctcttgcctcgaggggcccnagggaagcnctgggtgtcaagtgctcngaccagggg

SEQ ID NO: 318589 - DNA, 1376 bp, Homo Sapiens
  misc_feature (1234)..(1242): n is a, c, g, or t
ttttaaaaccagaatgaaattttattgtgtaaagtttatagaagtatgactagtattcctttgtacaaagtacacaacggttttaaatataactgagagaaatgtgagtcctatgacaacatctgatacacgctgaaccatttacagacacactaaaaatgttttaaaatatcttctttctccaaagagtccattgcgcatttcttagagtagagatggggacacattccaggcaaggtcacaatggcattttgttgccctcaatgctgattttcactgcgtgtgcagatctgctttttttccttatatctgtgaactttctcatctgtttatccagtcgactgatacccttcttggaggtcgcctgaaacctggatgactccatttccacattccatttgggcctgacaacatagtccttgtttgaaggcattgggacccttgcacgggcacagaatccaggatctccaggtctaagagccttctcctctcctgtcagcaccttttccaggtctcttctgggtgtctgaccaccagtgctgttcattcttcgtcgttgaggcatctgttctagatctctctgctccctttcttctcttgtcattcctttgtagtttgaggtaagaccaaatataggcctagaccactcattgattaatttccctgccatgtccttgttagaccttgactccttggggtgtttatagagatacatcactgctcgtccaatcccactatgcttcagggtctcctggctcacactaggcagctcttgcaggatcttcagcagctcctcccggatcttgagtgcaggcaaactcctatctggtagaggtgagagccattctttgatggcagacatcacaccactgtcaatgaatgtttctttaaggtcctgcttcttaaggtgcataactacagcaggcagtaaagttaattttttcagtgctggctttttttgattgttcaactgtctgtcttcctcagcaggtttattcatcttgacgatcatggcactcacgacgttttttgcatcactaataaaggtgccaccatcggggttccttttgcgcttgccactcatgctctttttttgttgcaacattatctcaaaatctgacagaaagtccatacgtttttctctttttatgttatcatcagaatctgaatcttctgctttttttacctcggcttaacccttttcttctttcagatcctattggcgaaatacccnnnnnnnnncctcctcttcatcaccagatttcttcaaatttgcccgaaacgaagattttcttattttattgactggactaacctgttcatttgtcaatcataactcatccgccaaaatctctgttttattaaaacaagtttgt

SEQ ID NO: 318590 - DNA, 737 bp, Homo Sapiens
ttaaggttgagataaaaatgtaagtacagaagcatgaaaagtaaaattttcgaataaaaagatgtctggcattttatccacatggttatactgactcacaatgtccaaataataacaatttaacagtataaggctgatctaatacatgacaccaatgggatattatagcttcttatttaaaaagaatatcatttgttagtatacagttattataaacagttaattgtttacattcattatctgtattcaaagaatcttgtcaggtctgaaggctttcccatactgcttacattcatagggtttttctccagtgtgagtccttccatgcctttgaaggtgcgaggctgatctgaaggctttcccacattgcttatattcatagggtttctctccagtgtgagtcctttcatgatattgaagggaactagaatacactcatagggtttctctcccgtgtgagtcctttcatgacattgaaaagaagtaaaaggaatgaaggctttcccacactgcttacattgatagggtttctccccagtgtgagtcctttcatgatatcgaaaagaactggaaaatgtgaaagttttgccacattgcttgcattcatagtgcttccttccagtgtgagtctattcatgtccataaaaggaaccaggctagctgaatgctttcccacaatccttacttcatatggcttctcttcccatataatcccttgcgtgtatatgcaaggaaag

SEQ ID NO: 318591 - DNA, 854 bp, Homo Sapiens
  misc_feature (416)..(416): n is a, c, g, or t
  misc_feature (422)..(422): n is a, c, g, or t
  misc_feature (425)..(425): n is a, c, g, or t
  misc_feature (428)..(429): n is a, c, g, or t
  misc_feature (444)..(444): n is a, c, g, or t
  misc_feature (454)..(454): n is a, c, g, or t
  misc_feature (461)..(461): n is a, c, g, or t
  misc_feature (504)..(504): n is a, c, g, or t
  misc_feature (519)..(519): n is a, c, g, or t
  misc_feature (523)..(523): n is a, c, g, or t
  misc_feature (531)..(531): n is a, c, g, or t
  misc_feature (545)..(545): n is a, c, g, or t
  misc_feature (547)..(547): n is a, c, g, or t
  misc_feature (552)..(553): n is a, c, g, or t
  misc_feature (559)..(559): n is a, c, g, or t
  misc_feature (563)..(563): n is a, c, g, or t
ttgaaagtgcaataatttggtattttgaagacccggcgtgtggtcaggaacccccggggaaggcggggcccagggtgcggcaccgtgtggcgtgggggggtctcagttttctagccagctacctcggtaattccaattcaggttaacttccctacggaacagtacagatgtccacagatgtccacagctgccgccgccgccgccgtcaccataccccggtccttggggcatgggttgcggtcgcttcccaaggggcagcagggaccccggccaccccggctctcggtttgggttgattcctctcctttttgctcttggttttccgacgggtacgaggctggcccggcaccctgtcccccgggagcctcacttttccagcaggaccagaccaggggcctccttcctgtccccaggcnttcccngcnccnngcaggccccacccangcccttggcntcagggnccaacaactgggggagctaccagggctctgccttcaggagccnacagctgggcacccncccngccccccnggagaccggggttnangcggnnttccgncttntcctggttctccaacaccgctgcctgcggtctgttttgcttttgtcctccccagcccagaattttcctttgtataaacagaactcctagtcaggaagcaatatcatttcaggtctaaagaaagggacgtgcatctggccgagggcagttcagtctcactgcagagcccgcagcccgtgcgcagctcggcccctccccgccgcacgggcagctgaaggccgctgttttctaatatttgtattctaatttaattgtttttaaaaaatgcaaataaaaaaggtcgaggtgaaaa

SEQ ID NO: 318592 - DNA, 793 bp, Homo Sapiens
ttattacacaaagaaaaagattttattgtcttcttagtcaatatccctggtgaaattagaggcatagcttgagactggtgacagtgcaacacagaccttcaggagctgctttgaggactggcctgcccagatgcctgctgttaagccagcagccccctcactccggcccctgccatcttgacagatggagctgccatggtttcagggacactcagcagggcatctgggttggtccctcccacatggaccttgtaaagttgctattcaggggaacctggtatcgtttcaggcaaaacacagaaccatattagcacttctaagccccctgccccggccgcctccccggaacatttgggcttgtcgcacattccaggagggagcaggagcacagctgcagccacagttgccaggaacaggcctgggctcccgccctgtgtggggggagggcagaggctgagggcttcctctgggggccctgagtaagctcaccctcaccccacctctctgacttcatccatccaaggccgcttggccaagagcccaggcagggtgaggggctgtctcccagaccaggcctgggctgcctagcagaggtgggggagggggagcttcaggcctagcccaactctccagaaaccaggggtagcctgctgagctctgaaatgccagaagtttaagaaaagagggaagggggcaagaggtggtggtggtagtggtactttgctatttaaaggtagaagaatgcaaggaagtaaaactttttttctccatttgttgtttggcgaccccattg

SEQ ID NO: 318593 - DNA, 615 bp, Homo Sapiens
  misc_feature (422)..(422): n is a, c, g, or t
  misc_feature (605)..(605): n is a, c, g, or t
tacttttggtagataattaagattattaaaccctcatttaaatgtgacataaaatacagctttaagcacataaatacaaagcagcttccatcaggaacatggagcaggcagggactccattttacagaattactgagatttctcagttgtaaaacatgatgtcatcctgcatgcctcctgggaattctccaatggggtcgccaaacaacaaatggagaaaaaaagttttacttccttgcattcttctacctttaaatagcaaagtaccactaccaccaccacctcttgcccccttccctcttttcttaaacttctggcatttcagagctcagcaggctacccctgggtttctggagagttggggctagggctgaagctccccctcccccacctcttgcttaggcagcccagggctgggtctngggagacagccccttcaccctgcctggggcttcttgggccaaggcggctttgggatgggatgaagtcagagaggttgggttgggggtgagtttatttagggggcccccagagggaaggccttcaggcttttggccctttcccccacacagggcggggacaggggaccttgtttctggggcagnttgttgggtt

SEQ ID NO: 318594 - DNA, 438 bp, Homo Sapiens
  misc_feature (346)..(346): n is a, c, g, or t
  misc_feature (389)..(389): n is a, c, g, or t
  misc_feature (396)..(396): n is a, c, g, or t
gaaaaagttttacttccttgcattcttctacctttaaatagcaaagtaccactaccaccaccacctcttgcccccttccctcttttcttaaacttctggcatttcagagctcagcaggctacccctggtttctggagagttgggctaggctgaagctccccctcccccacctctgctaggcagcccaggcctggtctgggagacagcccctcaccctgcctgggctcttggtcaagcggccttggatggatgaagtcagagaggtggggtgagggtgagcttactcagggcccccagaggaagccctcagcctctgccctccccccacacagggccgggacagggnccttgttcctgggcagcttgtggctgaagcttgtgttccttgntccttcngggaatgttgcgacaagcccaaatgtttccggggaaggcggc

SEQ ID NO: 318595 - DNA, 448 bp, Homo Sapiens
  misc_feature (49)..(49): n is a, c, g, or t
  misc_feature (57)..(57): n is a, c, g, or t
ttacacaaagaaaaagattttattgtcttcttaagtcaatatccctggngaaattangaggcatagcttgagactggtgacagtgcaacacagaccttcaggagctgctttgaaggactggcctgcccagaatgcctgctgttaagcagcagccccctcactccggcccctgccatcttgacagatggagctgccatggtttcagggacactcagcagggcatctgggttggtccctcccacatggaccttgtaaagttgctattcaggggaacctgggtatcgtttcagggcaaaacacaggaaccatattaggcacttctaaggccccctgccccggccgcctccccgggaacatttggggctttgtcggcacattccggggaggggagcagggagcacagcttgcagccacagcttccaggggaacaggctgggggttcccgcct

SEQ ID NO: 318596 - DNA, 1652 bp, Homo Sapiens
cgggatgccccagagcgcggcggcagcggcggcctggcccttccagagggccagagccagggacatgcgggcgcccgggactccgcgttccgcgcggcccggcgcctgagcgcctccgttccccgtcccggagctgccggcggcatgatccgacacgccggggcgcccgcgcgcggggaccccacgggtccggttccagttgttggcaaaggagaggaagaggaagaggaagatggcatgcggctttgtctgccagccaacccgaaaaactgccttcctcaccgccggggcatcagcatcctggagaagctcatcaaaacatgcccggtgtggctgcagctgagtctgggccaggcagaggtggccaggatcctgcaccgggtggtggctgggatgttcctggttcgccgggacagcagctcgaagcagctggtgctctgtgtccactttccttctctgaacgaaagctcggccgaggtgctcgaatacaccattaaggaagaaaagtcgatattgtacctggaaggctcggctcttgtgtttgaggacatcttcagattgattgcgttctactgtgtcagtagagacttactgcccttcacactgcggctaccccaggccatccttgaggccagcagcttcacggaccttgagaccatcgccaacctgggtctgggtttctgggactcctcgctgaatcctccacaagaaagagggaagccagcagagcccccaagagaccgggcccccggattccccctagtctccagcctcaggcccacagcccgtgacgcaaactgtgcctgtgaaatcgagctgtcggtaggaaatgaccgcctgtggtttgtgaatcctattttcatcgaggactgcagcagcgccctgcccaccgaccagccacctcttggaaattgccctgcacgccctttgccgcccacctctgatgccacctcacccacctccaggtgggccccacgccggccaccacccccttccccagtgctgcccctgcagccctgcagcccagcccagccccctgtgctccctgctcttggccccgcccctggctgtcctttgcccacctctaccccagtgcctggcccccacgttacaccccatgccccaggttcaccagaccatacaaaccagtcgtccatgatgacctgcgagagactcccatgccccactgcaggcctggtccctctcagggaggaagcgatgaagtcagggacagacttcagttccttgcagaaggtaccacgtcccgacactgtctgagatgaagaaccttgtccactgtccctataagacgccgtgttaatctagagggtgtctcttataagaccaaagtccgctcttggtggttggagggtgaccagcttaatctgcctttaccagggaaccttagtcgtgcctttaggcctgtccccgttagagcacgatccagggcccagtcacagtggtgttagttcgtcccccttccagcctgccactatctcccagttaggtcttcactctttattatacttccttgtttaaaacgcactcctctattttgtcttagcccctccatcttatttggtacgtttcctttaccccgcgcgtgccttcgaaacactctcgccgtgtactcctggggatccaagcccgct

SEQ ID NO: 318597 - DNA, 1086 bp, Homo Sapiens
  misc_feature (8)..(8): n is a, c, g, or t
  misc_feature (18)..(19): n is a, c, g, or t
  misc_feature (58)..(58): n is a, c, g, or t
  misc_feature (113)..(113): n is a, c, g, or t
  misc_feature (118)..(122): n is a, c, g, or t
  misc_feature (148)..(148): n is a, c, g, or t
  misc_feature (153)..(153): n is a, c, g, or t
  misc_feature (577)..(638): n is a, c, g, or t
ttttcccntgttgggtgnntacctttccctgttctggccccccccttttgccttgttngggtcctctccttttgcctggttggggtccctctccttttcccttggtttgggtnccttnnnnnttttgccctggtttggggtccctctnctttntgccctggtttggggctccttcagcctttttgctttgattctgagtcccttccgcctttttgccctgagtagtgccagtggctggtgtgttgcccttggcacccactgggggcaccaccaccatcggcacctccttgggagcagtttccaagatggcagccttcgaagtgagaacctggatggaattcactacagagctgacagctggttccacttttgccacttttttctccttcttctttttgtccttgggggaggaggccagcttctcctggggcatggctggaactgtggcgacaggagcaacgataatggggggctgcactggggttggagccacagccacagcaggagcccgcactggttctcgaaggaggacagtcacattggggctggatcatgatcaggtatcttcccattaggnnnnnnnnnnnnnnnnnnnnnnnnnnnnnnnnnnnnnnnnnnnnnnnnnnnnnnnnnnnnnncgactttctggtggtgagttttcgccatctccttgcgctggttggctagggcttcttcatatgacgtttccttcatggagaaagtcgacaccaggaagatgccaatggcagaaacaaccatgaatcctccaaagaccacaacccccaaggtttgagtgtcgtaaatatccatcctggcttgctttcctttcactaggaggtctgccccggcctttgcttcaacagagagggaaatggcacctccaggacctcagaaccggaagcttctttctgcagccagagacgcgagagggaaagcgagagggcaggagccgccgccttcgcagccgccgcggagccgggagagaggagccggccaagcctccgccaagaaaccgcccccgagcagctgtagacgctgcgaccctgacgccgcccgccccgtctgccgtccgctccggccgctcgc

SEQ ID NO: 318598 - DNA, 2422 bp, Homo Sapiens
  misc_feature (1564)..(1564): n is a, c, g, or t
tttttttggtaactttggggatgtttattgcaaatggttataatttaagtgatatttacaattgtttaagacagagggcaaacaggctctgagccaggcctcagctttagaggcccatcctggagaggaaatggcacttgcagggaacatgagctcaatcactattgctcactaagcacagggtcacactggagtcatcttagggaggctgcgaggaagaaaagggagtgcacagagccatgaagcaactactttaaattctgaatcttgctgtgttcccactgagcatgctgccttcctagagcaggccttggagccatcccagggactaacacagatccttcctggggcgcaggcttctcacactagcgtagggtgcctaggtcatcctcatcattgtttatcatcacagacttctttctgcctgccagatatcttccctacttgtggctttaaaacaccagcaggagggaagtcaaggaatgttcttgttagtataaatccatagcaaaaacgatttgagaactggatgcttcccagggttggcaggtgtgtggatggttccctgaattctttatccacaggatgcttgaatgggtggtgctgttgaggctgacaaatgtctgagctttacagacttgttcatgtttttgagaacctatggggatactcattgggcagaatcagagcccagcagaacacggggacggggaagggtaaagaggggaaaccgacagagtcctgaggtcatcccgggaggaagggggactacttccagaagcagcagcacaaagggctctgccgagactctgcggagggggtccagggtactgggggtggaggggtcccctcttgcagtgtggggttactgtttgggtaaagcgaagtcccaggcagtttcctgtgcacatttccacatggcctgcatgaggcgagtgaaacccatgtctttgggcttttccaggcctctcatcagccgttgcttcatgatggaaacaaattccttattgctcagttcgccattgccatcacagtcaaagagtgcaaacaccacatcacacacgtggtctgagagctccactttagccactgtcctggccacctgctgcatggtcactttatcaagagatgctccagccatatggtaaaaactcaatgcagtgtccacatcattaatgttctttaggaaagtaaagaagttctccacctcctgaaatgtcagaccctttccttctttgaagtgcttcttgagctgcctctgcatggcggtcagcttcttggactgcaccccactgtaggcaagtagcatgccaccaaactgcctctcagtaattctcccatccacagggtcatggcgttcaaactcaagcttcagaacatcatgctgcagtttacgctgaaattcgaggaagtttttgattgtcagctttcccttcagatcagctccaaaaaagtaggttgtgagggctgaacacaagccagacttgagggtgttgccagtagttggacgatctctgtggcgcatacccatactggtttgggagcgaatgatgctctgaacctnttcaaattcttccatatctacttctccatctccattcaaatcaaacatcttgaaggcaatttcaaaattttctctgaggagtggaaaagaaccagttgtgaggaaaatgtagtctgaaaaggatatgagcccacattctccaaagggtgtaaaatatactgccttcatcagcaaatttttctcgtttcctgggaaattttctttccatcaaagcgttttattatatattgatccagaccccaagtgttctggttgtttttcattgggtgttatcggatcgcacaaaatcttctggtgtcataaacacttctgcttcaccaggctcactgatgactttcaaggtggcaaaatatcggaagattttgtctggcgtggagtaggctcgaatcctattctcatattccatcacttttctgtctctgaatccagaacgtttcttctttttctcttctgggtgaggggcaagatctgcagtctttttctcatggttacaaacatccccttcatctttattcttccctttatcaccgatgtcactttttaggttgtctacacatggtggagattctgcatgggccctcttccacaaaagaccagtacttgcagttactgcagatgctcccaggaaagccaccatcattagtcttcgccggatctggatgggctgtgatcctccatggtaccatcgagaacccacagccagttctgccaaagcagaaagtgagttcagacgaaacatcgcgtccaaacacgagctccagcagcctctcggtcaaagccgcccacctctgacagccatagagatgaaacagcggagacaaacctccaccccctccgcccactctcacgtgacgtccc

SEQ ID NO: 318599 - DNA, 985 bp, Homo Sapiens
  misc_feature (919)..(936): n is a, c, g, or t
ccaagggggggttcaggggagcgcgccacacaagggcctgggcggttccaggacaggtgtttccgttttttatggacaaaccctatggggtatcccagtattgccaaggccgactcaggatttcattcccaagaagaaagggccccttcgtggagccggcccgcaagcggggagaagaggaaggccaaggagccaggagaccccggccaccaagaaggctgtccaaggcgggggagcccacccccgtggtgggggctgtccaggggcctgtcccgggcatgccgccgatgactcaggcgccccgcattatgcaccacatgccgggccagccgccctacatgccgccccctggtatgatccccccgccaggccttgcacctggccagatcccaccaggggccatgcccccgcagcagcttatgccaggacagatgccccctgcccagcctctttctgagaatccaccgaatcacatcttgttcctcaccaacctgccagaggagaccaacgagctcatgctgtccatgcttttcaatcagttccctggcttcaaggaggtccgtctggtacccgggcggcatgacatcgccttcgtggagtttgacaatgaggtacaggcaggggcagctcgcgatgccctgcagggctttaagatcacgcagaacaacgccatgaagatctcctttgccaagaagtagcaccttttccccccatgcctgccccttcccctgttctggggccacccctttcccccttggctcagccccctgaaggtaagtccccccttgggggccttcttggagccgtgtgtgagtgagtggtcgccacacagcattgtacccagagtctgtccccagacattgcacctggcgctgttaggccggaattaaagtggctttttgaggtttggtttttcacnnnnnnnnnnnnnnnnnnctcgagactagttctctctctccctcgtgccgaattcgccacccaggcc

SEQ ID NO: 318600 - DNA, 489 bp, Homo Sapiens
  misc_feature (305)..(305): n is a, c, g, or t
  misc_feature (445)..(445): n is a, c, g, or t
gcctttatatccagcgatctttctaaatttaagttcacttattaatcctaacagttgcttagtagacacttggattttctacatgcacaatgagttacaagacacaggcgacaaaatcaaggccacggagagagcgaaaccaagtcatagccatgaagaaagaccttgagaaacagtcacaaggagggaacaagagtttcgaaaggagatagcatcatctaggtgctcaataccccccaaaacgagagagagaaacacatctctataaagaaatggaaaggaggggtctgaagccccaaggggangaactctccccaccctgtcccaaagccagtccattgtggctgaggaaggtctggcagtgggagggttggtctccgggacctggcttaccgggacaggcccctggacagcccccaccacgggggttggctcccccgccttngaaagccttcttggtggccggggtctcctggctcttggggctcc

SEQ ID NO: 318601 - DNA, 772 bp, Homo Sapiens
acttgatgggaatcatggcagcatccaggccattgtcccgcttctgggagtggggaaagaacatcgtctgcgtggggaggaactacgcggaccacgtcagggagatgcgcagcgcggtgttgagcgagcccgtgctgttcctgaagccgtccacggcctacgcgcccgagggctcgcccatcctcatgcccgcgtacactcgcaacctgcaccacgagctggagctgggcgtggtgatgggcaagcgctgccgcgcagtccccgaggccgcggccatggactacgtgggcggctatgccctgtgcctggatatgaccgcccgggacgtgcagaacgagtgcaagaagaaggggctgccctggactctggcgaagagcttcacggcgtcctgcccggtcagcgcgttcgtgcccaaggagaagatccctgaccctcacaagctgaagctctggctcaaggtcaacggcgaactcagacaggagggtgagacatcctccatgattttttccatcccctacatcatcagctatgtttctaagatcataaccttggaagaaggagatattatcttgactgggacgccaaagggagttggaccggttaaagaaaacgatgagatcgaggctggcatacacgggctggtcagtatgacatttaaagtggaaaagccagaatattgagttatttcttaacaagtttcgagagagaagggagcaagacaagagcaagcaacggctattaaatgtcacaatcctttaattagaaaccattt

SEQ ID NO: 318602 - DNA, 1353 bp, Homo Sapiens
  misc_feature (59)..(68): n is a, c, g, or t
  misc_feature (1300)..(1300): n is a, c, g, or t
  misc_feature (1331)..(1331): n is a, c, g, or t
caggggcctctgcttttttggttcgcggaaaaatggaccatcttgttcccctttacaannnnnnnnnntgcccccaaccggctcataattttctccgggtgccaagccatccatgggtgtctccatggccctgctcagtaccccaggatgcaaaagccctgggtcattttctttaccgatctcagcctttaaattggtggccaagagtgtaagtgtctgttggtggtataaaaagctgttcttcccgctcacccagtcagctaggacaagctttggccgcctgttcctgactatatgaagcctcccttcttcttcttcccccaaacgttgggccactgccgtcagaaagtgctcagtggtctggaacccagagacgccataatagttggaaatctcctccaggttgcagcgctgcaggatggtctccactggggtcacagggtctgccagcttctgcacgtggacgcagttacgcaggatggtgcccacctctgagttgggccctgggacaatgcctggagcatccaagagccggatgaacttgtccaggtagacctcctgcatgaatttggtaattccaggaacagctcccacgctgcatgcgcggctgcgcttcaggctattgatcaggctgctcttcccaacattgggaagacccacaacacccacacgaatgtgggtgcgcacttcaccaaggcggcaatagttccccagaaccctcatgaggttttcagctccaaagcaggctttgcttttcagcagtgactcagaggcctgatctactggcacactgcaacgattcaggtttttgacctgatgctgggtactggccttgaaagccacggttggcaactcattccgaaggtaatccagccatttctccacaacctccttggggaccaggtcaatcttgttcaagaccaggaccagcttcttgttgccttgtgctcgcaggacagcctcctccatttggaagcagcggcagcctaatgggtctctggcatccaggacttccagaatcacatcagagtattccaccaccttacggaactccttgtaataagccttcctcgtggcctcgtcatccagctgaggaaacatatttaattcctgcaaaacttcctccttatgctcaaactcctcctggcgtcttaggacatcctgacagtagctctcaatggtcctgcgtttttgtctttcttgctcccgggcggcttgctgcttctccctcatctcctcaacccacttcttctttaattcagcctctcgattggcatgatcattggggtgaacaaaatgnggtgcagagggcactttggaggttgctttcntcccattttgctttgcaggctg

SEQ ID NO: 318603 - DNA, 1131 bp, Homo Sapiens
  misc_feature (855)..(881): n is a, c, g, or t
gatggcaaagagggaacgccccacaggtcggccagacaccacctgagcaaccgtgtggcgttcaggcgtcaacggcccggacgggcccggttttaccacgcccgggcttggagaccgccacggggaagctgcctgatcgtggaggtaagggacatccaggggctccacgggcacttctcctatcccataatcggagtatagcagcaccgaggccagtcgcggacaacagctgtaacagctggtggcgtaacgcactagctgctgtttgaccgggttgtactggcttccatccagggtctggaaatctgtcaacacgacttctggcgggtgggcgagattctggactgaggtgggcaggggagggagaaaggtgctcttggttcggatattggtcagtaggattctgacgtccaagtgcctgtggacgtcggcgccagcatagaggtgcgtgatgaaatcaagaacctcaaacgtggcctgcacggggctggactggggctgagccgggccctccaggctcatgcccggctgcaggtgaacatagagtgtgtgattcaccagccgggccgccgaggtcaggatggaggccaggcgaggggctagggaggccagcggcgtcgtcagcaccaggagacccgaccggaatacggccatgctgcccaggcctgcggacagtcagggagacgaggcgacggtgactgaagggcctgcggccgaggcagaggcctgtatgggaccttggaccccagagaaggaggcctggagcagggacggggtttcagtgctgaccgacaggagccgggggaggggacggggcctggtagacggcgcctcggggctgtgctctaagccttnnnnnnnnnnnnnnnnnnnnnnnnnnntgacttcgctgaactgagtcgaaatcctgggagggggaaactggacaggaacccttgtcacagggctggggatccaaaaatcctgggccctcttgctaagctgcaccagggtcttcaaggaatcgaagagggaggctaaagggggacgctaaagctcacgtcggccccctactcactgaaacctcaaggcttgggttccacttgcaccaccgcggaggcttccctggctgcaacccggaagcactaacac

SEQ ID NO: 318604 - DNA, 2082 bp, Homo Sapiens
ctgaacattcacctttaattctgttacaggttccagtatttgcgctggccctagtcagctgtgggtaagagtcacccatgggcaagagtggggaggggactgctccccccatgaaccacatcctcagtgttggccaaataccagcgtgttgggtaggcttcctgtgtccaccaggcctggccatgtcctgcacagtatagcttggacctctgggcctgaaccagggtgagcatcaaggcccccatttctcctcaccacggggtcgcttgtcagctccaggagccagtctggccccactgagaacttttcagtcgagggcctgatgagtcttgggaatgcgcttctgcaagagggcccaggctttctccacctggcgttgggtgatatgcggctcccacaaggtgctgagcaccacgtggctctgttccacaagctgctgcccgctcatctggctctgcagccggctttgagccgcggcttcactgaggccatccctctccacaatgcgtcttacagcctcagtctctgggatgacagcagtccacacctcatggaccaggttctgccagccggcttcaagcaacacagcggcatcaatcacacacacacgctttccctcagccacagcccgatccatctcctctcgggccagctttgcgataattggccacataatgtccgtgagtatcttcagctgcttcttattcccaaacacccggctgcctaggaccttcctgttgatgatgccatctttatggagaatatctgttccaaaggcctccaccacaggctggtaggcagggccacctggggcataggcccgatgacccaggtggtcactgtcaatgacaaacgcccccaggcccttcagtcgctgagctattgagctcttcccagagccactgatgccagtcagcccaattacatagagacatgtggggagctctggcctttcatatggaggccgaagcaggttccccaacattcgctggcggaagctggaggagctgactttgtcctcttcattctctgtatgtctgaggtccttcagcagctggatctggtacaaagcaagttcctccaggtcattctcaaggcggaagcggttgatggccatccccccacgataggtctcctcgctgaccaccaggaactccagggaggggtcagagccagcgggcccataggggtccagcagggggatgacatcaaaagtcaaggagggcttgatgtccaccaggaattcactcagatgttccacacgttctgtataaggttggagcagctcagggagcaacttgctcttcaacagatctttgtctgctactcccaccacaagctgctcctgggccaggatgcacgcgacactgagcaacaccttgtgggcgttgtgcaggcggtcaaacgtgccaccgacagcgccacggtagtagccacgcaccggctgctttggagacccggccacgggggaagctggcctgatcgtggagggtaaggggacatccaggggctccacgggcacttctcctatcccataatcggagtatagcagcaccgaggccagtcgcggacaacagctgtaacagctggtggcgtaacgcactagctgctgtttgaccgggttgtactggcttccatccagggtctggaaatctgtcaacacgacttctggcgggtgggcgagattctggactgaggtgggcaggggagggagaaaggtgctcttggttcggatattggtcagtaggattctgacgtccaagtgcctgtggacgtcggcgccagcatagaggtgcgtgatgaaatcaagaacctcaaacgtggcctgcacggggctggactggggctgagccgggccctccaggctcatgcccggctgcaggtgaacatagagtgtgtgattcaccagccgggccgccgaggtcaggatggaggccaggcgaggggctagggaggccagcggcgtcgtcagcaccaggagacccgaccggaatacggccatgctgcccaggctgaaacctcaaggcttgggttccacttgcaccaccgcggaggcttccctggctgcaacccggaagcact

SEQ ID NO: 318605 - DNA, 1579 bp, Homo Sapiens
  misc_feature (317)..(317): n is a, c, g, or t
  misc_feature (1032)..(1032): n is a, c, g, or t
  misc_feature (1053)..(1053): n is a, c, g, or t
  misc_feature (1126)..(1126): n is a, c, g, or t
  misc_feature (1194)..(1194): n is a, c, g, or t
  misc_feature (1212)..(1212): n is a, c, g, or t
  misc_feature (1215)..(1215): n is a, c, g, or t
  misc_feature (1265)..(1265): n is a, c, g, or t
  misc_feature (1282)..(1282): n is a, c, g, or t
  misc_feature (1300)..(1300): n is a, c, g, or t
agcccctgtcttgtttatctacccaaggttgttttgatttttcccagccaaataaaggttgaaactatccccaaaagtacctccatcacacaagaagtcttttccctgtaaagcctttccaatggaaaacaccaaaatgggttatgtgaatccggtcaggaaaacccaggtctctaaaggaaaagatgcctcatcaccccttgggcccaggcagctgctgtcagagaatgacccagcacctgcacagtcgctgtccactccctgccactgctgtcggtgggggtgacgggagcaaagtaggcgtggactttgccatnaggaagctgagcccgcatccgcttgatgcctgcacgggtaacctgctggcagtcgtacagctcgaggcgctccaggcctcggcagttctctaggtgttccagggccacatcagtgatgaggaggcagttgtccaactccagtacccgcagcctctcatggccacaggtactgttgctcaggtgcaggatcccatcatctgtgatgagttcacagtgggacaggctcagggcttgcagtttaggacagtgaatggagagctggatgagtgtgctgtcggttatcaggatgcattcttcaagatccatcttctccaattcgtggcaattccgagctaaaagtgtaaaacctgcgtcagtcaaatgggagcatcgggcagcctccaaaatttgcagtcgcggacagttcaaacccagggctgtaagagaggcatctgtgaggttgctgcaacccgaaaggcagagagcctgtagccggtgacagcccctgcatatctgcaccacaccttcatccgtgatacgtgagcaggactgcaagttgaggctcacaagctcatggcagtaattctgaatgtgtttcagagcttcatcttctaactgtgtgcagcccctcaggagcagggctttcaggcctcgacaacctcgcaccagtgcctcgatgccatccttcgtgatctgatcacaccaagagaggttcaggtactccaggtttcggcanccctcactgatacccttcaangagctgtttgtaatagacacacaggaggtcagatccagatgtttcagcttggaacagaatctgctaaggctanaacacgtgctgaaaaagagcagacgcactgtcagtgatttttgtgcatccattgaggttcaaatgttnaatgtttcggcagttctntgnaaaggtcttcagggaggaatccccaaccccaatgcagcctcgcaagctgngcttcctcaggaatccnccgcatcgcttcgagatnttttccacaactcgaccctctacatctgtttgaaagttaaaaagatctattctttgccagttgcttccatccagggctaagatgttccaagccttggaaatctgtgcacatcggcacaaagttactatatccaagaaggaaaatattcttaacagaagttctttgggtaactttttgttaataaggccttcatcattgtttgagaaaaccatggccgaagagccgcgagcgagcccacagcccgaagtcacacggcgccggcgacgcccgttgtcctgg

SEQ ID NO: 318606 - DNA, 1807 bp, Homo Sapiens
  misc_feature (1777)..(1777): n is a, c, g, or t
gggccgttcggcggcgctcccatggcgcacattaccattaaccagtacctgcagcaggtgtacgaagccatcgacagcagagatggagcatcttgtgcagagttggtgtcttttaaacatcctcatgttgcaaacccacgacttcaaatggcctctccagaggagaagtgtcaacaagtcttggaacccccttatgatgaaatgtttgcagctcatttaaggtgcacttatgcagtggggaatcatgacttcatagaggcatacaagtgccagaccgtgatagtccaatcattcttgcgagcattccaggcccacaaagaagaaaactgggctctgcctgtcatgtatgcagtagcgcttgaccttcgagtgtttgccaataatgcagatcaacagttggtaaagaaaggaaaaagcaaagttggggacatgttggaaaaagcagcagagttactgatgagctgtttccgggtctgtgccagcgacacccgtgctggtatagaggactctaagaagtggggcatgctgtttctggtgaaccagctgtttaaaatctacttcaagatcaacaaactccatttatgtaaacccctaattagagcaattgacagctcaaacctgaaagacgattacagcactgcacagagagtaacatacaaatactacgttggacgcaaggctatgtttgacagcgattttaagcaagctgaggagtacctgtcatttgcctttgagcattgtcaccgttctagtcagaagaacaaaaggatgattctgatctatttgcttccagtaaaaatgctattgggtcacatgcccactgtggagctcctgaaaaagtatcacctgatgcagtttgcggaagtaaccagagctgtgagcgagggcaacctgctgctgctgcacgaggcgctggcgaagcacgaggccttcttcattcgctgcggaatcttcctcatcctggagaagctgaagatcatcacctacaggaacctctttaagaaagtgtatttgttactgaaaacacaccagctgtctctggatgcttttctggttgccttgaagttcatgcaggtggaggacgtggacattgacgaagttcagtgtattctggctaacttgatatacatgggacacgtcaaaggctacatatcgcatcagcatcagaagctggtggtcagcaagcagaacccatttcctcccctgtccacggtgtgttgaaagtacacggagccccgaggacgggtgagcagttgtttctttccactttggttgtgctgatgagaccggtccggtactgcaacaaggctccctgaagccggaactcttggaggcgcttttcccagggatgctgaggctgagattttcagcacacccgagttaatctccttcatttgtaactaatttcagcctgatgaaaacctggaattcctttttcacagactcggctggttctggagtctttgtgagacttctttgaaggaggctttgcgtgaaggctgctcggctcacttttcctaagtgtggttcctgaaggctgtctttgtaactttttgtagttctttgtgtaaaaagcgtattctgaatttatacacatggcatgttcttcattatatcttccaggatacatctatttttatatattaaatttgaatgtgttatcaaaatgcttggttaacttaaggcacctttttaaaagcagaatttaatttgatttaaattttccagattttatagcttgcctgtatggatgctcctcaatttatgatggggttancatcccaataaacttattttatttgccttt

SEQ ID NO: 318607 - DNA, 908 bp, Homo Sapiens
gataacacattcaaatttaatatataaaaatagatgtatcctggaagatataatgaagaacatgccatgtgtataaattcagaatacgctttttacacaaagaactacaaaaagttacaaagacagccttcaggaaccacacttaggaaaagtgagccgagcagccttcacgcaaagcctccttcaaagaagtctcacaaagactccagaaccagccgagtctgtgaaaaaggaattccaggttttcatcaggccgtcctcggggctccgtgtactttcaacacaccgtggacaggggaggaaatgggttctgcttgctgaccaccagcttctgatgctgatgcgatatgtagcctttgacgtgtcccatgtatatcaagttagccagaatacactgaacttcgtcaatgtccacgtcctccacctgcatgaacttcaaggcaaccagaaaagcatccagagacagctggtgtgttttcagtaacaaatacactttcttaaagaggttcctgtaggtgatgatcttcagcttctccaggatgaggaagattccgcagcgaatgaagaaggcctcgtgcttcgccagcgcctcgtgcagcagcagcaggttgccctcgctcacagctctggttacttccgcaaactgcatcaggtgatactttttcaggagctccacagtgggcatgtgacccaatagcatttttactggaagcaaatagatcagaatcatccttttgttcttctgactagaacggtgacaatgctcaaaggcaaatgacaggtactcctcagcttgcttaaaatcgctgtcaaacatagccttgcgtccaacgtagtatttgtatgttactctctgtgcagtgctgtaatcgtctttcaggtttgagctgtcaattgctctaattacc

SEQ ID NO: 318608 - DNA, 2416 bp, Homo Sapiens
gaaatggatgaaaagaggctgctggatccagggttgaaggttcataaaggcctctgggattatactctgaagaacccgcagacggaatgcctgagtgactgaagaaaatgggtgctaatgcatctaattatcctcattcatgttccccgagggtagggggaaattcacaggcccaacagacttttatagggacctcatcctattctcagcaaggctatggttgcgaatcaaagttgtatagccttgaccatggccatgagaaaccacaagacaaaaaaaagagaacctctggtcttgccaccctcaaaaagaagtttattaagcgtcggaaatctaataggtctgccgatcatgccaagcagatgcgagaactcctctctgggtgggatgttagagatgtcaatgcattagtggaggaatatgagggaacatcagcattaaaggagctttctctacaagccagtttggctagaccagaagcccggacattgcagaaagatatggctgatctttatgagtacaagtattgtactgatgtagacttaatatttcaagaaacttgttttcctgttcatcgtgccattttggcagcaaggtgtccattttttaaaacactgctttcttcctcaccagagtatggggcagagataataatggacatcaatacagctggtattgatatgcccatgttttctgctttgttacactacctttatacaggagagtttggaatggaggactcaaggtttcaaaatgtcgatatccttgttcagcttagtgaagaatttggaacaccaaattcccttgatgtagatatgcgtggactctttgattacatgtgttattatgatgtcgtccttagtttttcttcagactctgaactggttgaagcttttggtggaaatcagaactgtttagatgaagagctcaaagcccacaaggctgttatttctgcacggtccccattttttcgaaatttattacaaaggaggatacgaactggtgaagaaatcacagaccgaactttgaggactcccacaagaattatattagatgagtccattataccaaaaaaatatgcaacagtgatattacactgtatgtataccgacgtggtggacctctctgttttgcactgtagcccctctgtggggagtctcagtgaagttcaggctctcgtcgcagggaagccaaacatgaccagggcagaagaagccatggaactttaccacatagcactgttcttggaatttaacatgcttgcacaagaggagactacagtcatcaggcctgcctgtgcagcagagctttcaaacagctgcttactgcctcaatcttaaatatgaaaacccatccaaggataactggacatttgaggaaagcttccaaattgagacagagatcagagcaaaaagaacaaagtcctggaggaagcagacaatgaagggagcagaagaaaacttcagtagaatcaaaatatccttatataaaagaactttttatggaatcagtgagacataagcaggatgctattaaagtaaaaacaggagcttttagaaataagatagcagaaatgaaagatataatggaagcattgaaaggtacagttgaggaaatctagaaagtaaataatataataaagagatgagtggagacaaataaaactagagtattcatccagggtttaacatctaacaaatagtggctttagaaatatataccagagaaaagtgaagagaagacagtatctaaggagtaatataagaaatatttccaaaactaaaggaatttctatataaaaagtttctttttcagaacactggggaaaaagagacaattttaaaatgttgcagggaggagaaaaattaggttccatgcaaagaaacaggaatcagatggtattgagattttcagtagcaacaactgaataccacaatacagtgaagtagtgtcttccaaaagctgatggaaaattattttaaacacaaaatcctatatttagccaaacagtcaatcaagtgtaaggctaaataaaggcatttttcagtcatacctcgaaaaactgcctgtgtagggatatttcccctgcttccccactcaggcagctgctgggaatgtattccaccaaatgacgaagcaaaccaagaacaaagaagtgaaggatctagaaaatgggctccaacacgggaaggaagcaaagggagatcccacgcatcagccacacagtaggtcttgtgggcattcagtctagcccagaccgggagggtgaaagtctccaaggaaagaggtgtctcggaagaaatcaattactttcaatgtttgaacattaaatagcaaatgacaaagcaattttatggctcttgtggtgcatttatgaagaattagcaataagttcttagaaaatgaagcaaatgga

SEQ ID NO: 318609 - DNA, 1173 bp, Homo Sapiens
  misc_feature (660)..(661): n is a, c, g, or t
ttttatcccaaggcctcctctttattcaaccgggtcaaactggctcatgggaaacgccctgaagccacgtgcctggggagaaaggcttcctactcggttcggttcagcgctgcgtgggatccacgcggctggctgtgcgcaacccccacagttcacctcagacactaccaagcaggtcagtcgacaaaagcaaggaattaaacaaaaaacagaaatacactcagtagatttcttctagaagctcccagagtttctggaccaccaagtcccaacccccaaagccaggagcgaggggactaacagcgcaccccctccaccagtgtccggcggaaaccccgttttaaattaaaaaataagccagtttacatcgtagaaaatttctcttaaaaatctcacaatttgtaaatgtatattttttctttaacataaaagtttacaatataccgtaaaacaaaaggctcaggaaaataatttccaaaaaaaaggaagaaaaagaaacctgaagttttgaattaaagctgaagacattttttttaaaccctgttgttgaaccagtgacttttttttattgtgctgatgggttagagaaagaaatatttaaaaacctcagtccagacgacacccacagccgctccaaaagcctcgcgccctccccccgcnncccccaaggttgagtcgccactttgccgccaagtttgtgattgtcacgagttcacaagtttggaatcctgggtctgggccgtgcagacgtcgcggcgccgcgggctagcgtcggtaggggtggaacccttgcacgttgtggttctgccctcgtccaaagccgctgccgccggcgggggggccccccgaccctggcacggagggacccccgtaggaaggaggctgctggctggggtctgagaagccctgtccgaagccactcaagtcctgcccgtaaccatactgaccataggggaagtctggctgagctgtcgggggcttgctcatgtccggggcagcctgagacggaggcggtgggaaagccagaggtgctgccccgggagtggctggtggaggaggaacccccggaggggcaaactgatctggcggtggaggtggaggcccgtagccaaaactgaactgtggcgggccaccgtagccctgagggaagcctggggagggggaaagcctcca

SEQ ID NO: 318610 - DNA, 978 bp, Homo Sapiens
  misc_feature (580)..(580): n is a, c, g, or t
  misc_feature (696)..(696): n is a, c, g, or t
tttttttggaacactgaatgaaatttattgaagagagatatgtacttgaaaccggttgaagagaagggaatcacaacacagaagctgcaaatggccaccacaggacacaggtcgggacccccctcctcctgggggaacacccaccccaggtctaggaaactcagtaacaagtaacaacaggggtggaacgccaaagcacaaagttcactggggaacctcagacagccccactccatcccgggtcctgttctttctcccacagtcatggtcaccatcgctgtcacgggatgagtgtccactgtgccctggtgccttctttccgccatctcccgggactgcgctggggtcctctggggaggagctgctcagagaagaacacacacggctccacaaaaacaagcagcccctggcctagatctacgcagggaaagcagaggtggtgctcacgatacgggagagcagtgagcacaacctgggctcccaggaagctcacagcacgtgcccctggcactggaggggcgcctccccccaccccatttggtgttaaatgtggtcatctgggtcaccgggaaggtggtgngtgggcagggccccttggggggaagtggggggccccgatcccgatgtggggtgagggaccggccctggccccgcctccgcctgtctccagggccctgctgcctgagaggaggaganggaggccccggggccctcggagcctatttgcccggggaggactcgcgctgggctgcctccccagccccaacctagttatcacatttctctaggacgggcttgagcccctcctggaggagctcctcagcctcctggcctcctgcctggcggaggccctctggctcccgaccaggacctcctgggaccgcctctactttagtgctggctctggcaacagcctgggcacagcccgggcaccgcccccttcctgtgtctgggctctcacgctcctggctagactgg

SEQ ID NO: 318611 - DNA, 399 bp, Homo Sapiens
  misc_feature (38)..(38): n is a, c, g, or t
  misc_feature (72)..(72): n is a, c, g, or t
aaaggaaaaactgaattcaatgaataaacaaacagggntggaaacaccaaaagcaacaaaagtcctcgggancctcaggcagggcagccccgctctgtccctgggtccagttcttcctcccacagtcacggtcacccatcgtggttcacagggtgaacgtcccgcccttgcccctggtgcttccttcctgtcatctccctgggactgtgctgggggactccggggaggagctgctcagagaagaacacacacagctccacaagaacaagcaccactggcctagatctacacagggaaagcagaggtggtgctcatgacgcgggacagcagtgagcagagcctgggctcacaggaagctcacagcattgtccttggcccagaggcgtgctacctgggtgg

SEQ ID NO: 318612 - DNA, 1117 bp, Homo Sapiens
  misc_feature (853)..(853): n is a, c, g, or t
  misc_feature (865)..(865): n is a, c, g, or t
  misc_feature (922)..(922): n is a, c, g, or t
  misc_feature (972)..(972): n is a, c, g, or t
  misc_feature (994)..(994): n is a, c, g, or t
  misc_feature (998)..(998): n is a, c, g, or t
  misc_feature (1004)..(1004): n is a, c, g, or t
  misc_feature (1013)..(1014): n is a, c, g, or t
  misc_feature (1016)..(1016): n is a, c, g, or t
  misc_feature (1018)..(1019): n is a, c, g, or t
  misc_feature (1023)..(1023): n is a, c, g, or t
  misc_feature (1030)..(1030): n is a, c, g, or t
  misc_feature (1038)..(1038): n is a, c, g, or t
  misc_feature (1046)..(1046): n is a, c, g, or t
  misc_feature (1052)..(1052): n is a, c, g, or t
  misc_feature (1067)..(1067): n is a, c, g, or t
  misc_feature (1071)..(1071): n is a, c, g, or t
  misc_feature (1073)..(1073): n is a, c, g, or t
  misc_feature (1086)..(1086): n is a, c, g, or t
  misc_feature (1089)..(1089): n is a, c, g, or t
  misc_feature (1092)..(1092): n is a, c, g, or t
  misc_feature (1103)..(1103): n is a, c, g, or t
  misc_feature (1110)..(1110): n is a, c, g, or t
ttttttccagacacggggcaggttttattgtcacagcagctgacggcttccccggtgctgggttgccagggagtcccaggcagtcctggtgctgctgagatgggcgctgcctcctcccacccacagcgcgtcatcccctcaccagccggcacctgcaggctcccctcctgaagcggactcgggctcacagggaacacccgcacccagaccgtgccgtctggcaggcactttcggcctcagtgccacggccccctccccaggccgctcacacccctggggggccacagaggtgtctgcacagcagggcttcctccttccctgggaggcccatgaagggagacagatttggctgcaggacctgctgctacggggcaccgtggacgaataggtacggctgggtcagtgggcgggcccttgacactgaggctggtcccgcccccacagcagcctggcgatgctcacagcctgctgatggtttcttcacaaagcgacctctccagggaacatccgcaaataaaccccgtgtggttcagggagtgagggcccgggcccgctggggacgggggtcagcgactgctttaatcccccagatgcagggtgctgttcggctgagggagctagagggtgcctgggactggggggttcatcctggcaaggtccctccacccccacagccagggcagagcactggggagccccagggagaccagccctccacctggggctgctgtggtggacggaccctctggacctgggtatgcagggtgggcatggggcagtgctctggacacttggggttgctgtgctcgccaccatggtgaccgcagcaggtgggaagcgggtcccaaggcangcagtccaagtnatggagtgcggccagcctggctggcacccccacatctgctcactcccaatgatctcnaagccaaggtgtgatagcagggctgccgtgttcaggagacacagagcgtncacacagcacggacatgcgcantganctggtngcacctggnnananntggntggtgtngcgtgtgnggtgcagngagcanaattcctcagtctgntgtncnttttgctcacggnaangantcccaagaaanttcgganaggcgcc

SEQ ID NO: 318613 - DNA, 1144 bp, Homo Sapiens
taccaaaaacgcggggggtttatttgaggtttgggtgaaaaataatcttgtgggtggtggtaggccgacagatggggacaggaagctgtggacgaaagccccaggtcccgtgggagaggtgacagcagcaggggcacgcagccacgtgggtccccaggggaatgtgaaggcggagggctccaggcgaactggggattaaacaaatatttacaggcagcagggaagtgcccagcgcacgtgacgggggcggggcgggactttggggagggcggggcctaacggtatcgagcgagccggttgtagacgtggtccaggtttctgcacaggaatatcgagagcgtcatgaacccgagctcgagtaggccgacgcccaggcaaatgcccactatggaaataaggttgttgtgcagccacttctggaggccctgcgcgcagccctcgcggtagatgtggctctctgcagggacagcgcagatgtctgcactgtgtctggaccgcgccaggtgtccaagcctgctgagctggggcaagatcaccttatctaggattgtggagtcgttggtcgccgacaagttgtagcaggagcagggcacgcggtgcgcctccgacccgttacctctcaggatgaggacttggaaccagttctgcgggtagtgccagccgcagcagcgcagctggaactgcacatagtcccagctctcctcggccgcggtctcctcggggttggtgccgtacttttggatggttttctctacgacgtcccgcaagcttcgctccagctgggcccgctgagtggagatgaggattcccagggtgatctgtgtggcaaacaggagcagcagcatcccaaaatacaggcccaggaggcagcggagctccttgagggcccccacacaacccaggagggcgatgcccatggtgaagattcctgagatggccaggactttggaccagatctgcagaggcacgaaggccaagcccacaaaggacacgaagctggtcttgtcgatgaggatccagatgccgaagcagaagatcaggctgccgaggacttgatgaggctgaggcagctctcctgggctgacatcttcacctagtggggtaagcggtccactcaccacacagaagaggtgctgacagtggg

SEQ ID NO: 318614 - DNA, 1424 bp, Homo Sapiens
ctaacagcagatagattctttatgttcaagacagcaaattcagatacaaaaacccaccgccatcgtccctccctccctcctgctctgggccagggatgggcctggaaggagagatgggaggtggggaggaggttgcggggttcacagcagactcgtgtcaaatgcggaggtaacaggctccacagggagggggctcctctcaggaggggtgagggcattattgcatttgctggggggaaggacaaccctctcccctgtattccctgcgtcaggaaactaggaaggtcatgacccccaaacagaacccaaggccccagggagacagagggaccagtttggcagctgatggtggaaagtggtggaggcgggggtggccgcccaatttggctgatccctcccctccctgtgcctgatccagctgaggtaggtggggaacagggcacaggggggccggggaccccggccagactgggaaccagggaggggatggtaccgattggagcggggcagggggcctggccccacctcccctcaccatcgtccttgggctgctgagctaggctcaggctggaggctcgggtcctgacgtcagtgtccctgctgggggcccccaccaggttgcgcccgggtcatcatcgcagggtccgggggcagtcctagtagcggccgaccttggcgtccccaatggcgccccagacgtcaaagacgaactcgtcagggaaggcaaagtcacccagccgttcgtccagggcctcggccagctcatccgggttccttttgtcctttcccagctccaccatggtggccgccagctccgtgtccctgatacccatgtaactctccagcaggtcatccaccttctcaatggccttctcttcaaaggcagagggcagatcctccactgtggcggggccccgggatcggagccgcagggtccctcggccagtgcccagttgtgggccagagccagggcggccacccgctgaacgctggctgatcatgtcgaaggccttgcgaggctccgtgagcttcagcgtgaaggtacggcctcggggcagctccttgagcagccgggccacctcgtagtgccggcagcccagcaggctctgcccgttaatggcctcgatcatgtcgcccacgctgatgaggtggatgtggtcgatcacgctgccctccttgatgcgcttgatgaaggcgtagccagccccgttgtccgtgatggtgagcccgagtgcatcctccgacttgaacacctccacctccttgcgctgccccttcacgtgggcgaagatgaagtcctccagcccgatctggccccccaggagcttgtccatgtccactttgtgggtgttcagggtgcagaacatcacctaaactagtgtggttgcccctcgtgccgaattcgccacccaggcctcgctact

SEQ ID NO: 318615 - DNA, 1101 bp, Homo Sapiens
  misc_feature (46)..(46): n is a, c, g, or t
  misc_feature (324)..(324): n is a, c, g, or t
  misc_feature (457)..(457): n is a, c, g, or t
  misc_feature (513)..(513): n is a, c, g, or t
  misc_feature (529)..(529): n is a, c, g, or t
  misc_feature (531)..(531): n is a, c, g, or t
  misc_feature (774)..(774): n is a, c, g, or t
  misc_feature (797)..(797): n is a, c, g, or t
  misc_feature (843)..(843): n is a, c, g, or t
  misc_feature (936)..(936): n is a, c, g, or t
ccaatcttcattctcggggttggcccgccccgatagtcactccatngtcctcgtttactggttcatcttcgtaatctctgtcatggtcaaaatctggactgtggttggctgttgtcactaaggacaggggcccttcagcttcctctggatcgaggggctcttctttgacgtgtacaggatgcacggcttgcataggagatctgcctggactgctgtcactctcgttgctgttggtatgctccattgccccgttcagctcttcccgtattgcgctggctaagttgcccagagtgggatttcccatggaagcggtagtgtataganggtatactattctcagccattgaagcctgttaagctgcatttgagaggtgtgcagtaaggcgtggctgctctgcatgtttttaataagggaaagggttaccactgatcttttgtggccttcgtttttgggaanttctacttcatccactgtccatactgcccctttaacgttttctactcgcacaaaanacttgtgaagactaanantatgacgcactgcattcttccacgtggccgcgttgcgtcggaagtaagcaaacattcgtgtgaaccagttatagatctcatttagtgttagctgcttttctggagattcgagaatggcctgcctaattaaagatgcatatgtaaatggtggtcataacttctgcagttcttataaaattcttggttctgcgcaatatctgacgaaatgggcacgttgtatttgtctgagtaccgcctgcggantgggtcccaccggtgtgcatgcntggtggttgtgatgacagaggggccttgggtgacggggagttaggnggggcggttggggtcgttggagtatgaggtaagctctgtggagaagcctccgatgcggacttggagagagttacacttgataccagattcaangggctgaggggcggctttgggttctgtagacttcacatgcaggtgggtcatcatggcttgcaggcgttctttgtcttttgcaagctgtagctctaactgctgtacaacctgcatttgtactctacattgggctgtacttctatcgtccagcgcatgctcactgtt

SEQ ID NO: 318616 - DNA, 1140 bp, Homo Sapiens
  misc_feature (12)..(12): n is a, c, g, or t
  misc_feature (23)..(23): n is a, c, g, or t
  misc_feature (28)..(28): n is a, c, g, or t
  misc_feature (32)..(32): n is a, c, g, or t
  misc_feature (47)..(47): n is a, c, g, or t
  misc_feature (50)..(50): n is a, c, g, or t
  misc_feature (54)..(55): n is a, c, g, or t
  misc_feature (62)..(62): n is a, c, g, or t
  misc_feature (67)..(67): n is a, c, g, or t
  misc_feature (88)..(89): n is a, c, g, or t
  misc_feature (94)..(94): n is a, c, g, or t
  misc_feature (97)..(97): n is a, c, g, or t
  misc_feature (111)..(111): n is a, c, g, or t
  misc_feature (113)..(114): n is a, c, g, or t
  misc_feature (117)..(117): n is a, c, g, or t
  misc_feature (123)..(123): n is a, c, g, or t
  misc_feature (126)..(140): n is a, c, g, or t
  misc_feature (162)..(162): n is a, c, g, or t
  misc_feature (207)..(207): n is a, c, g, or t
  misc_feature (214)..(214): n is a, c, g, or t
  misc_feature (219)..(219): n is a, c, g, or t
  misc_feature (228)..(228): n is a, c, g, or t
  misc_feature (232)..(232): n is a, c, g, or t
  misc_feature (234)..(234): n is a, c, g, or t
  misc_feature (269)..(269): n is a, c, g, or t
  misc_feature (363)..(363): n is a, c, g, or t
  misc_feature (426)..(426): n is a, c, g, or t
  misc_feature (468)..(468): n is a, c, g, or t
  misc_feature (855)..(855): n is a, c, g, or t
  misc_feature (1137)..(1137): n is a, c, g, or t
aaaaacaaaatncccggattttncctancccnctcctggggctgggnggnaatnnttgaccnggggngggggtccgggggcgggttgnncactnccncccgcctgggcacngnnggncccctntcnnnnnnnnnnnnnnntgatctatctcaatagagaacngggaactagcccacctaaccggaccatgcacaagacaagaaattntagcctnttttnccccttccnaggngnaagtgagaacataagccacactgtattctgcctcnaaatgataacacacttttgcccctgctcatctatcttgaggagttacggttcttttccactactgtatgccacatgttctagtaaaaggatctntcaaaggtgtccaacaccttatgaatctggtctatcagattaatatctgaagatctacagtgnttttacatttaatttaaatgccattcttagaaggatcttgtnacaaagaagccttcacatagccccaccttgtctcagaagctagagttcattatcaaaacttaatttccatttcatatagctcaaaatcttaaaatctagggcatggccaactaaattactttgattctgtttaccttctctgatgacaattccatcaagccttaaataggaaaatgtcgaatctagggtaatttatcacttttgtgtgcatcttatctgagtccagccatctggtactgctgtgcattttgaacaccgtgggcataaacaatttgttgaattactaagtgaaaacaataataaagaaggaaatggtcaggagtgtggtttcagcactacttaacagatgactgtttctacctcatttgaccataactgtacttgtgngcttctttccttccattcatgactgaagatctgctcaaatgcaccaacactgccaagtgactaaggtagaaaagaaaaatgacaggtatcgtcatctgaaggacagatgaatctttttctgccccttcttcacaatggaatataaggaacaattatgggatgtcatcagaatggatgccataggacctacagctccctttctctttattgtgattatactttaaatatgacattgtcttttatgtgtatgttcctatattttcaatgtatctttttccttcngta

SEQ ID NO: 318617 - DNA, 816 bp, Homo Sapiens
ttttttttgccctctcatcccatttattaaagaaacagtaagaaaagatacaatgcaggaaaaccaccaaccatccttgcacaccaggccgaacaaagcacagtgatttcttcccttcatcccccacccccaccctaattcccatattcccatccacatcagtttaaattttgaggttctttgattgattgggagtaccagtgaagagggagttggatgagtagaggggccttaaatctggccacctctaagtcccaggagaagggagctgcaggcccagtcagtcaagcagaaactgcattcggtgggtctttctttgaagtggttgtccatctccctgttctgtgttcaagcccccagggaaaggtatggcagtagaggatgaccaggtccaagctgcccaggtcagagctacggaagcatggtccgttcaccaacgccacgtttctagagagcagtgagctgattctccaatggtgagcaggggactacatgtgaactgggacctgcaggccaatgtatccctgaggaaaagtccacaagaacaattcaagaaactagtaagaaacaatgggcagaaagctgtgggacgaaagcacagcaggcttctgggaggctggagatcctttctctcaagggcaggattattcccacctgccacagttcacatgccacaaataacatctcaccttcagtcaagaaaaacgcaaaggaaaaagatggctcatttgaacttgagcccaagctatgttcttcagactgtagctccacaactacccttttacctaagacagcccctgccaagtaccacagtgc

SEQ ID NO: 318618 - DNA, 1747 bp, Homo Sapiens
  misc_feature (1637)..(1661): n is a, c, g, or t
ttttgccattttcagtcactttattatcaggaactttatttttaaactaattacaggtacccaaagttcaaaaaattaaaacaaaccaaaatgagaacctcaacagccatagttgtttatttgctgcttattcttgtggccaaagaggaattctactaaatgtcaaatgaaggatgtctctaaactagaagacaagttaaagggccttgttgtcatttctgtcattgtggtggtggttgttggctttcttggagaaatatatctgtgactttctcaactaatgggcctctggccttaattatcaaagtatcccttttcctagaggaaaagactagtaataaatacatacggtatattatctaatatcccttactgttatcccagaaaatcttattaaatattaaagtgaactactgattagaatagtgcctgtcaatggtgactcaataatgatttcttgaatgataaatacctttaacttcatctctacttgttgctctcccatctcagaaacttatgaccttcattaagccccactagttactagtttggtgaccgactagggggctagcaagaaagctaactcataaggctatgacataagcactgaggcatcctaaagccttatctgggccacaataagttacctagttacctatacaaactctactccacagcctagctctggaaaatcggggaaaaagagagagagttcagcacccataacacactcctatgccacttcttttgcatttcttcttagccaacagttgagaaagactattttttagcttgtttcacttttccttgatcttctactttcttaatggctgcttggatcgcctcttggtcacccaggaactgatgaggcccaacagcacgcaggttttcatccaattccagaagaatggggactccagtaggaagagtaatgttgatgatgtcttcatctgagataccttccaggtgttttaggagtgccctactgctatttccatgagcagatatcagaatggttttgccacgtaatacttcgggagcaatcctttcattccaatagggaaggagtctctccagaacatcctttaagctttccgaccgtggcagttgatccaagggcacatcgcatactttatacctccggtcgttgtagatttcttggtagtaaggatgagactcctcaatgggaggcggggttacattgtagcttcttctccagagcctcacttgttcttcaccatgattcaaagccatctgctccctgttgagaccgatcaaggccccatagtgacgctcatttagacgccaggagctttccacaggcacccattcctggcctagctcttccaggatcagccaggctgtgtgaatggaccgattaaggacagatgtgaatacaagatcaaactcaaagtttaacgctttgagttgcttcccacagttccgagcttcctccattccttcgctgttgagtttctgatccacccagctacaaaaacggttctccttattccaagcaccctctccatgtcttaacataataagtttgtacttggacatactgatggctgaacttcccaggcgttttcaaatgggctaatattcaaggacagcaatacatctgcaaaggggccacnnnnnnnnnnnnnnnnnnnnnnnnncgctcctccgagccgccaaagagccagcgcctcctaggactcatcactgccgccggcatcgacgctcttttctagcccctgaacca

SEQ ID NO: 318619 - DNA, 640 bp, Homo Sapiens
  misc_feature (367)..(367): n is a, c, g, or t
  misc_feature (386)..(386): n is a, c, g, or t
  misc_feature (396)..(396): n is a, c, g, or t
  misc_feature (446)..(446): n is a, c, g, or t
  misc_feature (459)..(459): n is a, c, g, or t
  misc_feature (464)..(464): n is a, c, g, or t
  misc_feature (480)..(480): n is a, c, g, or t
  misc_feature (482)..(482): n is a, c, g, or t
acacagaaagtttgatgaagtggtctccctttgcaaggagctaattcatcttgcattgaaaggattgtcctattatcacacatatgacagattctttttgggcgtcaatgttgttattggttttgtgggatggatatcttatgcctctttgttgatcatcaagtctcattccaaccttataaaaggtgttagtaaagaagtgaaggtacgtttagaaaatgtgaggattcagatgatggtataaaatcactagtactgaatccagtgtaatgagtttataggatgtgcaagtcattgttctaagctaactcttgtttatctttcatttgcttttattgtattggatttttcctcagttatctctgtntcttcagttgagaccccgntatattgatnataatgaccctatcacttccgaacgctataaagatagaggtgtaagtcanttaagtgctcctntgttntcaatggtgtcggccntntgttttattttataactagcattttataagtattcccatatctttcctggtacaactggtcagaaaactacttcaaaacaatatgtttaattttatttgatattaaaagtttgggagctagagaacaataaaattatttgctcataatgtttcttctt

SEQ ID NO: 318620 - DNA, 963 bp, Homo Sapiens
  misc_feature (797)..(797): n is a, c, g, or t
  misc_feature (816)..(816): n is a, c, g, or t
  misc_feature (818)..(818): n is a, c, g, or t
  misc_feature (822)..(822): n is a, c, g, or t
  misc_feature (849)..(849): n is a, c, g, or t
  misc_feature (857)..(857): n is a, c, g, or t
  misc_feature (860)..(860): n is a, c, g, or t
  misc_feature (869)..(869): n is a, c, g, or t
  misc_feature (885)..(886): n is a, c, g, or t
  misc_feature (901)..(901): n is a, c, g, or t
  misc_feature (913)..(913): n is a, c, g, or t
  misc_feature (919)..(919): n is a, c, g, or t
  misc_feature (922)..(923): n is a, c, g, or t
  misc_feature (925)..(925): n is a, c, g, or t
  misc_feature (932)..(932): n is a, c, g, or t
  misc_feature (944)..(944): n is a, c, g, or t
  misc_feature (946)..(946): n is a, c, g, or t
ttttagtgattttcacttttaatatattacatataatactacaaaaagactgaagttttaaggaaaatccattattattaaaagtttagtactcttgagtctggactttctgacaataaaatacaccagagcaaaagcccaagaaagtacaacaaagaggtatactaactggcaaaatagctgctgcaacatgccacaggcacttcaggcctaacatttctgaaaaagcatggaacgtgtggattcccaggaaaaaactgcctcagatcatttgtaacaggaagaaatagtaagttacccctctaagcaacactcactagtagatattacatatttcccgtggcttgtttgtttgcatgttattgagaacagggcaaggaaaggcactgttttctccaggtagttgtttttgagctagttagggcaagctatacccctgcatcagtacttcgtggctgaaaaccctccctccgaaggctacccatgtcaaagcgggtggaggcctcacagcgcactaataatgtgtcatccttaatgaaagttctttgtcttagggcttccagatgcataaaagttacatagccaaaaccttttgggttccgtgggattgtgggtcgctggaaagcaagcagctctggtttggcatccattatctcttcgtggttttgccttacatgttcttcagactgatcaagaattgtaaggcgtattgtaccctggaagggccaagggaggtggctgtcatattctccttgcattgtgtggacaaaaagggatatatagtttgcacatctctnatcattctttaactgaatntncaanctcattcacagttttgtacccgttttnttccattntanaatccattnctatgaatcacaacanntttctcctcttcttnacatttcaaatncatccnaanntncgaatcntccaaatataantncatttcacttctgtctt

SEQ ID NO: 318621 - DNA, 1051 bp, Homo Sapiens
  misc_feature (8)..(8): n is a, c, g, or t
  misc_feature (22)..(22): n is a, c, g, or t
  misc_feature (35)..(35): n is a, c, g, or t
  misc_feature (50)..(50): n is a, c, g, or t
  misc_feature (60)..(60): n is a, c, g, or t
  misc_feature (66)..(66): n is a, c, g, or t
  misc_feature (69)..(69): n is a, c, g, or t
  misc_feature (75)..(77): n is a, c, g, or t
  misc_feature (90)..(91): n is a, c, g, or t
  misc_feature (93)..(93): n is a, c, g, or t
  misc_feature (95)..(95): n is a, c, g, or t
  misc_feature (114)..(115): n is a, c, g, or t
  misc_feature (125)..(126): n is a, c, g, or t
  misc_feature (132)..(132): n is a, c, g, or t
  misc_feature (146)..(146): n is a, c, g, or t
  misc_feature (150)..(150): n is a, c, g, or t
  misc_feature (153)..(153): n is a, c, g, or t
  misc_feature (155)..(155): n is a, c, g, or t
  misc_feature (159)..(159): n is a, c, g, or t
  misc_feature (163)..(163): n is a, c, g, or t
  misc_feature (181)..(181): n is a, c, g, or t
  misc_feature (183)..(183): n is a, c, g, or t
  misc_feature (186)..(186): n is a, c, g, or t
  misc_feature (191)..(191): n is a, c, g, or t
  misc_feature (201)..(201): n is a, c, g, or t
  misc_feature (223)..(223): n is a, c, g, or t
  misc_feature (227)..(227): n is a, c, g, or t
  misc_feature (428)..(428): n is a, c, g, or t
  misc_feature (475)..(475): n is a, c, g, or t
  misc_feature (790)..(790): n is a, c, g, or t
gggggatncactcagcagtggnttgcagtaagccnggcaaagtctctttnaatggagaanaccccngtnccgggnnngacctctcgtccnntncngatccgtgcatcagggccnncgctctcgcnnccacangcgccagggctggnccancancngcanttgncaaagtcagcctggcctnanaanaaatncacacggcanagtggccttgccccacttgaanaagncattgacgttgtcgtccgtacttgttgaggatggaagagcagtggtccagcacctcgtagtactcctcgaccaccagcttgcactggcagtagttgagcagcagcggcgtgatctgcttgtccagctggatccattcaggggacccaggctgttccttcatctgcaggttcttgaggcaggcaatggcatcgtagtacttngcagcagcctccttcacaatgcccctcgcggtacaaccggttgcccncctggtggataagtggcactgcctttgccttctcttcgtctgtcatggcccatgggtcctgctggtacgtgccagggctctccaccttcagcatctccatgtggaagatgaggggctgggggttctgctgcagggcgtccaggtcagcatggcccagggagctgtgttcacgcatctgtgcaacaccgcagcagtgccgctggccctccagggggtccttgcccaccgcggtgttgcggagactcttggccaccagcgggtacaggaccacatgcttgatgtcacagaggaactgggcaatctccccttctcgcntggtgcacacgatggtctcccacacaggctgcttgaacttcttgccaatgatgggctccatgggcttgccacgagcccgtgctgtcgtccagcacggtgccctcgtcgtcactgtgcagcgtccggtagtggaacgtggccttggtcccatcttgaaagtccgggggctctcctcggctcttcctgtttcacacgtttttggatcccgtcctcccggagtcttgcgatgatatccgccatcctccttccccgctgcatccc

SEQ ID NO: 318622 - DNA, 1071 bp, Homo Sapiens
cttttgttctttttgccgaatccgtccttccagggccgcaagttttgggttcaccccaggcgccagggctgggttcagctccagcactttggcaaagtcagcctgggcctcctgggcattccacacgggccgcgtggggcctgcccccgcttgaagtaggccttgacgttgttttttgaggatggaagagcagtggtcccagcacctcgtagtactcctcgaccaccagcttgccactggcagtagttgagcagcagcggcgtgatctgcttgtccagctggatccattcaggggacccaggctgttccttcatctgcaggttcttgaggcaggcaatggcatcgtagtacttggcagcagcctccttcacatgcccctcgcggtacaaccggttgccctcctggtggataagtggcactgcctttgccttctcttcgtctgtcatggcccatgggtcctgctggtacgtgccagggctctccaccttcagcatctccatgtggaagatgaggggctgggggttctgctgcagggcgtccaggtcagcatggcccagggagctgtgttcacgcatctgtgcaacaccgcagcagtgccgctggccctccagggggtccttgcccaccgcgatgttgcggagactcttggccaccagcgggtacaggaccacatgcttgatgtcacagaggaactgggcaatctccccttctcgcatggtgcacacgatggtctcccacacaggcagcttgaacttcttgccaatgatgagctccatgggcttgccacgagcccggctgtcgtccagcacggtgccctcgtcgtcactgtgcagcgtccggtagtggaacgtggccttggtcccatcttgaaagtccgggagctctcctcggccttcctgtatcacacgtttttggatcccgtcctcccggagtcttgcgatgatatccgccatcctccttccccgctgctccctttcggcaacttccggactcgctcggtagcttccggacttgcttcggcaactcctagcacctcggcagcttccgagctagcgccattttggttgaggg

SEQ ID NO: 318623 - DNA, 1076 bp, Homo Sapiens
  misc_feature (76)..(76): n is a, c, g, or t
  misc_feature (84)..(84): n is a, c, g, or t
  misc_feature (87)..(87): n is a, c, g, or t
  misc_feature (89)..(91): n is a, c, g, or t
  misc_feature (94)..(94): n is a, c, g, or t
  misc_feature (97)..(97): n is a, c, g, or t
  misc_feature (99)..(99): n is a, c, g, or t
  misc_feature (101)..(102): n is a, c, g, or t
  misc_feature (104)..(104): n is a, c, g, or t
  misc_feature (161)..(161): n is a, c, g, or t
  misc_feature (207)..(215): n is a, c, g, or t
  misc_feature (885)..(885): n is a, c, g, or t
aataaaagtttgaagatctggcaggcagtgatcctattgtccgcccaccacccccagcacttatttcctgctcccngcactttnttntnnnttnttntntnntncacccaggccacagggccacactcccctgcaaacagaggaagaaaggggcttttctntagccatcccctgcacattagaaatcaacaagtattctctcaaagnnnnnnnnntacagaaattgaaacatttaaaatatgaaaacccaaaggggaagtgagtgggaagagggcaagagaggaaaggaactggagtttcttgggaagggactcccatgtctcccttcccatttatgggcttggggtctggggtacgaggctcacacagtgagtttgcagttacacagctccttgtagatctgccgacgaagtttgggcatgtcctgctgggtgaagctgaatggctgatacagggccagatgcttgcagttctgcaacacaaaagcaccacagtcactgtcattattctgcctggccacattcattttgaagtaacctttccagccctggtggaaatccagtcggtctttctttaccgcctctgcctgtagatacttggcaatatgcttagggcagcggcggtttagggtacgctgcgagtcaaaataggtgatggtgcgtcgcctcacatcaacagagatgagggaccaatgcacctccaggtggatggggattagcagtagctccttattgaagatgtccaccttttcagggactgtgtccatgaccaggtctccatacatgttcatcacctggtcattgagccagttctgtccatacaaggtccccaagtcatccatggtcagcacgtgccgcttataagccactcggaagcccctcaccnatggcattgcctggcatccgctggtaagactggatcagctgcaacaccaggcccttcctggaaggggtggaaaactcctgctggaaaatgtcctccagcttctctactacctcatcagtgctgaggggtatgaggctgccatacgtttgaaggaattcgtccaagatgctctgtacgcaggtcacatgctc

SEQ ID NO: 318624 - DNA, 1246 bp, Homo Sapiens
tttttgttaataatttgaagatgtttattgcattctatttttggtgggaaaaaaatgtaacatacatttatttagcacgacattgtgaaatacacaaaacatgtaactgagaaagcaggaattttctattcctagtccatttctgaggactaaatcatgaactgctcccaatgtaattaaatatttcttacaatagttgggcaccaagtttaagatttattaattttctcctctcagtataggcagcaattcaccattttctttcagttccttcacaatatccaatcctcccaccagctcccctttcacatacagctgagggtatgttggccaatttgagtaagcttttaatccttgccgaacttcttcatcctccaatatatcgaatgtttcatattcaacaccagtactatttagtatttccagaatttgtttgctgaatccacattttgcttcctgtttgtttcctttcataaagagcatcacagaagctttatttgtcagcactttgagcctttcctctaatttgggagctttgggacaaattgtatctagttcttcagatgcttctagctccttaattatatcaagtcctcctatgagctctccagaaacatagagctgaggataggtaggccaactggaataggctttgagtccctgtcgaacctcttcatctgagaagatatcaaaactgctaaactgaatattatgtttgtgaagaatttccaccatctgcttgctgaaaccacagcgtggttcttgaggagttcctttcataaacagcatgcagggggcagcatgagtcaatttcttcaagcgaaggttgagatcttctttaagatgttcattagcgctgggtaggaaggagccactagatgcatgtcgctgaacttttttggtcaactctggggcatgtgcaccatctaatcggtcgattttctgagaattcttgaaaaacagaaaagtgggaacagagctaatttcatatttttcagatacttcaggaacaccttcagcttccaacttcacaaatgaaacttgagggagttctttagctaactctgccataacttcgttcatctgtgcacactgtggagcccatggtgcccagaaatggaccacaaggagggacttggctttgaggcgcagcagctcctcaaactgcccggctgagccgacctcctccacggccgctacagctgcctcagccgcccccgccgccatgctgccgccgccagacaga

SEQ ID NO: 318625 - DNA, 572 bp, Homo Sapiens
  misc_feature (21)..(21): n is a, c, g, or t
  misc_feature (521)..(521): n is a, c, g, or t
  misc_feature (546)..(546): n is a, c, g, or t
tccaaaaactgcctaaactgnaaataattatgtttggtgaaaaaaatttcccaacccacctgccttgcctgaaaaacccacagcgtggttccttgaaggagttccctttccataaaacagccatgccagggggccagccatgaagtcaaatttccttccaaagcgaaaggttgaagaatcttcctttaaagatgttccattagcgcctgggtaggaaggagccactagatgcatgtcgctgaacttttttggtcaactctggggcatgtgcaccatctaatcggtcgattttctgagaattcttgaaaaacagaaaagtgggaacagagctaatttcatatttttcagatacttcaggaacaccttcagcttccaacttcacaaatgaaacttgagggagttctttagctaactctgccaataacttcgttcatctgtgcacactgtggagcccatggtgcccagaaatggaccacaaggagggacttggctttgaggcgcagcagctcctcaaacctgcncggctgagccgacctcctccacggncgctacagctgcctcagccgcccccg

SEQ ID NO: 318626 - DNA, 1882 bp, Homo Sapiens
  misc_feature (1777)..(1777): n is a, c, g, or t
  misc_feature (1786)..(1786): n is a, c, g, or t
  misc_feature (1813)..(1813): n is a, c, g, or t
aaattctaatacaaagcaattttattttttagagtgtccacaaactttgttaaaatatgttctctttttaaagccaattaccttaaaaatgtctggaaggaaacactgaaataagaatacaacatttcggtgaagagctggaaacttaaaaaattatcaaaaggaattttggtatcatcttcagagaaaaaataaagcaagaaatactaacatcaaaaggacaggtatgatgatgcgataataataaacatctgcgtttgtctcttcactaagagtaaactgggaaattgtaggccaaagtccagttgaactttctaagtctgtgatccccgtgctgactgtgggagtgtatttataccaggatgggagatcttgacttcttggaatatatctgggctgggtaaaatcttgatgaggctcataaaatgagtttgggaattgtgtatagctgattttttgtgggaaactgtttacttcattcaaaggttcttgagactcttgatatttctgtcttctccttgtgctttcctgagctgcttcattgttcatcaatccaatcagtttctcctctttctgcactttccatgttgcacaggactcagcgcttctctcactgtggacttttttttcgattaacctattgtgtgccttgttgacttgctttgttgcagccttttgtgaatcaactttttgactgtttggagtatggacatttatactctgtccttttgtgggaaaaggtccagtggtcctaaaggtattccatgagggttcaaaattttcttgagggcttgatagtttggcttttcatcatatgctaaactatgagcacataccaaaaattgggctatttcacagcaactgcttccagaaggagcccatttaagcactgactgggggagctcgtccaacagatttgttttagcagtctgcacagccacagggtccttcaggttctgttcccagggaagtttcccacacaaccaccgcagcatgcagtagccgaggatctcaacgtcacttcgtctggacaaggctactcccttgtgggcatccaagctggtaaactctattgtcccattatggccttttctaggattttcctgatactgtttgtggttcccattgggacaatatctgtaggaaagtccataatctgcaagataaacctggtctggatttttgtaacccaaaagtagatttgctgcttttatatcaccatgaacatattcattttcatgtatatattccagtacatccaacattcggatacctaattgcaggacagttgactttttaaaggtaccattctggcctgagatcttctgtaaatctattcctagtctttccattaccataaatctgtaacttcttcccttgaattcagtcagaccagatccataaaacagaggaattcctaaataatcaagttgtttgcgttctatccactttttgatacagtctttttttgcaactctctgataaaatttaagttctgaaaataacgggccattttcttgatattccacttttactacatgtcttgcatctttctctggtttatttgtggggaaagctaaatatatcaatccaaatcctccagagccaatcttcttgcccagtacccactgattgccttccatatcatccagaaccttgccttctggaaatggaataggaagtttgtatttttcatttctttttggtggcatcacttctgccgctgcgacgaggcggagcccccgggcctacagtcccgcggggaggcgggcccagnactcgagcntgccctccctaggacctgcctaacttntctccagctgcgtcggcctcgcagtgcagcgatcccgggaattccggaccggtaccagcctgctttttt

SEQ ID NO: 318627 - DNA, 432 bp, Homo Sapiens
  misc_feature (20)..(20): n is a, c, g, or t
  misc_feature (83)..(83): n is a, c, g, or t
  misc_feature (99)..(99): n is a, c, g, or t
cccacaggtcccttcaagtntcctgttgccccaggaaatttccccacacaacccaccgcagccatgcagtaagccgaggaatnctccaacgttcacttncgtctggaacaaggcctactcccttgtgggcatcccaagctggtaaactctattgtcccattatggccttttctaggattttcctgatactgtttgtggttcccattgggacaatatctgtaggaaagtccataatctgcaagataaacctggtctggatttttgtaacccaaaagtagatttgctgcttttatatcaccatgaacatattcattttcatgtatatattccagtacatccaacattcggatacctaattgcaggacagttgactttttaaaggtacgattctggcctgagatcttctgtaaatctattcctagctgtgccgaa

SEQ ID NO: 318628 - DNA, 1207 bp, Homo Sapiens
aaacaaatggagaaaagacagaccagccaggatgtcttcccacatggaagggatttaagggctgcccccatgaatttcttcaggccacgacagctacttcctcctcttgtatctggatttagatttaaagtttcctcctcgtctctggtggggcaagcccaactgtttcctttcttcaaaggaagggccagctcgatactgtttcagggccttcttgcttgtgttggtgagttcttcatcaaatacagatttcttcccctgcttttgcttcttggcaggacctctcactggctcctcctcgggcattgctcgggcccgcttggctctgcgattcctcttcgctagccgttcagcaaacatctgcgccttgaggatttcaaactgagacctttcctctgctgtcatctcccccttttttttggcatccttcataaacttcttccttttcttctttcctcttaaggccaagtcaaattcctgcagagctttggcaattttctccttcttcctctcttctttggtctggaaccagctcctctcgggctcttggaccactgcctccttccccttctccaggagccgctttgctgtattgatctgggcttctgactgctgcatctctttttcctccgcctctagctgcagaactgcatacacatctttctccattttctcaatcttgtcccggaatttgaggatgacatcttggggaagtatcctggccttcacaggggccttggcagcttttacaatctccttcagcatcttccgctcatcttctcccaccagagagactgagcgcccagccctgccagcacgtgctgttcgccccacccggtggacataatgtttgatggtattaggcattgtgaagttgattaccgttttgaccccctcaatgtcaagtccacgggctgccacatcagtggccacgaggatgtcaatctgttcatccttaaaacgccggagggcctccagccgctgcgtctgtgacaagttgccatggagctcacccacctgcagccccatgagccccaggaggatgtgcatgcggtgggcctgcttcttggtttgcgtgaacagcatcacatggtcagtgaaggtcctcgtcaacaaagctgccacgatggcttcccggtctccttcacgattaggccggatccggatgaaccctcgtgccgaattcgccacccaggcctcgctactt

SEQ ID NO: 318629 - DNA, 2160 bp, Homo Sapiens
  misc_feature (65)..(123): n is a, c, g, or t
  misc_feature (183)..(183): n is a, c, g, or t
tccgttcaggcaaaacatttggcccttgaggaatttcaaaactgaggcctttcctttgggggtcnnnnnnnnnnnnnnnnnnnnnnnnnnnnnnnnnnnnnnnnnnnnnnnnnnnnnnnnnnnaaggcccaatcaaaattcctccggagctttggcaattttctccttctcccttttcttctnggtccggaaaccaggtcctttgggggttttggaccactcctcctttccccttctccaggagccgctttgctgtattgatctgggcttctgactgctgcatctcttttcctccgcctctagctgcagaactgcatacacatctttctccattttctcaatcttgtcccggaatttgagggatgacatcttggggaagtatcctggccttcacaggggccttggcagcttttacaatctccttcagcatcttccgctcatcttctcccaccagagagactgagcgcccagccctgccagcacgtgctgttcgccccacccggtggacataatgtttgatggtattaggcattgtgaagttgattaccgttttgaccccctcaatgtcaagtccacgggctgccacatcagtggccacgaggatgtcaatctgttcatccttaaaacgccggagggcctccagccgctgcgtctgtgacaagttgccatggagctcacccacctgcagccccatgagccccaggaggatgtgcatgcggtgggcctgcttcttggtttgcgtgaacagcatcacatggtcagtgaaggtcctcgtcaacaaagctgccacgatggcttcccggtctccttcacgattaggccggatccggatgaactcctgccgcaggaagggagccacatctgtgttgctgttcacaaatatccggacaggattcttcaaggagacagaagccagatctttcacctcgtctgtcatggtggccgagaagagcatggtctggcggtggtgggaacacattcggatgatctccttcatctgctcctcaaagtactcatccagcatcctgtcagcctcgtccaggatgagcacctcgatgctgctcaggtggaaggaagggcagttgtggaggtgatcgatgagccggcctggggtggcgatgaggatgtcaggcgctgcccgaagagctgcttcctgagacttcacatccaagccgcccacagccaggcaggtggtgatgttgcagaactgggccagctgtctggtgacagagtgcacctggatgcccagctctcgggtgggcactagcaccagcacgcgggtgactggagcctggcggggtttataaatcagacgctcctatacaggcagggcaaaggtggcagttttacctgtcccaagtggctgcacaggcacagatgtccttccccaatagacccacaggtatgcacgccttctggatcggggtgggctgcttgaagcccatggctgtaatggccttcagaagagggcgggaaaggttcatgtcctggaacgagaggttttcatcgtactgagatgcatcttcaaaaaatcctcctgcttcctgtcctttcttcttcttcttcttccgatcctttactttgagtgtatctgctttggtgaggatgttctcatcagctgatgagtagtcagtctccgaggcttcatcttctgagccttcctcatcattctcttgaaggtcttcctgctcctttggttcagagccttcctttgcttctttctccttttccaacttcccagacttggcttctttatcctctgttttccttttctttcgaactttctcaatcttctcatctaatgtagtggctgccctcttcttcttgagttggctcatgacatcagccagggcccagctgccatcgtacgtcccctccttctcagtgaaaacgaaatcagggttgaaatcagcactgcggttcttccccaaagctttttgtcgtctgcccagcacaatgggcccctcctcttcctcgtccccggagtcagactcgggctccaccggcacctcgtcatcctcgcctatggttccgattaagccgaggtccgcaagcatgttgtcgcagaagccacttccggaagcgagcacagcctgcggtccggcccttaacttttcgcagcctcctcgtcgtctttgcgcaagtaccatgcgtcacccc

SEQ ID NO: 318630 - DNA, 932 bp, Homo Sapiens
  misc_feature (29)..(29): n is a, c, g, or t
  misc_feature (112)..(112): n is a, c, g, or t
  misc_feature (497)..(497): n is a, c, g, or t
  misc_feature (662)..(662): n is a, c, g, or t
  misc_feature (810)..(810): n is a, c, g, or t
  misc_feature (854)..(854): n is a, c, g, or t
  misc_feature (866)..(866): n is a, c, g, or t
  misc_feature (908)..(908): n is a, c, g, or t
  misc_feature (913)..(913): n is a, c, g, or t
  misc_feature (919)..(919): n is a, c, g, or t
  misc_feature (922)..(922): n is a, c, g, or t
  misc_feature (927)..(927): n is a, c, g, or t
  misc_feature (930)..(930): n is a, c, g, or t
ttttaaaaaatcttaccattatgaaagtnaaaaaaaatatagcactcagtacaatgaattactgcatttaatattcaaacacttaaggcacatttctcacagtttacatgtnagaatttagcatgatccaaactcaaatatccatttctcgtatctttcaatgtctgcagcagacactgacttagaaaccttttttaaagccatctcgaaatcctccatagttgtaggcatgtgcatttcttctttggaaagatttcggatttcctctggagtcaaaccttcaatgcgccttctcattgccatcaaggacgcatccctgcacacgttggtaatgtccgcacctgaataaccttccatgttttctgctatacttgcaaggtcaacatcatcagccaattccaactcacgtagacttattcgtaatagctcctccctgccttttgctgacggcaaaggaatatagattcgtttctcaaggcgtcgtcttaaagcctcanctatatcccagggaaaattagtagctgccagaaccataaccattttggaagggtcatcattttcagaagtgcctccaacaccatccatctgaaccagcagcgccgctttcacccttctgcttgctttcatgttcttcagaaggtccctcggcgactacagatggngtctatctcatcaataaatatggtggctggagaataaaatcgagctttccatggtctcctaatgcccttaaagaattcgggcatccacattggtaacactacggcttccttaagcaactttttagcttctactaaatcagcgatatcncccatcgaacattgggattctgggaattatatctctttccaaanctctactaagtnttatcatatccggtacaatcaatttatttgtctttggttctnttacngcagcnggngattngtnct

SEQ ID NO: 318631 - DNA, 1503 bp, Homo Sapiens
  misc_feature (219)..(219): n is a, c, g, or t
  misc_feature (306)..(306): n is a, c, g, or t
ggttttttggataactggcaggggtcaactcttttagccaatttcaaattcccggtggcttttttgggaaaaagtccccccctgccttttggggacggcaaagggaataaagttcgtttttaagggttggtcttaaagcttcttcaattcccgggaaaatagtagctgcagaccataccatttggagggtctcatttcagagtactccaccccatcctntgaccagcagtcgcttcaccctctgctgctcatgtctcagagtcctcgcgactacagatggagtctatctcatcaataaatatggtnggctggagaataaaatcgagccatttcaaacagaagacgaacaagcttctcagattctcctctgtatttggaagtcaaagttgatgaagagacattgaagaatgttgtcttgcattctgtagctactgctttagcaaggagcgtcttccccgtgccaggtgggccgaccatcagtactcctgttccatggtctcctaatgcccttaaagaattcgggcatccacattggtaacactacggcttccttaagcaactttttagcttctactaaatcagcgatatcatcccatcgaacattgggattctgggaaattatatctctttccaaagcttctactaagtctttatcatatccggtactatcaaatttatttgtctctggttctgttactgcagcaggtgatttgttcttttcctctcttcctttattctgttctttcttttcacgacaacgaacagctttccctctgtcattgtgaacattctgtgcagatgaacggtgaactctgacagttgtacttggacgattaccatgtgatttagggtcactgtactgagaagattggcgttttctaggtcctggtgagggtcttcgttcaacaggtacaggcatggaccagacttctccctcagaagctggaaggtcatgctgtgccgctttcaagggagtgctgtctagtttaaagctctctagtgttttcatgatatctttaacatgtttagcttccacatttatttcctgccaaacctgttgccatttctgctggaggtatgtatctttgactgagtacagatacttgttcatttggtcaagaactccctgataatagaccatcgcagagtcatagtttcccagcaatgcatattcacgagccaattttacattctcactaatcataagaagactcatgttcgactgtaagctgcggcggcccaagctcctcgggaaaccgcccaacgccaggcacaggggattggcggagtggagatcccggcagcgaggaaggagggcctgacccagtccagcccactttgctctccgctcacggccccagtactgcccagttcaatcgtcaacaccacctgccggcgcggctcctgctcgccgagaatttgaagacaaacccgccagggtcacttccggtgccggggacgacctcggcgactctggcgcacgcggggcgtcgcatcccggga

SEQ ID NO: 318632 - DNA, 766 bp, Homo Sapiens
gaggaaaagaacaaatcacctgctgcagtaacagaaccagagacaaataaatttgatagtaccggatatgataaagacttagtagaagctttggaaagagatataatttcccagaatcccaatgttcgatgggatgatatcgctgatttagtagaagctaaaaagttgcttaaggaagccgtagtgttaccaatgtggatgcccgaattctttaagggcattaggagaccatggataaacaatggcagataaatcctctgctgaggctattatattcgcaacagggagtactgatggtcggcccacctgggcacggggatgacgctccttgctaaagcagtagctacagaatgcaagacaacattcttcaatgtctcttcatcaactttgacttccaaatacagaggagaatctgagaagcttgttcgtcttctgtttgaaatggctcgattttattctccagccaccatatttattgatgagatagactccatctgtagtcgccgagggacttctgaagaacatgaagcaagcagaagggtgaaagcggagctgctggttcagatggatggtgttggaggtacttctgaaaatgatgacccttccaaaatggttatggttctggcagctactaattttccctgggatatagatgaggctttaagacgacgccttgagaaacgaatctatattcctttgccgtcagcaaaaggcagggaggagctattacgaataagtctacgtgagttggaattggctgatgatg

SEQ ID NO: 318633 - DNA, 1916 bp, Homo Sapiens
  misc_feature (580)..(580): n is a, c, g, or t
  misc_feature (619)..(619): n is a, c, g, or t
  misc_feature (703)..(703): n is a, c, g, or t
  misc_feature (709)..(709): n is a, c, g, or t
  misc_feature (722)..(722): n is a, c, g, or t
  misc_feature (755)..(755): n is a, c, g, or t
  misc_feature (917)..(917): n is a, c, g, or t
gcatgcctgcaggtcgactagagaggcagacaagatcgaccgtctcactttacagaagtgcaaagagtagctggcctaatgccacagccaatgaacagatgaaggaggcctacaaccacctagtcttccctacttctcctcactcctccccttctgacctccttatgtcaccactgaccaatggatcactgtgtggccgttcagcatcttcctatgctgtgtcaggcaagagaaattctggaaagagagcatctcatgtttattaaggagactgggtgtccttgtagaaagtcctgccatgcacaaccccggtcttaactgatgtgtttcaccatactgaaggcaagttgccatctaacatagttgaaggcgagccagttgtggtgatctttgttcctgcctagtccaatgtgaataacaaaatgaagaatatcaggatgattcgagaccaggaatactacagatgtccaacacttccacctggaatccccaaagaggcccgcttttagcctccacactggttggtgacctgcctctgcagtgcactctgctgcttcagatgaaaattttcaggtctgtntgccactgtagtgaagcactgctttgggtagtgtctgtngagaaactttttaaaggacatagttgaaatattgtgctacaaaccaattcttgaacaccactcattttgtcctacctctctgtnaccgtnaaagacggctgtnctcttggcaaaggtcatctctctgtcatgagtntggatctccttttcttctcctgattatctgtcactcagttatccccactctcttccacaactttaacttcagcttctctattctaagagactcttctcgcaggctcaaggctcttctaccctccatcattcctccctctaccccacacagccagcatgtgtncagctagtctatccttcagccaaacttccttagaaagaggccttacctcactgtccctacccatctactctctgactcacttcttaactccatgactgggttctggtttctttcccttgcctgttgtgacttcctatggacacagccaaaaaccatcacatagtcctgttgtatggcatccccaccatcttgaaatgtcctctccctcagttcctatgtcttactacacacgcctgccttggcttctccctctagttgttccttctctgtcttctgtgggcttcttattgtctgctcactccttcttcagtgtcctctcatgggcttccttcccttctcagctgatgccatcacctggggaatcacagttactcagcagcactggggcctctctatctctatgctggtcatgcctatgtgtgagctgcagacccagtggaatttccatttgtgcatcccatgcccagcccaccctccaccagcctcgaatgcagctgttcagccctaccccagtcctcagaaaagttcctctccctggatcctctttttccttcatgagtgcccggttgcccaagtcaaaaacctgggagtgatataaactccccacacatccagtcagtcactcatcaactctattgattctgtctgctaaatatatctcaattgtattaacttaaacatatgcataatacatcttcttcttcactgcatttttgtgggctgcacttacctttcaggtaacaacaacactggcccctcttgcccttctagtcagaagtgccaaaatgatgagagctagccatgacaaacccacagccaacattacactgaatgtgcaaaactggaagggcatccaaacagaggagggaagagaggaatagacaggaagtcaaactgtctctgtttacagatgacatgtttctatatctagaaagccccatagtcttggccccaaagcttcttctgctgataaactttagcaaagtcttagcatacaaa

SEQ ID NO: 318634 - DNA, 571 bp, Homo Sapiens
  misc_feature (30)..(30): n is a, c, g, or t
  misc_feature (38)..(38): n is a, c, g, or t
  misc_feature (124)..(183): n is a, c, g, or t
  misc_feature (194)..(194): n is a, c, g, or t
  misc_feature (272)..(272): n is a, c, g, or t
  misc_feature (509)..(509): n is a, c, g, or t
ggtggaaaaagtatattcaataaattttgnctttaaancagagctcttgacctataaagtataaaaagtaattacaatgaaatattcttcagtaaatctgacactttgggattccaggcaaaannnnnnnnnnnnnnnnnnnnnnnnnnnnnnnnnnnnnnnnnnnnnnnnnnnnnnnnnnnntgactctgcangttcactctgctgcttcagatgaaaattttcgaggtctgtcatgccactgtagtgaaggactgctttgggtagtgtcntgtggagaaactttttaaaggacatagttaaaatattgtgctacaaaccaattcttgaacaccaatcgttttgtcctacctctctgtgacagtgaaagatggctgtgctcttggcaaaggtcatctctctgtcatgattctggatctccttttcttctcctgattatctgtcactcagttatccccactgtcttccacaactttaacctcagcttctctattctaggagactcttcntgcaggctcaaggctctcctaccctccatcattcctcaatctaccccacacagccagcatgt

SEQ ID NO: 318635 - DNA, 1264 bp, Homo Sapiens
  misc_feature (16)..(16): n is a, c, g, or t
  misc_feature (39)..(39): n is a, c, g, or t
  misc_feature (99)..(99): n is a, c, g, or t
  misc_feature (101)..(101): n is a, c, g, or t
  misc_feature (107)..(107): n is a, c, g, or t
atttttaatctgactncgggtaacagctcaatgggcgtnacacacacttccagaccctgtggtgggaaaccctgggagcgggtggaaggagaaggacananactcanaatgggggtggagggacctgaaatccaagacctgggttgaggtggaggcggaagggggcctgtcaggggatacattccaatggctcccacaggggagcagccagaggcctgggctccgccccctcaccccaggtgccttagagttggtgatggggcatgtgagatgctgccatccttcatccgctccctctggtgaaccagggggcaggggtgcaggagactaaaggggcaggccctctttgttaccctcccagccactctaaggtgtggggaaggggagccacctcctctgtttcagagggaggctcacagagggcaggtcacttgcccaaagtcctgcaggacagcagggactagaatgcaggaacactagactgcccaaggtcagggcggttgctgtgaaggctgtgctacgccccacttggtggacagagtgggaatccgctggggaagcagaatcatagattccccctacaatggatgttggtgataaattccccacccacgacccttcccccagactctgctccatcaccagtgtgggctacctgatttcctggtctatatgctgcagccttggctaggttggccaaagcggagttgtcctctctgcccctcttataacaagggaaccttgctgtccccccaccaggccagggctgagggctcagcctcaaggacagctttctttggccaggggagcaggggacagggcaccacttgttcctccctccaagtcccccatcaatccctcatgccattcctagaatcttcattattattgttatttctaaatcggtacaaaactgacagtgatcagctccggtgacgagaggtagaaacccggccaggcagccggagaaaatggggtggagtgagttagggtatagggctaactggtgttgggacaagagggtgtcagatcctgagggcctccatctgtggcaggaggaagatgcaggtgtgtctcccccaagtacaggggtccccaccattctttccctggctctgttcttccccagattaatcaggatagtctgagatctgaggcaggcagagtctggggtagtcagatggggttgagacggggcaacagaattttcactgggacaacctaacccccttctgggcaccatcctgcccacgaccagacccca

SEQ ID NO: 318636 - DNA, 1759 bp, Homo Sapiens
gtttgtgtgtgttttggagccctaaaataagcattttatttaataaaaaatggcttctacatctcaaatcatgtccataacttacaatctaaatgaaagccagttacataaataagaaggtcattctggaagaatcaaattcctaggacaggagggaaataagtgcgtccagaaacttgctccgatcctcagctttcagctcaattactgagaggtcaaaatggttgtgcagcatccgggagctggtgctttccgctgccttctcaaacgccctcccaaaaaagttcttcctgtccgagctgtcggtctctggggggatgcccaccacggtcactgtgccatgctccatgctcaggggggcagccatcaccaggggcagcagtttgcagcgccggttctttgtcgaacacacaaaggacttgagcaggtgtttgctgagcaggcttagggatgccggcctagagaacagcatgacatctggagtgccctccatgagagagcagtacaggaaaggcccctgggagatgacgaggttggtgcaaaggcagctggcaatggtctgctgggtggctcgcagctgcttcttggcgagttccaggccatggtacagcttgtccaggttactcctggagaggctgtccagagcctggatgaagtgatctgtccctgagccatccttctcggggctctccatcaaagacatggtggcaaagaccacgtcgctggccagaaacttgtgcttgaacccaaaatgaatgctgaaagtctgcacgcgcatgtccttcatcccaaatttatttgcagactcttcaatcatttcccgcaaattctccttcaaggagatgtccatggcctggaacttctgcttcacctgcttcaggggaagacccatgtctgcaaggaactcctggagccgcttctgtccatgcacagaccacagcttgaacctggctgcggtatagctggtgttgcacaggctgtcatggagggaccagtgctggtagagcaccaggcggaggtcatactcaaaggagatccgtgtgcagtccacggagagtgtgttctcctcatcctcgttccggtggttgtggcgggaaacgtggcgctgcaggacaccaacatcagtcacgtatttcatttgagtgatcttgtcttgcacccactggtctgttagtccaacgatggcccaccacagcatgtcattcaggtccttggacagcatccaagccagctcaaacatcaccatggctgacgatgtcccatgatattcatactgctcgtagtcaaagaggatgtctcttctccgggcctcccactctcgccgctgcctcctcgcgcatggtttgctccactatctcctcttctaaccgtgtgcgcttctcagaaggctctgacccatcactgtcatttcctgaatgctcttcatcctcctcttcatccctgaagatgtcttcataggcgggaacttcaaggtcatcatcttgtttaatgagtaatttgatctgttctttatgctcaagaaatgcagtttcaagttcttgccacccagaaactggaaccagcgtatattgcacgtggtcacactggaacaaggcctgaaggatcttgcacgcacacagagcatccacgtccgaggccacgaagagaaggaccctctggctctggaccacctcgtagaactctttgcggaaatcggacacgaacatagccacggcggccggacgcctgagcgctcgcgctgaggtaccaagagcccggc

SEQ ID NO: 318637 - DNA, 300 bp, Homo Sapiens
  misc_feature (1)..(2): n is a, c, g, or t
nnggggtaggcttttgcataccttcacattctccccatgccctagcttttggccagtctcttcggtctgtttcaaaactgtcacctttccctcattctaacctagtatgttaactctggaaatggctgcaaacattgtgaaactcgaggatttgtgtcagaagaatgccagggaaggcagtttacatcgcttgccatgtccccagtatgcaaacagcggcaatttttttgtgggttattttcattttcatgatgtcaaacttcattttaactccatgggatcttgttatttaagacgaag

SEQ ID NO: 318638 - DNA, 1113 bp, Homo Sapiens
  misc_feature (749)..(784): n is a, c, g, or t
caaaaagaatgtttattttaagctctatgtacagaagaacagagtataaacgtaaaaaggaacaaaggaaacaaaaatgacaggcatacatatttacatagcaagtgtaggcaaaatgtgtcaagaagagtctttaaatacatctacttttagcctttaacagtccaaatcagtttctaagaataatttatcatccaggaagaagttttggaagtttaaagctcaaccttaagttgagtttaaatccttgagtttagaaggcttgtgttgctgataccttggtcaacagcttttgtgttgaccatttcttctttagttcgctgtccttctgactgtgaaatgtgatgtccaaaccttgaagtttctggactagaaaatggggaagattcccaagatctattctctttctcaaaagaatcatcttcttgaaatgcaaatttctgtttaagtgcatgagatattaaagaaactggatcccaatgtgaattctgtcttttcctcttatgaatgggtctaccgccaggtgaccgctcaattgcacgaagcttaaccttattcatatcctttagaacgtccaacatgtttggaatatctttatttctctggctttttgaatgatgactataattggtcttattagcagccgggttctgtttgctcatttcagttgctggattatctgagtcacaaatattattagatcctggttgtacgggaggaaaacacggtggctggagagatgaaaactnnnnnnnnnnnnnnnnnnnnnnnnnnnnnnnnnnnnctgaacctggaagctgatctgggtccacactcagatgggcagcccgcgatgatgacagctgacccaaactaatgcgctcgtcactcaagccaaaggaactagaatttgtactatttttcagttcctgcatttccacaattgctgcaatctgagagcgaagaaaagtcagctcattttcaagggcagctatttttctaattgcagcttcatttacaggcaggtcatttttcacagtttctttctgtcttacagcaggtgacagtggatcccgaactagtcgcaaaggatgaaaaatttccactttctcttcttcattttcccatagatta

SEQ ID NO: 318639 - DNA, 1759 bp, Homo Sapiens
ttttttagggagtttgaaaggcctttaattggtgcggaaatcctgaaggcacaagccaagcccccgcccaactttgatcccggatcccagcgtcactcagctctggacggttcttcccccattgcttctgtcggctgcatagacgtgaggggcagataggtgctctcctccctaacatggtaactgccgctccgttggtgctccctgaagacgtacattaaggccagtacgatagtcaccacgcccagggtcagtaacaccgccacgaagacggggacaaagtgggagctcccagcctcaatgtccatcaccacgaccagggtgtatttgcctcgtgagctggacgcttggcactgataagtaccattatgtgttacgttgacgaagaacgggatccccaccggcacctcccggctggagccttccttcaaacaccgcagctcggggtacgggttgcccctggcttggcactgcaggacgtgtctcgttttatctttccatttcaagtgctgggggcatgtggctcggtcaattttgggaccatacaggactcgcagctggacgctactgttcctgtgcaagaactcgccgtccacctcgagagtggcactgcagaagaagctgcgtccgtcgtcactctcggtagcatttagctgaagttgagctggctgccccggggccgcggccggaactccgtccagcgtgacctggactcgagccccagccatgcaactcacggtcactgtggacccctcatgggcggtgggctcgctgaggttcacaatgggtcctaggaagctaaagaccgtcaagttctcccgggcctcccgtctctcgccccctagggtcacgttgcagacgatctcccgggcaccctcctgatccgcgcgcgccgtggctgtggctgtggccgttagcgtgtccccgtggttcatgactgtcgcattcagcatctggtcccccagcgccaggtagacctgggcctctgaggctggaaaaagcccgtctagggtgcagtccaccggccacgacgtttccacctccaagaaccggggggccacgaggcgcgggggggtcacgggcaggacaaaggttcggagctggcggggggctgaggtgttcacgaacagtcccagcccctggggctgcatgtccagttctgtgcggcatgagaaaggggctccgtggtcgtctctgctggccagcacagtggcagtgacctccgctggctcctccactgcgggctgccggctcagctcctcctcccagcgaagcagcaccaccgtgaggctggtccggggcgacccatcctccacttggcagcgcagggtgaagttctggcccaccggctgccaaggaggcaggggtgccagctccacacgctccgggagcctgtacacggtgatgttagaggagcctgttatctgagagccattgcagtacactgagcagaggatccgactgttgccagtcacgttgctgagattgaaggctgcccagcccatgccactggccaccagctcctttgatagggacgtctccaaggcgattttctcagagctgggacaatcagtactgcagttcacaaacagggaccctccagcagagagcacagggttctggggctccacccgcaaaaggaactcctgcccctggacacctggggtcagcagacagcagaccagcagagtccagcaggccctgggccacaacacggatggtaccatgttggccattctgacagaggaaggtgccatcc

SEQ ID NO: 318640 - DNA, 2084 bp, Homo Sapiens
  misc_feature (191)..(191): n is a, c, g, or t
  misc_feature (845)..(853): n is a, c, g, or t
  misc_feature (1222)..(1222): n is a, c, g, or t
cttctatctaagagtagcatgcaagatcttgtaaaatgctttattggaaccaagaaatgttgcgcttaaagcttacaaaacagagacagctaaagctttctttcataagcaacaattgtcttctccatccccacctcattggaactgacatgatgaaggatttgaaagtttcataacttaactcagcgaantcagtagtacatttagtattggttatacaacatttgtttaataaatgcaatgaacaaagctatacaggaattagatattgaagcagaaaaggtggttttacagtccctgcattaacctctaattcttactaccctggccaagaaagcattttcacctcctgcgctttccttcctgtgtgcttgtggttggttctttcttctcaggctttctcattctgatgctgagatagttctgttcacttagcaacttgggacagtgacacagggtttgttctgtactttcttttccaccccaccccccaccgcaatcctcagtccccttcctaggaccattttctactcctagcattaagaggactcatcgttatatacttggagatggtccagttctgatagagtcccctggaagactcaattctacgtcaccctcatgatttcctgttaattccactacggctaatgttctaggaagacacccttatctctgggctcagatgggaacacctcccttagactatcctggactacctgctatttctcagccatgctttcattggtcccactgaattccctagatccccagcagttcccacactctgtatggtcctgcctcaaccattaattctacttatccatttatttaggaataattgnnnnnnnnncccctctaaactgggtaatttataacacgagcaatttttgtatgtttaaaggattaccatccctagcctgtattgttgctttgctgtgagggaacggttgggacagaaaaagtgtttgtgtagctctgaaacttcaatttctaggaatgcagctactcactggggcttccctgcttgaagatcatgggcttttcccttccactggagaccaaggaaaagtcgagagttggataagggatctggctctgagttctatgtttcctgctgcttgtagagaggcctgaggatgatggggttgcaaatccagagaaatgttcagagatgctgctgctactgctcttattacccccatgggatgggggtcatttngtcttgagggtcctttctccatttaaatttatggtccttccagtctcttgttgagcttcgaatgtttgtcttcacagagaaatatagtcctgtgtccactgcaaaaaggagtaccatcaccaagcagaaagagacttggtacccaggtggaaagaatgatgagatggttgacactgccaaaccttgagtgatggtgatgttcacagtctctgaagacacatttttactcccaacaagccccctgcagaagtaggagccgctgtctttgagtgtggcttttggaatgtagaagtcagaattatgatgaaaatacttcctgcctttgccattctgtaaatatgtgaccttatgcagagcagtgttcttccagctgtgacacctcaggtgaatagggtcttcctccttgaacacccaccgaggggcctggagcaacagccagccgatatggacttctagctgcaccgggtcactgagggtggagaggtttgtctggcacctgtactctccactgtcgtcgactgtggcagcgtcaatgaagtagctcgaggcctggcttgagatgaggctctcattgtgaaaccactgtgtggaattgtcctcaggggagtaggctccctggcacttcagagtcacactgtccttctcgagcaccctgtaccattgaggctccaggaacaccacagcctttgggagatcttcagtccgcatgccagctgaaactagaagtagcagagcagttgggaggagcagctgccacatgatgccacactggagtggacaagtcaccaaagatatccggagcccttcctcgtgttacccaggtctgcggatttagctcaggccctccgggccactggatctg

SEQ ID NO: 318641 - DNA, 501 bp, Homo Sapiens
  misc_feature (20)..(20): n is a, c, g, or t
  misc_feature (441)..(442): n is a, c, g, or t
  misc_feature (448)..(448): n is a, c, g, or t
agacctcatctaagcatgcnctgagctactcatgacgctgccaagtcgacgcagtggagagtaaggtgccagacaaacctctccaccctcagtgacccggtgcagctagaagtccatatcggccctttcccgacccatgacctccatgttctctctttgtgaagtctgattacttggtgacatgatcgtgagaactaagctctggcgatataagaatttcctctcttgaaggccatgctcagtaaattacttggtgacatgatcgtgagaataagctctggcgatacaagaatttcctctcttgaaggccatgctcagtaataaagttggtctcaccgaggccctgtgacaccttagaaaccacgaattgccaggctgagcaataccagtcccgcccttcccctgcctggtgtttacattgagttctccttcacaatttcnngaccantccgtggccaccgtcaccttattcctgactgccacaagagtctttcaatattc

SEQ ID NO: 318642 - DNA, 716 bp, Homo Sapiens
  misc_feature (515)..(534): n is a, c, g, or t
tctcataaattcattttatttcaacaacaaaaagattagctccatccctctgattgggatcacaaagtacaatcttttcagcatgggttttctcaccatgccacaaacagaaagaggcactaagggactgataagggggtattttctgtctctggcagtattatattgacctgcaataaaaacatgtgatcttacagaacaggatacctcttgaagaggtatagtttattttataatatgtaagtattccaaatacattgattgtatgaattagggaaggaaaagcactaagaaacatttcatgaatattcattcctacactccaactataccaagtgttactactttatataattcatattttattagcttttactattttaaaatactatttctgttctgtaaaattgatattagaggaaaaaaagtcacacacagatttctaccaccaccagggggatactcaaatgtttatttgcctatgcccgttggtttgtttttattgtggcctcccnnnnnnnnnnnnnnnnnnnnaccctaactgatggtggtaccaacctgtctcccgtgtgttttaaacatttttctcttgaacggtgtgaaggttaaaatatttttgcataatggtatttttcatagatgcagtttttgtagtgaatgccacctttctctacctggcatttgcttcttttctcccgtgctccccaaaagttttt

SEQ ID NO: 318643 - DNA, 1650 bp, Homo Sapiens
  misc_feature (21)..(21): n is a, c, g, or t
aacaaaactttgggaaaatgnccacttccctttgcactccccttccagccattcttcattcacctttgataacaccaggattatatcccctttctgaaaactccaggtcctctggttgggtagcctcataactgaagagtgcctccacttggctgcctttcttaagctgaggttctgttgtctggttattagcatcagctttttcactttccttgggttcatctggaaagccttggtcacccactgtgttctcacaccacagagtcaggcagtagtttttcacctggccccaggcatccttcatgctgtcttctgaaaggggcaccagctcattgctgtcccgaggccgatagctcagcttagtgtgttccagccggagctccagtttcttagacaccatgtcccggacctggctgtaggggagcccgggctgagtcttcatgactaccgtgtacttgtagtgcaccttgagtgtgtagggcatgggaacactgagcttcacttccttaggctcttctttttgtttctggcctggtgacagctggggtcttccaggggctttggaactaggaggagctgggatgtcggactgcggagagctttcctcctggggctgctgctgagggtggatccgcagctcaactggttcaaggtagttgcagggaacaagccccttctgcccgttgaacatgaccgtggcccagttatcattgcccttcttcaagacaaagacaatgttccctggcatgacctggagctcttcttttgtctcaggcacaaacccaaatagcacacggtgagcctccccttccagagccctgaagatctctggggttttccggtctgggtggaggctcagctgcctgtggttgcagaggggcaaacccagagaaactgtcttgatccaccacagatgccacgaccgtcgccttgcctaggtaatccttcttggccagctgagccacttgtctctcatttggtcgaaacagcctgcccacagggatcaccactggctcatatagcttctgcttccagacacactccatcgccttgtcgattttggaatgtctgggctcagacttcatgctcgtggccaatgctaactgttcttcagcttttttccattcctccttcttggcatacatgaaagcaatgttatataacacctcacaggcaaacagcttgaactggagccccaggatcttatagtctatcagctggttccctcgaagctgaatcaaggcttctttaaggtctttgatagccaaatcatatttctctgtctggtagtagagcatccctcgttggaagtaagccactgccaagtgcttgtctcggttaatgcttctggtaaaggccttctctgcttcagtcatgttcttcaggatagtgtacatgcagccaatgttgaagcaaatccgggagtgggggtcctggacggcactgaaggcatccagggctcccttccagtccttcttgtccgctgccagcaccccttcattccagaggctgatggcctccaccagggacatgattaggtagaaactaggaggccaagagagctgccaggagacagagagaagacaggttggagcgtctcccctagcagggctgccttagtggcccccaaggtgttcactttctgggcca

SEQ ID NO: 318644 - DNA, 1623 bp, Homo Sapiens
  misc_feature (11)..(14): n is a, c, g, or t
  misc_feature (171)..(172): n is a, c, g, or t
  misc_feature (175)..(175): n is a, c, g, or t
  misc_feature (268)..(268): n is a, c, g, or t
  misc_feature (272)..(272): n is a, c, g, or t
  misc_feature (309)..(310): n is a, c, g, or t
  misc_feature (314)..(314): n is a, c, g, or t
  misc_feature (319)..(319): n is a, c, g, or t
  misc_feature (323)..(325): n is a, c, g, or t
  misc_feature (330)..(330): n is a, c, g, or t
  misc_feature (333)..(333): n is a, c, g, or t
  misc_feature (336)..(337): n is a, c, g, or t
  misc_feature (340)..(340): n is a, c, g, or t
  misc_feature (343)..(343): n is a, c, g, or t
  misc_feature (347)..(347): n is a, c, g, or t
  misc_feature (360)..(360): n is a, c, g, or t
  misc_feature (362)..(362): n is a, c, g, or t
  misc_feature (364)..(364): n is a, c, g, or t
  misc_feature (366)..(366): n is a, c, g, or t
  misc_feature (393)..(393): n is a, c, g, or t
  misc_feature (396)..(396): n is a, c, g, or t
  misc_feature (431)..(431): n is a, c, g, or t
  misc_feature (460)..(460): n is a, c, g, or t
  misc_feature (463)..(463): n is a, c, g, or t
  misc_feature (626)..(626): n is a, c, g, or t
  misc_feature (647)..(647): n is a, c, g, or t
  misc_feature (1042)..(1055): n is a, c, g, or t
  misc_feature (1424)..(1424): n is a, c, g, or t
ataacatggtnnnnactctttcctccatattgctgttttgtaaaagcagactagaaattatttaatttaacattttcatgataccctggaaccaacttttagaactgattttcctgcaataaatagtacttcagagacaaccaaaggttaatggaataaaagaaaaagctnntcngaagggagtaaatgatgacatctattttaccttgaaacaggttaatctcatctagacccactgcattttaaaatcacattaaataatattganctcngtcacattcgaagtaaaatatgatttaaatatacccnncacnatctnagannngctangcnggnngtntgnggtngcacaaacaaatncncncncccattccacatcaactttcaatcccngcnttttacgttcatacatttagaattaaagatgaaantccctttaggtaccagatgctgcagatcngcngggagagcttctagagttttaatgtgctggaaggcaaatcctcggcaaaggcgctttgcccggccggtgtggtgctcttattacttcacctgcaaacggttgctctcagaaaatcggacctaattatcagcctagcatctctgcaataaagagaccataatcngtgggggaagtgtactctaantccggccacatgcagattaaagtaactgggaggaataaaaactagattaaaatgttcatgcctaataccagaagattatcaggacattttacttctttaaatcctaatttataggagccagggttaagtttgagtttttatttggtgagatcacatactgcagttgattttcctctgtttagaaaagacttggctagaaagtattttgcttagcacaatacagaggcatctgagtgaagggaatggtttcaaatgtactgatatacatcttatgacaagtaaaatgaagccaccctgttgaaactggtcaaggtagtaaataatggaaattattcttgctttaatggtaatattgctgtatcactgtgtatatatgaaatagttttgtgataacnnnnnnnnnnnnnncataaaatggaatctgattcttatattttgaaactttctgaacaagacttgatatgctagaagtgcctacccactactgttagttgagcaaattgcagcaaataattacctgtaattcaaatttaatctaagcacatgaccattcatgtgaagatatttagtagtaccaccttggcagatcattagtaataccaccacattaaaataatctttttctaaagcaataagaagagcaaattattatgtcaatcaacagaatatattttcttttaccagttctacaactcttactaaattggcatgccttgacttaccacctgtgaggccagacaatgtgtagcagtctttgctgattatcaactccacccnaaaatgtcacagggatcaacagtcagatttttgtttattttcaccatgatgagagcttgaattatctgacgaggtgggattttttcaagtctgattcctgtcttaatgagttacccaaatattcttgtcgtgcagtatcagggccacagtgtgtatcacactctgaattaaaattcttcaattaaatcctctgatacct

SEQ ID NO: 318645 - DNA, 658 bp, Homo Sapiens
gaacagtctcctacatgtgatgccgaggacatgtgtaaccatcataacgtctctaggaatctgtatttaatttgagttggggtggtggcagggattggagatctgaagccgccacaggtttgtggcagatggctctgtgtcagctatgacaagcagccaggctcagcttcctctgcagattttcttttctctctgatcaggtaaatatgggcacactctggaaagttcttcagattctgccttaggctgcaagtttgtgacttagccccatctgtcacaaatcttccctaggttctgttgtaagcagagacctgaatttaccatgtagggctgcccaagaaaacggagcgatttcacccttatagagatgttttcttataatatctggtctcttgcagaaattctggagcctttttgaaagctgttcaggtgtagaatacagatattcagctggaaatatttcgggataaaccaaatctttaggacaaagtgggtaacacccacagtacacagcttccaaccacctgtgaggccagacaatgtgtagcagtctttgctgattatcaactccacccaaaatgtcacagggatcaacagtcagattttgtttattttcaccatgatgagagcttgaattatctgacgaggtggatttttt

SEQ ID NO: 318646 - DNA, 1007 bp, Homo Sapiens
  misc_feature (15)..(15): n is a, c, g, or t
  misc_feature (17)..(17): n is a, c, g, or t
  misc_feature (29)..(29): n is a, c, g, or t
  misc_feature (34)..(34): n is a, c, g, or t
  misc_feature (36)..(37): n is a, c, g, or t
  misc_feature (41)..(41): n is a, c, g, or t
  misc_feature (47)..(47): n is a, c, g, or t
  misc_feature (50)..(50): n is a, c, g, or t
  misc_feature (54)..(55): n is a, c, g, or t
  misc_feature (61)..(62): n is a, c, g, or t
  misc_feature (64)..(64): n is a, c, g, or t
  misc_feature (67)..(92): n is a, c, g, or t
  misc_feature (94)..(95): n is a, c, g, or t
  misc_feature (97)..(97): n is a, c, g, or t
  misc_feature (101)..(101): n is a, c, g, or t
  misc_feature (104)..(104): n is a, c, g, or t
  misc_feature (113)..(113): n is a, c, g, or t
  misc_feature (118)..(118): n is a, c, g, or t
  misc_feature (125)..(125): n is a, c, g, or t
  misc_feature (137)..(137): n is a, c, g, or t
  misc_feature (144)..(144): n is a, c, g, or t
  misc_feature (150)..(150): n is a, c, g, or t
  misc_feature (152)..(152): n is a, c, g, or t
  misc_feature (158)..(158): n is a, c, g, or t
  misc_feature (160)..(225): n is a, c, g, or t
  misc_feature (234)..(246): n is a, c, g, or t
  misc_feature (852)..(852): n is a, c, g, or t
  misc_feature (887)..(887): n is a, c, g, or t
  misc_feature (905)..(905): n is a, c, g, or t
  misc_feature (914)..(914): n is a, c, g, or t
  misc_feature (938)..(938): n is a, c, g, or t
  misc_feature (977)..(977): n is a, c, g, or t
tgggggccggggggngntcgtggggccgnagttngnntcgncggccnacnttgnnaacctnntntannnnnnnnnnnnnnnnnnnnnnnnnntnngngggntcngtggcacangcctnaatcccngctacggggggnggagcangagaancnctaaancnnnnnnnnnnnnnnnnnnnnnnnnnnnnnnnnnnnnnnnnnnnnnnnnnnnnnnnnnnnnnnnnnnactctgtcnnnnnnnnnnnnngatgttaaaggaaaaatcctgaggcgcaattcatgaagtttagtgttccagtggcaaaatgtcacaggcaagtatttattgggaaaatgtggaagcaaaataaaggcaatcggttggttttcaattacataattgttttttgggggtaggtatcttcttagaaagtccctagtcacctaattatatgttagtaggctgcttgtgattggctggggttgtcttatttctaacataagcatttaccagaaatgatccaagttaagttttgcttatgcttgtatgtagtatgaccccgtgaagttttgcttgtgtttgtagtttaagcaaagttaaagctatttctaagggccaggtggttttgtttgctcaggaatttttccagtctccatttaaattttcctttaacaattcccctctttttgtcatccactcagcaagctgagagtgtgaccacatggcataacgttactctttagttattactgttgacatggtcgttggggggaagagtcaggtagatgtttttatcatcgtcagtaggtgccctggggttcagagtcatgtagccgccgtcagctgtttcatagtcattgttggtttcttcangttgtctctttctgatggcaatcatttgacgtccnggtggctcaaattgggcngccttcacnggatcagtggaattggctggaaangggctagtccagaggcagaattcagctcacccatggggncgcccaggagtgtcagaaaggccacgccat

SEQ ID NO: 318647 - DNA, 395 bp, Homo Sapiens
  misc_feature (16)..(16): n is a, c, g, or t
  misc_feature (35)..(35): n is a, c, g, or t
  misc_feature (55)..(55): n is a, c, g, or t
taagaaccccgtgaanttttgccttgtgtttgtanttttaagccaaagttaaaancctaattcctaaagggccccaggtggttttgtttgcctcaggaaatttttcccagtctcccatttaaaattttccctttaacaattccccctctttttgtcatcccaaccagcaagctgagagtgtgaccacatggcataacgttactctttagttattactgttgacatggtcgttgggaggaagagtcaggtagatgtttttatcatcgtcagtaggtgccctggggttcagagtcatgtagccgccgtcagctgtttcatagtcattgttggtttcttcaggttgtctctttctgatggcaatcatttgacgtccaggtggctgcaggaaagcattt

SEQ ID NO: 318648 - DNA, 1754 bp, Homo Sapiens
  misc_feature (13)..(13): n is a, c, g, or t
  misc_feature (110)..(110): n is a, c, g, or t
  misc_feature (142)..(142): n is a, c, g, or t
tggcagagtggcngagctgcagtccctcaagcgcttttatgtattcgtcgcgtaaggctaagagctccatgtaacgctgctccactggattcggctgttgtggcttgatnctggggttccatctaatgtagtaattcaccangagttccaagtgacgcatactggcaactggatataaaactcgattgatttctttagtatagaaggggtttttgaatttttctttattactgtttatcagtgaccataaagaaacagtcctttctgtaaccttctgtctttctcgagcagattcacagttgaataagaaagtaccaaatcggcaactatacagatgatccaaaattataatcaaaaattgttcattgaattcaaaagctgtagggaactgttttgacatttgccacacacaatcaataaactggagaaaaataggagaacggtcagcatcggtgtggtttttatcaccatgacctattcgagatgcaaatttatgtccaaaacttatccattctttttgtaccagtatttcgaacccttcaatgctcctatagaagctatccaacatcagcatggccaaggatgtcagctgagcagtcctgtcccatccgtcactgcaatgcacaagcactgaactcttccctgaagaaactttgtctgctacttgaatggctcctgtcaaaacgagcttgatatgttctaaccaatgagtagactccaaactggacaaccaatgagattcttctacattaggataaacaatgtccttcacttttttttaagattcccgcataacatgaatattatgaatgtctaagaagaaaagttcggcgttatgatatgcatcatcactttcatatcctcctcctgttgccttgttggccactgcatttacgctgggtcttgcatcataaatggtgagtttagaaattttgtttattagtctccctgataacatcgagatatttctcatcatctttatttcgtttcccactcataccgacaagaggctgactgcaacgcacaatgaccgtcttattttctggatgaatccatgacagcactggaattcgatttcgggacctaaaagttgcaactctccggaggtcatcatctgaggcacgatacggaaccaccaaaagagcagggtaagtgtcacagagctcatagcacttattaataaaagttattctccaatggtgattgggcaagccctgcctcctgtattcttccactggattgtaaactgtccatccatccacgttaaacttttcttcatttaaaaatgcaaataatggcagactgtgagccaggggaaacgcgtatctcgtgaggatctcaaacatatctcttctgctgtggccttcctgtttcaaagcgaacctcaggtttctcatgtctttacaagtaatatctagaccataggaattttctcctctacttgtcgcgcctcccattttttcaattctcgagatcacacccagaggaacatcaagtattagagaagaatccgtttccaaacttcttaaataaagacgataatttgtgatgtaaactcttcccttaatggggccattgaaaggacatatgtaaataacttctttgtcagtgattagtgtttctcctggaagtcgaggaacagcctcagtgagatctcgattgactccatctcgagacgtcctcttaatagactcattctccaaggagtgtgaattatatttagaagttgatgcagaagccatcctggaaactct

SEQ ID NO: 318649 - DNA, 343 bp, Homo Sapiens
  misc_feature (230)..(230): n is a, c, g, or t
  misc_feature (238)..(238): n is a, c, g, or t
  misc_feature (253)..(262): n is a, c, g, or t
  misc_feature (281)..(281): n is a, c, g, or t
  misc_feature (286)..(286): n is a, c, g, or t
  misc_feature (292)..(292): n is a, c, g, or t
  misc_feature (301)..(301): n is a, c, g, or t
  misc_feature (304)..(304): n is a, c, g, or t
ggacagcatttcattttattatgtaactgtagaaagccttgatcaagataaaaatagggatgacttatcagaaactgaagaattttcttaggaaagcaaagtttactgaaggataccttcattccagccatgatgagcatctgtcttctcaggcaatcatgatgaagctccagggacagtataacccatctctcccactcatccctgagccttggtcctggacttgaatnttggttanaaggttgtggaaatnnnnnnnnnncccaaaataagaacactcncccantaaaancaagctcanaanactgggcctctttgcttaggtacaacaatggggagggag

SEQ ID NO: 318650 - DNA, 1455 bp, Homo Sapiens
ggattccaaccttaaatggggaacaaaaaggcacttctcccggccaagaggtcacccaagaggggagccccagtgctgtgtgcccggcccaaaggaacagaggaaggatggagggcaagccagcggagggcaagtggggccccagcatcccctgaagcctcacttgcagcctggggctgatgagatctcgcccactgcgcggcagagttgcagcttcgtacctgggccgccgcagctcctcagggggcctccacacctccacaccctaccctcagtggccagccaaagccatggggccccatgcagcagagcagggaagggacaagaggctcggcagaatttccactgtggccagcctccagccaggcctcgactggcagtgtgggctctgaagggctccttggggcatgggcccggagcagggtatcactcagtgaaggagagtcacactgggtcaagcagccagccagccagccagcctgtcctggggcctccacttctcagcaaagtctcatggtcagctggggtgggaaaggaggcagagcagccagatcccactgcagcgcagacctgtcccccagttcatcccactgcctccacacccccagccacagctggggcagctccgtcttcaaagaggaggaaaaggggtaacaagccacccccaaagcagccttaacaccagaggagggagggaggtcccagcctaagggtgtgagagcagtggggacctgggctgcagggtgccagaccccacactcataaggcaaacagcatgtcatcatctttctcctgggtcttcttccggggcgctgggccagatgggggacccgggggcccctcagctgaggggctggagaggctgggcaatcggtccgcggctttggcccgttcttccaggaatttgtcaaatttaccttcgctggtgacccccttaggctcttccgcatcattacccacgtcagtggacagccactgctcgatgtcctccatgaggcaggcctgggtgactgggatcgcgccagtgctctgctgccgggcgtccagggctccagccaggccgtctgttgcttggggggcttcgtattttacctctttccgttggtcagccagtgagctgccccgtgtcagcgcaaacatgtcaaactcatcttccagtcgaccagaggcctccagagactgcaggccagctctcacactgctggagcccaggttcattcctgccagctgggatgagaggttgccggtggctgctgggtcagggcccatgtcgatcaggtcagctgccggctcggcctcacttggggccttggtggtctggcctgttcggaaccgttcaaaccgttcatggcgcaggaacacattgttgagattgtcattgacgatgagcagctcctctgtcagctgctcattggcgatctgagggatgagctccaggacccgctgctgcatggc

SEQ ID NO: 318651 - DNA, 1054 bp, Homo Sapiens
  misc_feature (6)..(6): n is a, c, g, or t
  misc_feature (20)..(20): n is a, c, g, or t
  misc_feature (38)..(38): n is a, c, g, or t
  misc_feature (1012)..(1012): n is a, c, g, or t
gagagntcacagaggagatntgaggccacaatgtgggnatcccacactggtctcataccctcgggcctgccccactgtctcttgcccagctggttggcaaatggggttgcatttctgttcagggatactggatagggctgaccaggtgacaaacatggtgtagagggtgatgaccgaggcctgcagcagacccgagttgggctgggcgtcctggaccttgggcaggacagcagcgatggacacgcagacacagaaggtgaggttgaggctgatgaagaccttgccctcgtggcagccgctgggctcagtgtagtacatgaacatcagcgccacggccgcgatcgacagcaagtagaagaggagagtgaagaagaagaggcctgcgtaccaggcacgggaatcgcactcctcggccttgcccagccaccgctggttccaggagtgcgcaaagtcgatgagcagcaccagctggatgaggatgaagaggaaggagcccacgacgccgaagtagaaccagatgttggtgaaggagccgtcaggaatgtagaaggcacccacggtgaggcccaccaggatcaggaacttaaagaaccaaaacccattctggatggcagcccgggggtcccggctgctgctcacgcagagcatgagcagggtgaaaaagaagaagaaggccgccgtggcgaagcacatgcggtagacagcgcggtagccaagcagggagccacagtcgatgtggccctgcaggacggtggggatcccggccccctcctcacacacccagggcagcttgtagagctgactctccacgcccgggctcagcataatgatggacaccagcacccccaggaagaggaagaacgtgaagatgaggcggctcacggtggagttgcggctggcggggcagcagctgcacaggatgcagggggcagagccgcagaggcaggacgcgcagctgagcagggagcaggctcccaggcaggcccccatggcggcggctcccggcttcggncccggcgccgggcgcgatcccgggaattccggaccggtaccg

SEQ ID NO: 318652 - DNA, 1446 bp, Homo Sapiens
  misc_feature (142)..(142): n is a, c, g, or t
cccccagattggcaggcttgtaaggcttccttcagctgaagttcgcgggttgcgccaggagggagtgggggttaccagggtcccccaggtagagggggcaggccttgcccagcttgggcacagatttttcacccaccccggncggtcccacgtgctgatcatcttcccgggtcttcaccgggcttgtaccagttggtgagcgtcatcatgacgtgcagtgaggccagcaccaggcagaagtggaagaaggagtagctgtaggtgacgccgtcctgctcgttgtcaaaggcccggccctcacaggctgccacctgctgctgctgctgctgtgtggcgtctagcataggtgggcactcctcggtctgcatcaggctgttcacctgccggtggtctgaggagcgcagactgatgaagagggtgcacaggaggaagatgatgaggcccacaatgctcggggcatcccaccactgggtctcatagccctcggggcctgccacaactgtctcgttgcccagctgggttggcaaatgggggttgcatttctgttcagggatactggatagggctgaccaggtgacaaacatggtgtagagggtgatgaccgaggcctgcagcagacccgagttgggctgggcgtcctggaccttgggcaggacagcagcgatggacacgcagacacagaaggtgaggttgaggctgatgaagaccttgccctcgtggcagccgctgggctcagtgtagtacatgaacatcagcgccacggccgcgatcgacagcaagtagaagaggagagtgaagaagaagaggcctgcgtaccaggcacgggaatcgcactcctcggccttgcccagccaccgctggttccaggagtgcgcaaagtcgatgagcagcaccagctggatgaggatgaagaggaaggagcccacgacgccgaagtagaaccagatgttggtgaaggagccgtcaggaatgtagaaggcacccacggtgaggcccaccaggatcaggaacttaaagaaccaaaacccattctggatggcagcccgggggtcccggctgctgctcacgcagagcatgagcagggtgaaaaagaagaagaaggccgccgtggcgaagcacatgcggtagacagcgcggtagccaagcagggagccacagtcgatgtggccctgcaggacggtggggatcccggccccctcctcacacacccagggcagcttgtagagctgactctccacgcccgggctcagcataatgatggacaccagcacccccaggaagaggaagaacgtgaagatgaggcggctcacggtggagttgcggctggcggggcagcagctgcacaggatgcagggggcagagccgcagaggcaggacgcgcagctgagcagggagcaggctcccaggcaggcccccatggcggcggctcccggcttcggatcccgg

SEQ ID NO: 318653 - DNA, 942 bp, Homo Sapiens
cccaagcttggggtttggccaaaattgggggttgccaattttctgtttcaggggataccgggataggggctgaaccagggggccaaaccatggttgtagaggggtgatgaccggagggcttgcaggcagacccggagttgggtctgggcgtccctggaccttgggcaggccagcagcgatggacacgcagacacagaaaggtgaggttgaggctgatgaagaccttgccctcgtggcagccgctgggctcagtgtagtacatgaacatcagcgccacggccgcgatcgacagcaagtagaagaggagagtgaagaagaagaggcctgcgtaccaggcacgggaatcgcactcctcggccttgcccagccaccgctggttccaggagtgcgcaaagtcgatgagcagcaccagctggatgaggatgaagaggaaggagcccacgacgccgaagtagaaccagatgttggtgaaggagccgtcagggatgtagaaggcacccacggtgaggcccaccaggatcaggaacttaaagaaccaaaacccattctggatggcagcccgggggtcccggctgctgctcacgcagagcatgagcagggtgaaaaagaagaagaaggccgccgtggcgaagcacatgcggtagacagcgcggtagccaagcagggagccacagtcgatgtggccctgcaggacggtggggatcccggccccctcctcacacacccagggcagcttgtagagctgactctccacgcccgggctcagcataatgatggacaccagcacccccaggaagaggaagaacgtgaagatgaggcggctcacggtggagttgcggctggcggggcagcagctgcacaggatgcagggggcagagccgcagaggcaggacgcgcagctgagcagggagcaggctcccaggcaggcccccatggcggcgg

SEQ ID NO: 318654 - DNA, 1553 bp, Homo Sapiens
  misc_feature (179)..(217): n is a, c, g, or t
  misc_feature (230)..(283): n is a, c, g, or t
gccccgctctcatttatgggcgggtttaaaatttccggggtttttccaaaccgatttcattaaatgccaggtttaccctggctttttcggaaatttatttcggcctccttttgggggaggcccggcagattttaccctttgttcaagaaaggtgggtcaggaaacagctatggccatgnnnnnnnnnnnnnnnnnnnnnnnnnnnnnnnnnnnnnnngcctcgagttttnnnnnnnnnnnnnnnnnnnnnnnnnnnnnnnnnnnnnnnnnnnnnnnnnnnnnnggtacacgcactggcttgtttattagaaaaagtcttagagactcagtaaggcacgaagtccaggaagtgggcagggtcccctgggggacgtgaccaggaacaccagggcttcagtgccggatgccccactgtggtgggagttccccgctctctccagcagccccgctcccgtggagcctgaggacaagggagccctttcatccgagatgctgagtatgggcaacagggaggaggggaaggaagaggcagctccaccgtgtgggtgtggcggggggatggggctctgcaggagcctgatgctcctcggaccctgaaggcactacgactagaaggcccggctcaggggcaggtcctggagctggggcaggggtgggggctcagcctggctgattggtgtggggagggggcaggttggctgtcaccgagccgagaggcaccaggtggcaggaggcaccagatggcaggctgtgaggctgcctcagctgaagtcgcggttgcgcaggaggagtggggctaccagggtccacaggtagaggagcagccctgcccagctggcacagatcttcacccacacggcggtccacgtgctgatcatcttccgggtctcaccgggcttgtaccagttggtgagcgtcatcatgacgtgcagtgaggccagcaccaggcagaagtggaagaaggagtagctgtaggtgacgccgtcctgctcgttgtcaaaggcccggccctcacaggctgccacctgctgctgctgctgctgtgtggcgtctagcataggtgggcactcctcggtctgcatcaggctgttcacctgccggtggtctgaggagcgcagactgatgaagagggtgcacaggaggaagatgatgaggcccacaatgctcggggcatcccaccactgggtctcatagccctcggggcctgccacaactgtctcgttgcccagctgggttggcaaatgggggttgcatttctgttcagggatactggatagggctgaccaggtgacaaacatggtgtagagggtgatgaccgaggcctgcagcagacccgagttgggctgggcgtcctggaccttgggcaggacagcagcgatggacacgcagacacagaaggtgaggttgaggctgatgaagaccttgccctcgtggcagccgctgggctcagtgtagtacatgaacatcagcgccacggccgcgatcgacagcaagtagaagaggagagtgaagaagaagaggcctgcgtaccaggcacgggaatcgcactcctc

SEQ ID NO: 318655 - DNA, 2026 bp, Homo Sapiens
  misc_feature (1384)..(1384): n is a, c, g, or t
  misc_feature (1474)..(1474): n is a, c, g, or t
gtggaaccggtcccaagcagccagccataagggagcgggcaacttgttggccaaccccccacatcgtctcacgtcccaatgacctccaagcccaaggtgtgattgcagggcctgccgtgttcaggagcacacagcagcgtcccacaaagcacaggacatgcgccacgctgagctggtgccaccctggcagagcagatggctggctgtggccgtgtggtggtgccaggcgagccagcagttccctcagtcctgcttgtcccctctctgcctccaggggtagatgagctccccaaggaacagcttgcggcacagggcgccccaggagtgctttggggtggcagccacagctggggaggcggtaggtgtgcaccacgcggctgtagggcagtgggtttatctgcatcaggagggggaggggcttgctggcttggtgccggaggacacggaacttccacgccagcccgccagcctgtagggccggcagagccgaagacccagtgagtacagcggcagggagttgatgaggtccacgagcagatggatcaggccctgcacggcgaccaccaggagccggagcagggtgaacaccaggtagtacagggctgtggtaggcaggaggaagagcaggatggtgaagagcagagtcccgatgaacagctggtccaggtcataggaacaggagtccacgcgctggcgcagaacgttccacttcttcccccggaacagacgccacagtgaggacaggccatggatcttcaggcagtacagcctggctccatagacgtaaaagcagtagatgtggaaggtgaggagggcgataatgtccgagaggagggacagggccaccgtcaggcccaggcaggccgagaggcccacgtgccaaaggatgtgctccacgaagggggacatgaggtggatgtagctgatccacaggtggatgtggtagaggaagaagcggcccagcacctggtccagtgcacggttcatcttgagcccggcgggagcacccatcagccactgcagcagatgctggagctcctcggccacgtggtcagccacaggaacgagggcgtcggccagatgcccgatgcggcttctcccgtggagccaggacagcagcatgaggcccagggccacgtccagcagcacagaggccaccgtgttggccttcctcatcagctgggcagggttctccgccttccgtgtactgaagattagcgtgaggtgctccagccggtgccggagctgttcgcacgtggagagtttgctcccgaggaaggacaggggccagagcttgaacactcggcaggcactgacagctgagaccagcgacagcaggctggccaacagcagacaaatgggtcccgaggctcgcctggcccantccgcgaggatgctggcctccacgccctccgactgccagtggctcagccgcacggggccctcatcaaagcggtcactgcggaagagcacnctactgcgtgctaccgtgtcgaagacggcagccaggccccccgtgctggcagtggtggctccagcctggcggtcgggcaggacggtgggcaggtgtagctgtgacagcaacacctggcgctggtcatagaagatgagcatgacctggtcctcaccaggggcaccgggggcagtgggcgcttgccggtgggtggcctcgcagctccagaacgtgccgcctctctcccggcacagccgcagccagggctcatgggggaagacagcacccaggctctccaggaagcggcccaggctctcctcgggctcctgccggcagtggcaccaggtgcccagcacggccacgcccacctggctggcctgccgcacctgggccaggagctgcttgacctggatggggatgaagggaaagtgcaggaccgccaggaccacggcgctgctctgctccggcacccaccgtcccaccagcagcccgctgtccgccgagacgcagcacgtggggaagaaggccttgagcaccatgccgggaggctctgccaggcccagagaagctact

SEQ ID NO: 318656 - DNA, 861 bp, Homo Sapiens
  misc_feature (85)..(85): n is a, c, g, or t
  misc_feature (148)..(148): n is a, c, g, or t
  misc_feature (205)..(205): n is a, c, g, or t
gcaaaggggaaaggatttccggtgcctgaaaaacccaactgtgtgtgtggtccttcttcagtgacgtcagccaaacagaccacanaccacaagacgacaggcagacttgtgacagatgatcccactgagcgtcctcccccagggaagnaggcagaggatcacacagcttcggcccaggagacccaaggagaggctgagaacaggnacgggcctggcgtccccctagatggtgagtgatgctgtggtcctctctgtggggccaggacatccatggaggggcagtcccttacagagctcgggggaccctggggtggtcaccctgtgcccagctggggggctcctgtggtggccactgtctccacctctgttctgtgtcccgctggcctccctccactggcctgctagccagacctgactctcagctccgctggtccatccagctccataagcaggactcacctggggacacgggacaatggctgccctcgctggccttacagggtgaaggggctgctgagaactcttgtcttcactttctttggtttcttccaaaaacatatttagtatatgagtcaattgtgtaacctaagaaacagcttttttaatgaagctgttggctgggtcacaagatttttggaggcattaaagaaaccagacccggacgttgggggagcgcacttggtcgggtctcaccccagatgcaaacgtcccttctcttgaccaatgtaattgacggggagtgcactgcctacaagggcagactgttctctcagtgcattcttagatgtcctctaacttcagcagaaattcagttctgtgttaatcccttctctccatgccctcatgaagttgcagaaagca

SEQ ID NO: 318657 - DNA, 983 bp, Homo Sapiens
  misc_feature (3)..(3): n is a, c, g, or t
  misc_feature (24)..(24): n is a, c, g, or t
  misc_feature (31)..(31): n is a, c, g, or t
  misc_feature (36)..(36): n is a, c, g, or t
  misc_feature (39)..(39): n is a, c, g, or t
  misc_feature (45)..(45): n is a, c, g, or t
  misc_feature (48)..(48): n is a, c, g, or t
  misc_feature (53)..(53): n is a, c, g, or t
  misc_feature (69)..(70): n is a, c, g, or t
  misc_feature (77)..(77): n is a, c, g, or t
  misc_feature (81)..(81): n is a, c, g, or t
  misc_feature (102)..(102): n is a, c, g, or t
  misc_feature (106)..(106): n is a, c, g, or t
  misc_feature (122)..(123): n is a, c, g, or t
  misc_feature (125)..(125): n is a, c, g, or t
  misc_feature (127)..(127): n is a, c, g, or t
  misc_feature (142)..(142): n is a, c, g, or t
  misc_feature (148)..(148): n is a, c, g, or t
  misc_feature (150)..(150): n is a, c, g, or t
  misc_feature (157)..(157): n is a, c, g, or t
  misc_feature (163)..(163): n is a, c, g, or t
  misc_feature (178)..(178): n is a, c, g, or t
  misc_feature (180)..(180): n is a, c, g, or t
  misc_feature (183)..(183): n is a, c, g, or t
  misc_feature (200)..(200): n is a, c, g, or t
  misc_feature (228)..(228): n is a, c, g, or t
  misc_feature (242)..(242): n is a, c, g, or t
  misc_feature (262)..(262): n is a, c, g, or t
  misc_feature (276)..(276): n is a, c, g, or t
  misc_feature (279)..(400): n is a, c, g, or t
  misc_feature (462)..(571): n is a, c, g, or t
ttntcctttttgtcaggctgtctngaatccnacctnagnatccanccncctcnccacccaagtgctggnntacaggngganccaccagccaagcccgcaaantcanataaaaatctaaagcnngntntttgaagtgtaacanttcatnangaaccancccccnccccatccaaggaantnttntcttccgtgaaactggnccctgatgccaaaaaaggttggcggccnctgctcaagaggtnaaaaaacagagaactaggcngggcatggtggctnatnnnnnnnnnnnnnnnnnnnnnnnnnnnnnnnnnnnnnnnnnnnnnnnnnnnnnnnnnnnnnnnnnnnnnnnnnnnnnnnnnnnnnnnnnnnnnnnnnnnnnnnnnnnnnnnnnnnnnnnnnncatggtggcacatgcctatcagctacttgggaggctgagacaagagaaccgcccgaacccannnnnnnnnnnnnnnnnnnnnnnnnnnnnnnnnnnnnnnnnnnnnnnnnnnnnnnnnnnnnnnnnnnnnnnnnnnnnnnnnnnnnnnnnnnnnnnnnnnnnnnnnnnnnngagaacagttagagtaaacccagccaatgataaagcccatatacaatatcattcattaacagctcatattgaccaagtacctaccatgtgctggtgctgttttaggggacaggtaaatattagggaatagacagacaaaaattcctgccctggaggcctgacattcctgtggtttccatgtcaggttcccatatgttttacaagtaagattctgggggccaaaattcctatcttactcatatttttgtcactagcaattagcatctactcagagcatgaataagtgtacatctgcaagaaaggcaactcaaccatcagtcttgctgacatcaaagggaaggatgcgggggccagggagggacgtgcagggccaggctcttttgtcaactgccagggacaagtagagcaaggt

SEQ ID NO: 318658 - DNA, 1484 bp, Homo Sapiens
  misc_feature (81)..(81): n is a, c, g, or t
  misc_feature (97)..(97): n is a, c, g, or t
  misc_feature (170)..(170): n is a, c, g, or t
  misc_feature (208)..(208): n is a, c, g, or t
  misc_feature (237)..(237): n is a, c, g, or t
  misc_feature (251)..(251): n is a, c, g, or t
  misc_feature (318)..(318): n is a, c, g, or t
  misc_feature (321)..(321): n is a, c, g, or t
  misc_feature (375)..(375): n is a, c, g, or t
  misc_feature (479)..(479): n is a, c, g, or t
  misc_feature (501)..(501): n is a, c, g, or t
  misc_feature (540)..(540): n is a, c, g, or t
  misc_feature (546)..(546): n is a, c, g, or t
  misc_feature (556)..(556): n is a, c, g, or t
tttctttctaaaaaaatgacaaagcaggtttcttaaataatttacaaagggcagaaattgctcttgaacagggctaccccncctggcacaaccacantgactctgcctagcatataaataggtacccgtgagcccagggtcgtaagacctggaaatatctcctatgcctncctccgagtccctggtagggaaaggagggatgagagtngggccctcaagagccttggcaccagaaanacagtgggtgagtnactctgcggatgactccccaaaaaccaggcacccgggtacagagctaagagctctcaaatatctgangcnagcacttcatgttatagatgaggcaaatagaaggctcaaggtcaagtgtacgangagtttctaagcccaagagtcccctaggaaagcagaaggaacaattctccccctctgcaagggctccccaagacactctcaggctatggcaggcagtcactgangggtccagatgtggctggagcngggggctctgggccccttgttaagtgctttttaacaatngcccangggtactgangactcccggggggttttttccaggaagctcacggggaagcatagacatccttgagtatgaagccttggcggtcagacagggcttgtttcctgcaggcacttcctcagtcatgaatgagagagacgatgtcaccactctcttccgccataatggcttcatctagctcttgggacagcttctggagatgctgaattcccgcccccacaggctctaggtcactgtcagactcgctgggagagcagaggggctctgttgaggagtagggctccggaaggcagcctcccgccttgatcgccgtaatgggtgggcatgtgagcccatccggacagagaggcggtgatgctccttctcccaggggtctgcggctgagtgggcaggggcggctccagacagccgggtgctcttctggctcaggctgtgagttggggatccactgcccttctgtgctcctctcttccgcctcctggccttcacctgggtctccaccagccacttggtgccactttggcaggactcctggattctctgggacacggcacccaaagcactcttagctgagcgagctgcagcctggaggccctgctgacctggctctggggtttccaggcgtttccaggagggccctgcgcggaggttgaggttgacggctctcaggggcagcctcctttggaactgtctgcacagggaccccagggcccctacagaggtctcctgatggctgaccacaggctgcagctccttgctgtcctccagctgctcctggtgctggagagatctccggcgcacggaggtccccatgttctgccaccgagaagccatctgcctggccaagagtcttctctgtccactagaccccgacaccactaaggccgagcacagccgccagcacagctgctcctcgcccaccgcagccgatttgaactctgcg

SEQ ID NO: 318659 - DNA, 1556 bp, Homo Sapiens
  misc_feature (1538)..(1543): n is a, c, g, or t
  misc_feature (1546)..(1546): n is a, c, g, or t
  misc_feature (1550)..(1550): n is a, c, g, or t
ggatcagctgtgctgcggctgtgctcggccttagtggtgtcggggtctagtggacagagaagactcttggccaggcagatggcttctcggtggcagaacatggggacctccgtgcgccggagatctctccagcaccaggagcagctggaggacagcaaggagctgcagcctgtggtcagccatcaggagacctctgtaggggccctggggtccctgtgcagacagttccaaaggaggctgcccctgagagccgtcaacctcaacctccgcgcagggccctcctggaaacgcctggaaaccccagagccaggtcagcagggcctccaggctgcagctcgctcagctaagagtgctttgggtgccgtgtcccaggggataaacttcaggagctgccgagaaggtccagttagaggggatttgctgtcaaatgagagctgctgtcaggaagacgtccttatattggatagaatccaggagccctgccaaagtggcaccaagtggctggtggagacccaggtgaaggccaggaggcggaagagaggagcacagaagggcagtggatccccaactcacagcctgagccagaagagcacccggctgtctggggccgcccctgcccactcagccgcagacccctgggagaaggagcatcaccgcctctctgtccggatgggctcacatgcccacccattacggcgatcaaggcgggaggctgccttccggagcccctactcctcaacagagcccctctgctctcccagcgagtctgacagtgacctagagcctgtgggggcgggaattcagcatctccagaagctgtcccaagagctagatgaagccattatggcggaagagaggaaacaagccctgtctgaccgccaaggcttcatactcaaggatgtctatgcttccccgtgagcttcctggaaaaaacccccgggagtcgtcagtacccctgggccactgctaacaaggacctgactagcaaggggcccagagcccccctgctccagccacatctggacccatcagtgactgcctgccatagcctgagagtgtcttggggagatcttgcagaggtggggagaattgttccttctgctttcctaggggactcttgagcttagaaactcatcgtacacttgaccttgagccttctatttgcctcatctataacatgaagtgctagcatcagatatttgagagctcttagctgtgtacccgggtgcctggtttttggggagtcatccgcagagtcactcacccactgtgtttctggtgccaaggctcttgagggccccactctcatccctcctttccctaccagggactcggaggaaggcataggagatatttccaggcttacgaccctgggctcacgggtacctatttatatgctcaggcagagcactgtggatgtgccaggaggggtagccctgttcaagagcaatttctgccctttgtaaattatttaagaaacctgctttgtcattttattagaaagaaaccagcgtgtgactttcctagataacacgctnnnnnntantgangactat

SEQ ID NO: 318660 - DNA, 1483 bp, Homo Sapiens
  misc_feature (58)..(58): n is a, c, g, or t
gtccccaaaccaagggatccaaacagggggccaggtttccctgtcccctttccctttntagggggcataagtggtggggagaacactcatatgatggggcaggactgcaaaggcgcccccctcccggctacccttgcgggggcacaggtttgccttttcccgtagtatcccgggaagatggccctgacctccatgttcttggccagggtcagcatccagcgcccattgccccaggaatagagcttgccccggcttagcttgcccacctcttcgcttggggtgcccccccttctcctgccgcagaatctttaagaggtcaaggcccgtctgcacggcctttacgtcagctgcacagccgagggtgatgtgggcgcggctcccccgcggcaggttgtcagtgggtgacagcttgtccacatcactcggccacaactgcagttgctgctcgcttaactccacccgggccccagtcgtcttgggtgtcacaaagagggcagagatggtcagcgtgaaggccttggagtaagatttctttaacacatcttgttgagcgtactcctctgccccgggagccttcccgtagtcacaaaacttggttgtgcaatgcagcacgcctgggggtctctttccaaagtaggtgaccaagtccatcttctccctgggctcatccccagggacgaattgtcgcagctccttcttgaaggccttgtggttccccagctcttccaggaagacctggccggctttgcggagggtctcagagctcttcttggtcaggaaccagccgaagtagagcggcaggaagtccttctccagcccaggcttcagcttcttcaggtcatcagccgacagctgccactggttcttctccttgagctgggcacagtccagccgccacgccgtcttgggctccaccagcaccacctggtactggtactggtcggccatttcaaagagctgctccagccgttcccgttcgtggttggtgtcatcaagcacaagaattctgatgtcccggcggcggcagtaggcagccaggtcctcatcgagccgcttgtactcctcggagaaggctcctcgagcgccgggggtgatcttgtaagcgtcagccgacaccatcttggtgccatcacggtacttgtccacgatgacccgtgccagcgtggacttgccgcttcctggcaggccgcgcaagatgaagagcgtcttgcactctagcagcgtggccactgtgtcctcatcctgaaggaagggaaactgcagctcaggcttgtccttggcccctgaggatgacatcttgcggaagaagatcttgggcaggaatgtgtggctttttcgggagaagcctctgttcatgatgaggaggggcgccaccgtcgccgcctctgccggcaccagcgctccggggccgcccgcctgcgcggagggacacgggagtccagcggtggcacaacccgagcccggccgctttacatagcccggg

SEQ ID NO: 318661 - DNA, 1660 bp, Homo Sapiens
  misc_feature (1210)..(1262): n is a, c, g, or t
  misc_feature (1265)..(1280): n is a, c, g, or t
  misc_feature (1306)..(1306): n is a, c, g, or t
  misc_feature (1310)..(1322): n is a, c, g, or t
  misc_feature (1398)..(1398): n is a, c, g, or t
  misc_feature (1498)..(1516): n is a, c, g, or t
  misc_feature (1556)..(1565): n is a, c, g, or t
  misc_feature (1601)..(1610): n is a, c, g, or t
taagcaggctggtacggtccggaatgctttgggatatcgtcgacccacgcgttcgaggcttctcccgaaaaagccacacattcctgcccaagatcttcttccgcaagatgtcatcctcaggggccaaggacaagcctgagctgcagtttcccttccttcaggatgaggacacagtggccacgctgctagagtgcaagacgctcttcatcttgcgcggcctgccaggaagcggcaagtccacgcatggcacgggctcatcgatggacaacgtaccgatgagtggcaccaagcatggtgtcggctgacgcttacaagatcacccccggcgctcgaggagccttctccgaggagtacaagcggctcgatgaggacctggctgcctactgccgccgccgggacatcagaattcttgtgcttgatgacaccaaccacgaacgggaacggctggagcagctctttgaaatggccgaccagtaccagtaccaggtggtgctggtggagcccaagacggcgtggcggctggactgtgcccagctcaaggagaagaaccagtggcagcatgtcggctgatgacctgcaagaagctgaagcctgggctggagaaggacttcctgccgctctacttcggctggttccctgaccaagaagcagctctgagaccctccgcaaagccggccaggtcttcctggaagagctggggaaccacaagggcttcacgaaggagctgcgacaattcgtccctggggatgagcccacggagaagatgggcttggtcacctacctttggaaagagacccccaagcgtgctgcattggacaaccaagttttgcgactaccggagagctcccggggttaaagagtacgcctccacaacaggtgtcaaagaaatcgttactccaagggcttcacgctgaccatctctgcccctctttgtgaccccccaaaacgactgggggccccgggtgggagctaaagccaagccacccaacttgccagattgcggggcccaaattgaatgtgggcaacaagacctggcccaccccccactgggaaccaacctctggtcctctggggtgggggagaaaaccgcgcggccccaatacacttccgccccctatttccgggggtttttgttttgtcccgcacccctgggcccacgcgctagagaaaaagggggggactgtgataggggcccacaggaaacaatgcnnnnnnnnnnnnnnnnnnnnnnnnnnnnnnnnnnnnnnnnnnnnnnnnnnnnnccnnnnnnnnnnnnnnnngaaacaacatgcccctccctttcttngccnnnnnnnnnnnnntttcctaaaagggggcggcgggaaggaggaagaacaacaggagggcgggtaaagggggcgggcccccgaaattgcnaccccccttaaacgagaggggccatcggcacaaaaaaggaaaaaacgaggggtaaggagggggggaattcgcagaaaaataacacccccacaaaaacaannnnnnnnnnnnnnnnnnnaggaaacacaaaaggaacgctcttcccataaaaataatannnnnnnnnntattgggaggggacctcacaaacaggggtgggcagnnnnnnnnnngtgggagagaaggggggctttgttgaaacacccccctttggggcgccgcc

SEQ ID NO: 318662 - DNA, 1685 bp, Homo Sapiens
  misc_feature (814)..(814): n is a, c, g, or t
ccatgggagaggaatcgagtagggatgcagagcctggtggcactgtcctgagagaggaggaggctgggcagggccccggcgctggagaggtgccctgcatatgggacctctcagaggtgcacaagagctgtgtgcccaggtacccctgtctcctctcctcctccagcccccagcctactctcctaatggtctgtgtctttcagggatgagatttactgccagatctgcaagcagctctcggagaacttcaaaacaagcagcctggcccggggctggatcctgctcagcctctgcctcggctgcttcccaccctcagagaggttcatgaagtatctactgaacttcatcggccaagggccggcgacctacggccccttctgtgccgagcgcctgagacgcacctatgccaatggggtgcgtgcggagccccccacctggctggagctgcaggctgtcaagtccaagaagcacatccccatccaagtcatcttggccactggagagagcctaaccgtccccgtggactcagcctccacatctcgggaaatgtgcatgcacatcgctcacaagcagggcctcagcgaccacctgggcttctccctccaggtcgccgtgtacgacaagttctggtccctgggcagcgggcgcgaccacatgatggatgccatcgcccggtgtgagcagatggcccaggagaggggcgagagcaagcgccagtcaccctggcgcatctacttccgggaaggaattcttcaccccctggcacgactccccgggaggaccctgtcagcaccgagcttatttaccgccaagncctccgaggagtctggtctggcgagtacagcttcgagaaggaggaagagctggttgagctgctggcccggcactgctacgtgcagctcggcgcctcagcagagagcaaggctgtccaggagctgctgcccagctgcatcccccacaagctgtacaggaccaagcccccagacaggtgggcgagcctcgtcactgccgcctgcgccaaggccccatacactcagaagcaagtcacaccactggccgtgcgagagcaggtggtggacgccgcccgcctgcagtggccgctgctcttctcccggctcttcgaagtcatcacactctcaggcccccgcctgcccaagacgcagctgatcttggctgataactggaaggggctttgcttcctggaccagcaggagaagatgctgctggaactctctttcccagaggtcatgggtctggccaccaacagggaggcccagggcgggcagaggctgctgctctccacgatgcatgaggagtacgagtttgtgtcacccagcagtgtggccatcgctgagctggtggccctgttcctgggggcctgaaggagaggtccattttcgccatggccctgcaggacaggaaggccacagatgacaccaccctcctggccttcaagaagggggacctgttggtcctcacaagaagcaggggctggtggcctttgagaactggaccctcggccagaacgacaggacaggcaggacggggcttgttgcccatgggcctgtcttttacacatccccaaaggcaattaatcctcttgcacaatttgctgaccttgcttggccatgtccccacaaaaaagggaagcctggcgggcttaagggggggccaggttcaaagag

SEQ ID NO: 318663 - DNA, 1070 bp, Homo Sapiens
  misc_feature (226)..(226): n is a, c, g, or t
  misc_feature (237)..(237): n is a, c, g, or t
  misc_feature (1010)..(1028): n is a, c, g, or t
accgcgcaccctcaccctggaatggccaggtggtttcccccagccgcgtggaagttctgcttggatgccctgacccttggcgtgtgtggggtttaaccccccaggggaggggagctcccagggttcactagggactgtagcccaccgggcttcgggctggggctaccctgattaggcccatgggcgacggtttaggttggtaactgggcgggggagtgggtatttntggtagcttgnctggccttggcgcccccctggtggtagctctggggggcgggggctgggctggtaggacccttttggggaggggggcagcataggggagagaactggtctggtgttgtacatggccggcgtccctggcgtctgcgggttgtattgtgggttgacctgtggggacgaggggtctggggtagccaggtgtttggggattgggggttcccccataggcctgcggggacggggtgggctcatcatcgaaagcatactcatattcttcctcagcccgtgacggcgtgttggggttgttggggtcccaggccccactctgggcaggagtgcggctgccatcatgcaggggcgtctgtgagccgtagtgtggggtgcggctaccatcctggaggggtgtctgtgagccgtacatgggtgttcgggagccagagccatacatgggcgtctgggagccatacatgggcgtcctcccataggtcgaggtcatgccgcccgggcgccgtgagcccaccgtggtgagccgctgacggtccacagagatggtctggcaggtggagtgcagctccacacgggccgtggactctgtggcatctttcaccacaccgatgtagcctttgtagggcccctgggagatgcgcacggtctggccgatgagttcgttgtccctccggccccggcccctgctcatgccaccactgccgccacctgggctaccaaagccgccacgctgacctccagcactggggtgcatcctcgtgccgaattcgccacaccaggcnnnnnnnnnnnnnnnnnnnaccccgcccccgcgccgcccacaagggacactcctattcgtt

SEQ ID NO: 318664 - DNA, 2203 bp, Homo Sapiens
ttttagaccaaacagcttctttttattgaaagacggtacaacaaaagcaagctgtggggaggaggtacaggaaggtggggaccctcccccagactctactcagattccaatgagcaccagggagggaaaagatggaaaactaaaaggaaaaacaaaaggaaatccagaacaatccgcctagccctgcaggaggatcttgtgtcacagccaagggccagggaaggaaggaggatcactcttcatccgacgaagtccaccggccctgcctgcttcaggcttccagggagcttccccaggaagcggaggttgaggatcttgagctgctcatcaaggtccatacggacaatgccatcctcaccatcaatgctcagtaggacgcccgtggcttcccgatcctcgcccaggatcactttcaccttgttgttcttggtgggggtgataggctccaggtgctcactggaaatgctgacaaccttctcactgtccttcaggtacacagagcacatgccccccgtgacactgcggatgacacctgtctgtcccaccacctgtgtatccaggtaggtgtcccgcaccttcacctgaatgtcagtggttacccagtcgctggagttctgctcgatgcctgagcctggcgtgtgtgggttgtagccaccaggggagggagctccaggtgtcataggactgtagccaacggggctcgggctggggctagcctgataggccatgggcgacggtgtagggtggtagctggctggggagtgggtattctgggtagcctgctggggcttggcgcccacctggtggtagctctgggggctggggctgggctggtaggaaccttgtggggagggggcagcatagggagagaactggtctgtgttgtacatggccggcgtccctggcgtctgcgggttgtattgtgggttgacctgtggggacgaggggtctgggtagccaggtgtttggggattgggggttcccccataggcctgcggggacggggtgggctcatcatcgaaagcatactcatattcttcctcagcccgtgacggcgtgttggggttgttggggtcccaggccccactctgggcaggagtgcggctgccatcatgcaggggcgtctgtgagccgtagtgtggggtgcggctaccatcctggaggggtgtctgtgagccgtacatgggtgttcgggagccagagccatacatgggcgtctgggagccatacatgggcgtcctcccataggtcgaggtcatgccgcccgggcgccgtgagcccaccgtggtgagccgctgacggtccacagagatggtctggcaggtggagtgcagctccacacgggccgtggactctgtggcatctttcaccacaccgatgtagcctttgtagggcccctgggagatgcgcacggtctggccgatgagttcgttgtccctccggccccggcccctgctcatgccaccactgccgccacctgggctaccaaagccgccacgctgacctccagcactggggtgcatggggctgctgatccggggactcataggcgcaaaagccacccacggtgaaagttggtcacatcacggtgcttttgagcccccagccagcaccaggtggcggtctcgcagacatacacgcccccgttctcctaccagtttctttgcaatgtaggaaggcgtaagccttcggaagagatggctgaatctccccattgctcggccctggagtggggggccattcacattgaccctttaaacgaatcgtcttttcacatggatcgcctgttctgctctgagtcacaaggccacacgcaaacgcggttgtccttcttccgggtcacagccgtgactgtctgacagtcaccaccttgcgcagtacatagattcatgcacctcggaacggtctccccgttcctagtcgcaccgccgacaacccacagtctggggatccagactgcaccagcgtcgcgccgcattcatcctggcccccaacatccaacacctgatgctgtctctgagcagagctgcaggtcccgggggagcaccttcagctcatgcatggtgaggttcagagaacaggataacgaaagtctcctccatccgcacaatgaaggtattcggacgcgtgggttcgacgatatcccgggaattccggaccgtacagcctgctttttaactgcacagggttgttctattattca

SEQ ID NO: 318665 - DNA, 2810 bp, Homo Sapiens
  misc_feature (355)..(477): n is a, c, g, or t
  misc_feature (2285)..(2285): n is a, c, g, or t
  misc_feature (2510)..(2532): n is a, c, g, or t
  misc_feature (2540)..(2540): n is a, c, g, or t
aagtcttgttggtgaagttcccgggtttacaaacccccgcgttgggagaggctttaacaagtccggccagaaaaccccttaaaagattttttacaaatacctccggttaatcccccgggggtggtttttatttggggaaaaaacacccccttgtggcttcccggggggtttttttccaggaaaaacacttaagaacttcccttttggatttttttggagacccctcgcgctccacaccgggggttttaataatttttagaaagcaagcgcggacggcaaaaccaagattttcctaggaaacaattttaggccaagttccccttcctttttgggcccgcgggccaaaatgaaaggnnnnnnnnnnnnnnnnnnnnnnnnnnnnnnnnnnnnnnnnnnnnnnnnnnnnnnnnnnnnnnnnnnnnnnnnnnnnnnnnnnnnnnnnnnnnnnnnnnnnnnnnnnnnnnnnnnnnnnnnnnnaaacagaaagtagttttattttttctaaataggattttgatcacaaaaatgctggtgattcaaacctttaaaacagaagagcatacaacctaagaaaaatgcaaaacaggctacaaacctgtacatcatgttactgcactgaatactgtaggcaactgtaacataatggtatttgtatctaaacacagaaaagggtatagtaaaaatacagtattataatcttatgagactgccaacatatacgtggtctgtcattgaccaaaaacatcattatgtagtgcatgactattaaaattgtgcaaaacaaaccccctgtatccatagtgtttaaaccataaaaccaatacctggtatatacatgacaaaacaaagcatgtaaaataatatgcagcctaaagaattcaaagacaacaaaggtgacaaagtcaggtaaaagaaaggcaattagggacataagatattttttaaagcaggaagctgatgatgtccactgtaagcctggaagaaaccaggagtctgaacacggagcagttactgataggaaggataaagtgctacatctctaacagcaagcaaattaactctgctgaaattgccagaatgaaggccaaggtggttttcagtaaagagtgttctccttgacagcatagccagcatgtggttgagccgggacctgataccagcgaagtggaattgccgctctttgttcaagtttctaagtgagtcactcaagtacagttccaggtggggggtgcccaggtacttgggatagccaggattgtggaagtcagtggttctgatggaagcgggagaaccagtggagcttgccacagagccttgggaagacacagaggaggaagacttcaaactggaagatctcgatacagacatttttgagactggtgacccttctgtagattgagttcctcgaggaaagagaatgttctcatccatgtcagtctgagtagtggtcgatctggaccaaatcgtggtttgagagcttgctatcctggtgatgactgcagtctgggtaccagcacatgctgtggtgatgctggtttgtgttcccacctcactcacactcagccctggcatctcctctcctggctctgtttgagtggcagcgtcaatggcctttctgctctggagctcgtccctgtggctgctgaagtagtcttcctcactaacagtagaggactcacagtcatggggcttgcgctctgccttgccctctgcgggcatctctgggtccaggtccgccttcctgggagtacttgacagcctagccagccgcatccgcagcaggttgcccagggtgagctccttggactgtggttttcggttggtgaggtgatcaaacttgttgctgctctggaagtgagaccaggagtttggggctgatgggcttggactgggcatacaggattcggaactccagatcaaagtgttcaaccacttggccagacagaattaccaagttactgctgtttaatttgccatccgtccatgtaaaactgtaggagcctgttgccacgcggatgccatcaatcaacgtgaacttttcgtgaaccttcccaataatcttagttcctgaccttgcatagtagatatttcctgtgatagtccgaactgtcattaacttttcctgttcaggatgaactttcagatccatgcacatatccagaaattgagagaggagagcctggtccagaaggatatacacagcaactccctgtttcctgcatatttcttgcaggtctctgaagatgtcgatgtctgtgaacacgtccatgaccactgcaatcacntctcgcgccgagcggagtgctggcgcagagcgtccttgcagccgtaggggccaccttcgccagcgccgcggggctggaagtgcgtctcgacacgcgtggcgccgcggtaggcgccctggtagaaggcgggccagccaagctccaacagcggtggctccaggtccgactgctcggggaagtaggtgcccgaagagcagtcgtgcgaggagccgaacgagtcctcgnnnnnnnnnnnnnnnnnnnnnnnctcctctnccggcctctccgccgcgcgcagaatggcgtgcacctcatcggggttcaggaaacgagccaggcgctcgcgtcgcaggaaggccgcgaaggcttcggggccgcccgccaccagctcctccagagccaggcgccgtgactcgctgaacagctcggtcgggttgggcggcccgcacggcgacaggcaggcggcgggcacctcgtccaggccctcggacagcagagccatggcggcgctcggatcccgggaattccggaccggtaccagcctgc

SEQ ID NO: 318666 - DNA, 1527 bp, Homo Sapiens
  misc_feature (403)..(403): n is a, c, g, or t
  misc_feature (1403)..(1403): n is a, c, g, or t
cccggcccgggccgcctctgcacgtccgccccggagcccgcacccgcgccccacgcgccgccgaggactcggcccggctcgtggagcccttcgcccgcggcaaaaccagaactgatggctctatttgcagtctttcagacaacattcttcttaacattgctgtccttgaggacttaccagagtgaagtcttggctgaacgtttaccattgactcctgtatcacttaaagtttccaccaattctacgcgtcagagtttgcacttacaatggactgtccacaaccttccttatcatcaggaattgaaaatggtatttcagatccagatcagtaggattgaaacatccaatgtcatctgggtggggaattacagcaccactgtgacagtggaaccaggttctgcanttggacgctgggacatctagagctccctttggaatgtgccacacactttgtaagaataaagagtttggtggacgatgccaagttccctgagccaaatttctggagcaactggagttcctgggaggaagtcagtgtacaagattctactggacaggatatattgttcgttttccctaaagataagctggtggaagaaggcaccaatgttaccatttgttacgtttctcggaacattcaaaataatgtatcctgttatttggaagggaaacagattcatggagaacaacttgatccacatgtaactgcattcaacttgaatagtgtgcctttcattaggaataaagggacaaatatctattgtgaggcaagtcaaggaaatgtcagtgaaggcatgaaaggcatcgttctttttgtctcaaaagtacttgaggagcccaaggacttttcttgtgaaaccgaggacttcaagactttgcactgtacttgggatcctgggacggacactgccttggggtggtctaaacaaccttcccaaagctacactttatttgaatcattttctggggaaaagaaactttgtacacacaaaaactggtgtaattggcaaataactcaagactcacaagaaacctataacttcacactcatagctgaaaattacttaaggaagagaagtgtcaatatcctttttaacctgactcatcgaggtgagactagagttgtcacagcccaccgtggccctaacgtgtctttgtttcacagactgtgtgatcaagtaaatgtgctgtagatctttgcctcattcacagcggaggtgagagttagaatttatacctattgttcatgccacgtttctcctcatggatgcacgcatcccctattatttgtttcttttaataatgtcacgagcaccaatgagcttactacccaacttcaaaactaggactctaacaataacttctgtcatatctcatcctgtaacgcccccaccttcgctccntccgccaagataattatcactttaaattgtgtgcgtgtgtattctcatttcttatgtgatggtaaaaatgcctttattttgtttggttttaatgcatagaaaggacatcaagctgtatgttata

SEQ ID NO: 318667 - DNA, 418 bp, Homo Sapiens
ttggcatattattattagtttattatttataccgtgctctgttccaaaaaggatgtaaggaggcagcatggcttgagtaccaccttacttgatgagttaaggagttcacatccatctagagacacttgtctgagagactgtattagaagactacgggatggtttttgggagggaagagtgctaagaaaagcagtggcatcttgtccaacctcatcttctctctcctcatttgcaaatcatatctcaggagtaagccaaaaactggtgggagggttgcagcaggaaaaaattagcagtaaagcaggagagggttaattcttagaaaggtacacaatcccaccatccttcccacctctggtgcctactgcaagtaaagagtctggtcttctcccgacaggctctggctgggcctgtgatc

SEQ ID NO: 318668 - DNA, 1444 bp, Homo Sapiens
  misc_feature (31)..(31): n is a, c, g, or t
  misc_feature (78)..(78): n is a, c, g, or t
  misc_feature (117)..(117): n is a, c, g, or t
  misc_feature (160)..(160): n is a, c, g, or t
  misc_feature (195)..(195): n is a, c, g, or t
  misc_feature (213)..(213): n is a, c, g, or t
  misc_feature (215)..(215): n is a, c, g, or t
  misc_feature (233)..(233): n is a, c, g, or t
  misc_feature (237)..(237): n is a, c, g, or t
  misc_feature (253)..(253): n is a, c, g, or t
  misc_feature (257)..(257): n is a, c, g, or t
  misc_feature (274)..(274): n is a, c, g, or t
  misc_feature (287)..(287): n is a, c, g, or t
  misc_feature (293)..(293): n is a, c, g, or t
  misc_feature (314)..(314): n is a, c, g, or t
  misc_feature (330)..(330): n is a, c, g, or t
  misc_feature (364)..(364): n is a, c, g, or t
  misc_feature (377)..(378): n is a, c, g, or t
  misc_feature (402)..(402): n is a, c, g, or t
  misc_feature (438)..(438): n is a, c, g, or t
  misc_feature (737)..(737): n is a, c, g, or t
atggcgactcccgctcgtgccccggagtcancgccgtccgcggatccggcgctagtagcggggcctgccgaggaagcngagtgcccgccgccgcgccagcctcagcccgcgcagaangtgctcgctgccccgcggcttcgagccccaagctcccgagganttggcgcagggaagtttggtggagctgcgggaaangttgaagcgccaggagananttttgcgcaaagaaaaantcanttgcaaattgcccganaaangtaaaaaaatctttgantcttttgccaaantgaaanctgctattgcagaatgtgaanaagttagaagaaaaantgaactgtttaaacctgttagtttagactgtaanctaaggcaaaaannaattgcagaagttgatgtgggtanagataaggcccagaattctgacccgatacttgatanttcatcactagttcctggatgttcctctgtagataaaatcaagtcatctcaaacctcacaaaaccagggacttggacgtcctaatcttgaaggtgatgaagagacttcagaggttgagtacacagtgaataagggcccagcttccagcaatagagacagggtaccaccttcatctgaagctagtgagcatcacccgcggcatcgtgtttcaagtcaagcggaagatacttccagcagctttgacaacctgtttattgacaggttacagaggatcaccattgcggaccaaggtgaacaanagtcagaagaaaacgcaagtactaagaacttgacaggcctttccagtgggactgagaagaaacctcattacatggaagtgctagaaatgcgagccaaaaacccagtgccccagctgcgtaaatttaaaaccaatgtgttaccttttcgacaaaatgattcatctagtcattgccagaagagtgggtctcctatttcctcagaagagcggcggcgcagggataagcagcatcttgatgacatcacagcagctcggcttctaccacttcaccatatgcccacgcagctgctctccatagaagaatccttggcacttcagaaacagcagaaacagaattatgaggagatgcaagcaaagctcgcagcgcaaaaattagctgaaagactgaatattaaaatgcggagttataatccagaaggggagtcttcagggagataccgagaagtaagggatgaagatgacgattggtcctctgatgaattctgaagataatctcctaaatcactgacgttgagatgtcatcatcttacatcagactttctaactagtatcaagatcagtgtcagatattgttgagggaagtaattttattaagttacacacaggtagttataaaaaaagcccagtttgtctttcagaaggtgactttcatgtgcttgaaaagtttaatattttgatattgtgttaacccatggtattaaattttgc

SEQ ID NO: 318669 - DNA, 1598 bp, Homo Sapiens
  misc_feature (2)..(3): n is a, c, g, or t
  misc_feature (5)..(5): n is a, c, g, or t
  misc_feature (17)..(17): n is a, c, g, or t
  misc_feature (24)..(24): n is a, c, g, or t
  misc_feature (31)..(31): n is a, c, g, or t
  misc_feature (39)..(39): n is a, c, g, or t
  misc_feature (279)..(279): n is a, c, g, or t
  misc_feature (281)..(281): n is a, c, g, or t
  misc_feature (297)..(297): n is a, c, g, or t
  misc_feature (304)..(304): n is a, c, g, or t
  misc_feature (310)..(310): n is a, c, g, or t
  misc_feature (332)..(332): n is a, c, g, or t
  misc_feature (339)..(339): n is a, c, g, or t
  misc_feature (343)..(343): n is a, c, g, or t
  misc_feature (345)..(345): n is a, c, g, or t
  misc_feature (356)..(356): n is a, c, g, or t
  misc_feature (368)..(368): n is a, c, g, or t
  misc_feature (371)..(371): n is a, c, g, or t
  misc_feature (373)..(374): n is a, c, g, or t
  misc_feature (418)..(418): n is a, c, g, or t
  misc_feature (420)..(420): n is a, c, g, or t
  misc_feature (423)..(423): n is a, c, g, or t
  misc_feature (429)..(429): n is a, c, g, or t
  misc_feature (438)..(438): n is a, c, g, or t
  misc_feature (449)..(449): n is a, c, g, or t
  misc_feature (453)..(453): n is a, c, g, or t
  misc_feature (456)..(456): n is a, c, g, or t
  misc_feature (459)..(462): n is a, c, g, or t
  misc_feature (466)..(466): n is a, c, g, or t
  misc_feature (468)..(468): n is a, c, g, or t
  misc_feature (481)..(481): n is a, c, g, or t
  misc_feature (485)..(485): n is a, c, g, or t
  misc_feature (487)..(488): n is a, c, g, or t
  misc_feature (491)..(492): n is a, c, g, or t
  misc_feature (496)..(496): n is a, c, g, or t
  misc_feature (499)..(500): n is a, c, g, or t
  misc_feature (503)..(503): n is a, c, g, or t
  misc_feature (512)..(512): n is a, c, g, or t
  misc_feature (525)..(525): n is a, c, g, or t
  misc_feature (536)..(536): n is a, c, g, or t
  misc_feature (538)..(538): n is a, c, g, or t
  misc_feature (542)..(542): n is a, c, g, or t
  misc_feature (553)..(553): n is a, c, g, or t
  misc_feature (556)..(556): n is a, c, g, or t
  misc_feature (558)..(558): n is a, c, g, or t
  misc_feature (560)..(561): n is a, c, g, or t
  misc_feature (584)..(584): n is a, c, g, or t
  misc_feature (595)..(595): n is a, c, g, or t
  misc_feature (599)..(599): n is a, c, g, or t
  misc_feature (605)..(605): n is a, c, g, or t
  misc_feature (611)..(611): n is a, c, g, or t
  misc_feature (617)..(617): n is a, c, g, or t
  misc_feature (628)..(628): n is a, c, g, or t
  misc_feature (630)..(631): n is a, c, g, or t
  misc_feature (633)..(633): n is a, c, g, or t
  misc_feature (635)..(635): n is a, c, g, or t
  misc_feature (639)..(639): n is a, c, g, or t
  misc_feature (643)..(643): n is a, c, g, or t
  misc_feature (646)..(647): n is a, c, g, or t
  misc_feature (651)..(651): n is a, c, g, or t
  misc_feature (653)..(653): n is a, c, g, or t
  misc_feature (655)..(657): n is a, c, g, or t
  misc_feature (668)..(671): n is a, c, g, or t
  misc_feature (673)..(674): n is a, c, g, or t
  misc_feature (676)..(676): n is a, c, g, or t
  misc_feature (680)..(680): n is a, c, g, or t
  misc_feature (682)..(682): n is a, c, g, or t
  misc_feature (684)..(688): n is a, c, g, or t
  misc_feature (796)..(796): n is a, c, g, or t
  misc_feature (866)..(866): n is a, c, g, or t
  misc_feature (1005)..(1005): n is a, c, g, or t
  misc_feature (1007)..(1007): n is a, c, g, or t
anncnctttaacaagangtctgcngctagtnctgggganagggccgcccgatgagaaccttttgttccagaagtggaatctgttcccggactgtggggtgggtcctgaaatgctctaacacactttcctgaatgagattccacatccaaactttctgttgcttccgtcgtttggcagtcagctccccactggcaagcattaggtcctggaaatctttcattttatcccacatttcagagatcccctctccacttcgggcagaaatacgaattacctttngnttccagacttgtgaangtttgcngagtantttcagtgcactcacatattcngcttgtntccntngggctggcacnatcaagtctccntcngnnttggttacagctaccagatctgccatctcgattatgcccctttngngancctggngctcatgtnctcctgctggnggcngtngtnnnncagncntgtgaaccatgtnaggnanngcnnactncgnntgncccacaccnacggtttcaatangaattatgtcntntccngctccttcacncancngnntagcttcatttgtggtccttgtnacgcctcctanagtncctctngttggngatggnctgatgtatgngnncntntctntggngannggcngngnnncgggttttttnnnntnngngtgntncnnnnntagtacaagaagaagggtccacagctagcacagataatttgtgccctctctcagtaagcatttttccaaaatattctataaatgttgattttccagcaccagggggcnccgacaatctagtagttcttcctatgaatatttctgtcctgggatccagagcaagattcttgccaaagtnaaaatcttatattattttcttaaaatacatagccttggttcaaatgtcatggcaattttttcaacttaacaaaactaatatttgccaggaaaactcatttaaaattcatccaaatattgtgaaaaaagtcgccattcgntngcaaactatttagacttttttttaaaaaacagaatacagagaatttgtaaaaatatttactgagaatacacacaaaaaagactgacctactcgaaatgctagtggttttcctttatttgattgttcttgttctctgtggtaaagtaatactttctgaagaagcacctgggcttactcctttttcctgctgtgagttgattctacaagagttatggcctctgctaaacaggccctttgcccttggattaaaccagtataaagtttatccacaaatctttgctctttgtcagaaagtccttctgtgtggtcctttaaggttgtttgtacacataattttctctttaagccatctgacagcagcatccactttgtacaatggagtccaagagaattaaacggctgagcacatgggattcctgatccgagatgagtacttgagtgaaagatgaagtggtaacatcggaaaggtgctcttaaaaggccttttaggaaatgctggtgaggatgtggtagcagcatgggcatattcgttttatttgtaactggagaaaacactggatgcgttttggctcaatgtgattgtgacctccc

SEQ ID NO: 318670 - DNA, 416 bp, Homo Sapiens
tttttttaaagcaaatgacaaagacccagtttaccagctttacttttttaaacctaagcttaacattacatatttaaacaattgtcaaaacttactaagttgccagcattcatgcacaactagaaaacatccttaatttatattaaaccagaaatgtattaccattaatgtattaatatctttcactactaaatactgaaaaaaattgaaattatttctgtagaagaatcgtcctggcaatgttaacttcacagcaggccgacactacgtggctcacatttcagacacaatgaaaagcaggtccatgctggtgttagtgtacaatcttgtcctacactaaagagtcaagactcaccttggagtacgtttaataaaaaagcaaagtgcatacagagatttacaacaattttaaagac

SEQ ID NO: 318671 - DNA, 859 bp, Homo Sapiens
  misc_feature (104)..(142): n is a, c, g, or t
  misc_feature (266)..(286): n is a, c, g, or t
  misc_feature (324)..(339): n is a, c, g, or t
  misc_feature (363)..(363): n is a, c, g, or t
  misc_feature (383)..(383): n is a, c, g, or t
  misc_feature (455)..(455): n is a, c, g, or t
  misc_feature (472)..(472): n is a, c, g, or t
  misc_feature (510)..(511): n is a, c, g, or t
  misc_feature (525)..(525): n is a, c, g, or t
  misc_feature (536)..(536): n is a, c, g, or t
  misc_feature (542)..(542): n is a, c, g, or t
  misc_feature (545)..(545): n is a, c, g, or t
  misc_feature (551)..(551): n is a, c, g, or t
  misc_feature (559)..(559): n is a, c, g, or t
  misc_feature (581)..(581): n is a, c, g, or t
  misc_feature (585)..(585): n is a, c, g, or t
  misc_feature (588)..(588): n is a, c, g, or t
  misc_feature (595)..(595): n is a, c, g, or t
  misc_feature (599)..(599): n is a, c, g, or t
  misc_feature (603)..(603): n is a, c, g, or t
  misc_feature (606)..(606): n is a, c, g, or t
  misc_feature (609)..(609): n is a, c, g, or t
  misc_feature (617)..(617): n is a, c, g, or t
  misc_feature (619)..(620): n is a, c, g, or t
  misc_feature (625)..(625): n is a, c, g, or t
  misc_feature (627)..(628): n is a, c, g, or t
  misc_feature (666)..(674): n is a, c, g, or t
  misc_feature (681)..(681): n is a, c, g, or t
  misc_feature (697)..(697): n is a, c, g, or t
  misc_feature (701)..(701): n is a, c, g, or t
  misc_feature (703)..(703): n is a, c, g, or t
  misc_feature (705)..(705): n is a, c, g, or t
  misc_feature (711)..(711): n is a, c, g, or t
  misc_feature (713)..(713): n is a, c, g, or t
  misc_feature (717)..(717): n is a, c, g, or t
  misc_feature (738)..(738): n is a, c, g, or t
  misc_feature (740)..(740): n is a, c, g, or t
  misc_feature (759)..(759): n is a, c, g, or t
  misc_feature (787)..(787): n is a, c, g, or t
  misc_feature (819)..(819): n is a, c, g, or t
  misc_feature (822)..(822): n is a, c, g, or t
  misc_feature (827)..(827): n is a, c, g, or t
  misc_feature (845)..(845): n is a, c, g, or t
tttcatagaagggactgtcccagatctgtaactgttcaatgttgtattcacttcacagtgtatcaagcaccagcgtttgccatggattggtttcaaataacccnnnnnnnnnnnnnnnnnnnnnnnnnnnnnnnnnnnnnnncaaaactgatagtacatagtataactggaagaaagaactaaacttaaaaggatatgctgaaaggatggagtttgttaacacaataaataaaagttccctccctctcccagccctccccaccggnnnnnnnnnnnnnnnnnnnnnccagtggtaatgtacatggaaaattgtgcacagcagannnnnnnnnnnnnnnnataaaaagtagattcaggagcccntccaattataaatgattgtnaggaaaatcatataaaacaatggaatacataaaagtgtcaagagttatcgtcagggtgcgaaattccttggnggccagaggcccatggnaagcagaaattatcctggcagcatcactaagaggtcgnngtcctctccagggntgcaagcggcntgggcnggngggggntttgaatntcataccccgagtcatagtctncccnatnccctgtnccantgcnggnagnttcacccntnnctgcngnnatgtcgcccttggcgcgtggaggaacgggaggagcccnnnnnnnnnctctttnaccccgagctgctctngttntncngtggtnancctncactggaggtcacttttgatnangattttgatgaggagccanttttttccttaaagtttgttaaaatganggtgacgttgcccacagttactgccaactgcngtncagtnctcctgttcacgtttttnagcgggggcctaga

SEQ ID NO: 318672 - DNA, 734 bp, Homo Sapiens
  misc_feature (18)..(18): n is a, c, g, or t
tataaaaagtagattcanggagcacatccaattataaatgattgttaggaaaatcatataaaacaatggaatacataaaagtgtcaagagtaatcgtcagggtgcgaaattccttggtggccagatgcccatggcaagcagaaattatcctggcagcatcactaagaggtcgatgtccacagaagattctccagggatgcaagcagcatgggcaggtggaggttttgaatttcataccctgattcatagttttcacaattccatgtgcaatttcagaaagattcatcattgactgctgacatgtcgccctttggcttggaggaacgggaggagcccttgtctgtgctctctgaccccgagctgctctggttctgctgttctgaccctgcactggaggtcactgtggatgaggatgtcgatgaggagcgagtcttttccttaaagtctgtgataatgacggtgacgttgcccacagttactgccaactgctgtgcagtgctcctgtccacgtttttcagccggggccttgaggtgtgatttgtttcgctggtctttgttgtagcatttgcagactgtatgctgtttgcttcactaggaggatctttcagaatgtcagactttggtttggttttcttgttggtatttttcttggtaacactaggactaatttccttgtctttctcaggtttctctttgtcctgcttttcaactttctccttcttctcctttttagg

SEQ ID NO: 318673 - DNA, 2357 bp, Homo Sapiens
  misc_feature (109)..(109): n is a, c, g, or t
  misc_feature (159)..(159): n is a, c, g, or t
  misc_feature (172)..(173): n is a, c, g, or t
  misc_feature (175)..(175): n is a, c, g, or t
  misc_feature (177)..(177): n is a, c, g, or t
  misc_feature (182)..(184): n is a, c, g, or t
tttattggtgagggaatcccagcccccttagttcatggccccggatttgccttggagaccccgttatggacccgggtccactttccttatgggggccggcgcgccaaancgcatggtcttagaaagcttttcgagggcccgaaggcgcccgacatgttnttaagtttttatnnantngtgannntgccagggatccatttgtttatgtacaccagcattctaggagaaaggtgaatgggcccctctcctcagtgcccaaggggacaggactgaggcagccccacctggcccatggctctgcagagctctgcaccctccccaaggctgttacccacgatggacagaaggacgttctctcaacaccagggttgattttggggaggctggagggaaccacgtctaggacctaccaacactagcccctccctgggggctcccaagttctgaaaagaaaaccaaacgcagtgagcccacgtcagggtctccacgttcctgcacgtaacacccacgacaccactgcagcctcagcatgggctgcacggggtgggcaggactgaggaggggagggcaggactgaagaggggcggggacccgcactccctgccagccgcccaccacctgccttttctactttggcaaaaacaaaaacaaaacctggaagcctcaagacaatgaagtaaactttaggaaatggaaaagacagcaggctgtgcccaaagcctctctcagcctcccagcaagtccttcccaagagctgctggtgactctccagggccacaatggcaggttttcctcacagcagccccaaccccagcccagctgaagacggctctcctgagctcccttcatcagctgccttggcttccaagctgggaaggcattggggtgtggtcggggaaggcacccagttgtttacagatggtagagggtgacacaggcagcatcgtcatgaagcagggccccaaggaaaggtcctccgggagaaccaggctgcccaaggggaggagctgcagacgcacccgctgggaccgcagcctgctggtggacaggctccctgtcgaggagacaaacagcacagcacatgtggccaaaggcacctccagaggcagcagctgagtgaggatgaagactgcagggtgggcacacttgaatgtggatctgagtgacggttctgtccccatggactgggcagctttgggaactgagggaagtgagggagcgcaggaggccagggggctcagccagctggtaggggcggccgagacaccacccctggagtgatggaggaggaggatgtcattgtaaataccaccaggacagcgttgggtggcacctgacatcccccagcacacatagacctgtggtgcctccttgggctatgtctgtccacatggtgggacctcctgcccgctgaggtggtgcggagaggcctcagggagttgtttggcaacagggcagccctgaccccctctggctgatgggaagcagcatgtctgctgccccagagtctgaaggcccccacagtgctgggtgaaagtccacagggcccctcttggcctccccgctgtgggcccagagtcacagaaatcacccccagaaatttgcagaaactcaacaccaggacacaggacccaccgcccaacctaaaagaacaggaacaaccctaaggccacgcaggcctggcaggtgagagacgcagagtggctgccggccgcagccccgcggggtcagcacaaaggcaagacgcggtggggagaggacaggagccttccagcacatcacggggcagaggcggtgcacaccggcggggcacggctagttcctcaaggcggccaacctccgtgacagctggtcctcctggctgcgcacagagctctcgcccacggcagaggcgccctcgggcagctggctgagctggtccagcacctccaggccattctcctcggcgatctgcatgatgaggctgtccacctgctcctgcggcgtggtcagggtggtggccgagctcatggagtcctccatcaccgatgtatggacgtccaggttctgcacctgctgctcgaacctgtccatcactgaggagaccttctgcaggtccatggtgctcagggccttgtccagggctttggtcacctgggccatattcttggtcacccccttcatagtcacagctgtctgcaccttggaggccactgcgtctacgcgggacgccatccgaagccagttcacaccttcgttcttcttgcggatggcgttctcggcatacacacgggcacactctacatttttctgcagaagggccttcttcactttggcctgctccgccttggcctcgtgccgaattcgccacccaggcc

SEQ ID NO: 318674 - DNA, 1136 bp, Homo Sapiens
  misc_feature (5)..(5): n is a, c, g, or t
  misc_feature (10)..(10): n is a, c, g, or t
  misc_feature (14)..(14): n is a, c, g, or t
  misc_feature (18)..(18): n is a, c, g, or t
  misc_feature (35)..(35): n is a, c, g, or t
  misc_feature (37)..(37): n is a, c, g, or t
  misc_feature (50)..(50): n is a, c, g, or t
  misc_feature (53)..(54): n is a, c, g, or t
  misc_feature (68)..(69): n is a, c, g, or t
  misc_feature (73)..(73): n is a, c, g, or t
  misc_feature (91)..(92): n is a, c, g, or t
  misc_feature (102)..(102): n is a, c, g, or t
  misc_feature (118)..(118): n is a, c, g, or t
aacancaaanttcncctntcataaattaatttctnanaaataagcaaaanatnngcatgactaatgannctanagaaaacaccagtacaanncacacacatntttgtgcctgccaccntccacctagtcggggagagctgttctcttccttgccgccaggggcagttagctcatggctgagaagtctctcaagggttcagttaaacaagcttccaaatcaaactcatcctccacttgactgtccatgtttctcaccttggtgggtgtgccagagtacacatcaaagtcatcctgagagctggtctgggggctcggagctgctttctgcagattcaaggtctacagggtgtatttcttgcaaatcacatccttcttccgctggaggatcccaaaaatgcagagccaccttccagagtttgatttgctggtcccatgaacgtcgactatacttcttaaatttattaggggtcttgggatgaatgccaggttgtcgaaggtgtcttgggacttctttaatataacgatcataggcaattgtgttcttcccatagttgatctgcttctgtctcctcattaggacactttcatctgtctcaaagtcagccggcacagtagacatagactcctttgaatcagaacttcctgatgatgattttctctctcttccaaagtcattgatgaggagtttccttttatatcttgccatttctttgttaactctggtcctcatttcatcttcttcaactgcacttgcccagtcagagcatctggaacggggtttagggccttcaggagtggtaaagctctcgggtctgcgctcggcgtcgcggtgctctgcctcctcggcgtcttcgggcctccagcgcctgccgtcggctctgcgcttccgtcccaggctccatcgcgcgggggacggcgggctggcgtcaccgtcgcagcggctctgatgcctcggcggcttcgcgggcggcaggccatggcagcacgggccgggcgcgcagcgcagggccgaggctgaggcggcggcggcgcgggcagagagcgcagagtagagcagggcagggcctgaggcagaaacccgcgtccccgcgccggcatcccgggaattccggaccggtaccagcctgcttttttgt

SEQ ID NO: 318675 - DNA, 1214 bp, Homo Sapiens
tttttctgaccctcccaaccatgtcagctctcacggcagctggcccacctggcaacagccccagtcagtgaaagagggttctttcctttttatttttgcaatatcccatacaaaagcaatagaaacgtaacagtcttaacaagaagtttacaattgaatatttgaacagaaaatctgtacacattatcatttacagcaattttacatggtaaattaactgattgttttaaaatgttctttctaaatcgctccactctgctgccctaactcttggagtattctaaagagtctaactagtgctatttacaagtaccaaattaagaccatataacttacataaaactcattagtttaatagctcaatttaacaatgtctgacttcagaatgctgttatgacatattgataaaaggccaaaaattaagtttccataaagatattaaaggtgtctgagaatactttgatgcctataaaagtagctgactctcaattggtcccatggattacatggttaaatccaaaacagtccacctgacaagcaataactgaagatgcctgtggaaaaccagttatgtagacgtgtcagcttaccctggaggacaacagggattacgcaattaagctcgctggaagagagcttcaagtactttcttggacttagctccatttacaatttaaaacatgcaaaatatactcactatacataaaattaatgtttcttaagaaagtaaggcaaaaataattcagcatgagctaatggactgctaacagagaaaccaccaggtacaagtgcacacacatgcttggtgcctggccagccttccacctagtcggggaggagctgtttctcttcctggccgccagggggcagttagctcatggctgagaagtctctcaagggttcagttaaacaagcttccaaatcaaactcatcctccacttgactgtccatgtgtctcaccttggtgggtgtgccagagtacacatcaaagtcatcctgagagctggtctggggctcggagctgctttctgcagattcaaggtctacagggtgtatttcttgcaaatcacatccttcttccgctggaggatcccaaaaatgcagagccaccttccagagtttgatttgctggtcccatgaacgtcgactatcttcttaaatttattaggggtcttgggcctcgtgccgaattcgccacccaggcctcgctcttt

SEQ ID NO: 318676 - DNA, 633 bp, Homo Sapiens
gttcacacccagtgggtggcctgtgttcagaacaggacccccctgtggtcccagggaaccgtcgagccgtcctcgaggtggcagcggagcacgagtccaaggagttggccgctctctagggaaaatccgaggttctttcatactttcttggggacgctggtgataatgggcttggggcgggttttgaaaaggatcttgtctttgatgagtgctgtcaccaggtaccgggtgccagtctcgcggccaagctcatcacagtcctgatccccaggagtgtgtttgacaaggactgcaaaaggtttctccaggtggatgattttcccatacaggatatgatgccccacgatcagcacagggattccctcagtggtgtaatgtaggtctcccaggaggtttccagctaatccagtgctgtagcgagcctcgatctccccctgtagctccatcagcacccattctgccaggcctccagccctcgcactggaaataacaatttgcaccatgagctttctgtctttaaaaagcaagtgaaaacaagctgcaatggcggccgccgagcgcggcgccgcgcggccaacgggcgacaaccgaacctcccgccgccgtcgccgccgccgcgagcactgcctgcgc

SEQ ID NO: 318677 - DNA, 1094 bp, Homo Sapiens
  misc_feature (262)..(285): n is a, c, g, or t
ttaagataatattttgagtgtgtcagggccattcaaattgttggtgttgcatcacagctaccttaactgtttttaacatggatcctctgtgcctgtgaatttacttgcatgcttgtacttgacttcttaggatgggtagctgaaaagaccaccattttaagcatttgagaattcttaaatatgaaatttattcagaattgaagatggtgacctattcagagcctttttgtccttgtcaacagactgggacagtgtctgattnnnnnnnnnnnnnnnnnnnnnnnngccttgccacacacagctaatattctaatggtaaatttctctgtatcaggtggggaaatgtgctgaaggacagtatgtatcccttgcttcatttttaggtcgtaggtttggaatgtcttgtcccagttcttcaaacactcttaaatttttcttaagtaatgtaaaaatggaactgccaattttatttctcttgcaaaaatagtaaatacttgatgttacattattcccaggtttaatgaaagaacccaacttagtttttcagtgaatttgacacctattttttagtgatgaaatttttctttgagaactggcaaggatgcagtcagctgtttgcagtttttagcctgattttggggtctatagagattgctttattggatacttcaagtcattcttgcttgcacttcccctattgacacatgaaagctgtgttggtgttttattgtacatacttcagatgcacataggaatagaagtgtgttataaatctagctttctttatgatgtttctgataatacgagaattgaaaactttaccttctcttgtacatagtcagactatttgtattaaatttacatttcattctaagttcaaaagtttgaaaattattagttttgcaagatcacacactaatgtaaccattttatgaaggttgaagtggatttatgcaggcagttctatatatagaaatacaattctttttaaatttttaggaccaatacaaaataacaaaaatgtaatggaatcagactgaattaaagtaaggctgtatattgaaagtcatattataaaaggtttgctttcttta

SEQ ID NO: 318678 - DNA, 1100 bp, Homo Sapiens
taagagaagatggcctttattgcagcacgaacttcgggggactgcatgtccacagctctccaggagctgccaaaggcaacgggcccgccctgcccctgcaacaggccctccaggggctagagcatggctcccctcaggaagggtaacgcgtgcttgtaaacaagggcccagacaacacagagaggagaggcagcatcatcaggtgcagctttgctacaagaaagatagttcttaatttcaaagaggagacaccgctacacctagccctgccctcccatgcactggaaggctctggaagtagctctcgcctgcctgggcagttaggtccacccactgcccgtgagctgggcccaggcacactgcagccacacaaaaacgctggcagctgactcctaatttcagaaacacaattagaaaagaactggaattttacatttttctcccatacattaaaaataagaaaaagccaacattttgactgtagaccctggtaggtggcatctgactttaacctgaagttctcattggaatccttttctgtctggcgctccaccgcccacaatcagccccagggccggtgtggggagggacatgggggcctttgcagaagcagctcagagaactgaggttggaatcctgccccaagcacaggttttggggacagcgagtgcctagacaaggcaggtaacgtggcagccaccgggctggtccagaaacaaggtgctgaagacgtcgttgaagaaggtggggtggtacctgcaggctcgctcacagtcggggttgaagttcacctccaggatctgcggctgcatcacccgccttccatctgggccgttgtcccacttcagcatgaggtcgacggcatacatggcccgggatgaggggtagtcgcagaggcccaggggtggtggcttggcacaggccacctggaacagctccgtgaaggcccggaagatctcagcctggacgtccgtccagggaaattctgggtattgcttctcaaactcggggatgacctcttcacagtgcacctgcttcagcaccacatccgggtcatagttcatgaccgtgaagtgcttctcgtagtcatccaggtcgtt

SEQ ID NO: 318679 - DNA, 891 bp, Homo Sapiens
aaggagaaagatgcccttttttgcagccggaaattaggggggcgggcattccccagcttttccaggagggccaaaaggcaacgggccggccttgcccttgcaacaggccctccaggggttagagcatggctcccctcaggaaggggtaacgcgtgcttgtaaacaagggcccagacaacacagagaggagaggcagcatcatcaggtgcagctttgctacaagaaagatagttcttaatttcaaagaggagacaccgctacacctagccctgccctcccatgcactggaaggctctggaagtagctctcgcctgcctgggcagttaggtccacccactgcccgtgagctgggcccaggcacactgcagccacacaaaaacgctggcagctgactcctaatttcagaaacacaattagaaaagaactggaattttacatttttctcccatacattaaaaaataagaaaaagccaacattttgactgtagaccctggtaggtggcatctgactttaacctgaagttctcattggaatccttttctgtctggcgctccaccgcccacaatcagccccagccccaggcgccccttgccgaaggatcctggcccatctcacacaagggcgggaccccgtggagtgcccggcgagcagggcaaccactgggaagacagatactgatttccctgttggggtctgtgaccctcagcaaacgaaaaggaaacggtaacaagacggtggcctcctgccaggacctcagcaggaggtttgctggtgaaggttctgggtgagctggaatgggtgataaggcgggcttgctgggtggtggcctcaggctgttcctgggcccctgtcgcatagagccccctcgtgccgaattcgccacccaggcc

SEQ ID NO: 318680 - DNA, 1630 bp, Homo Sapiens
  misc_feature (38)..(38): n is a, c, g, or t
gatattattcacaggtgggccagggtcagctgagcgtnaagtgctgggcacagagttcacccggccgtcccagcaggccctggcgcctgggataaactccagtggcaccggctcgggccccttcttcttcaggtcccgctcaaagatctcgtaggccgtgagctccagcagtggcgcgatgctgacctcaggcatggacagggcctggttgatgacgctggcggctttggacacctcagggtggtagtggcgctggagggcctgaagctcccacagggagctctccaaggcccggctctgggctgggtcctcctctccagggtcgtaggggtcggcgtccaactcagggccgtgtggacggtgcacgaggacccggcaggcagggtgccggcgcagcaggttacagatgaaaggcaggaccatgagcagggcctcagggggagccgtcagggccaggcgggccagccgcttggcgaaggcggccaccaggtaggcggggaggtgggaggaggacaggaagaggtcagccaggtggaagaagcgggcgcggtacttgacgtgaaagacagaggggtccaagaggccgtagagcttccggtagaagtcagggtactccaggttgtgtttgtgaatcaagatgaacagcccgttcaaggccaagaggctgagggcccccccgaggtcgcaggcgcgggtgaggaagtcgatcatgagcgtgggctgcgccagctgcggcaggatggcgtcatgcacaatcagcagcaccttcttgtagaggctgaggggcagcttgtgcttgaggaagctgagccacatggcctggaaaaccctcctgtgctccttcaggtgagcaaccttccaggtgtcccacagctccgcccgcttcacatagaagctggagacggtgggctcccggcggggcaggctcacggcagacagcagcgtgaaggcattgttccaaaaggcggggggcacctcggggtgctggccagtgacccgggccacggcatccacggctgcctgcatggtgtggtagcgggtgtcgtcgtagtccaggtactcccggaactgggacaggagcaggctctggtcctcctcaggagacagcaggcctcccaccaccaacttgaagagctctcgggggaacaggtagttgccttcccacttggacttctccagggggtgcgctccttccagctgcacgaacttcaggagtgcgctgagggccagctccttgacctgaaaggaggggtggcccaggagctctcccaagcgattgcagcagctgtgatagcggtgtctcatccacaccttgtacttccgtgtggctccctgggaccctgtcatgaccatctcctcagagggcagctggcccacaaacagctctccccgctccagcaaggccccgaaaagacggctgcacgtgcggactgcttcctggatctcctcctggtcctcagactgcagcacggccaggatgtcgaacacggcgttggcctcactgcggctcgccagcaccgcctccagccggcggcccagagcccggcgaactcccgcggcgcccggctcccgctccatgccgcccccaacacggaacaacgcggattctcagccgccggcgctcccgtga

SEQ ID NO: 318681 - DNA, 1044 bp, Homo Sapiens
  misc_feature (760)..(803): n is a, c, g, or t
taaaacgttaattaaacgcgcgcccccgtcaacactcccccccgccggggctgcgtggcgaattcggcacgaggacgccgtgttcgacatcctggccgtgctgcagtctgaggaccaggaggagatccaggaagcagtccgcacgtgcagccgtcttttcggggccttgctggagcggggagagctgtttgtgggccagctgccctctgaggagatggtcatgacagggtcccagggagccacacggaagtacaaggtgtggatgagacaccgctatcacagctgctgcaatcgcttgggagagctcctgggccacccctcctttcaggtcaaggagctggccctcagcgcactcctgaagttcgtgcagctggaaggagcgcaccccctggagaagtccaagtgggaaggcaactacctgttcccccgagagctcttcaagttggtggtgggaggcctgctgtctcctgaggaggacccagagcctgctcctgtcccagttccgggagtagctggactacgacgacacccgctaccacaccatgcagggcagccgtggatgccgtggcccgggtcactggccagcaccccgaggtgccccccgccttttggaacaatgccttcacgctgctgtctgccgtgagcctgccccgccgggagcccaccgtctccagcttctatgtgaagcgggcggagctgtgggacacctggaaggctgcctcccctgaaggacacaggagggcttcccaccccttgtggnnnnnnnnnnnnnnnnnnnnnnnnnnnnnnnnnnnnnnnnnnnngagcggcgtcccggcttcccctatgcccgtccacaccaccagcgctgacagcgttccctgttctcccgtttcccctactcttcctccgctttatctacacccccgacgcgaatcccacctaccgtccataccctctgcaatccgccctccgctcagcccgcgcgcccacacacactacctcggtagcgcggggcgtcatggtcccacccttgtgctccagcccgccttgctcgctattacg

SEQ ID NO: 318682 - DNA, 1455 bp, Homo Sapiens
  misc_feature (1175)..(1175): n is a, c, g, or t
  misc_feature (1216)..(1216): n is a, c, g, or t
  misc_feature (1218)..(1218): n is a, c, g, or t
  misc_feature (1423)..(1423): n is a, c, g, or t
catggacaaggagtacgtgggttttgctgctctccccaaccagctgcaccgcaagtctgtcaagaaggggtttgacttcacgctaatggtggcaggggagtcaggcctagggaaatccaccctcatcaacagcctcttcctcaccaacctctatgaggatcgccaggtgccagaggccagtgctcgcttgacacagaccctggccattgagcgccggggcgtagagattgaggaagggggtgtgaaagtgaagctgacccttgtggacacacctggctttggggactcagtggactgctctgactgctggcttccggtggtgaaattcatcgaggagcaatttgagcagtaccttagggatgagagtggcctgaaccggaagaacatccaggactcccgagtccactgctgcctctacttcatctcacccttcggccgggggctccggcccctagatgtggccttcctccgggcagtacacgagaaagtcaacatcatcccagttattggcaaagcggatgctctgatgccccaggaaacccaggccctcaagcagaagatccgggatcagttgaaggaagaggagatccacatctaccagttccccgaatgtgactctgatgaagatgaagacttcaagaggcaggatgcagagatgaaggaaagcatcccttttgcagtcgtgggatcatgcgaggtggtgagggatggcgggaaccggccggtgaggggacgccgctactcctggggggaccgtggaggtggagaacccacatcactgcgatttcctgaacctgcgatggatgctggtgcagacacacctgcaggacctgaaagaggaaacccaggccctaaagcagaagatccgggatcagttgaaggaagaggagatcaacatctaccagttccccgaatgtaactctgatgaagatgaagacttcaagaggcaggatgcagagatgaaggaaagcatcccttttgcagtcgtgggatcatgcgatcgagccagccgcagtaagttttcccgccagagcgcaacagagatcccgctgcccatgctgcctctggcggacaccgagaagctgatccgcgagaaagacgaagagtgcgccgcatgcaagagatgctggagaagatgcaggcccaaatgcagcagagccaggcccagggcgagnagtcagacgccctctgaggccacgccccgcccggccttacncnttgctccgccttcagtcggcctcttgtccaatccccgcgccccaaactgcccagcgccccccgggacctccgcgggtgccgccctcgcgcgggctagggggaggttctcccagcctgagtccgtagccccgccccggcgctggtcccgcccacccagacaccgcccacttcccggcccggggcctggacaatctccgaccgcatnactgtcttccagagtcccccttcttctcccaa

SEQ ID NO: 318683 - DNA, 1031 bp, Homo Sapiens
  misc_feature (15)..(15): n is a, c, g, or t
  misc_feature (24)..(24): n is a, c, g, or t
  misc_feature (35)..(35): n is a, c, g, or t
  misc_feature (41)..(41): n is a, c, g, or t
  misc_feature (49)..(49): n is a, c, g, or t
  misc_feature (61)..(61): n is a, c, g, or t
  misc_feature (66)..(66): n is a, c, g, or t
  misc_feature (101)..(101): n is a, c, g, or t
  misc_feature (117)..(117): n is a, c, g, or t
  misc_feature (125)..(125): n is a, c, g, or t
  misc_feature (150)..(150): n is a, c, g, or t
caacaatgcttaagnccttgtganaattttcaggncactgnaaaatctnggccacctttgnccttnaacaatgggaaaacatctggtggaggaagctggtngtggtcaacagagctntttgtagnttgatccttccttccaagagctggncccacagtgctatctggttcttcacggctcttcctttctccacttcctcagaaactttgacactagagaaggtcatcaccacaccatcatcctcactgtttctatctccagccctgtcttcctcactctcgccttgggagtcttccgcgtcatccccttcttccatgccactctcttcgtcttcctcctcctcactgctcccaaggtcatccattcccttggtaaatttctcaaagtcactgatactctggacactgaagcccggtgtttttgcagagtggcttctgctcttcttgctctccctgtgatcaccacactcctgttcctcagcagcacccaggtcgtcctcatcatattcctccagacccagtccctctgaatcttcatctccagacccttcctcatcagatatttcctcatcagacgatcctggcagagtctgctcccaatggtcttcattccatgcttttctagaggtggttttgccgcaataccttttgtccgtgtccaagagggaggctgatgccagttttctaatgctacccactactaggaaatcaccttccccatcttccccttcatcaaacctgtcaatcaccctggcagcagtggcttcctcggggtccgcttcagggtccgcctcgcttggtcgcgggttcaacaactgttccagttgcagcgccaggggctgcggccccgccatcgtcaccagctcccggtccactccgcttcgcgcacgtaaatgtgcggcccaacccccggccccgaagctccttccctgccggatcctctcgccttgatccgattccccgactccgccagagaccgcgcggaggcccgacgcgtggtcgacgatatcccggtaattccggccggtacca

SEQ ID NO: 318684 - DNA, 1037 bp, Homo Sapiens
  misc_feature (3)..(3): n is a, c, g, or t
  misc_feature (5)..(5): n is a, c, g, or t
  misc_feature (13)..(13): n is a, c, g, or t
  misc_feature (44)..(44): n is a, c, g, or t
  misc_feature (75)..(75): n is a, c, g, or t
  misc_feature (79)..(80): n is a, c, g, or t
  misc_feature (232)..(232): n is a, c, g, or t
  misc_feature (268)..(268): n is a, c, g, or t
  misc_feature (349)..(349): n is a, c, g, or t
  misc_feature (352)..(352): n is a, c, g, or t
  misc_feature (840)..(840): n is a, c, g, or t
  misc_feature (842)..(842): n is a, c, g, or t
  misc_feature (850)..(850): n is a, c, g, or t
  misc_feature (921)..(921): n is a, c, g, or t
  misc_feature (923)..(923): n is a, c, g, or t
  misc_feature (929)..(929): n is a, c, g, or t
  misc_feature (950)..(950): n is a, c, g, or t
  misc_feature (963)..(964): n is a, c, g, or t
  misc_feature (985)..(985): n is a, c, g, or t
  misc_feature (988)..(988): n is a, c, g, or t
  misc_feature (1026)..(1026): n is a, c, g, or t
  misc_feature (1034)..(1034): n is a, c, g, or t
canantttaaaanacaaacagaagccctagacagccttggagtnctgcagcccggagtcactgaaggagtaagtnagtnnggaggagctgcctgagcttcctgcttaggggccggcccccacccacagggtctccctggactggcggggggtgggggtcaggcagtgggcaggggcctgacctaggctcccactctgcctggtgcccacagcctgggcacagtggctcagcnactcagccttgagcgtctgtgccgggtaactcagcntctgcaggaggaagaaggggagcaaaaagagcccggaccacgtggtgaagcaggcctgggccccggccagccagtacactnaancggccaccaggggccccgcggccctggccagagcacctaggctgcgcagtgtacccatgaccgtgcccttctgccctggtgagccatagccagcgaccacggaggacaggcagggcaccacaacggcggcggcaaaggagtagagcagcagccccaggcccagcacgggcagagaacgtccccagccgatgaggaggaaggcgggcaccagcagcaggagggcccgcttcacggcagcaacttccccgccaggttggatccgccgggcataggcaccctggatggtggccatggtgaggccgatgaggaaaaacatcttcccctgctgtaggctactgaactggaagcgctggtgtgttaggaagctcagcgtgtactccaggcccgagaacaggaagaggtagaggaagtagactaggcccaggcggcgcaggctgctgagcctgtctccagagggtgggtcctggccacgagcgacaccgagaagngngaggggcnagggggctgagcagatcagcgcatcacggaaccccagggcgatagagggcgcccgtttctccaggggcacntntttggnaggaagcagaagatgaacagnaggtcggaggctnngagagcagggcaaacaaggtncanttccaggggagggaggtcgagcatagggccagggtganccagttanaag

SEQ ID NO: 318685 - DNA, 1663 bp, Homo Sapiens
  misc_feature (1568)..(1611): n is a, c, g, or t
acacgcttgtgttggtttttcttgttctcccttttgccagaaaataaagccattttattatgatttttttctctgccatgtggctgggaatgggaggtgagtggatgggtgtgaatggctgaccctgctggaggccctgcggggctctacttggcctggactgtctcctccagcctgtccaagcgcttctggagctcctgcaccgtggcctggagcttccgcatctcctcctccagccgagacacggcatccgagctgggagtgccactggcctctggtgctgccctcctgcgcccggtgtccaggccccggttgaccctcagctcccggctctttgggggtacgtagccatccttgagggagatgaggaggggcccagcatcccgaccccccagccactcctcagccgtgagggcagggtcgggccctgcggtgggtgggtacaggtcctcctggaacagtccgactttcgaggcactgtcatggcaatgggctcacacctccgctcgtgcagcttgtagaacctggcgatttcacacttgttcacctccaggccacgtttgggcatgtagcccatgccccgctgggactccttggaactgaacatggagagatagtgcaggaaaggggcctcggaagtgatctcaaagtaccggattgagctgtcacccttgccacagaggtagacgatgtggtgtcagggtcaaagaagggcagcaggacaccgctgctggtgtccagctcctgcagggacagcggctcctccaggtgctttgtgtcccacagcgccacctgccgctcactcatgcggctgaagcccgtggtcaggatcttcccctccgacacgaacactgcacgcacgggccgggtcccctcgtggggacggtccttctcagctacgacagtgcctttgcggggctcgatgatgcgcacgcgcttgtcacggcaggaggtacaaatgaggcctccatctcggctccagtccacactgtagatcgtgtctgggtgcacctctgggcccagtgtcagcatggccgccccagtgcccacgtcccacaccatgatcacgttgtcacaacctgcactgagcagcacgttctgggctgtggtgtgccaggccacaatgcccacacgcttggtgtggccctccagggtgacgacgggctcccgcaggggcagcatcaggcccccatccgggatctcccacaccatgactgtgcagtcctcggagccactggcaatgacgttgtcattgtgcgggcaccaggcgatgtctagcacaggggctgtgtggccacagaccgtgggcgcattcttgtccacacgtccagtcttgcccaggggcagcaccaggaaggcccctcccccgctggcctcacagatcagggccacaaacttagggttgacagcacagaagccactgtcccaggtggtctgtgagacgcgcacatcttcatagcactggtcggccttggccggctgtccaaacacgtggcggaacttgctggagcggaccacctgccggctcattctgctgccgagagaggacagtgatcccccaaaagccnnnnnnnnnnnnnnnnnnnnnnnnnnnnnnnnnnnnnnnnnnnnccggggactcgcccgctgaagatgccctcgtgccgaattcgccacccaggcc

SEQ ID NO: 318686 - DNA, 675 bp, Homo Sapiens
  misc_feature (429)..(429): n is a, c, g, or t
  misc_feature (435)..(435): n is a, c, g, or t
  misc_feature (443)..(444): n is a, c, g, or t
  misc_feature (449)..(449): n is a, c, g, or t
  misc_feature (468)..(468): n is a, c, g, or t
  misc_feature (471)..(471): n is a, c, g, or t
  misc_feature (477)..(502): n is a, c, g, or t
tagaaaacatatgctccatttattttgttttataaacttttgttaaaacacagaagagtaagaaatgttttttgtttctttgccccatcaggcggcagtgatgggggctcaggggtcagcgcaagacctaatgacattcacacccacagaaagatgtgggtcgttctgatgggacccagcccgctttgataattgcttgatgtaaatttcacaattcatcttaatcagggcagatcacagaaaaatttggcaaaagtaattggcttggtaatgacaagaaatagaagagcgttcatttctgaccctctcctctcctctgtccactctcaggagagccatgcggatttttagaagctcctgagacccgcctgaagatcagggttttttggtggggaaattttgcccacgcttttccccccagcaaccctntttttntccatcannttttnttttttaggaccacaactnaantagccnnnnnnnnnnnnnnnnnnnnnnnnnngagagcgagagattttctaatatcatgtcagcttagagtcaaaaaagtaaactttgttttgtgtttctcacattacaataaagttattaaggtggaatgggtttctcctccagaaaggggtagattcccagcagagaactgaccccctgctccaacagattgttcccatgaag

SEQ ID NO: 318687 - DNA, 1530 bp, Homo Sapiens
  misc_feature (27)..(27): n is a, c, g, or t
  misc_feature (63)..(98): n is a, c, g, or t
  misc_feature (135)..(165): n is a, c, g, or t
tagagatcagacgattgaacacgaganaagctgactatatacagacacaggtgtgggtgttgnnnnnnnnnnnnnnnnnnnnnnnnnnnnnnnnnnnnaatatcccctttcttaaaagacaagctagtatactgnnnnnnnnnnnnnnnnnnnnnnnnnnnnnnnccaagacaactttagtaccctcatctttatttgggaaggggagggggaatcctgggtcgcccaccctcaccctgctcctcccagctcagctaagctcgtccctcgtgcccccccttttgtgggcgatgggagaggaccaggtgggcgtggaggtgtctggaactagcagaggtggtgagtggggcaggtggaggtgggagcatacctgggacccggggtcgggggagactcggggtgcccaggacgggaaaggggcagctagcattgcgtgcatgcagtaccagggtgagagggctgtggcccaggcagactgtcggttacacatgttcaaaacgggggaagggccggggctgctgcgcttcgcgaggtcttgctcccttgggacctggtctcccatctgaccctccaggccttagcttgcctcacatgtcagggcaggtatccacctaaccaggctgcaggggaggaggagggaagccgggaatggggtaggaagaaagctagaggtggcctgcaagctgggctggggcccccgccggcggccaccataaatactatgggagtttagccaatcccgagctccgctgtgtcttgtgctaaacattcctttctctccgtgcctctgtctcccctctgtcccccctcccaacctccctgtcccggccccctgctaatccgacttctcgccatcatcctcctggtgggtgtcaccatcgtgcccgttcttgtcttccttggagaggtgggcctgggaacccagcgcggacagcgagaggaggccggtgcctgcgctgaccgccggcagcgaaggcggctgcagccccacgggtagtggggtcaagggcagggccagggcctgcagctgggacagctggtgggcttggagctgctgtcggatgatagagttcagctcgggagcggtgacctgcttggccctctcaatggctcccaagacctgctgctggtgctcttgggagaggtagggcaggacctgggcacaaatcccgttcagccttttgccgatctcagcctgtttgtgcatctcgatgttcaagccgtaggacatctcgtagtacatcacatagtgacgctgcatctctgacttctcactggccggcttgtcacattcgagcttgaggctgtggtactgagcttgcagtagctgaaattcgtctttgatgcggtcgcaggagtccgaggtggtgaatttgagttgctggggtaggtgcgaggagccccggcagccggccgggcctcggtttccccatctgtcaaagaaaagggacccggctgcccgcgtcgaagccgcctcgtgcggaattcgccacccaggcctcgtggtgggggatgtattggggcccgaaa

SEQ ID NO: 318688 - DNA, 861 bp, Homo Sapiens
cccctcccaacctccccgtcccggccccctgctaatccgacttctcgccatcatcctcctggtgggtgtcaccatcgtgcccgttcttgtcttccttggagaggtgggcctgggaacccagcgcggacagcgagaggaggccggtgcctgcgctgaccgccggcagcgaaggcggctgcagccccacgggtagtggggtcaagggcagggccagggcctgcagctgggacagctggtgggcttggagctgctgctgcagggcgggggaggggaacattagctgcctggggcccacctgtcccccgcccacccgcccaggtccccatacatactcggatgatagagttcagctcgggagcggtgacctgcttggccctctcaatggctcccaagacctgctgctggtgctcttgggagaggtagggcaggacctgggcacaaatcccgttcagccttttgacgatctcagcctgtttgtgcatctcgatgttcaagccgtaggacatctcgtagtacatcacatagtgacgctgcatctctgacttctcactggccaacttgtcacattcgagcttgaggctgtggtactgagcttgcagtagctgaaattcgtctttgatgcggtcgcaggagtccgaggtggtgaatttgagttgctggggtaggtgcgaggagccccggcagccggccgggcctcggtttccccatctgtcaaagaaaagggacccggctgcccgcgtcgaagccgccggccctgctgtggcacgacctggacgcgtgccacggacgtgctctgtgaccttggctctggctgggcggtggttcttgctgagcctcagtttccttttctgcagaaaggca

SEQ ID NO: 318689 - DNA, 140 bp, Homo Sapiens
tttgaagcttatcacatctttattggaaaggcacagctaagcccacccttgatacagcattttccacttctctctgtagagatcagacgattgaacacgagataagctgactatatacagacacaggtgtgggtgttagc
